United States Patent Application Publication US 2010/0120628 A1 - sequence listing, part 2

SEQ ID NO: 1388 - DNA, 11386 bp, Homo sapiens
gtggcgcgagcttctgaaactaggcggcagaggcggagccgctgtggcactgctgcgcctctgctgcgcctcgggtgtcttttgcggcggtgggtcgccgccgggagaagcgtgaggggacagatttgtgaccggcgcggtttttgtcagcttactccggccaaaaaagaactgcacctctggagcggacttatttaccaagcattggaggaatatcgtaggtaaaaatgcctattggatccaaagagaggccaacattttttgaaatttttaagacacgctgcaacaaagcagatttaggaccaataagtcttaattggtttgaagaactttcttcagaagctccaccctataattctgaacctgcagaagaatctgaacataaaaacaacaattacgaaccaaacctatttaaaactccacaaaggaaaccatcttataatcagctggcttcaactccaataatattcaaagagcaagggctgactctgccgctgtaccaatctcctgtaaaagaattagataaattcaaattagacttaggaaggaatgttcccaatagtagacataaaagtcttcgcacagtgaaaactaaaatggatcaagcagatgatgtttcctgtccacttctaaattcttgtcttagtgaaagtcctgttgttctacaatgtacacatgtaacaccacaaagagataagtcagtggtatgtgggagtttgtttcatacaccaaagtttgtgaagggtcgtcagacaccaaaacatatttctgaaagtctaggagctgaggtggatcctgatatgtcttggtcaagttctttagctacaccacccacccttagttctactgtgctcatagtcagaaatgaagaagcatctgaaactgtatttcctcatgatactactgctaatgtgaaaagctatttttccaatcatgatgaaagtctgaagaaaaatgatagatttatcgcttctgtgacagacagtgaaaacacaaatcaaagagaagctgcaagtcatggatttggaaaaacatcagggaattcatttaaagtaaatagctgcaaagaccacattggaaagtcaatgccaaatgtcctagaagatgaagtatatgaaacagttgtagatacctctgaagaagatagtttttcattatgtttttctaaatgtagaacaaaaaatctacaaaaagtaagaactagcaagactaggaaaaaaattttccatgaagcaaacgctgatgaatgtgaaaaatctaaaaaccaagtgaaagaaaaatactcatttgtatctgaagtggaaccaaatgatactgatccattagattcaaatgtagcaaatcagaagccctttgagagtggaagtgacaaaatctccaaggaagttgtaccgtctttggcctgtgaatggtctcaactaaccctttcaggtctaaatggagcccagatggagaaaatacccctattgcatatttcttcatgtgaccaaaatatttcagaaaaagacctattagacacagagaacaaaagaaagaaagattttcttacttcagagaattctttgccacgtatttctagcctaccaaaatcagagaagccattaaatgaggaaacagtggtaaataagagagatgaagagcagcatcttgaatctcatacagactgcattcttgcagtaaagcaggcaatatctggaacttctccagtggcttcttcatttcagggtatcaaaaagtctatattcagaataagagaatcacctaaagagactttcaatgcaagtttttcaggtcatatgactgatccaaactttaaaaaagaaactgaagcctctgaaagtggactggaaatacatactgtttgctcacagaaggaggactccttatgtccaaatttaattgataatggaagctggccagccaccaccacacagaattctgtagctttgaagaatgcaggtttaatatccactttgaaaaagaaaacaaataagtttatttatgctatacatgatgaaacatcttataaaggaaaaaaaataccgaaagaccaaaaatcagaactaattaactgttcagcccagtttgaagcaaatgcttttgaagcaccacttacatttgcaaatgctgattcaggtttattgcattcttctgtgaaaagaagctgttcacagaatgattctgaagaaccaactttgtccttaactagctcttttgggacaattctgaggaaatgttctagaaatgaaacatgttctaataatacagtaatctctcaggatcttgattataaagaagcaaaatgtaataaggaaaaactacagttatttattaccccagaagctgattctctgtcatgcctgcaggaaggacagtgtgaaaatgatccaaaaagcaaaaaagtttcagatataaaagaagaggtcttggctgcagcatgtcacccagtacaacattcaaaagtggaatacagtgatactgactttcaatcccagaaaagtcttttatatgatcatgaaaatgccagcactcttattttaactcctacttccaaggatgttctgtcaaacctagtcatgatttctagaggcaaagaatcatacaaaatgtcagacaagctcaaaggtaacaattatgaatctgatgttgaattaaccaaaaatattcccatggaaaagaatcaagatgtatgtgctttaaatgaaaattataaaaacgttgagctgttgccacctgaaaaatacatgagagtagcatcaccttcaagaaaggtacaattcaaccaaaacacaaatctaagagtaatccaaaaaaatcaagaagaaactacttcaatttcaaaaataactgtcaatccagactctgaagaacttttctcagacaatgagaataattttgtcttccaagtagctaatgaaaggaataatcttgctttaggaaatactaaggaacttcatgaaacagacttgacttgtgtaaacgaacccattttcaagaactctaccatggttttatatggagacacaggtgataaacaagcaacccaagtgtcaattaaaaaagatttggtttatgttcttgcagaggagaacaaaaatagtgtaaagcagcatataaaaatgactctaggtcaagatttaaaatcggacatctccttgaatatagataaaataccagaaaaaaataatgattacatgaacaaatgggcaggactcttaggtccaatttcaaatcacagttttggaggtagcttcagaacagcttcaaataaggaaatcaagctctctgaacataacattaagaagagcaaaatgttcttcaaagatattgaagaacaatatcctactagtttagcttgtgttgaaattgtaaataccttggcattagataatcaaaagaaactgagcaagcctcagtcaattaatactgtatctgcacatttacagagtagtgtagttgtttctgattgtaaaaatagtcatataacccctcagatgttattttccaagcaggattttaattcaaaccataatttaacacctagccaaaaggcagaaattacagaactttctactatattagaagaatcaggaagtcagtttgaatttactcagtttagaaaaccaagctacatattgcagaagagtacatttgaagtgcctgaaaaccagatgactatcttaaagaccacttctgaggaatgcagagatgctgatcttcatgtcataatgaatgccccatcgattggtcaggtagacagcagcaagcaatttgaaggtacagttgaaattaaacggaagtttgctggcctgttgaaaaatgactgtaacaaaagtgcttctggttatttaacagatgaaaatgaagtggggtttaggggcttttattctgctcatggcacaaaactgaatgtttctactgaagctctgcaaaaagctgtgaaactgtttagtgatattgagaatattagtgaggaaacttctgcagaggtacatccaataagtttatcttcaagtaaatgtcatgattctgttgtttcaatgtttaagatagaaaatcataatgataaaactgtaagtgaaaaaaataataaatgccaactgatattacaaaataatattgaaatgactactggcacttttgttgaagaaattactgaaaattacaagagaaatactgaaaatgaagataacaaatatactgctgccagtagaaattctcataacttagaatttgatggcagtgattcaagtaaaaatgatactgtttgtattcataaagatgaaacggacttgctatttactgatcagcacaacatatgtcttaaattatctggccagtttatgaaggagggaaacactcagattaaagaagatttgtcagatttaacttttttggaagttgcgaaagctcaagaagcatgtcatggtaatacttcaaataaagaacagttaactgctactaaaacggagcaaaatataaaagattttgagacttctgatacattttttcagactgcaagtgggaaaaatattagtgtcgccaaagagtcatttaataaaattgtaaatttctttgatcagaaaccagaagaattgcataacttttccttaaattctgaattacattctgacataagaaagaacaaaatggacattctaagttatgaggaaacagacatagttaaacacaaaatactgaaagaaagtgtcccagttggtactggaaatcaactagtgaccttccagggacaacccgaacgtgatgaaaagatcaaagaacctactctattgggttttcatacagctagcgggaaaaaagttaaaattgcaaaggaatctttggacaaagtgaaaaacctttttgatgaaaaagagcaaggtactagtgaaatcaccagttttagccatcaatgggcaaagaccctaaagtacagagaggcctgtaaagaccttgaattagcatgtgagaccattgagatcacagctgccccaaagtgtaaagaaatgcagaattctctcaataatgataaaaaccttgtttctattgagactgtggtgccacctaagctcttaagtgataatttatgtagacaaactgaaaatctcaaaacatcaaaaagtatctttttgaaagttaaagtacatgaaaatgtagaaaaagaaacagcaaaaagtcctgcaacttgttacacaaatcagtccccttattcagtcattgaaaattcagccttagctttttacacaagttgtagtagaaaaacttctgtgagtcagacttcattacttgaagcaaaaaaatggcttagagaaggaatatttgatggtcaaccagaaagaataaatactgcagattatgtaggaaattatttgtatgaaaataattcaaacagtactatagctgaaaatgacaaaaatcatctctccgaaaaacaagatacttatttaagtaacagtagcatgtctaacagctattcctaccattctgatgaggtatataatgattcaggatatctctcaaaaaataaacttgattctggtattgagccagtattgaagaatgttgaagatcaaaaaaacactagtttttccaaagtaatatccaatgtaaaagatgcaaatgcatacccacaaactgtaaatgaagatatttgcgttgaggaacttgtgactagctcttcaccctgcaaaaataaaaatgcagccattaaattgtccatatctaatagtaataattttgaggtagggccacctgcatttaggatagccagtggtaaaatcgtttgtgtttcacatgaaacaattaaaaaagtgaaagacatatttacagacagtttcagtaaagtaattaaggaaaacaacgagaataaatcaaaaatttgccaaacgaaaattatggcaggttgttacgaggcattggatgattcagaggatattcttcataactctctagataatgatgaatgtagcacgcattcacataaggtttttgctgacattcagagtgaagaaattttacaacataaccaaaatatgtctggattggagaaagtttctaaaatatcaccttgtgatgttagtttggaaacttcagatatatgtaaatgtagtatagggaagcttcataagtcagtctcatctgcaaatacttgtgggatttttagcacagcaagtggaaaatctgtccaggtatcagatgcttcattacaaaacgcaagacaagtgttttctgaaatagaagatagtaccaagcaagtcttttccaaagtattgtttaaaagtaacgaacattcagaccagctcacaagagaagaaaatactgctatacgtactccagaacatttaatatcccaaaaaggcttttcatataatgtggtaaattcatctgctttctctggatttagtacagcaagtggaaagcaagtttccattttagaaagttccttacacaaagttaagggagtgttagaggaatttgatttaatcagaactgagcatagtcttcactattcacctacgtctagacaaaatgtatcaaaaatacttcctcgtgttgataagagaaacccagagcactgtgtaaactcagaaatggaaaaaacctgcagtaaagaatttaaattatcaaataacttaaatgttgaaggtggttcttcagaaaataatcactctattaaagtttctccatatctctctcaatttcaacaagacaaacaacagttggtattaggaaccaaagtgtcacttgttgagaacattcatgttttgggaaaagaacaggcttcacctaaaaacgtaaaaatggaaattggtaaaactgaaactttttctgatgttcctgtgaaaacaaatatagaagtttgttctacttactccaaagattcagaaaactactttgaaacagaagcagtagaaattgctaaagcttttatggaagatgatgaactgacagattctaaactgccaagtcatgccacacattctctttttacatgtcccgaaaatgaggaaatggttttgtcaaattcaagaattggaaaaagaagaggagagccccttatcttagtgggagaaccctcaatcaaaagaaacttattaaatgaatttgacaggataatagaaaatcaagaaaaatccttaaaggcttcaaaaagcactccagatggcacaataaaagatcgaagattgtttatgcatcatgtttctttagagccgattacctgtgtaccctttcgcacaactaaggaacgtcaagagatacagaatccaaattttaccgcacctggtcaagaatttctgtctaaatctcatttgtatgaacatctgactttggaaaaatcttcaagcaatttagcagtttcaggacatccattttatcaagtttctgctacaagaaatgaaaaaatgagacacttgattactacaggcagaccaaccaaagtctttgttccaccttttaaaactaaatcacattttcacagagttgaacagtgtgttaggaatattaacttggaggaaaacagacaaaagcaaaacattgatggacatggctctgatgatagtaaaaataagattaatgacaatgagattcatcagtttaacaaaaacaactccaatcaagcagcagctgtaactttcacaaagtgtgaagaagaacctttagatttaattacaagtcttcagaatgccagagatatacaggatatgcgaattaagaagaaacaaaggcaacgcgtctttccacagccaggcagtctgtatcttgcaaaaacatccactctgcctcgaatctctctgaaagcagcagtaggaggccaagttccctctgcgtgttctcataaacagctgtatacgtatggcgtttctaaacattgcataaaaattaacagcaaaaatgcagagtcttttcagtttcacactgaagattattttggtaaggaaagtttatggactggaaaaggaatacagttggctgatggtggatggctcataccctccaatgatggaaaggctggaaaagaagaattttatagggctctgtgtgacactccaggtgtggatccaaagcttatttctagaatttgggtttataatcactatagatggatcatatggaaactggcagctatggaatgtgcctttcctaaggaatttgctaatagatgcctaagcccagaaagggtgcttcttcaactaaaatacagatatgatacggaaattgatagaagcagaagatcggctataaaaaagataatggaaagggatgacacagctgcaaaaacacttgttctctgtgtttctgacataatttcattgagcgcaaatatatctgaaacttctagcaataaaactagtagtgcagatacccaaaaagtggccattattgaacttacagatgggtggtatgctgttaaggcccagttagatcctcccctcttagctgtcttaaagaatggcagactgacagttggtcagaagattattcttcatggagcagaactggtgggctctcctgatgcctgtacacctcttgaagccccagaatctcttatgttaaagatttctgctaacagtactcggcctgctcgctggtataccaaacttggattctttcctgaccctagaccttttcctctgcccttatcatcgcttttcagtgatggaggaaatgttggttgtgttgatgtaattattcaaagagcataccctatacagtggatggagaagacatcatctggattatacatatttcgcaatgaaagagaggaagaaaaggaagcagcaaaatatgtggaggcccaacaaaagagactagaagccttattcactaaaattcaggaggaatttgaagaacatgaagaaaacacaacaaaaccatatttaccatcacgtgcactaacaagacagcaagttcgtgctttgcaagatggtgcagagctttatgaagcagtgaagaatgcagcagacccagcttaccttgagggttatttcagtgaagagcagttaagagccttgaataatcacaggcaaatgttgaatgataagaaacaagctcagatccagttggaaattaggaaggccatggaatctgctgaacaaaaggaacaaggtttatcaagggatgtcacaaccgtgtggaagttgcgtattgtaagctattcaaaaaaagaaaaagattcagttatactgagtatttggcgtccatcatcagatttatattctctgttaacagaaggaaagagatacagaatttatcatcttgcaacttcaaaatctaaaagtaaatctgaaagagctaacatacagttagcagcgacaaaaaaaactcagtatcaacaactaccggtttcagatgaaattttatttcagatttaccagccacgggagccccttcacttcagcaaatttttagatccagactttcagccatcttgttctgaggtggacctaataggatttgtcgtttctgttgtgaaaaaaacaggacttgcccctttcgtctatttgtcagacgaatgttacaatttactggcaataaagttttggatagaccttaatgaggacattattaagcctcatatgttaattgctgcaagcaacctccagtggcgaccagaatccaaatcaggccttcttactttatttgctggagatttttctgtgttttctgctagtccaaaagagggccactttcaagagacattcaacaaaatgaaaaatactgttgagaatattgacatactttgcaatgaagcagaaaacaagcttatgcatatactgcatgcaaatgatcccaagtggtccaccccaactaaagactgtacttcagggccgtacactgctcaaatcattcctggtacaggaaacaagcttctgatgtcttctcctaattgtgagatatattatcaaagtcctttatcactttgtatggccaaaaggaagtctgtttccacacctgtctcagcccagatgacttcaaagtcttgtaaaggggagaaagagattgatgaccaaaagaactgcaaaaagagaagagccttggatttcttgagtagactgcctttacctccacctgttagtcccatttgtacatttgtttctccggctgcacagaaggcatttcagccaccaaggagttgtggcaccaaatacgaaacacccataaagaaaaaagaactgaattctcctcagatgactccatttaaaaaattcaatgaaatttctcttttggaaagtaattcaatagctgacgaagaacttgcattgataaatacccaagctcttttgtctggttcaacaggagaaaaacaatttatatctgtcagtgaatccactaggactgctcccaccagttcagaagattatctcagactgaaacgacgttgtactacatctctgatcaaagaacaggagagttcccaggccagtacggaagaatgtgagaaaaataagcaggacacaattacaactaaaaaatatatctaagcatttgcaaaggcgacaataaattattgacgcttaacctttccagtttataagactggaatataatttcaaaccacacattagtacttatgttgcacaatgagaaaagaaattagtttcaaatttacctcagcgtttgtgtatcgggcaaaaatcgttttgcccgattccgtattggtatacttttgcttcagttgcatatcttaaaactaaatgtaatttattaactaatcaagaaaaacatctttggctgagctcggtggctcatgcctgtaatcccaacactttgagaagctgaggtgggaggagtgcttgaggccaggagttcaagaccagcctgggcaacatagggagacccccatctttacaaagaaaaaaaaaaggggaaaagaaaatcttttaaatctttggatttgatcactacaagtattattttacaagtgaaataaacataccattttcttttagattgtgtcattaaatggaatgaggtctcttagtacagttattttgatgcagataattccttttagtttagctactattttaggggattttttttagaggtaactcactatgaaatagttctccttaatgcaaatatgttggttctgctatagttccatcctgttcaaaagtcaggatgaatatgaagagtggtgtttccttttgagcaattcttcatccttaagtcagcatgattataagaaaaatagaaccctcagtgtaactctaattcctttttactattccagtgtgatctctgaaattaaattacttcaactaaaaattcaaatactttaaatcagaagatttcatagttaatttattttttttttcaacaaaatggtcatccaaactcaaacttgagaaaatatcttgctttcaaattggcactgatt

SEQ ID NO: 1389 - protein, 3418 aa, Homo sapiens
MPIGSKERPTFFEIFKTRCNKADLGPISLNWFEELSSEAPPYNSEPAEESEHKNNNYEPNLFKTPQRKPSYNQLASTPIIFKEQGLTLPLYQSPVKELDKFKLDLGRNVPNSRHKSLRTVKTKMDQADDVSCPLLNSCLSESPVVLQCTHVTPQRDKSVVCGSLFHTPKFVKGRQTPKHISESLGAEVDPDMSWSSSLATPPTLSSTVLIVRNEEASETVFPHDTTANVKSYFSNHDESLKKNDRFIASVTDSENTNQREAASHGFGKTSGNSFKVNSCKDHIGKSMPNVLEDEVYETVVDTSEEDSFSLCFSKCRTKNLQKVRTSKTRKKIFHEANADECEKSKNQVKEKYSFVSEVEPNDTDPLDSNVANQKPFESGSDKISKEVVPSLACEWSQLTLSGLNGAQMEKIPLLHISSCDQNISEKDLLDTENKRKKDFLTSENSLPRISSLPKSEKPLNEETVVNKRDEEQHLESHTDCILAVKQAISGTSPVASSFQGIKKSIFRIRESPKETFNASFSGHMTDPNFKKETEASESGLEIHTVCSQKEDSLCPNLIDNGSWPATTTQNSVALKNAGLISTLKKKTNKFIYAIHDETSYKGKKIPKDQKSELINCSAQFEANAFEAPLTFANADSGLLHSSVKRSCSQNDSEEPTLSLTSSFGTILRKCSRNETCSNNTVISQDLDYKEAKCNKEKLQLFITPEADSLSCLQEGQCENDPKSKKVSDIKEEVLAAACHPVQHSKVEYSDTDFQSQKSLLYDHENASTLILTPTSKDVLSNLVMISRGKESYKMSDKLKGNNYESDVELTKNIPMEKNQDVCALNENYKNVELLPPEKYMRVASPSRKVQFNQNTNLRVIQKNQEETTSISKITVNPDSEELFSDNENNFVFQVANERNNLALGNTKELHETDLTCVNEPIFKNSTMVLYGDTGDKQATQVSIKKDLVYVLAEENKNSVKQHIKMTLGQDLKSDISLNIDKIPEKNNDYMNKWAGLLGPISNHSFGGSFRTASNKEIKLSEHNIKKSKMFFKDIEEQYPTSLACVEIVNTLALDNQKKLSKPQSINTVSAHLQSSVVVSDCKNSHITPQMLFSKQDFNSNHNLTPSQKAEITELSTILEESGSQFEFTQFRKPSYILQKSTFEVPENQMTILKTTSEECRDADLHVIMNAPSIGQVDSSKQFEGTVEIKRKFAGLLKNDCNKSASGYLTDENEVGFRGFYSAHGTKLNVSTEALQKAVKLFSDIENISEETSAEVHPISLSSSKCHDSVVSMFKIENHNDKTVSEKNNKCQLILQNNIEMTTGTFVEEITENYKRNTENEDNKYTAASRNSHNLEFDGSDSSKNDTVCIHKDETDLLFTDQHNICLKLSGQFMKEGNTQIKEDLSDLTFLEVAKAQEACHGNTSNKEQLTATKTEQNIKDFETSDTFFQTASGKNISVAKESFNKIVNFFDQKPEELHNFSLNSELHSDIRKNKMDILSYEETDIVKHKILKESVPVGTGNQLVTFQGQPERDEKIKEPTLLGFHTASGKKVKIAKESLDKVKNLFDEKEQGTSEITSFSHQWAKTLKYREACKDLELACETIEITAAPKCKEMQNSLNNDKNLVSIETVVPPKLLSDNLCRQTENLKTSKSIFLKVKVHENVEKETAKSPATCYTNQSPYSVIENSALAFYTSCSRKTSVSQTSLLEAKKWLREGIFDGQPERINTADYVGNYLYENNSNSTIAENDKNHLSEKQDTYLSNSSMSNSYSYHSDEVYNDSGYLSKNKLDSGIEPVLKNVEDQKNTSFSKVISNVKDANAYPQTVNEDICVEELVTSSSPCKNKNAAIKLSISNSNNFEVGPPAFRIASGKIVCVSHETIKKVKDIFTDSFSKVIKENNENKSKICQTKIMAGCYEALDDSEDILHNSLDNDECSTHSHKVFADIQSEEILQHNQNMSGLEKVSKISPCDVSLETSDICKCSIGKLHKSVSSANTCGIFSTASGKSVQVSDASLQNARQVFSEIEDSTKQVFSKVLFKSNEHSDQLTREENTAIRTPEHLISQKGFSYNVVNSSAFSGFSTASGKQVSILESSLHKVKGVLEEFDLIRTEHSLHYSPTSRQNVSKILPRVDKRNPEHCVNSEMEKTCSKEFKLSNNLNVEGGSSENNHSIKVSPYLSQFQQDKQQLVLGTKVSLVENIHVLGKEQASPKNVKMEIGKTETFSDVPVKTNIEVCSTYSKDSENYFETEAVEIAKAFMEDDELTDSKLPSHATHSLFTCPENEEMVLSNSRIGKRRGEPLILVGEPSIKRNLLNEFDRIIENQEKSLKASKSTPDGTIKDRRLFMHHVSLEPITCVPFRTTKERQEIQNPNFTAPGQEFLSKSHLYEHLTLEKSSSNLAVSGHPFYQVSATRNEKMRHLITTGRPTKVFVPPFKTKSHFHRVEQCVRNINLEENRQKQNIDGHGSDDSKNKINDNEIHQFNKNNSNQAAAVTFTKCEEEPLDLITSLQNARDIQDMRIKKKQRQRVFPQPGSLYLAKTSTLPRISLKAAVGGQVPSACSHKQLYTYGVSKHCIKINSKNAESFQFHTEDYFGKESLWTGKGIQLADGGWLIPSNDGKAGKEEFYRALCDTPGVDPKLISRIWVYNHYRWIIWKLAAMECAFPKEFANRCLSPERVLLQLKYRYDTEIDRSRRSAIKKIMERDDTAAKTLVLCVSDIISLSANISETSSNKTSSADTQKVAIIELTDGWYAVKAQLDPPLLAVLKNGRLTVGQKIILHGAELVGSPDACTPLEAPESLMLKISANSTRPARWYTKLGFFPDPRPFPLPLSSLFSDGGNVGCVDVIIQRAYPIQWMEKTSSGLYIFRNEREEEKEAAKYVEAQQKRLEALFTKIQEEFEEHEENTTKPYLPSRALTRQQVRALQDGAELYEAVKNAADPAYLEGYFSEEQLRALNNHRQMLNDKKQAQIQLEIRKAMESAEQKEQGLSRDVTTVWKLRIVSYSKKEKDSVILSIWRPSSDLYSLLTEGKRYRIYHLATSKSKSKSERANIQLAATKKTQYQQLPVSDEILFQIYQPREPLHFSKFLDPDFQPSCSEVDLIGFVVSVVKKTGLAPFVYLSDECYNLLAIKFWIDLNEDIIKPHMLIAASNLQWRPESKSGLLTLFAGDFSVFSASPKEGHFQETFNKMKNTVENIDILCNEAENKLMHILHANDPKWSTPTKDCTSGPYTAQIIPGTGNKLLMSSPNCEIYYQSPLSLCMAKRKSVSTPVSAQMTSKSCKGEKEIDDQKNCKKRRALDFLSRLPLPPPVSPICTFVSPAAQKAFQPPRSCGTKYETPIKKKELNSPQMTPFKKFNEISLLESNSIADEELALINTQALLSGSTGEKQFISVSESTRTAPTSSEDYLRLKRRCTTSLIKEQESSQASTEECEKNKQDTITTKKYI

SEQ ID NO: 1390 - DNA, 3051 bp, Homo sapiens
atcacatggccggagagtcacaaaaacaacagctttggccaagaccgtgacttcagtaaagggaacccggggctctcgcagccagccctcctgcccatggaggacagtttccttcaatcttttgggaggctgagcctccagccccagcagcagcagcagcggcagcggccgccccggccgcccccgcgggggacacctcctcgccgccacagctttaggaaacacctctacctcctgcgaggcctcccgggctccgggaaaactacactggccagacaattgcagcatgactttcccagggccctgattttcagcacggatgattttttcttcagggaagatggtgcctatgagttcaatcctgacttcctggaggaagctcatgaatggaaccaaaaaagagcaagaaaagcaatgaggaatggcatatcccccattattattgataataccaacctccacgcctgggaaatgaagccctatgcagtcatggcacttgaaaataactatgaagttatattccgagaacctgacactcgctggaaattcaacgttcaagagttagcaagaagaaacattcatggtgtctcaagagaaaaaatccaccgaatgaaagaacggtatgaacacgatgttacttttcacagtgtgcttcatgcagaaaagccaagcagaatgaacagaaaccaggacaggaataatgcattgccttccaacaatgccagatactggaattcctacacagagtttccaaaccggagggcccacggtggatttacaaatgagagctcctatcacagaaggggcggttgtcaccatggatattagaggcctatcttacagccaggcagaattttcctaagtcagtttctacttcagtttttgttattttttgttgcattttagtcagagctccaattccagtgtaaatagctgaactcaaaagtttctgagcaaagtcattatattcactttcttcaccaaaatttgttaaagtgcttctatatgcatggtctgatgctgggaattctgcagatttgagtaaacagtctctttctctagggtaagaatttgaaaccaaaacttgagaacacacccaagaatatatttacataggttcatagatgaaataaagtgtttatattatatataagcttcagtaccatttgctctgaagtgatctatttattttttcaggaaattcatctccatcggtaaagttgggaaggtggagagaagtggtgggggggcattgctacttatcaaagtgccattgctactttgataatctatgtatctaaaaatgtgagatgtgcgactcttatgatactgattttcctttaatgttaatatgccagaaagcatacatctaagggaacattgtccttcaaagtagacactttgggaagttatttctttattttaatgatgtatcattgttaaaaatgctgtcaaatccttaatagctacaggagctactgagggaaatcagtgtcattatttaaagtcacgccttgtgtttttactactttattcagcaggattaaacctgaataacttttggctgttgtgctaatagtgtaaataaaataagcctgccttcataaaacactaacttttaaaaggaataaacgacttctaaaattatgcctattaacatgtgtaattagtcggcagctcaaatgtttgggagtgcaagaaattaggcaccccaggatataggtcatacagggatatataaaagccatgctcattacaaaatgagcagttgatgttttatgtggcattaagacaatcaagtcctcacaactctggaatgtcttcttatactgatgctgaatttatgaatccaaattaatttccaacaggttggaatcagatttaatgtgagatcatgatagacaagaccacagaggacgtatgctctatttcttgttggccaacagcttctttctaatgttctgtgaaaaattattttaagtgtcttatataatggtgcttttatggttattaaaaattgtaaatggtatcacatttatatggatttgtcattggatctttttttggttcaacaataaaaaaatttaattacctaaatgccaagaaactcaacaatataccagtttttctgtatcacaggcttatttaccagtcttttttttaataaataggaatcgtaaaggtaatgacaaaagcagccttataatttagttgcttatatatttgatctgtgtacatgagactgttttaacgttatctgacactactgaaacctgctcgacatctccatgactaccaacaccatgtgtaatgttttcttcactaacattttaaaaactggtatctcctttgagtaagtttggctgacaatagtaaatcccaatgaatctaaggtgttatcagctttgctaacttctgtatctccaagcacaacataaaataatctcctaatgatctacttaataatgctcccattttccaggcccaggtagtcctgggtatcttggttgatagggtggtggcataaccagctcaatatggatggcttgactcgtctgggctggtagaggggagaaatgtcagagagctcaaagtggaaattaccatcctttgatttcacatgagcggttcaaaggaccagattcaagccctcctgacttggctggctccctgctttagggtttttggctcacttgggttaagtgagtgaccactatggagaagtggctctgggttacataacttttctagagctctaaagaatagtttcctggcctatttaatgtctcttctttccctagctgacccctgaaatatttggtttgtaaaccataaaaattgattaaatgccatcaactttatcccctgtagaagtgatctgtttttcaactcccatggcttctgatttgtgtaactctttgaacacccaatattgacttgtattgtgttcgctgtttgcatcattcatagaactggcaaatgctctttatgggcaatagggtctcattaaatgattgctgaataaataacacaaatttttaccattaaaaa

SEQ ID NO: 1391 - protein, 243 aa, Homo sapiens
MEDSFLQSFGRLSLQPQQQQQRQRPPRPPPRGTPPRRHSFRKHLYLLRGLPGSGKTTLARQLQHDFPRALIFSTDDFFFREDGAYEFNPDFLEEAHEWNQKRARKAMRNGISPIIIDNTNLHAWEMKPYAVMALENNYEVIFREPDTRWKFNVQELARRNIHGVSREKIHRMKERYEHDVTFHSVLHAEKPSRMNRNQDRNNALPSNNARYWNSYTEFPNRRAHGGFTNESSYHRRGGCHHGY

SEQ ID NO: 1392 - DNA, 3499 bp, Homo sapiens
gccaagaagcttgagagaagaaaaatttcagaaaaattgtctcaatttgactagaatatcaatgaaccaggaaaactgaagcaccttccctaaagaaaacttgggtatacaattactccacagacagagctgagggttttttacccaaatcagtcactggattttgctgcctgatacgtgaatcttcttggaatttttctcatgtggatctaaggggaatgctttattatggctgctgttgtccaacagaacgacctagtatttgaatttgctagtaacgtcatggaggatgaacgacagcttggtgatccagctatttttcctgccgtaattgtggaacatgttcctggtgctgatattctcaatagttatgccggtctagcctgtgtggaagagcccaatgacatgattactgagagttcactggatgttgctgaagaagaaatcatagacgatgatgatgatgacatcacccttacagttgaagcttcttgtcatgacggggatgaaacaattgaaactattgaggctgctgaggcactcctcaatatggattcccctggccctatgctggatgaaaaacgaataaataataatatatttagttcacctgaagatgacatggttgttgccccagtcacccatgtgtccgtcacattagatgggattcctgaagtgatggaaacacagcaggtgcaagaaaaatatgcagactcaccgggagcctcatcaccagaacagcctaagaggaaaaaaggaagaaaaactaaaccaccacgaccagattccccagccactacgccaaatatatctgtgaagaagaaaaacaaagatggaaagggaaacacaatttatctttgggagtttttactggcactgctccaggacaaggctacttgtcctaaatacatcaagtggacccagcgagagaaaggcatttttaaattggtggattctaaagcagtgtccaggttgtgggggaagcacaaaaacaaacctgatatgaattatgagaccatgggaagagcactcaggtactattaccaaaggggtattctggcaaaagtggaaggtcagcgcttggtgtatcagtttaaagaaatgccaaaagatcttatatatataaatgatgaggatccaagttccagcatagagtcttcagatccatcactatcttcatcagccacttcaaataggaatcaaaccagccggtcgagagtatcttcaagtccaggggtaaaaggaggagccactacagttctaaaaccagggaattctaaagctgcaaaacccaaagatcctgtggaagttgcacaaccatcagaagttttgaggacagtgcagcccacgcagtctccatatcctacccagctcttccggactgttcatgtagtacagccagtacaggctgtcccagagggagaagcagctagaaccagtaccatgcaggatgaaacattaaattcttccgttcagagtattaggactatacaggctccaacccaagttccagtggttgtgtctcctaggaatcagcagttgcatacagtaacactccaaacagtgccactcacaacagttatagccagcacagatccatcagcaggtactggatctcagaagtttattttacaagccattccatcatcacagcccatgacagtactgaaagaaaatgtcatgctgcagtcacaaaaggcgggctctcctccttcaattgtcttgggccctgcccaggttcagcaggtccttactagcaatgttcagaccatttgcaatggaaccgtcagtgtggcttcctctccatccttcagtgctactgcacctgtggtgaccttttctcctcgcagttcacagctggttgctcacccacctggcactgtaatcacttcagttatcaaaactcaagaaacaaaaactcttacacaggaagtagagaaaaaggaatctgaagatcatttgaaagagaacactgagaaaacggagcagcagccacagccttatgtgatggtagtgtccagttccaatggatttacttctcaggtagctatgaaacaaaacgaactgctggaacccaactctttttagttaatataccaaagcttatgaataattgtttgttaattgaacattttcaattatatgcagactgactgattctaagataaattctaaggaggtttctaattttgtaattgttaaaaatagagttaattttgactttgttagatgagggaggaaaactcaactgtttctctttgttatctaaatgtttcagaattcaatcgtgaaggaacaggcattttacactatgaagacattcttttgagatttttatttcagttgctatatcataagcatttttaaagtttcttttctaattttacattgtattagattttctgattcttttgtaaatacagaacttaaatagaaggcaacaggaaatttatataggaactattttcattccacttgtgtaagttaagtcttgactctttcaaatgcaaaaaacctattttatgctttgttaaaattatggtgtcacttagattgactttagttgactgcactatataatatagaactatgaatatgtagaataacatgaaaaattggaggtgctggtggtatggctgaccctgtttcagaagcaggatagtataaaagcatcagcctaagaatggcactcccactaactagctatgtaatcttgacctctttgggctttagttcctctcataaaaggaagagatgtattggattagactagattatcaccactttctcttctagttctaatttttttaattctaatacctatattttcaagttatgtcaattaaatcattatcaggttatttcctaatgtaagaatagctaaaatgttgcagagaaataagtgacccaacaaaatttattcatctgttatgggtaagatctgccataaattcttcctaaataatttgtttactaactctttaggccactgtgctttgcggtccattagtaaacttgtgttgctaagtgctaaacagaatactgctattttgagagagtcaagactctttcttaagggccaagaaagcaacttgagccttgggctaatctggctgagtagtcagttataaaagcataattgctttatattttggatcattttttactgggggcggacttggggggggttgcatacaaagataacatatatatccaactttctgaaatgaaatgtttttagattactttttcaactgtaaataatgtacatttaatgtcacaagaaaaaaatgtcttctgcaaattttctagtataacagaaatttttgtagatgaaaaaaatcattatgtttagaggtctaatgctatgttttcatattacagagtgaatttgtatttaaacaaaaatttaaattttggaatcctctaaacatttttgtatctttaattggtttattattaaataaatcatataaaaattctcaaaaaaaaaaaaaaa

SEQ ID NO: 1393 - protein, 619 aa, Homo sapiens
MAAVVQQNDLVFEFASNVMEDERQLGDPAIFPAVIVEHVPGADILNSYAGLACVEEPNDMITESSLDVAEEEIIDDDDDDITLTVEASCHDGDETIETIEAAEALLNMDSPGPMLDEKRINNNIFSSPEDDMVVAPVTHVSVTLDGIPEVMETQQVQEKYADSPGASSPEQPKRKKGRKTKPPRPDSPATTPNISVKKKNKDGKGNTIYLWEFLLALLQDKATCPKYIKWTQREKGIFKLVDSKAVSRLWGKHKNKPDMNYETMGRALRYYYQRGILAKVEGQRLVYQFKEMPKDLIYINDEDPSSSIESSDPSLSSSATSNRNQTSRSRVSSSPGVKGGATTVLKPGNSKAAKPKDPVEVAQPSEVLRTVQPTQSPYPTQLFRTVHVVQPVQAVPEGEAARTSTMQDETLNSSVQSIRTIQAPTQVPVVVSPRNQQLHTVTLQTVPLTTVIASTDPSAGTGSQKFILQAIPSSQPMTVLKENVMLQSQKAGSPPSIVLGPAQVQQVLTSNVQTICNGTVSVASSPSFSATAPVVTFSPRSSQLVAHPPGTVITSVIKTQETKTLTQEVEKKESEDHLKENTEKTEQQPQPYVMVVSSSNGFTSQVAMKQNELLEPNSF

SEQ ID NO: 1394 - DNA, 2354 bp, Homo sapiens
tcggagggaggttcgggtgggcatcgggcggctggaagagctcgactcgtcccgctgggaaagcgcgagtctgagtggaaccctggacgacttgcagagcggctggcgcagtcatggcggactactggaagtcacagccaaagaaattctgtgattactgcaagtgctggatagcagacaataggcctagtgttgaatttcatgaaagaggaaagaatcataaggaaaatgtggcaaaaaggatcagtgagattaaacagaaaagcctggataaggcaaaggaagaagaaaaggcatcaaaggagtttgctgcaatggaggcagctgccctgaaagcataccaagaggatttgaaaagacttggcttagagtcagaaattttggagccaagcataacaccagtaaccagcactatcccacctacctcgacatcaaatcaacagaaagaaaagaaagaaaagaagaaaagaaaaaaagatccttcaaagggcagatgggtagaaggcataacctctgagggttaccattactattatgatcttatctcaggagcatctcagtgggagaaacctgaaggatttcaaggagacttaaaaaagacagcagtgaagaccgtttgggtagaaggtttaagtgaagatggttttacctattactataatacagaaacaggagaatccagatgggagaaacctgatgatttcattccacacactagtgatctgccttctagtaaggtcaatgaaaattcacttggcaccctagatgaatccaaatcatcagattcgcatagtgattctgatggggaacaggaagcagaagaaggaggggtctctacagagacagaaaagccaaaaataaagtttaaggaaaaaaataaaaatagtgatggaggaagtgacccagaaacacagaaagaaaaaagtattcagaaacagaattcattaggttcaaatgaagaaaaatcgaaaactcttaagaaatcaaacccatatggagaatggcaagaaattaaacaagaggttgagtctcatgaggaggtagatttggaacttccaagcactgaaaatgagtatgtatcaacttcagaagctgatggtggcggagaacccaaagtggtatttaaagaaaaaacagtcacttctcttggagttatggcagatggagtggccccagtcttcaaaaagagaagaactgaaaatggaaaatctagaaatttaaggcaacgaggtgatgatcaatagttgcaggagagctttttgtacatgcttttaggacagaatggagacttatacacccaaagtttatctgtgtttgtttgtaagtattatgatgctaaaaatttagatttattctaaatgtatttgatgtgaattaaaataaatattttttcatgtgaaatttattttggttcctaaaatggaagcctaccacattgcattgtaatacagtgtattatgttcagtgtctaaaaactgctaattaagtcataatttaagatgctatgtatctgttatttaaaacatggagaaacagggcctttattccattcatattcataagagcatatttatcctgcattgaaaatgcattacttttgcacattgatattaactgttgtccaacaaataagtatcggagtacgtgagaatattcccagcccagtgatgatttggttctgaggctgatgtgagaaagctgatgtaaaaaatgtatgcatattggcttaccttactcaatttaaagtcaaaagccaacagccaggagcagctcaggtacttcagatgtgcttaatatggagtgaaaactggaccagaggtggaaagatgtatttgccccagttcacttcaaagcagcaaacgttgtttaagcattttagtttgaaccaggcattgtgttaggaatccagggataaagatgaatgaaatgtatttctgttcttcaggagttcacattctagcatatgccttttttcccccagtcatgcactctttttagcagtcttatatgtactagaaaagattttttaaagtttatttaaagctgtgtagatgaaggcttgatctaaaatagtataaggtctccagcttcagtaaaagtttttagtgtttacttaaattagtaatttctcactttctgtctggttaaaatgtcttaaaaagtagaattttcttctttaatccgtttagtagttacctcccttttacttttcaaattcacaaaattacatttctcataaattgtatagtatttaacttataatagttaatatttgtctttttaagatgactgtacatgtaagaaaaaagcttattaaaaacttgatcaaagaaaaaaaaaaaaaaaaaaaaaaa

SEQ ID NO: 1395 - protein, 376 aa, Homo sapiens
MADYWKSQPKKFCDYCKCWIADNRPSVEFHERGKNHKENVAKRISEIKQKSLDKAKEEEKASKEFAAMEAAALKAYQEDLKRLGLESEILEPSITPVTSTIPPTSTSNQQKEKKEKKKRKKDPSKGRWVEGITSEGYHYYYDLISGASQWEKPEGFQGDLKKTAVKTVWVEGLSEDGFTYYYNTETGESRWEKPDDFIPHTSDLPSSKVNENSLGTLDESKSSDSHSDSDGEQEAEEGGVSTETEKPKIKFKEKNKNSDGGSDPETQKEKSIQKQNSLGSNEEKSKTLKKSNPYGEWQEIKQEVESHEEVDLELPSTENEYVSTSEADGGGEPKVVFKEKTVTSLGVMADGVAPVFKKRRTENGKSRNLRQRGDDQ

SEQ ID NO: 1396 - DNA, 5228 bp, Homo sapiens
cattgtcgcccacgctgcagtagcggcttctgcggctccaagccagcgggtcctgtgaaggcgagcagacgcggagaaaggacgcgggagtgagagagggtgagtcagccactgtctaaacgataacgggaggcggctctgcggggtagggttgaattcagtaaatgggctcgtgctgctgtctcttcggagacgctgctatcttagcgtcagcgagggaaggttgaggaggagccagagccgggtcctgcagcgtttctcgccatcagcgcccgtcgccatctccaccatgcagtcccgggaagacgccccgcgctctcgccgcctagccagtccccgtggtgggaagcggcccaagaagattcacaaacccacagtttcggcctttttcacgggtccagaggaattaaaggacacggcccattctgcagccctgctggcacagctcaagtccttctacgatgcgcggctgctgtgtgatgtgaccatcgaggtggtgacgcctggcagcgggcctggcacgggtcgcctgttcccctgcaaccgcaatgtgctggccgcggcatgtccctacttcaagagcatgttcacaggtggcatgtacgagagccagcaggccagcgtgaccatgcacgatgtggacgccgagtccttcgaggtgttggtcgactactgctacacgggtcgtgtgtctctcagtgaggccaacgtggagcgcctgtacgcggcctccgacatgctacagctggaatatgtgcgggaagcctgtgcctccttcttagcccgacgtcttgacctgaccaactgcaccgccatcctcaagtttgcagatgcctttggccatcgcaagctgcgatcccaggcccagtcctatatagctcagaacttcaagcaactcagccacatgggttcaattcgggaggagactctagcagatctgaccctggcccagctgctggctgtcctgcgcttggatagtctggacgtggagagtgagcagacagtgtgccatgtggcagtgcagtggctggaggctgctcccaaagagcggggtcccagtgctgcagaagtcttcaagtgcgtgcgctggatgcacttcactgaagaagatcaggactacttagaagggctgctgaccaagcccatcgtgaagaagtactgcctggacgttattgaaggggccctgcagatgcgctatggtgacctgttgtacaagtctctggtgccagtgccaaacagcagcagcagcagtagcagcagcaactctcttgtatctgcagcagaaaatccaccccagagactgggtatgtgtgccaaggagatggtgatcttctttggacaccccagagatccctttctctgctgtgatccatactcgggggacctttacaaagtgccgtcacctttgacctgtctggctcacactaggactgtcaccactctagctgtctgtatctctcctgaccatgacatctatctagctgctcagcccaggacagacctctgggtgtataaaccagctcagaatagttggcagcaacttgcagatcgcttgctgtgtcgtgagggcatggatgtggcatatctcaatggctatatctacattttgggggggcgagaccctattactggagttaagttgaaggaagtggaatgctacaatgttaagagaaaccagtgggcattggtggctccactgccccattcttttttatcctttgacctaatggtaattcgagactatctctatgctctcaacagtaagcgcatgttctgttatgatcctagccacaatatgtggctgaagtgcgtttctctgaagcgcaatgactttcaggaagcctgcgtcttcaatgaggagatctattgtatctgtgatatcccagtcatgaaggtctacaacccagttagggcagaatggaggcaaatgaataatattcccttggtctcagagaccaacaactacagaattatcaagcatggccaaaaattgttgctcatcacctctcgcaccccacagtggaaaaagaaccgggtgactgtgtatgaatatgatattaggggagaccaatggattaatataggtaccacattaggcctcttgcagtttgattctaactttttttgcctctctgctcgtgtttatccttcctgccttgaacctggtcagagtttcctcactgaagaagaagaaataccaagtgagtctagcactgaatgggacttaggtggattcagtgagccagactctgagtcaggaagttcaagttctctttctgatgatgatttttgggtgcgtgtagcgcctcagtgaaatgcacaggatcaacagggtttgttgtaactagattgaaacactaagttgtttttactgttttggaaaatatcttaaatatcctttttgttcctaaaggagaggaaaagttgattaacttctggtttggtttagaaaaagtaatgtttgaaatacgaaggtaatttaatgttacaaattttaacactcaaatcaaccttttaataattttctgtgctaagggtccagtatttatttgattatttagtatgtttatgtttcatgacactaatttagtcttttgatacattttacattctgtttactgccacaagcactgtggcaataacttttgaattttaatttttataatagaaaaatgattaggaattgctagatagtgttttgaaagcatatctttttcttcagaacaatgtagacttccaaaatggttaacctaaggggtctttacaaaatgtgttataagttaaacataatttgggaagttttacttttgttttcttctatgaagaaaaaaatgcaggctgggcgcggtggctcacgcctgtaatcctagcactttgggaggccgaggcaggtggatcacctgaggtcagttcaagaccagcctggccaacatggtgaaaccccgtctctactaaaaatacaaaaattagctgggcgtggtggcatgcgcctgtaatcccagctacccaggaggctgaggcaggagaattgctgaaacccgggagtcagaggctgcagagagccgagactgggccactgcactccagcctggatgacagagtgagactccgtctcaaaaaaaaaaaaaaaaaaaaaaggaaaaaaaaaaaagaaaaaaaaccatatgtgtattagggtgactgagtggtgacttcatttataataatacagagaatagctataagctcattgacagtaaaaacaacaaaccaggattctactgtttgaaaagaagtttcgttttaattttggaatttagaatgtgtatttgcaaagtcaccaattttcatctaaaaggttatattctagttgtgtcaccaaatcatcaaaaaaccttaaaaaagaagtaacttgctttgtaggtttgtattgttgatctaaacctgatacatgcttcatttaatcaggaataatccttttttttctgctggacatgtataaatttcactggattgtataaatttttatctattgccttaaacatttacatgattctcaatatgttttagctgtacagttttggtgttcatcttagaggattcttcagcagaagtgatatttctttactgttttgtgaggtaatactgattttgaaaatatatataagctaaaaacagtatttcgttgatatcagtagtcattgtgttaactataaagtcaagtgccagcaaagaactttaaaactgtaaagctgtgtatagaactgttttgtgtagcatggaaatattctgtcagctttttaaagtcactaaatgttcttgattatcagcttgaaggtatttttgtattacaagttgacagttgctgggtgtagtggctcatgcctgtaatcctagcaactcggggctgaggtgggaggattgcttcagcccaggagtttgagaccagcctgggcaacatagcaaaaccccatctctacaaaaataaaaaatatgtctgggcatggtggcccaagtctgagtcccagttacttgggaggatcacttgaatgtaggatcacttgagtctaggagttcggggctgcagctatcatctgcagctataatcatagctcactgcagctatgatcatgtctcagcactccagctttggcaacagaacgagatcccatctcttagaaaaacaaagttgatagttaaagaacataagtggatgatggcatttgaggccactagtgaaagtatgttttctctaaaatatttctctaatagtgatataaatggctattttattatgatgtttgtatgtgttttgtatttctctgtaaaccatgctccagtctttgtttttctgttaccataatgtaagagaaggtcctggaacagagactaaatcccacgaaactgacattgttaaacacactaaaacagaagtacttacctcttgaagatttaatatataatggttgacatgatacatgtacatgatgaatgaccagatgcttatggtctacattttcctttatcctgttagtattaccttccttaatctttgttcattaacatgctaattcctcttcagtgtttattttctagtgacagaatgctaacatttcttacaccctggcagaagggagagaaatgtgttttggggtgggtaactaaatttttgagtgaaatatcataagatgagaatggaaagagggagacacaaagagttataacaaaaaaacaatggtttttttagccatttgactggctctttaaatagtctacaagacattcacgtttaacatcacttttagtgaaataaaatgtgccatactagtatgtgcttcaaaagggcaaatgtgctttagtgccctaaggctaaattttggtcatttgacatcagagatgttgtaagtattgcacttaatacgcacctatttctcaatagtgttattttttggctagcattttctttaccactatcttgttgatagctttttgttctctaaggttgaaacatgacagtgcttatctcaaacagattacccatctgcagaactaaggaaagcaatttatgtatgaaagaaattcttgaattcgtcattctcaacctttgaattaaagcttagactaaatagtaatatatcgtgggaaggattttggttttgtgatatttctgtgaattaaggaatagatgttaaccattattttgtagaaaagtgatttgtatgtggttaattataaataaaactggtacc

SEQ ID NO: 1397 - protein, 674 aa, Homo sapiens
MQSREDAPRSRRLASPRGGKRPKKIHKPTVSAFFTGPEELKDTAHSAALLAQLKSFYDARLLCDVTIEVVTPGSGPGTGRLFPCNRNVLAAACPYFKSMFTGGMYESQQASVTMHDVDAESFEVLVDYCYTGRVSLSEANVERLYAASDMLQLEYVREACASFLARRLDLTNCTAILKFADAFGHRKLRSQAQSYIAQNFKQLSHMGSIREETLADLTLAQLLAVLRLDSLDVESEQTVCHVAVQWLEAAPKERGPSAAEVFKCVRWMHFTEEDQDYLEGLLTKPIVKKYCLDVIEGALQMRYGDLLYKSLVPVPNSSSSSSSSNSLVSAAENPPQRLGMCAKEMVIFFGHPRDPFLCCDPYSGDLYKVPSPLTCLAHTRTVTTLAVCISPDHDIYLAAQPRTDLWVYKPAQNSWQQLADRLLCREGMDVAYLNGYIYILGGRDPITGVKLKEVECYNVKRNQWALVAPLPHSFLSFDLMVIRDYLYALNSKRMFCYDPSHNMWLKCVSLKRNDFQEACVFNEEIYCICDIPVMKVYNPVRAEWRQMNNIPLVSETNNYRIIKHGQKLLLITSRTPQWKKNRVTVYEYDIRGDQWINIGTTLGLLQFDSNFFCLSARVYPSCLEPGQSFLTEEEEIPSESSTEWDLGGFSEPDSESGSSSSLSDDDFWVRVAPQ

SEQ ID NO: 1398 - DNA, 3008 bp, Homo sapiens
agttctcccgggcgcctagcgggatcgccagcgcggcagtgggggcttccgcggctgcaagccagcgggtcctgtgagggcgagcggaggcggagaaagggcgcgggagtgagagagggtgagtcagccactgtctatgcaataaagggaggcctcaccgcgggatagggctgaattcagaagtgcggcccgtgccgcagtctgttccaggacgcggcttgtcttagcgtcagcgagggaaggttgaggaggagccagagcctggtcctgcagcctttctcgccgtcagcgcccgtcgccatctccaccatgcagtcccgggaagacgtcccgcgctctcgccgcctcgccagtccccgtggtgggaggcggcccaagaggatttccaagccctcggtttcggcctttttcacgggtccagaggagttaaaggacacggcccattctgcagccctgctggcacagctcaagtccttctacgacgcgcggctgctgtgtgatgtgaccatcgaggtggtgacgcctggcagcgggcctggcacgggtcgcctcttttcctgcaatcgcaacgtgctagcagctgcgtgtccctacttcaagagcatgttcacaggtggcatgtacgagagccagcaggccagcgtgaccatgcacgatgtggacgccgagtccttcgaggtgttggtcgactactgctacacgggtcgtgtgtctctcagtgaggccaatgtgcagcgcctgtacgcggcctccgacatgctacagctggaatatgtgcgggaagcctgtgcctccttcttagcccgacgtcttgacctgaccaactgcaccgccatcctcaagtttgcagacgccttcgaccatcacaagcttcgatctcaggcccagtcctacatagctcacaacttcaagcagctcagccgaatgggttcaattcgggaggagactctagcagatctaaccctggcccagctgctggctgtcctacgcctggatagtctggacatagagagtgagcggactgtatgccatgtagctgtgcagtggctggaggctgctgccaaagagcggggtcccagtgctgcagaagtcttcaagtgcgtgcgctggatgcacttcactgaagaagatcaggactacttagaagggctgctgaccaagcccatcgtgaagaagtactgcctggacgttattgaaggggccctgcagatgcgctatggtgacctgttgtacaagtctctggtgccagtgccaaacagcagcagcagcagtagcagcagcaactctcttgtatctgcagcagaaaatccaccccagagactgggtatgtgtgccaaggagatggtgatcttctttggacatcctagagatccctttctctgctatgacccttactcgggggacatttacacaatgccatcccctttgaccagctttgctcacactaagactgtcacctcctcagctgtctgtgtgtccccagaccatgacatctatctagctgctcagcccaggaaagacctctgggtgtataaaccagctcagaatagttggcagcaacttgcagatcgcttgctgtgtcgtgagggcatggatgtggcatatctcaatggctacatctacattttggggggacgagaccctattactggagttaagttgaaggaagtggaatgctacagtgttcagagaaaccagtgggcattggtggctcctgtccctcattccttctattcctttgaactcatagtggttcagaactatctttatgctgtcaacagtaagcgcatgctttgctatgatcctagccacaatatgtggctgaactgtgcttctcttaaacgtagtgactttcaggaagcatgtgtcttcaatgatgaaatctattgtatctgtgacatcccagtcatgaaggtctacaacccagctaggggagaatggaggcggattagtaatattcctttggattcagagacccacaactaccagattgtcaatcatgaccaaaagttgcttctcatcacttctacaaccccacaatggaaaaagaaccgagtgacagtgtatgagtatgatactagggaagatcagtggattaatataggtaccatgttaggccttttgcagtttgactctggctttatttgcctttgtgctcgtgtttatccttcctgccttgaacctggtcagagttttattactgaggaagatgatgcacggagtgagtctagtactgaatgggacttagatggattcagtgagctggactctgagtcaggaagttcaagttctttttcagatgatgaagtctgggtgcaagtagcacctcagcgaaatgcacaggatcagcagggttctttgtaaatagtattttgagacactaagatgtttctactgctacggaatgtattttaaacacatatcgtttctttttcttggaaaaaaagttgattaggaccacagatttggtttagaaagggtaatattttgaaatactacaaggtttagacagtccatgaaatcgacctgtttaataatttaccatcctgaaagtccagaattaaaatatggaagcaagaactatataattgattaggatgcttggtaggtttttttcattgttcaaatattcattgcacagtggattgttttgattagttagtatgctttttttttaattaattcagtcttctgttaatttttaagttttggttagtgccacaaggaatttaactttttgatttgtataatagaaaactgaactaggaattgttagcggggttttgaaggatgtgtactttccttcaaaataaagtggtagattttcaaaattttacactagtcagttctttatattctaagttaaatgtagtttgtaaaattattttggttttcttctacaaaggaaaaaattggatttatatatataaggttactgcataatgatttcattttgataatgtgcagaatggcctcataagctcacagaaagcaaaaaaaaaaaaaaa

SEQ ID NO: 1399 - protein, 684 aa, Homo sapiens
MQSREDVPRSRRLASPRGGRRPKRISKPSVSAFFTGPEELKDTAHSAALLAQLKSFYDARLLCDVTIEVVTPGSGPGTGRLFSCNRNVLAAACPYFKSMFTGGMYESQQASVTMHDVDAESFEVLVDYCYTGRVSLSEANVQRLYAASDMLQLEYVREACASFLARRLDLTNCTAILKFADAFDHHKLRSQAQSYIAHNFKQLSRMGSIREETLADLTLAQLLAVLRLDSLDIESERTVCHVAVQWLEAAAKERGPSAAEVFKCVRWMHFTEEDQDYLEGLLTKPIVKKYCLDVIEGALQMRYGDLLYKSLVPVPNSSSSSSSSNSLVSAAENPPQRLGMCAKEMVIFFGHPRDPFLCYDPYSGDIYTMPSPLTSFAHTKTVTSSAVCVSPDHDIYLAAQPRKDLWVYKPAQNSWQQLADRLLCREGMDVAYLNGYIYILGGRDPITGVKLKEVECYSVQRNQWALVAPVPHSFYSFELIVVQNYLYAVNSKRMLCYDPSHNMWLNCASLKRSDFQEACVFNDEIYCICDIPVMKVYNPARGEWRRISNIPLDSETHNYQIVNHDQKLLLITSTTPQWKKNRVTVYEYDTREDQWINIGTMLGLLQFDSGFICLCARVYPSCLEPGQSFITEEDDARSESSTEWDLDGFSELDSESGSSSSFSDDEVWVQVAPQRNAQDQQGSL

SEQ ID NO: 1400 - DNA, 2174 bp, Homo sapiens
cgtgatctcgggtttgtcgggctgaaatgtggcgggtctcggaaggttccgacctcagtaaagagagctaacgtgtattcttctttttcttagatgctgagatgaatcgtcacctgtgtgtttggctttttagacatccatctcttaatggttacctccagtgtcacatccagctccattctcatcaatttagacagatacatcttgatacaaggctgcaagtttttagacaaaacaggaattgcattcttcatctgttaagtaagaattggtccaggagatattgccatcaagacaccaagatgctctggaagcataaagcactacagaaatatatggagaacctgagtaaggagtaccaaacacttgagcaatgtctgcagcatatccctgtgaatgaggaaaaccgaaggtccttgaacagaaggcatgctgagttggcacctcttgcagccatttaccaagaaattcaggagactgaacaagcaattgaagaattagaatcaatgtgtaaaagcctaaataaacaagatgaaaagcagttacaagaacttgcactggaagaaaggcaaaccattgatcaaaaaatcaacatgttgtacaatgagcttttccagagccttgtgccaaaggagaaatatgacaaaaatgatgttattttagaggtgacagctggaaggactactggaggtgacatctgccaacaatttacccgagaaatatttgacatgtaccagaattattcgtgctataaacactggcaatttgaacttctgaattatacaccagcagattatggtggactacatcatgcagccgcccgaatttccggtgacggtgtctataagcatttgaagtatgagggtgggattcaccgagttcagcgcatccccgaggtgggcctgtcctcaaggatgcagcgcattcacacaggaacgatgtcggttattgtccttcctcagccagatgaggtggatgtgaaattggaccccaaggatttgcgaatagatacatttcgagccaaaggagcaggagggcagcatgttaataaaactgatagtgccgtcagacttgtccacatccccacagggctagtagtagaatgccaacaagaaagatcacagataaaaaataaagaaatagcctttcgtgtgttgagagctagactctaccagcagattattgagaaagacaagcgtcagcaacaaagtgctagaaaactgcaggtgggaacaagagcccagtcagagcgaattcggacatataatttcacccaggatagagtcagtgaccacaggatagcatatgaagttcgtgatattaaggaatttttatgtggtgggaagggcctggatcagctaattcagagactgcttcaatcagcagatgaagaagccattgctgaacttttggatgaacaccttaaatcagcaaaataaatactaacttattattatttatgattatataaatgaaatggacctatatcaagaggcagactgaagcttggaaatcattatgaatatttgtaaattacagctttaagaacacattacacataaatatatgttttgtaattaatcgaagtcacatttcctgacctaagaatttattttaggtttcctgtaaagtacaatccaactcatcaagtagaaaataagcatgcatcattgaaaagagaaagtattgagaattgattgtgtcatttaggacaagtcacttgttctctttatatgccttttttccccagccatctatgaattaatttaaatatatttttaatctactacttcaggaaaatatggtaaaatttagtaaaatatgaattttagacttccttataaaccttttatttaaatacaaagtaccttggcctatagtggatgcttatgcctgtaatcccagtgctttgaagggccaaagggggaagatctcttgaggtaagaatttgagaccagcctgggcaaaatagaccccatgtctacaaaaaaactcaaaacataaagaaaaaccataatactgttaatcatgttaaagttaagacttagactgcaacttttaaataaaaattatgaagaatatgagtcattcaataacaatgagcatctgggtacagacagtaaagccctttgattgctgtatgaattccacactatataaacaataagctgata

SEQ ID NO: 1401 - protein, 445 aa, Homo sapiens
MNRHLCVWLFRHPSLNGYLQCHIQLHSHQFRQIHLDTRLQVFRQNRNCILHLLSKNWSRRYCHQDTKMLWKHKALQKYMENLSKEYQTLEQCLQHIPVNEENRRSLNRRHAELAPLAAIYQEIQETEQAIEELESMCKSLNKQDEKQLQELALEERQTIDQKINMLYNELFQSLVPKEKYDKNDVILEVTAGRTTGGDICQQFTREIFDMYQNYSCYKHWQFELLNYTPADYGGLHHAAARISGDGVYKHLKYEGGIHRVQRIPEVGLSSRMQRIHTGTMSVIVLPQPDEVDVKLDPKDLRIDTFRAKGAGGQHVNKTDSAVRLVHIPTGLVVECQQERSQIKNKEIAFRVLRARLYQQIIEKDKRQQQSARKLQVGTRAQSERIRTYNFTQDRVSDHRIAYEVRDIKEFLCGGKGLDQLIQRLLQSADEEAIAELLDEHLKSAK

SEQ ID NO: 1402 - DNA, 3809 bp, Homo sapiens
ctccttcaccaccctcccggaagtggagccgccctcgcgcccaccagcggctaccccctgcggcaggccccgcccacacaggctccgccccccggcgctccgccccctcctcttgtagtggcgccggcttgcatcccaggtcgtggcggttttggtgcctgaagcagggagcgcggagtcgttcccgagagaggcggccaggctatgctcgccggtttccggcgttccgctccggccagccagagtctctgtctcaacctgtgtccgtgctccagcagtctcctcagcccggccccgcggcgcggttggcggcggcgccccaggcgcgccccctcctccgatggcggcggagatccagcccaagcctctgacccgcaagccgatcctgctgcagcggatggaggggtcccaggaggtggtgaatatggccgtgatcgtgcccaaagaggagggcgtcatcagcgtctccgaggacaggacagttcgtgtttggttaaagagagacagtggacagtattggccaagcgtataccatgcaatgccttctccatgttcatgcatgtcttttaacccggaaacaagaagactgtccataggtctagacaatggtacaatctcagagtttatattgtcagaagattataacaagatgactcctgtgaaaaactatcaagcgcatcagagcagagtgacgatgatcctgtttgtcctggagctggagtgggtgctgagcacaggacaggacaagcaatttgcctggcactgctctgagagtgggcagcgcctgggaggttatcggaccagtgctgtggcctcaggcctgcaatttgatgttgaaacccggcatgtgtttatcggtgaccactcaggccaagtaacaatcctcaaactggagcaagaaaactgcaccctggtcacaacattcagaggacacacaggtggggtgaccgctctctgttgggacccagtccagcgggtgttgttctcaggcagttcagatcactctgtcatcatgtgggacatcggtgggagaaaaggaacagccatcgagctccaaggacacaacgacagagtccaggccctctcctatgcacagcacacgcgacaattgatctcctgtggcggtgatggtgggattgtcgtctggaacatggacgtggagaggcaggagacccctgaatggttggacagtgattcctgccaaaagtgtgatcagcctttcttctggaacttcaagcaaatgtgggacagtaagaaaattggtctaagacagcaccactgccgcaagtgtgggaaggccgtctgtggcaagtgcagctccaagcgctcctccatccccctgatgggcttcgagtttgaagtgagggtctgtgacagctgccacgaggccatcacagatgaagaacgtgcacccacagccaccttccatgacagtaaacataacattgtgcatgtgcatttcgatgcaaccagaggatggttactgacttctggaactgacaaggttattaagttgtgggatatgaccccagtcgtgtcttgatgactctcccaggaatcagaaagatagtatttactaaagaaacggttgttttaacccaaatcattaccagagtggtaaagcagacatgtgagaagtaagaaagaaactaaagaccctgaatgaatttgcagattacccatgtgcacagtggggacctggccagtgagcactcgcaaggggactcttccaacttgttcatacaatataaaagaagctatttttttaacaaatggtttatacagtctggctgtgctgcattgttttgagtgtaccgaaaaatctgtgtggggtgtttaatttttatacttttcaacaccccattttacttgttgctttgtcagagaaataagggaggtatctactcagagtattttggtcattatactttctgtgtttacttcaacatgtgtcacgtggccagcggctttttcttctcttccctctgcacctacctgcaccttctctgcctttcctggaggggatgtatttatgttatttattcccagtgtttctgctttcatgtcctcctcagtggagagatttggaaactcatcatgtggattcaccagccagctgctggaattgcctgaagagcgatttgtttgtaatgtctgcctcattcacgttcttatgaagtagaaaagactgtgtttctgcctcagttgcctctgtctttcccacattaaaaaaaaaaatgctgtgagaaagctgctcccaaccatggttatcacagaagtagattattttaactcagagcttcaacgatcagtgcctggatcatttagaattcagttggagcctcctgagcctcttgttttagcttttttgacgcagctctccctcactcgtaacaatgaaaacaaatgacacacacacaaaatcctacatcagcggccctcaaccttgttggcagcagggaccggtttcaaaatgaaactgttccacctcggatcagcaggcattagcttctcataaggagcacgcaacctaaatccctcgcatgcgcagttcacaatagagtttctgctcctgtgagaatctgacgccaccgctgatctgatgggaggcggagcccaggcagtaacacttgcttgcccactgctcacgtctgatgggtgcccccattcctcacaggctatggaccagtacccatctgcagcccagggttggggacccccaccatacatgctctgaaaataagtgtctttaagttgtgtttttctgtgtgacatcatctctgaacttgaacatgttcattacggcaagattgtaatcctgctgtattcctcgccctctgtattctatccctttaaaaactagatatttaaacattttatcctaatgtgtttcatcagaacactttgcacactttcttactaaaacggtatgtgggtggtccgagacagaatggtacctacagtgcaggctatgtttctgtgggaatggaaaagaggactttagaaagtgaacctgaagaactcttatttctaagggaatccagtcaagcttgagaaaatgaaatattcttgtgtgtagtgattcagctcaggatattgaagtcccttttaaaaatcttattttcacctgtaaaaatagaataaaaattaatggcaagcctgcgccaggtgcctgcccctcctaagcactttacacgcacagctcattcaacctcacgtgtcgggagcatcagggagctcaccagtctcttgaggatcacaggccaattgcttgtccttcccgacccaagccccaccccacagtgtcttgctctcttctgattttacaggttttttggcagtaatacacatgggagtgaaattgaaatcctccctattattttccctcttttcctggaaagccgttttttgccctcacaatcattcattacttctctaactagggggaagtactacaagctgtcctcaggtactgcccctacgtgtgtttccctgggatggggccttgctagaggtgattctgctgccccagcattgggaagcaggaccagtgcatgtgccccatgcagccacggtacatggaagctgtcacttgagccatcagaccggctcagcccatgtgaccggagctctgaagaggcacacacgcatgccccgcacaggctgttagcacttgtcgcctcgctgccctggtccagactacccttgcttgcgtcagtcaaaactgttgtaactactttgagtcttttctgcatgattgctctttgagagaactttaacaagggaattaaatttaaaatattcaaata

SEQ ID NO: 1403 - protein, 400 aa, Homo sapiens
MAAEIQPKPLTRKPILLQRMEGSQEVVNMAVIVPKEEGVISVSEDRTVRVWLKRDSGQYWPSVYHAMPSPCSCMSFNPETRRLSIGLDNGTISEFILSEDYNKMTPVKNYQAHQSRVTMILFVLELEWVLSTGQDKQFAWHCSESGQRLGGYRTSAVASGLQFDVETRHVFIGDHSGQVTILKLEQENCTLVTTFRGHTGGVTALCWDPVQRVLFSGSSDHSVIMWDIGGRKGTAIELQGHNDRVQALSYAQHTRQLISCGGDGGIVVWNMDVERQETPEWLDSDSCQKCDQPFFWNFKQMWDSKKIGLRQHHCRKCGKAVCGKCSSKRSSIPLMGFEFEVRVCDSCHEAITDEERAPTATFHDSKHNIVHVHFDATRGWLLTSGTDKVIKLWDMTPVVS

SEQ ID NO: 1404 - DNA, 1344 bp, Homo sapiens
ccgcagcgtcttgtggttcgccaaggggctgcgcgagtacaccaagagtggctatgaatctgcatgtaaagactttgtccctcatgacttggaggtccagattcctggaagagtctttttggtcactggaggaaacagcggcattggcaaagcaactgcccttgaaatcgccaagcgagaacatttttctgcacattgtggacttgtctgatcccaagcaaatctggaaatttgttgaaaatttcaagcaggaacataaactccatgttctgatcaataatgcaggttgcatggtcaataaaagagagctcacagaagatggacttgaaaaaaactttgctgccaatactctgggtgtgtacattctcacgaccggcctgatccctgtgctggagaaagaacacgacccccgagtgataaccgtctcctcaggaggaatgttggttcagaaactgaacaccaatgatctccagtccgaaagaacaccatttgatggaactatggtctatgcacaaaacaagaggcagcaagtggttctgacggagcggtgggcccaagggcacccggccatccatttttcttccatgcatcctggctgggccgacaccccagacaggaatgagcaggagctgaggaaggtagtgggagaggcccagactgcctcaccactccccaggtttttggaaataatgatgcatgaaggtaaatgccagccacaaggacacagctcgaatgatctggaagcgtgttggagcagcggtggaggggagcagaattctcttccggattggcctcaccaactccatgacctcaggcagctcacctgggctctctgcagctctttcctcctctacaaacaagggaactgaaagcagcagcagccacagcacacaccccagggtgcacccgcggcgccaagaactggtctcagcgctgtctgcggattaacgcatttgtcctcaagcctctgtggagtggccactactgtctattatcacacccatttacagatgagggaactgaggcccagagaggctaagacctcccagccgggcctggccatggggttttgggaatcaggctctcacacactgctggcatggcctttctgaaaatcactatttatcagaagccttggaattcatcctaagaaataaagatagggaaaacaaggttgcttatcacagtgctggtggtaggagatgaagttaataaattatagaacacctgtgcaaaatctgttcagggctgaagactctgctgccaatcatgcctatggaaaaaccctgtgtgcactatatcattaaatgaagataccaagttcaaaaaaaaaaaaaaaaaaaa

SEQ ID NO: 1405 - protein, 271 aa, Homo sapiens
MNLHVKTLSLMTWRSRFLEESFWSLEETAALAKQLPLKSPSENIFLHIVDLSDPKQIWKFVENFKQEHKLHVLINNAGCMVNKRELTEDGLEKNFAANTLGVYILTTGLIPVLEKEHDPRVITVSSGGMLVQKLNTNDLQSERTPFDGTMVYAQNKRQQVVLTERWAQGHPAIHFSSMHPGWADTPDRNEQELRKVVGEAQTASPLPRFLEIMMHEGKCQPQGHSSNDLEACWSSGGGEQNSLPDWPHQLHDLRQLTWALCSSFLLYKQGN

SEQ ID NO: 1406 - DNA, 1970 bp, Homo sapiens
gaggccgcgccgggagcgcggtggggctaggcgtggggcgctcccggcatgtccctgtaccgcagcgtcgtgtggttcgccaaggggctgcgcgagtacaccaagagtggctatgaatctgcatgtaaagactttgtccctcatgacttggaggtccagattcctggaagagtctttttggtcactggaggaaacagcggcattggcaaagcaactgcccttgaaatcgccaagcgagaacatttttctgcacattgtggacttgtctgatcccaagcaaatctggaaatttgttgaaaatttcaagcaggaacataaactccatgttctgatcaataatgcaggttgcatggtcaataaaagagagctcacagaagatggacttgaaaaaaactttgctgccaatactctgggtgtgtacattctcacgaccggcctgatccctgtgctggagaaagaacacgacccccgagtgataaccgtctcctcaggaggaatgttggttcagaaactgaacaccaatgatctccagtccgaaagaacaccatttgatggaactatggtctatgcacaaaacaagaggcagcaagtggttctgacggagcggtgggcccaagggcacccggccatccatttttcttccatgcatcctggctgggccgacaccccaggtgtgaggcaggcgatgccggggttccacgccaggttcggggaccgcctgcgctccgaggcccagggcgcggacaccatgctgtggctggccctctcctctgccgcagccgcacagcccagcggccgcttctttcaaggtgacttcctccctggctgtgaaggcagctgacacagggctaggggcagcagctgggccttcgaggcgcaccttcccctccgtgaaacctggggtgggactgtcccctggggggtgcctgggcttctttggcgagatgattgctttgcctgctgaggttagttttgggaagcgcttcactccaggttggtagcttctttggagacttgtgataaccctgtcatcaaggtcctgtgagaacgggagaggcagttcctaccttgggaatggaagattttctctgcagtttgctgaggcccaggaggggcgctattcaaagctgcactgcaaagggagtaacggactctgcttctctgcagtgcaaagggtgtaagggactctgcttctctatttttggaagcagtgatctgttcacgtctctccccagtgggctcctaagggggcaggcgtgtgagtggacgccatccgaagacagcacttgacctcgggtggaagccaggctctttgcttggcttctctttcctctgttcttgatgagaaccacccttgcttgaggaattctgaagcgctggtgacccctggggtatccgggaggatggccgcaccccttcctgctgatcacccaaacgtggtctcccgtccagccctggctgcagcctcccagttcccaaactgcactttacatatcaatccatgctgcctgatccctgtgggacctttgacagcagggatgggggtctaacagctgtagggtgctgccactccagcaggcgtcggttcaaggcctgagcagcacagggacatggacccagccacgctgcagcagctcacacctctctgcggttccctctcacttttagatcggaagccagtttctacacacttgcctctcgctacagcgtcctcctcaccggccgaagaggagaaactcattgaaatcctggaacagctggctcagacatttaaataggccaacccagacacagtgcggtaccagaattgccttagaagataccagaaggtgcggtctagggaccagtgaataagaagaccccacttcaacttcccctcgaagacgttgtgcctcacagcgaggcctacaagggatgggaacttttatttcaaaataaatactaccgaggctgtgatcaggctcaccttg

SEQ ID NO: 1407 - protein, 242 aa, Homo sapiens
MNLHVKTLSLMTWRSRFLEESFWSLEETAALAKQLPLKSPSENIFLHIVDLSDPKQIWKFVENFKQEHKLHVLINNAGCMVNKRELTEDGLEKNFAANTLGVYILTTGLIPVLEKEHDPRVITVSSGGMLVQKLNTNDLQSERTPFDGTMVYAQNKRQQVVLTERWAQGHPAIHFSSMHPGWADTPGVRQAMPGFHARFGDRLRSEAQGADTMLWLALSSAAAAQPSGRFFQGDFLPGCEGS

SEQ ID NO: 1408 - DNA, 2745 bp, Homo sapiens
ggaacctggcattgatcctcagtttagaacaggccagttaccatattgtccggagtgggtccttgacattcaggaaagatacatccttagacctttcaaaatttgtcatgcctctctaacctaaaacagccctcattaaatgcactttaatccgagcactgtatggcttggaaagaattatgagtgaggagaggagcctttccttattggccaaagccgtggatcccagacaccccaatatgatgacagatgtggttaaacttctctctgcggtatgcattgtaggggaagaaagcatccttgaagaagttttagaagctttaacttcagctggtgaagaaaaaaaaattgacagatttttttgtattgtggaaggcctccggcacaattcagttcaactgcaagtagcttgtatgcagctcatcaatgccctggttacatctcctgatgatttggatttcaggcttcacatcagaaatgaatttatgcgttgtggattgaaagagatattgccaaatttaaaatgcattaagaatgatggcctggatatccaacttaaagtctttgatgagcataaagaagaagatttgtttgagttatcccatcgccttgaagatattagagctgaacttgatgaagcatatgatgtttacaacatggtgtggagcacagttaaagaaactagagcagagggatattttatttctattcttcagcatcttttgctgattcgaaatgattattttataaggcaacaatacttcaaattaattgatgagtgtgtatcccagattgtattgcatagagatggaatggatccagacttcacatatcgaaaaagactagatttagatttaacccagtttgtagacatttgcatagatcaagcaaaactagaagagtttgaagagaaagcatcagaactttacaagaaatttgaaaaagagtttaccgaccaccaagaaactcaggctgaattgcagaaaaaagaggcaaagattaatgagcttcaagcagagctacaagcttttaagtctcagtttggtgccttgccagctgattgtaatattcctttgcctccctctaaagaaggtggaactggccactcagcacttcctcctccgcctccactgccttctggtggaggggtgccgcctccacctcctcccccaccacctcctccacttccaggaatgcggatgccattcagtggtcctgtgcctccaccacctcccctgggattccttggaggacaaaattctcctcctctaccaatcctgccatttgggttgaaaccaaagaaagaatttaaacctgaaatcagcatgagaagattgaattggttaaagatcagacctcatgaaatgactgaaaactgtttctggataaaagtaaatgaaaataagtatgaaaacgtggatttgctttgtaaacttgagaatacattttgttgccaacaaaaagagagaagagaagaggaagatattgaagagaagaaatcgattaagaaaaaaattaaagaacttaagtttttagattctaaaattgcccagaacctttcaatcttcctgagctcttttcgggtgccatatgaggaaatcagaatgatgatattggaagtagatgaaacacggttggcagagtctatgattcagaacttaataaagcatcttcctgatcaagagcaattaaattcattgtctcagttcaagagtgaatatagcaacttatgtgaacctgagcagtttgtggttgtgatgagcaatgtgaagagactacggccacggctcagtgctattctctttaagcttcagtttgaagagcaggtgaacaacatcaaacctgacatcatggctgtcagtactgcctgcgaagagataaagaagagcaaaagctttagcaagttgctggaacttgtattgctaatgggaaactacatgaatgctggctcccggaatgctcaaaccttcggatttaaccttagctctctctgtaaactaaaggacacaaaatcagcagatcagaaaacaacgctacttcatttcctggtagaaatatgtgaagagaagtaccctgatatactgaattttgtggatgatttggaacctttagacaaagctagtaaagtctctgtagaaacgctggaaaagaatttgaggcagatgggaaggcagcttcaacagcttgagaaggaattggaaacctttccccctcctgaggacttgcatgacaagtttgtgacaaagatgtccagatttgttatcagtgcaaaagaacaatatgagacactttcgaagttacacgaaaacatggaaaagttataccagagtataataggatactatgccattgatgtgaagaaggtgtctgtggaagactttcttactgacctgaataacttcagaaccacattcatgcaagcaataaaggagaatatcaaaaaaagagaagcagaggaaaaagaaaaacgtgtcagaatagctaaagaattagcagagcgagaaagactcgaacgccaacaaaagaaaaagcgtttattagaaatgaagactgagggtgatgagacaggagtgatggataatctgctggaggccttgcagtccggggctgccttccgcgacagaagaaaaaggacaccgatgccaaaagatgttcggcagagtctcagtccaatgtctcagaggcctgttctgaaagtttgtaaccatggtaataaaccgtatttataaattgcaaaaaaaaaaa

SEQ ID NO: 1409 - protein, 849 aa, Homo sapiens
MSEERSLSLLAKAVDPRHPNMMTDVVKLLSAVCIVGEESILEEVLEALTSAGEEKKIDRFFCIVEGLRHNSVQLQVACMQLINALVTSPDDLDFRLHIRNEFMRCGLKEILPNLKCIKNDGLDIQLKVFDEHKEEDLFELSHRLEDIRAELDEAYDVYNMVWSTVKETRAEGYFISILQHLLLIRNDYFIRQQYFKLIDECVSQIVLHRDGMDPDFTYRKRLDLDLTQFVDICIDQAKLEEFEEKASELYKKFEKEFTDHQETQAELQKKEAKINELQAELQAFKSQFGALPADCNIPLPPSKEGGTGHSALPPPPPLPSGGGVPPPPPPPPPPPLPGMRMPFSGPVPPPPPLGFLGGQNSPPLPILPFGLKPKKEFKPEISMRRLNWLKIRPHEMTENCFWIKVNENKYENVDLLCKLENTFCCQQKERREEEDIEEKKSIKKKIKELKFLDSKIAQNLSIFLSSFRVPYEEIRMMILEVDETRLAESMIQNLIKHLPDQEQLNSLSQFKSEYSNLCEPEQFVVVMSNVKRLRPRLSAILFKLQFEEQVNNIKPDIMAVSTACEEIKKSKSFSKLLELVLLMGNYMNAGSRNAQTFGFNLSSLCKLKDTKSADQKTTLLHFLVEICEEKYPDILNFVDDLEPLDKASKVSVETLEKNLRQMGRQLQQLEKELETFPPPEDLHDKFVTKMSRFVISAKEQYETLSKLHENMEKLYQSIIGYYAIDVKKVSVEDFLTDLNNFRTTFMQAIKENIKKREAEEKEKRVRIAKELAERERLERQQKKKRLLEMKTEGDETGVMDNLLEALQSGAAFRDRRKRTPMPKDVRQSLSPMSQRPVLKVCNHGNKPYL

SEQ ID NO: 1410 - DNA, 2760 bp, Homo sapiens
ccaggatttctctcttcctatttcaggaggactctcacaggctcccacagcctgtgttaagctgaggtttcccctagatctcgtatatccccaacacatacctccacgcacacacatccccaagaacctcgagctcacaccaacagacacacgcgcgcatacacactcgctctcgcttgtccatctccctcccgggggagccggcgcgcgctcccacctttgccgcacactccggcgagccgagcccgcagcgctccaggattctgcggctcggaactcggattgcagctctgaacccccatggtggttttttaaacacttcttttccttctcttcctcgttttgattgcaccgtttccatctgggggctagaggagcaaggcagcagccttcccagccagcccttgttggcttgccatcgtccatctggcttataaaagtttgctgagcgcagtccagagggctgcgctgctcgtcccctcggctggcagaagggggtgacgctgggcagcggcgaggagcgcgccgctgcctctggcgggctttcggcttgaggggcaaggtgaagagcgcaccggccgtggggtttaccgagctggatttgtatgttgcaccatgccttcttggatcggggctgtgattcttcccctcttggggctgctgctctccctccccgccggggcggatgtgaaggctcggagctgcggagaggtccgccaggcgtacggtgccaagggattcagcctggcggacatcccctaccaggagatcgcaggggaacacttaagaatctgtcctcaggaatatacatgctgcaccacagaaatggaagacaagttaagccaacaaagcaaactcgaatttgaaaaccttgtggaagagacaagccattttgtgcgcaccacttttgtgtccaggcataagaaatttgacgaatttttccgagagctcctggagaatgcagaaaagtcactaaatgatatgtttgtacggacctatggcatgctgtacatgcagaattcagaagtcttccaggacctcttcacagagctgaaaaggtactacactgggggtaatgtgaatctggaggaaatgctcaatgacttttgggctcggctcctggaacggatgtttcagctgataaaccctcagtatcacttcagtgaagactacctggaatgtgtgagcaaatacactgaccagctcaagccatttggagacgtgccccggaaactgaagattcaggttacccgcgccttcattgctgccaggacctttgtccaggggctgactgtgggcagagaagttgcaaaccgagtttccaaggtcagcccaaccccagggtgtatccgtgccctcatgaagatgctgtactgcccatactgtcgggggcttcccactgtgaggccctgcaacaactactgtctcaacgtcatgaagggctgcttggcaaatcaggctgacctcgacacagagtggaatctgtttatagatgcaatgctcttggtggcagagcgactggaggggccattcaacattgagtcggtcatggacccgatagatgtcaagatttctgaagccattatgaacatgcaagaaaacagcatgcaggtgtctgcaaaggtctttcagggatgtggtcagcccaaacctgctccagccctcagatctgcccgctcagctcctgaaaattttaatacacgtttcaggccctacaatcctgaggaaagaccaacaactgctgcaggcacaagcttggaccggctggtcacagacataaaagagaaattgaagctctctaaaaaggtctggtcagcattaccctacactatctgcaaggacgagagcgtgacagcgggcacgtccaacgaggaggaatgctggaacgggcacagcaaagccagatacttgcctgagatcatgaatgatgggctcaccaaccagatcaataatcccgaggtggatgtggacatcactcggcctgacactttcatcagacagcagattatggctctccgtgtgatgaccaacaaactaaaaaacgcctacaatggcaatgatgtcaatttccaggacacaagtgatgaatccagtggctcagggagtggcagtgggtgcatggatgacgtgtgtcccacggagtttgagtttgtcaccacagaggcccccgcagtggatcccgaccggagagaggtggactcttctgcagcccagcgtggccactccctgctctcctggtctctcacctgcattgtcctggcactgcagagactgtgcagataatcttgggtttttggtcagatgaaactgcattttagctatctgaatggccaactcacttcttttcttacactcttggacaatggaccatgccacaaaaacttaccgttttctatgagaagagagcagtaatgcaatctgcctccctttttgttttcccaaagagtaccgggtgccagactgaactgcttcctctttccttcagctatctgtggggaccttgtttattctagagagaattcttactcaaatttttcgtaccaggagattttcttaccttcatttgcttttatgctgcagaagtaaaggaatctcacgttgtgagggtttttttttttctcatttaaaataaaaaaggaagaaagaaaataattttccttgtaaaatcgggccaaaccccaagacagctacattttcaacaaaaaagcaaacagagaaaaataaatgaactttaacactgtaagttcagcattgacagcc

SEQ ID NO: 1411 - protein, 555 aa, Homo sapiens
MPSWIGAVILPLLGLLLSLPAGADVKARSCGEVRQAYGAKGFSLADIPYQEIAGEHLRICPQEYTCCTTEMEDKLSQQSKLEFENLVEETSHFVRTTFVSRHKKFDEFFRELLENAEKSLNDMFVRTYGMLYMQNSEVFQDLFTELKRYYTGGNVNLEEMLNDFWARLLERMFQLINPQYHFSEDYLECVSKYTDQLKPFGDVPRKLKIQVTRAFIAARTFVQGLTVGREVANRVSKVSPTPGCIRALMKMLYCPYCRGLPTVRPCNNYCLNVMKGCLANQADLDTEWNLFIDAMLLVAERLEGPFNIESVMDPIDVKISEAIMNMQENSMQVSAKVFQGCGQPKPAPALRSARSAPENFNTRFRPYNPEERPTTAAGTSLDRLVTDIKEKLKLSKKVWSALPYTICKDESVTAGTSNEEECWNGHSKARYLPEIMNDGLTNQINNPEVDVDITRPDTFIRQQIMALRVMTNKLKNAYNGNDVNFQDTSDESSGSGSGSGCMDDVCPTEFEFVTTEAPAVDPDRREVDSSAAQRGHSLLSWSLTCIVLALQRLCR

SEQ ID NO: 1412 - DNA, 1321 bp, Homo sapiens
gcggccgctgcccgctttgcgccgctcctccctgcgcgagtagcgctggccccggcgtcgaggcggccatggcgacccggagcccgctccccacccaccccgcctgctccgccctcccctccgccccgcgccacctttgatggctcggacctcagccggccaccgccagccctgctcgcgcgcccgcgccgccgccgcccgcgggtattaatagccggcgccgccgcgccctcggccgccgggggcttgggagccgccgatcccggagcccgagccgggagagggagccgccgcagccgccggcgctgtggagatattctctaagccgctttcatcatgggagaaatagagcagaggccgaccccaggatcacgactgggggccccggaaaattcggggatcagtaccttggaacgtggacagaagccgcccccaacaccttcaggaaaactcgtgtccatcaaaatccagatgctggatgacacccaggaggcatttgaagttccaatggtgtcctcatcctccttcctcaaagccaccggctcctcctggacgggttgggtactgagatgctccatgaagcccaagcaccattcacatctaattgagaagtttggagaggacagaattctcactcatcttacaggctctatttcttacacaaactgggctggaagtagaagcttagcggtcacagtcactgaagagcttcttaatcttttttgagtcaggacttgaagtcctgtttcattatttcattcaaagaaattgattggcaatggccagagttaaattcaaaggtgacattaacacatttcagtgcccaataagtgatttttctgctgggtaggagtagatacagatgtgatctcagatacgtgaagctgcatacagaggggcccatccactcctaaacgggtctccaggaggcttggtttgatctactagatttggtgcctcttaaagggaagcaatacagcttttctgctgtgggttgtttgccactaggggaagattcatttctattccagccataaattagaccaaagagagggatttggtttattgctagtgcagaagttaaaaaccatcttcctttcctgagtggtctcttaattagattctttagtttttaaatgttaactggaattgctgaagtttaattcctgaaagggtttagtttttaaaaggagtacctcatttaccatattactgtgttctgagaaatctacagtaatttttgtgtaacttttttattcaaagaatggattgttaattgtaaagccatttagaaaggcgaataaagtcagatctactttaa

SEQ ID NO: 1413 - protein, 129 aa, Homo sapiens
MGEIEQRPTPGSRLGAPENSGISTLERGQKPPPTPSGKLVSIKIQMLDDTQEAFEVPMVSSSSFLKATGSSWTGWVLRCSMKPKHHSHLIEKFGEDRILTHLTGSISYTNWAGSRSLAVTVTEELLNLF

SEQ ID NO: 1414 - DNA, 5028 bp, Homo sapiens
gcggccgctgcccgctttgcgccgctcctccctgcgcgagtagcgctggccccggcgtcgaggcggccatggcgacccggagcccgctccccacccaccccgcctgctccgccctcccctccgccccgcgccacctttgatggctcggacctcagccggccaccgccagccctgctcgcgcgcccgcgccgccgccgcccgcgggtattaatagccggcgccgccgcgccctcggccgccgggggcttgggagccgccgatcccggagcccgagccgggagagggagccgccgcagccgccggcgctgtggagatattctctaagccgctttcatcatgggagaaatagagcagaggccgaccccaggatcacgactgggggccccggaaaattcggggatcagtaccttggaacgtggacagaagccgcccccaacaccttcaggaaaactcgtgtccatcaaaatccagatgctggatgacacccaggaggcatttgaagttccacaaagagctcctgggaaggtgctgctggatgcagtttgcaaccacctcaacctcgtggaaggtgactattttggcctcgagtttcctgatcacaaaaagatcacggtgtggctggatctcctaaaacccattgtgaaacagattagaaggccaaagcacgttgttgttaagtttgtggtgaaattctttccgcctgaccacacacaactccaagaagaactcacaaggtacctgttcgcgctgcaggtgaagcaggacttggctcaaggcaggttgacgtgtaatgacaccagcgcagctctcttgatttcacacattgtgcaatctgagattggggattttgatgaagccttggacagagagcacttagcaaaaaataaatacatacctcagcaagacgcactagaggacaaaatcgtggaatttcaccataaccacattggacaaacaccagcagaatcagatttccagctcctagagattgcccgtcggctagagatgtatggaatccggttgcacccggccaaggacagggaaggcacgaagatcaatctggccgttgccaacacgggaattctagtgtttcagggtttcactaagatcaatgccttcaactgggccaaggtgcggaagctgagcttcaagaggaagcgctttctcatcaagctccggccagatgccaatagtgcgtaccaggataccttggaattcctgatggccagtcgggatttctgcaagtccttctggaaaatctgtgttgaacatcatgccttctttagactttttgaagagcccaaaccaaagcccaagcccgtcctctttagccgggggtcatcatttcggttcagtggtcggactcagaagcaggttctcgactatgttaaagaaggaggacataagaaggtgcagtttgaaaggaagcacagcaagattcattctatccggagccttgcttcacagcctacagaactgaattcggaagtgctggagcagtctcagcagagcaccagccttacatttggagaaggtgccgaatctccagggggccagagctgccggcgaggaaaggaaccgaaggtttccgccggggagccggggtcgcacccgagccctgcgccgaggagaagccccgcgggtaacaagcaggcggacggagccgcctcggcgcccacggaggaagaggaggaggtcgttaaggataggacccagcagagtaaacctcagcccccgcagccaagcacaggctccctgactggcagtcctcacctttccgagctgtctgtgaactcgcaggggggagtggcccctgccaacgtgaccttgtctcccaacctgagccccgacaccaagcaggcctctcccttgatcagcccgctgctgaatgaccaggcctgcccccggacggacgatgaggatgagggccggaggaagagattcccaactgataaagcgtacttcatagctaaggaagtgtctaccaccgagcgaacatatctgaaggatctcgaagttatcacttcgtggtttcagagcacagtgagcaaagaggacgccatgccggaagcactgaaaagtctcatattcccgaattttgaacctttgcacaaatttcatactaattttctcaaggaaattgagcaacgacttgccctgtgggaaggccgctcaaatgcccaaatcagagattaccaaagaatcggcgatgtcatgctgaagaacattcagggcatgaagcacctggcggctcacctgtggaagcacagcgaggccttggaggccctggagaatggaatcaagagctcccggcggctggagaacttctgcagagactttgagctgcagaaggtgtgttacctaccgctcaacaccttcctcctgcggccactgcaccggctcatgcactacaagcaggtcctggagcggctgtgcaaacaccacccgccgagccacgccgacttcagggactgccgagccgctttggcagagatcacggagatggtggcacagctccacggtacgatgatcaagatggagaatttccagaagctgcacgaactcaagaaagatttgattggcattgacaatcttgtggttccgggaagggagttcatccgtctgggcagcctcagcaagctctcggggaaggggctccagcagcgcatgttcttcctgttcaacgacgtcctgctatacacgagccgggggctgacggcctccaatcagtttaaagtccacgggcagctcccgctctatggcatgacgattgaggagagcgaagacgagtggggggtgccccactgcctgaccctccggggccagcggcagtccatcatcgtggccgccagttctcggtccgagatggagaagtgggttgaggacatccagatggccattgacctggcggagaagagcagcagccccgcccctgagttcctggccagcagcccccctgacaacaagtcccctgatgaagccaccgcggctgaccaggagtcagaggatgacctgagcgcctcgcgcacatcgctggagcgccaggccccgcaccgcggcaacacaatggtgcacgtgtgctggcaccgcaacaccagcgtctccatggtggacttcagcatcgcagtggagaatcagttgtctggaaacctgctgaggaaattcaaaaacagcaacgggtggcagaagctgtgggtggtgttcacaaacttctgcctgttcttctacaaatcacaccaggacaatcatccccttgccagcctgcctctgctcggctactcgctcaccatcccctctgagtccgagaacatccagaaagactacgtgttcaagctgcacttcaagtcccacgtctactacttcagggcggaaagcgagtacacgttcgaaaggtggatggaagtgatccgcagtgccaccagctctgcctcgcgaccccacgtgttgagtcacaaagagtctcttgtgtattgatggccggacacactcgtttccgcagtggctgctttcctggaagacgtttcctttcttctgtattaatgaagcctggtaaaattaacacctgtctgaaaatcaaaaacatggcttcccagcagctctcctgtctccacagccgcgttttttaaccccgacctctcagcgtctgaatgaacagcgctcccacctccagtcctggcatccgctgggggcgctgttctttagctagtgccagtattaaaacattgtcattacgagagtgccaaatgacatcttccctccaccctgcccctgaaaaacagtacacacacatccgttcaacacaagacagggcaagtgtttttcttcctaaaaaaagttctttcttttattattttcacctattggctgctgcattttacgaagtggacttcccggtgtttgtttgtttgtttgcaatacactcagtgcagccttaagcaaatgagatcattttcagatttcattttttttttcagtctttctacttttgtaataataggaagttagtaggactcacttctctgattaataagcaatttgcagcacacagcgttccactgcggggtttcacgctcacctgaaaacacctgttcccaacctacttcttggtgcaagttgaccaaatcgttttaagtggtaactctttccaaccgtagcagggttgttttctgttaagcaaagccgagatccagtgcaatacctggactgtcaccgtcctgtgagtggtgtacacaatgggaagataataagccgtggtgttttgctgtctgtctgtgtcacaagcatgaaaacccgtgtgtcattgatcagcaccatttgtggtatgttccgtgatgagcgtttagtgagcctgctggctgcagagcactatgaaatcatggtacgtagtccccggcacctgtcgttattcctatatcctcctgcaactgtggtttgaaactgcgcattctctagtagtatatatcgtgcctgtcttcaaaaacatttccctttttatactcattccccccaggcatggggtagtgtcagtcggactgcacagggaacacggtttccagtggctttggcccctactcgggaaacgtctgcctgttctcgatggtgatggggtggctgccattcccttggttttcctaagccctttctaacgagagtctcaaacaagcggaggcgagggccaattcaaccccattctttccagcgccccgcaccatagcacctgcccacctgagaaccaggaacgcaccctctctgtggagctctgactggtgtagctggaaacaaacagcaacttgcaaacggacgaagagcctgccgtgtgttaatcatttgccttacaagatgtaccagacggtttccagtactaacaaagggaataaaaatacctcacgccacaatccagcatattgatgttttaaggcaaaacaaaaaaaaaaaaaaaaaaaaaaaaaaaaaaaaaaaaaaaaaaaaaaaaaaaaaaaaaaaaaaaaaaaaaaaaaaaaaaaaaaaaaaaaaaaaaaaaaaaaaaaa

SEQ ID NO: 1415 - protein, 1045 aa, Homo sapiens
MGEIEQRPTPGSRLGAPENSGISTLERGQKPPPTPSGKLVSIKIQMLDDTQEAFEVPQRAPGKVLLDAVCNHLNLVEGDYFGLEFPDHKKITVWLDLLKPIVKQIRRPKHVVVKFVVKFFPPDHTQLQEELTRYLFALQVKQDLAQGRLTCNDTSAALLISHIVQSEIGDFDEALDREHLAKNKYIPQQDALEDKIVEFHHNHIGQTPAESDFQLLEIARRLEMYGIRLHPAKDREGTKINLAVANTGILVFQGFTKINAFNWAKVRKLSFKRKRFLIKLRPDANSAYQDTLEFLMASRDFCKSFWKICVEHHAFFRLFEEPKPKPKPVLFSRGSSFRFSGRTQKQVLDYVKEGGHKKVQFERKHSKIHSIRSLASQPTELNSEVLEQSQQSTSLTFGEGAESPGGQSCRRGKEPKVSAGEPGSHPSPAPRRSPAGNKQADGAASAPTEEEEEVVKDRTQQSKPQPPQPSTGSLTGSPHLSELSVNSQGGVAPANVTLSPNLSPDTKQASPLISPLLNDQACPRTDDEDEGRRKRFPTDKAYFIAKEVSTTERTYLKDLEVITSWFQSTVSKEDAMPEALKSLIFPNFEPLHKFHTNFLKEIEQRLALWEGRSNAQIRDYQRIGDVMLKNIQGMKHLAAHLWKHSEALEALENGIKSSRRLENFCRDFELQKVCYLPLNTFLLRPLHRLMHYKQVLERLCKHHPPSHADFRDCRAALAEITEMVAQLHGTMIKMENFQKLHELKKDLIGIDNLVVPGREFIRLGSLSKLSGKGLQQRMFFLFNDVLLYTSRGLTASNQFKVHGQLPLYGMTIEESEDEWGVPHCLTLRGQRQSIIVAASSRSEMEKWVEDIQMAIDLAEKSSSPAPEFLASSPPDNKSPDEATAADQESEDDLSASRTSLERQAPHRGNTMVHVCWHRNTSVSMVDFSIAVENQLSGNLLRKFKNSNGWQKLWVVFTNFCLFFYKSHQDNHPLASLPLLGYSLTIPSESENIQKDYVFKLHFKSHVYYFRAESEYTFERWMEVIRSATSSASRPHVLSHKESLVY

SEQ ID NO: 1416 - DNA, 1381 bp, Homo sapiens
gccacggccgttgggagcctgagactcaaacatggcagcgccaccttctccaggaaggacggccgaccaagcagaccaggtatgcaccttcctcttcaaaaagcctggacggaaaggggctgcaggcctcagaaagcgcccggcctgcgaccccgagcacggagagagcagcagcagcggggacgagggcgacacagtggctcagcccccgcgggtggcaccgaggccccggggcctccacagctggcagaaggcggctcacggcgacaggaggggcgaggaggcggcgcctgagagcctcgacgtggtgtacaggtccacccgctcggcgaagcctgtggggccagaggacatgggggccaccgctgacttcgagcaggacaccgagaaggagcaccatacgccgaccatcctcaagtgcagccagcgggtccaggaggcactgcggggtcgggagcacgaccacatctaccggggaatccacagctacctgaggtacctgaagcccaaggacacgtccatgggcaactcctcctcggggatggcgaggaagggccccatacgtgcgccagggcatctgcgcgccactgtgcgctgggattaccagcctgacatctgcaaggactacaaggagactggcttctgtggcttcggggacagctgcaaattcctccacgaccgttccgattacaagctcgggtgggagattgaacgggagcttgaagagggtcgctactgtatctgcgaggacgaaaaccatgaagtgggaagcgaggaagaggaaataccattcaggtgtttcatatgtcgccaggccttccaaaacccagtcgtcaccaagtgcaggcattatttctgcgagagctgcgcgctggagcacttccgggccaccccgcgctgctacatctgtgaccagccaaccggcggcatctttaaccccgccaaagaactgatggcgaaactgcaaaagcttcaggctgcagaaggaaaaaagagataagaaagactcaagtctgtatgtacactggggagaagcagcctgttgagtaagatgagagagatgacagtcttcctgcaatcccatgcctgagtatgtaaccaaaagaattgaaatccggatctcaaagaggtatgtgcactcccatgttcactgcagaattatttgcaaaagccaagaggtgtaaacaacccaagtgtccatggatggatgaatggacaaacaaaatgcgatacacacacacaatggaatgctattaagccttaacgggaaggaaatccttttaaagatttaaactgatccttttaaggatcacatgctacaactagaatgaaccttgaagacgacactgctaagtgaaataaactagtcacaaaatgaaaa

SEQ ID NO: 1417 - protein, 322 aa, Homo sapiens
MAAPPSPGRTADQADQVCTFLFKKPGRKGAAGLRKRPACDPEHGESSSSGDEGDTVAQPPRVAPRPRGLHSWQKAAHGDRRGEEAAPESLDVVYRSTRSAKPVGPEDMGATADFEQDTEKEHHTPTILKCSQRVQEALRGREHDHIYRGIHSYLRYLKPKDTSMGNSSSGMARKGPIRAPGHLRATVRWDYQPDICKDYKETGFCGFGDSCKFLHDRSDYKLGWEIERELEEGRYCICEDENHEVGSEEEEIPFRCFICRQAFQNPVVTKCRHYFCESCALEHFRATPRCYICDQPTGGIFNPAKELMAKLQKLQAAEGKKR

SEQ ID NO: 1418 - DNA, 6874 bp, Homo sapiens
ctgcgctcggagactttcagtgaaagcagaggagagatttccaaaggttgtattttccttctggttggagcctctcatccacattgtggttgctttcagctatgtaacgtttttcgatcccatgagatggaaatcgaccagtgcttgctagagtcccttccccttggccaacggcagcgtctagtgaagcgcatgcgctgtgagcaaatcaaagcctactatgagcgcgagaaggcttttcagaagcaggaagggttcctgaaaaggctgaagcatgcgaagaatccgaaagttcacttcaacctcacggacatgctacaggacgcgattatccaccacaatgacaaagaagtgcttcggctcctgaaggagggggcagacccccacaccctcgtctcctcgggagggtccctgctccatctgtgtgctcggtatgataatgccttcattgcagaaattctgattgacagaggagtcaacgtcaaccaccaggatgaagacttctggacgcccatgcacattgcctgtgcctgcgataaccctgatattgtcctgcttcttgtattagctggagccaatgtccttctccaggatgtgaatggaaatatcccattagattatgctgtagaagggacagaatccagctctatcctgttgacctatctggatgaaaatggagtggatttgacctcactgcgccagatgaagcttcagagaccaatgagtatgttaacagatgtcaaacacttcttatcatctggaggaaatgtcaatgagaaaaacgatgaaggagtaaccctgttacacatggcgtgtgcgagtggctacaaggaggtggtgtctcttatcctggaacatggtggagacctcaacatagtagatgatcagtactggactcccctccacttggcagccaaatatggccagacaaatctggtgaaacttctcctgatgcatcaggcaaacccacacctcgtgaactgtaatgaggagaaggcgtcagatattgctgcctctgagtttattgaggaaatgctgctgaaagccgaaattgcctgggaagaaaaaatgaaagagcctttatctgcttctaccttagctcaagaagagccctatgaagagatcattcacgatcttcccgtactgtcgagtaagctcagtcccctggtgttaccaattgccaagcaagacagtttgttggaaaaagacattatgttcaaagatgcaacaaaaggtctgtgtaagcagcagtctcaggacagcatccctgaaaaccccatgatgagcggttccaccaaacccgagcaggtcaagctaatgcctcctgccccaaacgatgacctggcaacgctcagcgagctcaatgatggcagcctgctctatgagattcagaagcgctttgggaacaatcagatctatacattcattggagacattcttttgcttgttaacccatacaaggagcttccaatttattcttccatggtgtcccagctgtatttcagctcctcagggaagctgtgttcctcgctgcctcctcacctcttctcctgtgtggagagagcctttcaccagctcttccgggaacagcggcctcagtgtttcatcctcagtggagaaaggggatcaggaaagtctgaagccagcaaacaaatcataagacacctcacctgcagggctggcgccagcagggccacactggattccagattcaaacatgtcgtgtgcatcttagaagcctttggacatgccaagaccacacttaatgatttgtccagttgcttcatcaagtattttgaactgcagttctgtgagaggaaacaacagctaaccggagccagaatttatacatatttgctagagaaatccagacttgtttcacaacctcttggccagagcaattttctcattttctacttgttgatggatgggttatctgctgaagaaaaatatggacttcatcttaataatttatgtgcacaccggtatttgaaccagaccatacaggatgatgcatccacaggggagcgttctctgaacagggagaaattggctgttttgaaacgagccctgaatgtagttggcttcagcagcttggaggtggagaatctgttcgtaattctagcagcaatattgcaccttggagacattcggtttactgccctgaatgaggggaactccgccttcgtttctgacctccagctcctggaacaagtggctggaatgttacaagtatcaacagatgaattggcatctgccttaacaactgatattcaatattttaaaggggatatgataatacgacgacataccatacagattgctgagtttttccgagacctcttggccaagtccctgtacagtcgtttgtttagctttttggtgaataccatgaattcttgcctccacagtcaagatgaacagaaaagcatgcagacattggatattggaatattggacatttttggttttgaagagtttcaaaagaatgaatttgaacaactttgtgtcaacatgaccaatgagaagatgcaccactatatcaatgaagtgctttttctccacgagcaagtggaatgtgtacaagagggagttaccatggaaacagcatattctcctggtaaccagaatggagttttggacttttttttccagaagccatctggatttctcaccttattggatgaagaaagtcaaatgatttggtcagtggaatcaaattttccaaaaaaactacaaagtctcctagaatcctcaaacacaaatgcggtgtactcccccatgaaggatgggaatgggaatgttgccctcaaagaccacggtacagccttcaccatcatgcactacgcaggaagggtaatgtatgatgttgttggggcgattgaaaaaaataaagactccctttcacagaatcttctatttgtaatgaaaactagtgaaaatgtcgtgatcaatcatttgttccagtcgaaattgtcacaaacaggatccctcgtatctgcctatccttcctttaaattccgaggacataagtctgccctgctcagtaagaaaatgacagcttcttcaattattggagaaaacaagaattatctagaacttagtaagttattaaaaaagaaaggaacttctacatttcttcaaagattggaacgaggagatccagtcaccatagcatcacaactcaggaaatcactaatggatattattggaaaacttcagaagtgcactccacacttcattcattgcatcaggcccaataactcaaagctgccagatacttttgataatttttacgtgtctgctcagctacaatatattggggtcctggagatggtgaagatcttccgatatggataccctgttcgcctttccttctcggatttcctgtcaaggtataagccactggctgatacattcctgcgtgagaagaaggaacagtcagctgccgagcgatgtcgacttgttctccagcagtgtaaattacaaggctggcagatgggagtccgaaaagtgtttctaaaatactggcatgctgaccaactcaatgatttgtgcctacagttgcagagaaaaattataacctgccaaaaagttatcagaggatttttagcacgccagcacctgcttcagagaataagcatcagacaacaagaggtgacttctatcaatagctttctgcagaacacagaggacatggggctgaaaacctacgatgccctggtcattcagaatgcttcagacattgcccgggaaaatgaccggctccgtagtgaaatgaacgctccctaccataaagagaagttagaggtcaggaacatgcaagaggaaggaagcaaaagaaccgatgacaagagtggacccaggcatttccaccccagctccatgtcagtctgcgcggccgtggatggcctgggccagtgcctcgttggcccgtccatctggtctccttcgctgcactcggtgttcagcatggatgacagcagcagcctcccgtctccacggaaacagcccccgcccaagccaaagagggaccccaacacccggctgagtgcttcctatgaggctgtgagcgcctgcctctccgcggccagggaagcggccaacgaagctctggcccggcccagaccgcacagcgacgactacagcaccatgaagaagattcctcctcgaaagcccaagcgcagccccaacaccaagctcagcggctcctacgaggagatatcggggtcccggcccggggacgcgaggcccgcgggcgccccgggggcagcagcgcgcgttctgacccccgggactccgcagtgcgcgctgcccccggcggcgcctccgggtgacgaggacgacagcgagcctgtgtacatcgagatgctggggcacgcggccaggcccgatagcccggaccccggggagtccgtgtacgaggagatgaagtgttgcctgcccgacgacggcggcccgggcgcgggctccttcctgctccacggcgcatcgccgcccctgctccaccgcgcgccggaggacgaggcggcggggcccccaggggacgcgtgcgacatcccgccgcccttccccaacctgctgccgcaccggccgcccctgctggtgttccccccgacccccgtcacctgctcccccgcctccgacgagtcgcccctgacacccctggaggtgaagaagctgccagtcctggagaccaacctcaagtaccccgtgcagccggaggggtcgagcccgctgtccccgcagtactccaagagccagaagggcgacggcgacaggcccgcgtcccccggcctggcgctgttcaacgggtccggccgagcctccccgccgtccacgccgcccccgcccccgcccccgcccgggccgccccccgcgccctacaggccctgcgcgcacttggccttcccgccggagcccgccccggtgaacgcggggaaagcggggccgagcgcagaggcgcccaaggtccacccaaagccaaactctgcccccgtggccgggccctgcagctccttccccaagatcccatattcccccgtgaaggccaccagggcggacgccaggaaggccggctccagtgcctcgccccccgcgccctacagccctcccagctccaggcctctcagcagccccctggacgagctcgccagcctcttcaactcggggaggagtgtgcttcggaaatccgcggcgggaagaaaaatcagggaagccgaaggttttgaaactaacatgaacataagtagccgagatgaccctagtacgtcagaaattacttccgagactcaagacagaaatgcaaataaccatggaattcagttatctaattcactatctagtgctataactgctgaaaatggaaattccatctcaaatggtttacctgaagaagatggatactcacggttgtctataagtggcacagggacttcgacatttcaaagacacagggacagtcacaccactcaggtaatccatcagctgaggctctcagagaatgaaagtgtggccctgcaggaactcttggactggaggagaaagctctgtgaggaaggacaagactggcagcagatcctgcaccacgctgagcccagggtgcctcccccaccaccttgcaagaagcccagccttctgaagaagccggaaggggcctcctgcaacaggctgccgtctgagctctgggacaccaccatttgatgtggcctgaactgcagacttacaaaatagaactgcctactgattccgggctgcaacaacagaaggctgccttctgacatgcgctggggcttctctccacgcatttagacaaaaaaagcacaggacacagacactaaatatatgagatcccgtgtgtgtgtgtgtgtgtttgtgtgtgtgtgtgtgggttctttcttatccatctcgtggtgatacactctgattttcaagctcctcatttacggctctgtgctacccctaggtagcaagagagaggctgggaaaagtgtggacgtggccagagcgagagagtagcggaggaaaggagcaatccatgcacactctgtacagttgtttttctacggttcaacagtctgtttattgtacttccaatggttttattataatacagtatacgggacatatattttatttctttgtagctacttgtgttttattggtattataaacctgataattatttacatgtttattactgtaattttataaatttatgcaattggtggtgcttcctttcttcaaaatacagattttaaaaaatcatttctagattatttttttcctccacagtccttttttttcacctaacgcacctaaatcttgaaactacattgttgttttagcttcgccagtgtcaccccttgcaaaactatgaattgagccccatgttttaggtgttactcatggatgaggaggctgttctttcctatgccctgtatttctggataagtggattgtgtaccctttagttaaatttcacctcccgacttcagcatagatcacaggaaatcacatggcacacggttaaacacgtatggcttcaaatccatagccggtggtgtaaaatgatcatattcattcaaaggcctacacagtacaaatgagcacgctgccatgtactggtttgagcagtaggggctgcatcgcacagcgctcgtcccccgggacttacactgcatgattccctcgctgtatatcctcaaccctcccataatgcaaggccttgttcattgatgtgctttcgtcggctgtcggaaagttctgagcagtggctccagaccaccttgtcttgctacttggaactttttattcataccagcctttgaaaagttactgtgccaataaagaggtacaactgtgttcttctatt

SEQ ID NO: 1419 - protein, 1858 aa, Homo sapiens
MEIDQCLLESLPLGQRQRLVKRMRCEQIKAYYEREKAFQKQEGFLKRLKHAKNPKVHFNLTDMLQDAIIHHNDKEVLRLLKEGADPHTLVSSGGSLLHLCARYDNAFIAEILIDRGVNVNHQDEDFWTPMHIACACDNPDIVLLLVLAGANVLLQDVNGNIPLDYAVEGTESSSILLTYLDENGVDLTSLRQMKLQRPMSMLTDVKHFLSSGGNVNEKNDEGVTLLHMACASGYKEVVSLILEHGGDLNIVDDQYWTPLHLAAKYGQTNLVKLLLMHQANPHLVNCNEEKASDIAASEFIEEMLLKAEIAWEEKMKEPLSASTLAQEEPYEEIIHDLPVLSSKLSPLVLPIAKQDSLLEKDIMFKDATKGLCKQQSQDSIPENPMMSGSTKPEQVKLMPPAPNDDLATLSELNDGSLLYEIQKRFGNNQIYTFIGDILLLVNPYKELPIYSSMVSQLYFSSSGKLCSSLPPHLFSCVERAFHQLFREQRPQCFILSGERGSGKSEASKQIIRHLTCRAGASRATLDSRFKHVVCILEAFGHAKTTLNDLSSCFIKYFELQFCERKQQLTGARIYTYLLEKSRLVSQPLGQSNFLIFYLLMDGLSAEEKYGLHLNNLCAHRYLNQTIQDDASTGERSLNREKLAVLKRALNVVGFSSLEVENLFVILAAILHLGDIRFTALNEGNSAFVSDLQLLEQVAGMLQVSTDELASALTTDIQYFKGDMIIRRHTIQIAEFFRDLLAKSLYSRLFSFLVNTMNSCLHSQDEQKSMQTLDIGILDIFGFEEFQKNEFEQLCVNMTNEKMHHYINEVLFLHEQVECVQEGVTMETAYSPGNQNGVLDFFFQKPSGFLTLLDEESQMIWSVESNFPKKLQSLLESSNTNAVYSPMKDGNGNVALKDHGTAFTIMHYAGRVMYDVVGAIEKNKDSLSQNLLFVMKTSENVVINHLFQSKLSQTGSLVSAYPSFKFRGHKSALLSKKMTASSIIGENKNYLELSKLLKKKGTSTFLQRLERGDPVTIASQLRKSLMDIIGKLQKCTPHFIHCIRPNNSKLPDTFDNFYVSAQLQYIGVLEMVKIFRYGYPVRLSFSDFLSRYKPLADTFLREKKEQSAAERCRLVLQQCKLQGWQMGVRKVFLKYWHADQLNDLCLQLQRKIITCQKVIRGFLARQHLLQRISIRQQEVTSINSFLQNTEDMGLKTYDALVIQNASDIARENDRLRSEMNAPYHKEKLEVRNMQEEGSKRTDDKSGPRHFHPSSMSVCAAVDGLGQCLVGPSIWSPSLHSVFSMDDSSSLPSPRKQPPPKPKRDPNTRLSASYEAVSACLSAAREAANEALARPRPHSDDYSTMKKIPPRKPKRSPNTKLSGSYEEISGSRPGDARPAGAPGAAARVLTPGTPQCALPPAAPPGDEDDSEPVYIEMLGHAARPDSPDPGESVYEEMKCCLPDDGGPGAGSFLLHGASPPLLHRAPEDEAAGPPGDACDIPPPFPNLLPHRPPLLVFPPTPVTCSPASDESPLTPLEVKKLPVLETNLKYPVQPEGSSPLSPQYSKSQKGDGDRPASPGLALFNGSGRASPPSTPPPPPPPPGPPPAPYRPCAHLAFPPEPAPVNAGKAGPSAEAPKVHPKPNSAPVAGPCSSFPKIPYSPVKATRADARKAGSSASPPAPYSPPSSRPLSSPLDELASLFNSGRSVLRKSAAGRKIREAEGFETNMNISSRDDPSTSEITSETQDRNANNHGIQLSNSLSSAITAENGNSISNGLPEEDGYSRLSISGTGTSTFQRHRDSHTTQVIHQLRLSENESVALQELLDWRRKLCEEGQDWQQILHHAEPRVPPPPPCKKPSLLKKPEGASCNRLPSELWDTTI

SEQ ID NO: 1420 - DNA, 1514 bp, Homo sapiens
gccagagcctagaccagtgagccaactgtgcgaaccagacccggcagccttgctcagttcagcatagcggagcggatccgatcggatcggagcggatcggagcacaccggagcaggctcatcgagaaggcgtctgcgagaccatggagaacggatacacctatgaagattataagaacactgcagaatggcttctgtctcacactaagcaccgacctcaagttgcaataatctgtggttctggattaggaggtctgactgataaattaactcaggcccagatctttgactacggtgaaatccccaactttccccgaagtacagtgccaggtcatgctggccgactggtgtttgggttcctgaatggcagggcctgtgtgatgatgcagggcaggttccacatgtatgaagggtacccactctggaaggtgacattcccagtgagggttttccaccttctgggtgtggacaccctggtagtcaccaatgcagcaggagggctgaaccccaagtttgaggttggagatatcatgctgatccgtgaccatatcaacctacctggtttcagtggtcagaaccctctcagagggcccaatgatgaaaggtttggagatcgtttccctgccatgtctgatgcctacgaccggactatgaggcagagggctctcagtacctggaaacaaatgggggagcaacgtgagctacaggaaggcacctatgtgatggtggcaggccccagctttgagactgtggcagaatgtcgtgtgctgcagaagctgggagcagacgctgttggcatgagtacagtaccagaagttatcgttgcacggcactgtggacttcgagtctttggcttctcactcatcactaacaaggtcatcatggattatgaaagcctggagaaggccaaccatgaagaagtcttagcagctggcaaacaagctgcacagaaattggaacagtttgtctccattcttatggccagcattccactccctgacaaagccagttgacctgccttggagtcgtctggcatctcccacacaagacccaagtagctgctaccttctttggccccttgctggagtcatgtgcctctgtccttaggttgtagcagaaaggaaaagattcctgtccttcacctttcccactttcttctaccagacccttctggtgccagatcctcttctcaaagctgggattacaggtgtgagcatagtgagaccttggcgctacaaaataaagctgttctcattcctgttctttcttacacaagagctggagcccgtgccctaccacacatctgtggagatgcccaggatttgactcgggccttagaactttgcatagcagctgctactagctctttgagataatacattccgaggggctcagttctgccttatctaaatcaccagagaccaaacaaggactaatccaatacctcttggattttatttaatgtcataatgttgtcagaataaagagaaagatgaaataaaaaaaaaaaaaaaa

SEQ ID NO: 1421 - protein, 289 aa, Homo sapiens
MENGYTYEDYKNTAEWLLSHTKHRPQVAIICGSGLGGLTDKLTQAQIFDYGEIPNFPRSTVPGHAGRLVFGFLNGRACVMMQGRFHMYEGYPLWKVTFPVRVFHLLGVDTLVVTNAAGGLNPKFEVGDIMLIRDHINLPGFSGQNPLRGPNDERFGDRFPAMSDAYDRTMRQRALSTWKQMGEQRELQEGTYVMVAGPSFETVAECRVLQKLGADAVGMSTVPEVIVARHCGLRVFGFSLITNKVIMDYESLEKANHEEVLAAGKQAAQKLEQFVSILMASIPLPDKAS

SEQ ID NO: 1422 - DNA, 10342 bp, Homo sapiens
catcatgcagcaggtcaaacaaggcatctcctagtattgcatcctacagatgtgctgtaaacatcaaaagaagacggtgggatcaggagatgctgttttggaaagaagtgaggtttagacttctccatgttaaccatgagcgtgacactttcccccctgaggtcacaggacctggatcccatggctactgatgcttcacccatggccatcaacatgacacccactgtggagcagggtgagggagaagaggcaatgaaggacatggactctgaccagcagtatgaaaagccacccccactacacacaggggctgactggaagattgtcctccacttacctgaaattgagacctggctccggatgacctcagagagggtccgagacctaacctattcagtccagcaggattcggacagcaagcatgtggatgtacatctagttcaactaaaggacatttgtgaagatatttctgatcatgttgagcaaatccatgccctccttgaaacagagttctccctaaagctgctgtcttactctgtcaacgtgatagtggacatccacgcagtgcagctcctctggcaccagcttcgagtctcagtgctggttctgcgggagcgcattctgcaaggtctgcaggacgccaatggcaactacactaggcagacggacattctgcaagctttctctgaagagacaaaagagggccggcttgattctctaacagaagtggatgactcaggacaattaaccatcaaatgttctcaaaattacttgtctctggattgtggcattactgcattcgaactgtctgactacagtccaagtgaggatttgctcagtgggctaggtgacatgacctctagccaagtcaaaaccaaaccctttgactcttggagctacagtgagatggaaaaggagtttcctgagcttatccgaagtgttggtttacttacggtagctgctgactctatctctaccaatggcagtgaagcagttactgaggaggtatctcaagtatctctctcagtagacgacaaaggtggatgtgaggaagacaatgcttctgcagtcgaagagcaaccaggcttaacactgggggtgtcatcatcttcaggagaagctctgacaaatgctgctcaaccctcctctgagactgtgcagcaagaatccagttcctcctcccatcatgatgcaaagaatcagcagcctgttccttgtgaaaatgcaacccccaaacgaaccatcagagattgctttaattataacgaggactctcccacgcagcctacattgccaaaaagaggactttttcttaaagaggaaacttttaagaatgatctgaaaggcaatggtggaaagaggcaaatggttgatctaaagcctgagatgagcagaagcaccccttcgctagtagatcctcctgacagatccaaactttgcctggtattgcagtcttcttaccccaacagcccttctgctgccagccagtcttatgagtgtttacacaaggtggggaatgggaaccttgaaaacacagtcaaatttcacattaaagaaatttcttccagcctgggaaggcttaacgactgctataaagagaaatctcgacttaaaaagccacacaagacctcagaagaggtgcctccatgccgaacacctaaacgggggactggttcaggcaaacaagctaaaaatacaaagagctcagcagtgccaaatggagagctttcttatacttccaaggccatagaggggccacaaacaaattctgcttccacatcctcacttgagccttgtaatcagagaagttggaatgccaaattgcaattgcagtcagaaacatccagttcaccagcttttactcagagcagtgaatcctctgttggctcagacaacatcatgtctccggtgccacttctttcaaaacacaaaagcaaaaaaggtcaagcctcctctccaagtcacgtcactaggaatggtgaggttgtggaggcctggtatggctctgatgaatacctagcactgccctctcaccttaagcagacagaagtattggctttgaagttggaaaacctaacaaagcttctgcctcagaaacccagaggagaaaccatccagaatattgatgactgggaactgtctgaaatgaattcagattctgaaatctatccaacctatcatgtcaaaaagaagcatacaaggctaggcagggtgtctccaagctcatctagtgacatagcctcttcactaggggagagcattgaatctgggcccctgagtgacattctttctgatgaggagtccagtatgcctctcgctggcatgaaaaagtatgctgatgagaagtcagaaagagcttcatcctctgagaaaaatgagagccattctgccactaaatcagctttaattcagaaactgatgcaagatattcagcaccaagacaactatgaagccatatgggaaaaaatagaggggtttgtaaacaaactggatgaattcattcaatggttaaatgaagccatggaaactacagagaattggactccccctaaagcagagatggatgaccttaaactgtatctggagacacacttgagttttaagttgaatgtagacagtcattgtgctctcaaggaagctgtggaggaggaaggacaccaacttcttgagcttattgcatctcacaaagcaggactgaaggacatgctgcggatgattgcaagtcaatggaaggagctgcagaggcaaatcaaacggcagcacagctggattctcagggctctggataccatcaaagccgagatactggctactgatgtgtctgtggaggatgaggaagggactggaagccccaaggctgaggttcaactatgctacctggaagcacaaagagatgctgttgagcagatgtccctcaagctgtacagcgagcagtataccagcagcagcaagcgaaaggaagagtttgctgatatgtcaaaagttcattcagtgggaagcaatgggcttctggactttgattcagaatatcaggagctctgggattggctgattgacatggagtcccttgtgatggacagccacgacctgatgatgtcagaggagcagcagcagcatctttacaagcgatacagtgtggaaatgtccatcagacacctgaaaaagacggagctgcttagtaaggttgaagctttgaagaaaggtggcgttttactaccaaatgatctccttgaaaaagtggattcaattaatgaaaaatgggaactgcttgggaaaaccctaggagagaagatccaggacacaatggcagggcacagtgggtcgagtccacgtgacctgctctctcctgaaagtggaagcctggtaaggcagctggaggtcaggatcaaagaactgaaaggatggctaagagatacagagcttttcatcttcaattcctgtctgagacaagaaaaggaaggaacaatgaatactgagaaacaactgcaatactttaagtccctctgtcgtgaaatcaagcaacgacgtcgaggagttgcctccattctgcgactatgccagcatcttttggatgaccgggagacttgcaatctgaatgcagaccaccagcccatgcagctgatcattgtaaatcttgaaagaaggtgggaagccattgtcatgcaagccgtccagtggcaaacacgtctacaaaagaagatgggaaaggaatctgagactttgaatgtgattgatcctggcttgatggacctaaatgggatgagtgaggatgccctggaatgggatgaaatggacataagtaacaagttaattagtttgaatgaggaatcaaatgaccttgatcaagaactccaacctgttatcccttccttgaagcttggagagacaagtaatgaggaccctggttatgacgaggaggctgataaccatgggggatctcagtatgcctcaaatattactgccccctctagtccacacatttaccaggtgtacagcctccacaatgttgaactctatgaggacaaccacatgccatttctgaaaaacaatccaaaggtcactggcatgacacagcctaatgttttaactaagagtctcagtaaagactcttcattttcatctaccaaatctttgccagatcttctaggtggttccaatttggtaaagccctgcgcatgtcatggaggagacatgagccagaattcaggcagtgagagtggaattgtcagtgaaggagacacagaaaccactaccaactctgaaatgtgcttgctcaatgcagtggatgggtccccaagtaaccttgaaactgaacatctggacccacaaatgggagatgcagttaacgtgttaaagcaaaaatttacagatgagggggaaagcattaagcttccaaatagctctcagtcgtccatttcaccagtgggttgtgtaaatggaaaagttggagatttaaacagtattaccaaacatacccctgactgtttgggagaagaattacaaggaaaacatgatgtgtttacattttatgattactcatacctccaaggctcaaaactcaaattaccaatgataatgaaacagtcacaaagcgaaaaagcgcatgtggaggatcccctgcttcgtggtttttattttgataaaaaatcatgcaaatctaaacatcagactacagagttacaaccagatgtacctccccatgaaaggattttggcaagtgcatctcatgaaatggatcgcatttcatataaaagtggcaatatagaaaagacattcactggcatgcagaatgccaaacagctctcccttttatctcatagttcatctattgagtccctttctccagggggtgatttatttggattgggcatctttaaaaatggcagtgacagcctccagcgaagcacttctttagaaagttggttgacttcctataaaagcaatgaagatctctttagctgtcacagctctggggatataagcgtgagcagtggctcagttggtgaactaagtaaaagaacattagatctcctgaatcgtttggagaatatccagagcccctcagagcaaaagataaaacgaagtgtttctgatatcactcttcaaagcagttcccaaaagatgtcctttactggccagatgtcattggacatagcatcttctatcaatgaagactcagcggcatctctaacagaacttagcagcagtgacgagctctctctttgctcagaggatattgtgttacacaagaacaagatcccggaatcgaatgcatcgttcaggaagcgtctgactcgttcagtggctgatgaaagcgatgtcaatgtcagcatgattgttaatgtctcttgcacctctgcttgcactgatgatgaagatgacagcgacctgctctccagctctacccttaccttgactgaagaagagctgtgcatcaaagatgaggatgacgactccagtattgcaacagatgatgaaatttatgaagactgcaccttgatgtcagggctagactacataaagaatgaattacagacctggattaggccaaaattgtctttgacaagagataagaaaaggtgcaatgtcagtgatgagatgaagggcagtaaagatataagtagcagtgagatgaccaatccctctgatactctgaatattgagacccttctaaatggctctgtaaaacgtgtctctgaaaataatggaaatggtaagaattcatctcatacccatgagttagggacaaagcgtgaaaataagaaaactattttcaaagttaataaagatccatatgtggctgacatggaaaatggcaatattgaaggtattccagaaaggcaaaagggaaaaccgaatgtgacttcaaaggtatcagaaaatcttggttcacatgggaaagagatttcagagagtgagcattgtaagtgtaaagcacttatggatagtttagatgattcaaatactgctggcaaggaatttgtttcccaagatgttagacatcttccaaagaaatgtccaaatcaccaccattttgaaaatcaaagcactgcctctactcccactgagaagtctttctcagaactggctttagaaaccaggtttaacaacagacaagactctgatgcactgaaatcatctgatgatgcaccgagtatggctggaaaatctgctggttgttgcctagcacttgaacaaaacggaacagaggaaaatgcttctatcagcaacatttcctgttgcaactgtgagccagatgttttccatcaaaaagatgccgaagattgttcagtacacaactttgttaaggaaatcattgacatggcttcgacagccctaaaaagtaaatctcaacctgaaaacgaggtggctgctcctacttcattaactcaaatcaaggagaaagtgttggagcattctcaccggcccatccagctgagaaaaggggacttttattcgtacttatctctctcatctcatgacagtgattgtggggaggtcaccaattacatagaagagaaaagcagcactccattgccactagacaccactgactcgggcttagatgacaaggaagatattgaatgcttttttgaggcctgtgttgagggtgactctgatggagaggagccttgtttctctagtgctcctccaaatgaatctgcagttcccagcgaagctgcaatgccactacaagcaacagcatgttcttctgagttcagtgatagttctctttcagctgatgatgcagatacagtggctctttcaagtccttcctctcaggaaagagctgaggttggaaaggaagtgaatggtttgccccaaacttccagtggctgtgcagaaaacttagagtttactccttcaaagcttgacagtgaaaaggaaagttccggaaaaccaggtgaatctggaatgccagaagaacataatgctgcttcagccaaatctaaagttcaagacctctccttgaaggcaaatcagccaacagacaaggccgcattgcatcccagccccaaaactttaacctgtgaagaaaatcttctaaaccttcatgaaaaacgacatagaaatatgcataggtagaatgtaccccctccccaagcatgaaaatcatctcactgaaagatacgcctggctgcaactcaggggtggcctcatcctcccgccctgggctggcctctggttccatcacgtttgtcactgccgtttattacattgacttctcccaagatgaatcttccttccaaatgtgttttctccacacaagccttgtgatctgaatgtgtgcgctggttctctttaggtgatcgtctttgaagttcagcaaagctgcttgttctcccatggattcctgtcccaagctacctctaccaaccctctctctccagctagacttttctctttgcctcctcccttcccttccactctttaaagttctgcagttcaccaactggtagtccattaaattctcctgtctagaatgacccccccaccagtacttgaccaatttcatgtatcaatctggatttttttttaacggtataatgactgtgtttattgaaagagttttacctaaaaagccaacatttgaattggttgcagcatagagaagaaacactggtccttctttcaaaattaagcaactattaaaagcgccattttatttatttcatttaaaaaataatctatgcagcatttcaagaaacaaccatatggtgttgtatattataaactggtgacattctactattgaattatgtacaacattttcattttttatgcttcttgaggtggtaatgagaaaaaagttttttaaaaaagtgtgccttgctgtatttcttataccatttattaaaaagctgctttcacggtaaaattatgttggtttgaaaggaggaaatagcaaggttaagatgtgtgaataatttctgtatatatgtataaccaagtacaaacattgatgtataatgacagtataaaatgctttcatgtttgtgatgtctagtgatgtggaaaatataagccttaaatccattagattgcatggtaattaaaattggcataataaacacagattattgggggaaaaggaaaattagtgatctcttctactatgttctttaccaaattgttgcatctggttctgaaaaagtatagcatgtagcagcttccaaacatattcatattgcttaagaggcttaacattacctaaactagagactagacgtaaagccttcagttttcaaaatctttctggtcactataaagatcttggaacagcaaatgattaaatgtcagttcccctaaaccaataaacatttatactagattttttatttccacttatcattaatgatttaatgttggatttcaggtaccttgtatgtcttaatttattttaaatatttattttgaatgagtttgatagaaagctagtagaaaagtacagaaaatttgactattatttatagatttcaggtatatttatatgtgtaaaagaaattgacaaagaaatatttcatctggcctttactgactcctgttaaatgcagttttaaatttatatcgtaacacctacttaagtgcctgacacagtaggtattcaataaaaatttactgaattaaaggattaaattaggtgacatggtgacatctatccctttattttgacactaaaacatggacacaactagaaagaggtacaatgcaatataaagtcacaatagataatatatatcaaatttctaaaaggtaaagaatgttgtgggttcatgcagtcacaggaatgacaatcattcaacagatagttcagaaacactttttatctgcaaggcactattctagatccagaagatgcaatgttgaacaaacagacaaagccctgccctcagaaggctgtcctgcattaggaacaagtgaacacgcaaatgacatgaagtatttgttgcagagctgaggaacagagcaaatgtagtgatagaagcgcaatgagagaagcagcagtgggtacaaggaggaagaaaaagggcttgcagagagtggaaagttagtggaatattcatgaaacttcattgcaggggtaatagaagaaaaagtaaattgggaggacttaatggaaggtcttttaaaaagttaacttggagcttctgtatgtaaaatgctaggtaataaggacactttgtacaggctgttttgcacctgattttatttatcattagtgccacgccaagatcatttagacgatgcttatctgtaattctaccactttaataactatttgtatttttatgccccttctgatcttttccatatgtatttctaaatggataaattattctaggcttcttaataggtagtaatttgttcaaaagcggttttagccagacatctagttgcagtgttcaagaggattatgggggaaagagattagagataattgtctagttagggggcagctggagaaaataagctaagtttgcaataacagagtacacaagtatagtggcccaggatgtagtgaaagaacaaatcctagagtctttgaaatttctaagggcattctagacctctgttgggatatggtattattttacatactgacacaacctaaattttctttgggtagtaactaatgtcaagtctacatcgactggtaaaacattcaaagaacaaactgacaatgatgttctacctacttgttacatgctcatggaagaccgtgcagtattgaaagtatttgttaattatctgcttagtattaacactaaatttgtagaatgactttcaggtttgttgaacaatgccttttcaggttggaagaagaaaaatagcctcaatctcccaccccatgtaggcactacctccccaattacccttagaaaatgatcacaccaactctgcctacacacttccagtgatagtggctcattgtctgttaaggcaaactgttccactgttgggcatatctctttgttagaaagttctttcttaggttgctaaaatctgcctagtaccccgctaccctgttctgtcttatggagcagcccagattatctttactccctctttctcatggcaaccctgaagataatcaaggccagttactcatcatctcccaaccactgtttcctcaactgcccttcatatgtcatggttttcagatccattccaacctgactgaatgttaacagacagaattcttcacattaaggaactgtcttcatcatcatacatgtagaaaagaatctgaacatttaagtgcgaagttttctctagaaatatattcaagatatgtttattctattattgtaaatttcaaacaataaataaataagaatcc

SEQ ID NO: 1423 - protein, 2319 aa, Homo sapiens
MLTMSVTLSPLRSQDLDPMATDASPMAINMTPTVEQGEGEEAMKDMDSDQQYEKPPPLHTGADWKIVLHLPEIETWLRMTSERVRDLTYSVQQDSDSKHVDVHLVQLKDICEDISDHVEQIHALLETEFSLKLLSYSVNVIVDIHAVQLLWHQLRVSVLVLRERILQGLQDANGNYTRQTDILQAFSEETKEGRLDSLTEVDDSGQLTIKCSQNYLSLDCGITAFELSDYSPSEDLLSGLGDMTSSQVKTKPFDSWSYSEMEKEFPELIRSVGLLTVAADSISTNGSEAVTEEVSQVSLSVDDKGGCEEDNASAVEEQPGLTLGVSSSSGEALTNAAQPSSETVQQESSSSSHHDAKNQQPVPCENATPKRTIRDCFNYNEDSPTQPTLPKRGLFLKEETFKNDLKGNGGKRQMVDLKPEMSRSTPSLVDPPDRSKLCLVLQSSYPNSPSAASQSYECLHKVGNGNLENTVKFHIKEISSSLGRLNDCYKEKSRLKKPHKTSEEVPPCRTPKRGTGSGKQAKNTKSSAVPNGELSYTSKAIEGPQTNSASTSSLEPCNQRSWNAKLQLQSETSSSPAFTQSSESSVGSDNIMSPVPLLSKHKSKKGQASSPSHVTRNGEVVEAWYGSDEYLALPSHLKQTEVLALKLENLTKLLPQKPRGETIQNIDDWELSEMNSDSEIYPTYHVKKKHTRLGRVSPSSSSDIASSLGESIESGPLSDILSDEESSMPLAGMKKYADEKSERASSSEKNESHSATKSALIQKLMQDIQHQDNYEAIWEKIEGFVNKLDEFIQWLNEAMETTENWTPPKAEMDDLKLYLETHLSFKLNVDSHCALKEAVEEEGHQLLELIASHKAGLKDMLRMIASQWKELQRQIKRQHSWILRALDTIKAEILATDVSVEDEEGTGSPKAEVQLCYLEAQRDAVEQMSLKLYSEQYTSSSKRKEEFADMSKVHSVGSNGLLDFDSEYQELWDWLIDMESLVMDSHDLMMSEEQQQHLYKRYSVEMSIRHLKKTELLSKVEALKKGGVLLPNDLLEKVDSINEKWELLGKTLGEKIQDTMAGHSGSSPRDLLSPESGSLVRQLEVRIKELKGWLRDTELFIFNSCLRQEKEGTMNTEKQLQYFKSLCREIKQRRRGVASILRLCQHLLDDRETCNLNADHQPMQLIIVNLERRWEAIVMQAVQWQTRLQKKMGKESETLNVIDPGLMDLNGMSEDALEWDEMDISNKLISLNEESNDLDQELQPVIPSLKLGETSNEDPGYDEEADNHGGSQYASNITAPSSPHIYQVYSLHNVELYEDNHMPFLKNNPKVTGMTQPNVLTKSLSKDSSFSSTKSLPDLLGGSNLVKPCACHGGDMSQNSGSESGIVSEGDTETTTNSEMCLLNAVDGSPSNLETEHLDPQMGDAVNVLKQKFTDEGESIKLPNSSQSSISPVGCVNGKVGDLNSITKHTPDCLGEELQGKHDVFTFYDYSYLQGSKLKLPMIMKQSQSEKAHVEDPLLRGFYFDKKSCKSKHQTTELQPDVPPHERILASASHEMDRISYKSGNIEKTFTGMQNAKQLSLLSHSSSIESLSPGGDLFGLGIFKNGSDSLQRSTSLESWLTSYKSNEDLFSCHSSGDISVSSGSVGELSKRTLDLLNRLENIQSPSEQKIKRSVSDITLQSSSQKMSFTGQMSLDIASSINEDSAASLTELSSSDELSLCSEDIVLHKNKIPESNASFRKRLTRSVADESDVNVSMIVNVSCTSACTDDEDDSDLLSSSTLTLTEEELCIKDEDDDSSIATDDEIYEDCTLMSGLDYIKNELQTWIRPKLSLTRDKKRCNVSDEMKGSKDISSSEMTNPSDTLNIETLLNGSVKRVSENNGNGKNSSHTHELGTKRENKKTIFKVNKDPYVADMENGNIEGIPERQKGKPNVTSKVSENLGSHGKEISESEHCKCKALMDSLDDSNTAGKEFVSQDVRHLPKKCPNHHHFENQSTASTPTEKSFSELALETRFNNRQDSDALKSSDDAPSMAGKSAGCCLALEQNGTEENASISNISCCNCEPDVFHQKDAEDCSVHNFVKEIIDMASTALKSKSQPENEVAAPTSLTQIKEKVLEHSHRPIQLRKGDFYSYLSLSSHDSDCGEVTNYIEEKSSTPLPLDTTDSGLDDKEDIECFFEACVEGDSDGEEPCFSSAPPNESAVPSEAAMPLQATACSSEFSDSSLSADDADTVALSSPSSQERAEVGKEVNGLPQTSSGCAENLEFTPSKLDSEKESSGKPGESGMPEEHNAASAKSKVQDLSLKANQPTDKAALHPSPKTLTCEENLLNLHEKRHRNMHR

SEQ ID NO: 1424 - DNA, 3428 bp, Homo sapiens
ccacgcgtccgacgccccccacccgggaggggggagagaggcaaaaagtaagagaggaaaaaaaatagcaggaagatggcgcccaccaagcccagctttcagcaggatccttccaggcgagaacgtttacaagcattgagaaaggagaaatcccgagatgctgctcgctcccgccggggaaaagaaaactttgagttctatgaattggccaagttgttgcctcttcctgcagccattaccagccagctcgacaaggcatccatcattcgacttacaattagctatctgaaaatgagggactttgctaaccagggggaccctccgtggaacttgcgaatggaaggccctccacctaacacatcagtaaaaggtgcacagcgaaggagaagccccagtgcactagccattgaagtatttgaagcacatttgggaagccacattttgcagtccctggatggctttgtatttgcactaaatcaggaaggaaaatttttgtacatttccgaaacagtctccatctacctaggcctctcacaagtggagctgacaggcagcagtgtctttgactatgtccaccccggagatcacgtggagatggctgagcagctgggcatgaagctcccccctgggcggggtctcctgtcacagggcactgctgaggacggagccagctcagcatcttcctcctctcagtcggagacccccgagccagtggagtcaaccagccccagtctgctaaccactgacaacactcttgagcgttcctttttcatccgaatgaaatctactctgaccaaacgcggtgtgcacatcaaatcatcaggatataaggtgattcacataacaggccggctacgcctgagagtgtcgctgtcccacgggaggaccgtccccagccaaatcatgggtctcgtggttgttgcgcatgccttgcctccccctacgatcaatgaagtcagaattgactgccatatgttcgtcactcgagtaaatatggacctcaatatcatttactgtgaaaataggattagtgattatatggatctgacccctgtagatatcgtagggaagagatgctaccacttcatccatgctgaagacgtggagggcatcaggcacagtcacttggacttgctgaataagggtcagtgtgtgacaaagtactatcgctggatgcagaagaacggaggatatatttggatacagtccagtgccaccatagctattaatgccaagaatgcaaatgaaaagaatatcatctgggtgaattaccttcttagcaatcctgagtacaaggacacacccatggacatcgcacagctcccccatctgccggagaaaacttccgaatcctcggagacatccgactctgagtcagactctaaagacacctcaggtattacagaggacaacgagaactccaagtccgacgagaaggggaaccagtccgagaacagcgaagacccggagcccgaccggaagaagtcgggcaacgcgtgtgacaacgacatgaactgcaacgacgacggccacagctccagtaacccggacagccgcgacagcgacgacagcttcgagcactcggactttgagaaccccaaggcgggcgaggacggcttcggtgctctgggcgcgatgcagatcaaggtggagcgctacgtggagagcgagtcggacctgcggctgcagaactgcgagtcactcacgtccgacagcgccaaggactcggacagcgcaggcgaggcgggcgcgcaggcctccagcaagcaccagaagcgcaagaaaaggcggaaacggcaaaagggcggcagcgccagccgccggcgcctgtccagcgcgtcgagcccaggcggcctggacgcgggcctggtggagcccccgcggctgctgtcctcccccaacagtgcctcggtgctcaagatcaagacggagatctcagaacccatcaatttcgacaatgacagcagcatctggaactacccgcccaaccgggagatctccaggaacgagtccccctacagcatgaccaagccccccagctctgagcacttcccgtccccgcagggcggcggcggtgggggtggcggtggcggggggctgcacgtggccattcccgactcggtcctcaccccgcccggcgccgacggcgcggccgcccgcaagactcagttcggcgcctcggccaccgcggccctggcccccgtcgcctccgacccgctgtcacccccgctctcggcgtccccgcgggacaagcaccccgggaacggcggcgggggcgggggcgggggcggcggcgcggggggcggcggccccagcgcgtccaactccttgctgtacactggggacctggaggcgctgcagaggttgcaggcgggcaacgtcgtgctcccgctggtgcacagggtgaccgggaccctggccgccaccagcacggccgcgcagagggtctacaccacgggcaccatccgctacgcgcccgccgaggtgaccctggccatgcagagcaacctgctgcccaacgcgcacgctgttaacttcgtggacgttaacagccccggctttggcctcgaccccaagacgcccatggagatgctctaccaccacgtgcaccggctcaacatgtcaggaccgttcggcggcgcagtgagcgcagctagcctgacgcagatgcccgccggcaacgtgttcaccacggccgagggactcttctccacgctgcccttccccgtctacagcaacggcatccacgcggcacagactctggagcgcaaggaggactgaggcgccgcccgtcctgggcccggccaggccccgcttggaggaggcatcgtcggcattttcgtttagacctttaattctagcactttgaattcgagcaggtcagcgtcttctctcgccacgacggtccccattccaccccctctttctttcacctgacttattctttcgtgtaaagatatgtttattttttgccttcagagggtcagacgaccagttgcctgccgttttgtcttcttctaaggtgtgtgttgggttgttttgctttcctttgcatctttattaagatgtctttcatgtgtatatgcctctgccatagaatactcagtcttgtggtcaagagagttctcaagtgacaaccattggggtttcttcataaagatcttgatatgatcaagatggaaagagacaagcataaacaatgtgccctgtttgactaagtcaaatgaaatagggtggtttttgtttctgttcctaattcctttaaaaaatagggggaatagtattttagaattttatgcagaatttaattctctttttacggttaagattttaagattttcttacttgcacataaaaataatttgggttcttaaacttaatttctggcctgtgactagaatgtttaaaaaaaaaaaaaaccctcgtgc

SEQ ID NO: 1425 - protein, 901 aa, Homo sapiens
MAPTKPSFQQDPSRRERLQALRKEKSRDAARSRRGKENFEFYELAKLLPLPAAITSQLDKASIIRLTISYLKMRDFANQGDPPWNLRMEGPPPNTSVKGAQRRRSPSALAIEVFEAHLGSHILQSLDGFVFALNQEGKFLYISETVSIYLGLSQVELTGSSVFDYVHPGDHVEMAEQLGMKLPPGRGLLSQGTAEDGASSASSSSQSETPEPVESTSPSLLTTDNTLERSFFIRMKSTLTKRGVHIKSSGYKVIHITGRLRLRVSLSHGRTVPSQIMGLVVVAHALPPPTINEVRIDCHMFVTRVNMDLNIIYCENRISDYMDLTPVDIVGKRCYHFIHAEDVEGIRHSHLDLLNKGQCVTKYYRWMQKNGGYIWIQSSATIAINAKNANEKNIIWVNYLLSNPEYKDTPMDIAQLPHLPEKTSESSETSDSESDSKDTSGITEDNENSKSDEKGNQSENSEDPEPDRKKSGNACDNDMNCNDDGHSSSNPDSRDSDDSFEHSDFENPKAGEDGFGALGAMQIKVERYVESESDLRLQNCESLTSDSAKDSDSAGEAGAQASSKHQKRKKRRKRQKGGSASRRRLSSASSPGGLDAGLVEPPRLLSSPNSASVLKIKTEISEPINFDNDSSIWNYPPNREISRNESPYSMTKPPSSEHFPSPQGGGGGGGGGGGLHVAIPDSVLTPPGADGAAARKTQFGASATAALAPVASDPLSPPLSASPRDKHPGNGGGGGGGGGGAGGGGPSASNSLLYTGDLEALQRLQAGNVVLPLVHRVTGTLAATSTAAQRVYTTGTIRYAPAEVTLAMQSNLLPNAHAVNFVDVNSPGFGLDPKTPMEMLYHHVHRLNMSGPFGGAVSAASLTQMPAGNVFTTAEGLFSTLPFPVYSNGIHAAQTLERKED

SEQ ID NO: 1426 - DNA, 2763 bp, Homo sapiens
atggcgcccaccaagcccagctttcagcaggatccttccaggcgagaacgtttacaagcattgagaaaggagaaatcccgagatgctgctcgctcccgccggggaaaagaaaactttgagttctatgaattggccaagttgttgcctcttcctgcagccattaccagccagctcgacaaggcatccatcattcgacttacaattagctatctgaaaatgagggactttgctaaccagggggaccctccgtggaacttgcgaatggaaggccctccacctaacacatcagtaaaagggatacaaatgtggaaatctgaactctgcatgagaaagacaccatgtgaagttataggtgcacagcgaaggagaagccccagtgcactagccattgaagtatttgaagcacatttgggaagccacattttgcagtccctggatggctttgtatttgcactaaatcaggaaggaaaatttttgtacatttccgaaacagtctccatctacctaggcctctcacaagtggagctgacaggcagcagtgtctttgactatgtccaccccggagatcacgtggagatggctgagcagctgggcatgaagctcccccctgggcggggtctcctgtcacagggcactgctgaggacggagccagctcagcatcttcctcctctcagtcggagacccccgagccagtggagtcaaccagccccagtctgctaaccactgacaacactcttgagcgttcctttttcatccgaatgaaatctactctgaccaaacgcggtgtgcacatcaaatcatcaggatataaggtgattcacataacaggccggctacgcctgagagtgtcgctgtcccacgggaggaccgtccccagccaaatcatgggtctcgtggttgttgcgcatgccttgcctccccctacgatcaatgaagtcagaattgactgccatatgttcgtcactcgagtaaatatggacctcaatatcatttactgtgaaaataggattagtgattatatggatctgacccctgtagatatcgtagggaagagatgctaccacttcatccatgctgaagacgtggagggcatcaggcacagtcacttggacttgctgaataagggtcagtgtgtgacaaagtactatcgctggatgcagaagaacggaggatatatttggatacagtccagtgccaccatagctattaatgccaagaatgcaaatgaaaagaatatcatctgggtgaattaccttcttagcaatcctgagtacaaggacacacccatggacatcgcacagctcccccatctgccggagaaaacttccgaatcctcggagacatccgactctgagtcagactctaaagacacctcaggtattacagaggacaacgagaactccaagtccgacgagaaggggaaccagtccgagaacagcgaagacccggagcccgaccggaagaagtcgggcaacgcgtgtgacaacgacatgaactgcaacgacgacggccacagctccagtaacccggacagccgcgacagcgacgacagcttcgagcactcggactttgagaaccccaaggcgggcgaggacggcttcggtgctctgggcgcgatgcagatcaaggtggagcgctacgtggagagcgagtcggacctgcggctgcagaactgcgagtcactcacgtccgacagcgccaaggactcggacagcgcaggcgaggcgggcgcgcaggcctccagcaagcaccagaagcgcaagaaaaggcggaaacggcaaaagggcggcagcgccagccgccggcgcctgtccagcgcgtcgagcccaggcggcctggacgcgggcctggtggagcccccgcggctgctgtcctcccccaacagtgcctcggtgctcaagatcaagacggagatctcagaacccatcaatttcgacaatgacagcagcatctggaactacccgcccaaccgggagatctccaggaacgagtccccctacagcatgaccaagccccccagctctgagcacttcccgtccccgcagggcggcggcggtgggggtggcggtggcggggggctgcacgtggccattcccgactcggtcctcaccccgcccggcgccgacggcgcggccgcccgcaagactcagttcggcgcctcggccaccgcggccctggcccccgtcgcctccgacccgctgtcacccccgctctcggcgtccccgcgggacaagcaccccgggaacggcggcgggggcgggggcgggggcggcggcgcggggggcggcggccccagcgcgtccaactccttgctgtacactggggacctggaggcgctgcagaggttgcaggcgggcaacgtcgtgctcccgctggtgcacagggtgaccgggaccctggccgccaccagcacggccgcgcagagggtctacaccacgggcaccatccgctacgcgcccgccgaggtgaccctggccatgcagagcaacctgctgcccaacgcgcacgctgttaacttcgtggacgttaacagccccggctttggcctcgaccccaagacgcccatggagatgctctaccaccacgtgcaccggctcaacatgtcaggaccgttcggcggcgcagtgagcgcagctagcctgacgcagatgcccgccggcaacgtgttcaccacggccgagggactcttctccacgctgcccttccccgtctacagcaacggcatccacgcggcacagactctggagcgcaaggaggactga

SEQ ID NO: 1427 - protein, 920 aa, Homo sapiens
MAPTKPSFQQDPSRRERLQALRKEKSRDAARSRRGKENFEFYELAKLLPLPAAITSQLDKASIIRLTISYLKMRDFANQGDPPWNLRMEGPPPNTSVKGIQMWKSELCMRKTPCEVIGAQRRRSPSALAIEVFEAHLGSHILQSLDGFVFALNQEGKFLYISETVSIYLGLSQVELTGSSVFDYVHPGDHVEMAEQLGMKLPPGRGLLSQGTAEDGASSASSSSQSETPEPVESTSPSLLTTDNTLERSFFIRMKSTLTKRGVHIKSSGYKVIHITGRLRLRVSLSHGRTVPSQIMGLVVVAHALPPPTINEVRIDCHMFVTRVNMDLNIIYCENRISDYMDLTPVDIVGKRCYHFIHAEDVEGIRHSHLDLLNKGQCVTKYYRWMQKNGGYIWIQSSATIAINAKNANEKNIIWVNYLLSNPEYKDTPMDIAQLPHLPEKTSESSETSDSESDSKDTSGITEDNENSKSDEKGNQSENSEDPEPDRKKSGNACDNDMNCNDDGHSSSNPDSRDSDDSFEHSDFENPKAGEDGFGALGAMQIKVERYVESESDLRLQNCESLTSDSAKDSDSAGEAGAQASSKHQKRKKRRKRQKGGSASRRRLSSASSPGGLDAGLVEPPRLLSSPNSASVLKIKTEISEPINFDNDSSIWNYPPNREISRNESPYSMTKPPSSEHFPSPQGGGGGGGGGGGLHVAIPDSVLTPPGADGAAARKTQFGASATAALAPVASDPLSPPLSASPRDKHPGNGGGGGGGGGGAGGGGPSASNSLLYTGDLEALQRLQAGNVVLPLVHRVTGTLAATSTAAQRVYTTGTIRYAPAEVTLAMQSNLLPNAHAVNFVDVNSPGFGLDPKTPMEMLYHHVHRLNMSGPFGGAVSAASLTQMPAGNVFTTAEGLFSTLPFPVYSNGIHAAQTLERKED

SEQ ID NO: 1428 - DNA, 3113 bp, Homo sapiens
gctctcgcaaggagaaagcgggcgacgagcgctcgcagcccgtggggctgatcccacctcccgcagggctccggtcgtgtcgctgtcggaccgcagaacgccgggacgcatttccgagctcgggcccgacccaacccgctgccattctagctacctagtggagccgcggagagactcttgaaccgtgaggctccttgatgagaaggtggagaggctgccgggctattctccgagcatcttccggccgagctctgctcctctccgtgcgcttgcggcttctccttgggctagcgcgtccgcagtccctccaagtccaggccgcagtcacccaggtggggagctagcctgaaagagacagcggaaggagtttcctggactgcgctgtcgctcaccgacccgcaccaatcaccatgcagcttgccctcggacccgccccttttagggcgtgtccccagtgagtgatagacggagccgccctgccctgctcagcccagcccacgttgctgcttagattgaaatgcagaactcaagcctctttcatcggggcacagacttccttttacttcttccttttgccctctcgcctcctcctcctgggaagaagcggaggcgccggcggtcggccgggatagcaacaggccgggccactgaggcggtgcggaaagtttctgtctgggagtgcggaactggggccgggttggtgtactgctcggagcaatggagccagccttcggggaggtgaaccagctgggaggagtgttcgtgaacgggaggccgctgcccaacgccatccggcttcgcatcgtggaactggcccaactgggcatccgaccgtgtgacatcagccgccagctacgggtctcgcacggctgcgtcagcaagatcctggcgcgatacaacgagacgggctcgatcttgccaggagccatcgggggcagcaagccccgggtcactacccccaccgtggtgaaacacatccggacctacaagcagagagaccccggcatcttcgcctgggagatccgggaccgcctgctggcggacggcgtgtgcgacaagtacaatgtgccctccgtgagctccatcagccgcattctgcgcaacaagatcggcaacttggcccagcagggtcattacgactcatacaagcagcaccagccgacgccgcagccagcgctgccctacaaccacatctactcgtaccccagccctatcacggcggcggccgccaaggtgcccacgccacccggggtgcctgccatccccggttcggtggccatgccgcgcacctggccctcctcgcactccgtcaccgacatcctgggcatccgctccatcaccgaccaagtgagcgacagctccccctaccacagccccaaggtggaggagtggagcagcctgggccgcaacaacttccccgccgccgccccgcacgcggtgaacgggttggagaagggagccctggagcaggaagccaagtacggtcaggcaccaaatggtctcccagctgtgggcagttttgtgtcagcatccagcatggctccttaccctaccccagcccaagtgtcgccttacatgacctacagtgctgctccttctggttatgttgctggacatgggtggcaacatgctgggggcacctcattgtctccccacaactgtgacattccggcatcgctggcgttcaagggaatgcaggcagccagagaaggtagtcattctgtcacggcttccgcgctctgatgggaaattccgtctccagcagcttcacccgggtctccctgtctcagcacctcctcccccaattcccaggtctcacatcccacccctcctgccctccaacccttctgccttgaaagctggctgtacggactcacatcctttgtgctaatgacacttacatatttcttgccataacttttctcttgcagaaaaactgacatgactttaggatttaaaaacaagagcaacaataagcattgaatgagacatttgtgttgcccacatactgtcttaacataacaaagaaacctacacccctcaaagggtttaaggaactttacaaactagtctttggtaaaaccacatgtgtatatttattctaaatcaacctgaacttttgaaatgtgcaattgttgagattttgcaaaatcaataaaggaaaatacttatagaaaaaattatgctacaccctctaatcaaatatggtaaccaagtaagctttaattcatcattaggaaacaaatcaataagtgacttgtttgagtgatcctttgtttaagacatgacctattttgttgaaaaatatatgtagaacccaagcaatatctgaatctagctctccctggtgttttgacttggttccaaatacaataatgtttatattttctattagtttgtaaatacggactctggatggtgcatttgtgtcttcattccataagatattcccctcccctcagccccaccccctctctatttttttctttcttttttgcaaaggtgactttctggcaacgtctttgtctctgtttggtggtgggctgctcgggctcctggacctggacttgcccccaaattttgtgtatgcagtgaaggcttcaacatctcatgaaggacactttatttctacagcagaggacacgaaaaacagataaaacaagccagtctcccattttgtacctaatcaaacaacacacatgctaagcatataaagacaagagggtggaaaatatctgaacaagaaggctctaaaggaagtcacttagaaacttaagtttaatgtgaaatgttttgcaaagatgcttaaaatgaactttgtgttaagaaaaccactgtgaaactaaattgtcctattattgttggcttacctgtgtgttcagcaatctcagccccaaataatgttgtaatttaaagaaaatggaaaattctgctctaatgaatgtaacaatggcttgctgtgaagtttacattgttgtacagaagcatgtttcgcatgtaggtaaactggtggtggtactagaaatacaatgttatttaattttaacaaattccctttattcatttctgaaattacaggacacagtttaactcataaaaaaaaaaaaaaaaaa

SEQ ID NO: 1429 - protein, 341 aa, Homo sapiens
MEPAFGEVNQLGGVFVNGRPLPNAIRLRIVELAQLGIRPCDISRQLRVSHGCVSKILARYNETGSILPGAIGGSKPRVTTPTVVKHIRTYKQRDPGIFAWEIRDRLLADGVCDKYNVPSVSSISRILRNKIGNLAQQGHYDSYKQHQPTPQPALPYNHIYSYPSPITAAAAKVPTPPGVPAIPGSVAMPRTWPSSHSVTDILGIRSITDQVSDSSPYHSPKVEEWSSLGRNNFPAAAPHAVNGLEKGALEQEAKYGQAPNGLPAVGSFVSASSMAPYPTPAQVSPYMTYSAAPSGYVAGHGWQHAGGTSLSPHNCDIPASLAFKGMQAAREGSHSVTASAL

SEQ ID NO: 1430 - DNA, 5239 bp, Homo sapiens
gaaaaaaacaaacaaacaaaaaaaatcaccattccttttaatagcttgagcctgtaccagaatgataagtggaaattagtcctcaaagtaacctcagctgtttcattattgtgtgcctcgagcatctggttattcaagctcctcccacggttcgtattgtgcactcaggcttggcctgtaacattgaagaggagcgctactccgaaagggtctacactatccgggaaggagaaacccttgagttgacttgtctagtcacaggacatccacgtccacaggtggaccaaaacagcaggaagtgcctctgacagattccaagactcaagtgtcttcaatgagactttgaggattacaaatattcagcgacaccaaggaggccggtattactgtaaagcagagaatggcttggggtctccagcgataaagtcaatcagagtggatgtatactatttggatgatccagtagtaactgttcatcaaagtataggtgaagctaaagaacaattttactatgagagaacagtgttcctccggtgtgttgccaattccaatcctcctgttcggtatagctggagacgtggccaggaggtcttgctgcaaggatctgataaaggagttgagatttatgaaccattctttacccagggtgaaacaaagatcttaaaactaaagaatcttcgacctcaggactatgctaattatagctgcattgcttcagtgaggaatgtatgtaatattcctgataagatggtgtcgtttagactgtccaataaaacagcatcaccgtcaattaaactcttggtggatgatcctatagttgtaaatcctggagaggccataacattagtatgtgttacaacaggaggagagcctgcaccttctctcacctgggtcaggtcctttgggactctgcctgaaaagactgttttgaatggaggaactttgaccatacctgccatcacctcagatgatgctggtacttacagctgcattgccaataataatgtgggaaaccctgcaaaaaagtccaccaacatcattgtgagagcattaaaaaaaggacgattttggatcacaccagatccttatcacaaagatgacaacatccagattggccgtgaggtgaaaatatcttgccaagtagaagctgttccttctgaggagctaacatttagttggtttaaaaatggtcgtccattaagaagttctgagcggatggtcattacacagactgatcctgatgtctctccgggaacaacaaacttggacatcattgatttaaaattcacggattttgggacgtacacatgtgtagcatctctgaagggaggaggaatatctgatatcagtatcgatgttaatatatccagcagcacagttccacccaatctgactgttccacaggaaaaatcaccattggtcaccagagaaggagacacaatagaactgcaatgtcaagtaactggcaaacctaaaccaatcatcctttggtctagagcggataaagaagttgcaatgcctgatggatcaatgcaaatggagagttatgatggaacactgaggattgtgaatgtatctagggaaatgtcaggaatgtacagatgtcagaccagccaatacaatggatttaacgtgaaaccaagggaagccttggtgcagctcatcgttcagtatccccctgcagtggaaccagcattcttggaaatccggcaaggacaggatcgaagtgtcactatgagttgcagagtactgagagcctatccaatacgggtgctgacctatgagtggcgcttgggcaataaattattacggacgggtcaatttgactctcaggaatacacagagtacgctgtgaagagtctttccaatgaaaactatggggtttataactgtagcatcataaatgaagctggagctgggagatgcagctttcttgttacaggaaaggcctatgctccagaattctattatgatacctacaatccagtatggcagaacagacaccgtgtttattcttacagtctacagtggacacagatgaatcctgatgcagtggatcggattgttgcataccggttgggcatcaggcaggctggacagcagcgctggtgggagcaggagattaaaataaatgggaatattcaaaagggagaattaattacatataacttgacagagctaattaaaccagaagcttatgaagtccgactgactcctctcaccaaatttggtgaaggagattcaacaattcgtgtgatcaaatatagtgctcctgtaaatcctcatttgagagaatttcattgtggatttgaagatggtaatatttgtttgttcactcaagatgatacagataattttgactggacaaagcaaagtacagcaacaagaaatacaaaatatactcctaatacaggacctaatgctgaccgtagtggctccaaagaaggtttttatatgtacattgagacatcacgacccagattggaaggcgaaaaggctcgacttctcagccctgttttcagcatagctcccaaaaacccttatggacccacaaacactgcatattgtttcagcttcttttatcacatgtatggacaacatataggtgtcttaaatgtttatctacgtttgaaagggcaaacaacaatagagaatccactgtggtcttcaagtgggaataaaggacaaagatggaatgaggctcatgttaatatatacccaattacttcatttcagctcatttttgaaggtatccgaggtcctggaatagaaggtgacattgctattgatgatgtatcaattgcagaaggagaatgtgcaaaacaagacctagcaactaagaattccgttgatggtgctgttgggattttggttcatatatggctttttcccattatcgtcctcatctctatcttaagtcctcgaaggtgaccttatcctggcagaggctataaaagattcaccaggcactggcatgaagaaagagtctttgtaaatggacattgaacaaacaaactaccaaagattcctccactgactactgactcaaaaataaaataataaaaacaaatttttttaagcactggggataaaaagacatcatggaagtataacttattccagactaaacataaaagataatcttgacctgagtagagaagagaccttcaggtgcttttgtggctaaaaagattacagcgtcatctggttgaactctggaaaaaaaaaaaaaaatgaaaaaaagaaaaaaaaaagagctatagaaatccttgtcaaagcacaaagtcatggctggttttgtttcaaatgaatagtttgcttgttaccatggaaacctaatggcctgccaacaaaaacctcactgtaaacagggtacgtgaagagctggcatttattttccttacgagaaggttttcgtagagaattaaataaatgtaggcccttttacctttggctgttacccttccttgaaaataacccgaactcagaattatttaaagcattcatgtttctccccaccttatccccatcccacctttattattattatttttctcccatggctaagctagataactgtatgctgtctctttttgcatgcactactatccaggatggtaaacctgggcttacatgttacacaggcttatcggagtttgcttgcggccacttgaacacccaaactacgtcatctgttccaatgaagaaaccaaaccaccatcttttataaattgccatggaaaccaagtgccttcaatgaaacaagcctgaataattttcaactcagaagcttgcactgctaagagtggtttgtgtaaaactattttataaacaaactacagagcctaaatgtgcaaattacaggcaagacaacaaagccgcttctgaagaagaaaggaccgaagctgctgcgtaagcccatgcagacaagatatttgttgtttaacctcctagacagccatggcctttcggcttattgtccattagaaaatcacttccattgagaccagacatggagcaacactttttttcttccaggttattaaatgggtcaaccagagcaaaaggttattaagaatacttagtgcagaaggtggtaaaacacaaaagtgatttttttactctaacctccatttgaaatgaaattggccctagctttagagggaacaagaaaatgtttgggattgcagtgcatactaactctacagtggaactgggcctgaaaaatctggctttattctaaactctgagggtaatatgcctctgccctttagtcagactctgtgcaaattgtgaaatattattttattattttaccaagattataaaaacacttttacaaaaaaacaaaaacctgtaaaaataattttgagctacctgacgacaaatcatatctttaaccagccagttttccaatgcattgtaaatttcacttaaacctgttggttatgaaaatttgaagatcattttccttaaattatctcagcttttaacttcatttaaaaagacttttgtctaagaagaatattattattatatgttctttcaacaccccaggattaaaaaaactgattatgcaagcaattggaatataagtattaaattatagcatttgcaaatattaatataaaagcacaacaaaatgtagtggaaaatgacaaagcttgttttttaaaacaattctgtagaaatgtttgtgcaaattcagtaattcaacttaaaatataattttacagctatgttcaataaagcctctttccaggtaaggtatgacaagcagtatgtgtgtttgttgagcaatgttcacttatcactaaaatgaaattagttatacaatttattggttaccatgggataaatcttcagtgctccacataccttaatgtctgcagaaagaaattttaataggaactccctgatgcactcccctatattgtaatacatgcagaaagcagttaaacctttgaaggtaaaatatgaaacatatatgaacctggaatttaatgtctattttcagtcagttcaaaaggggaccagtttgaatatttaggtagtgatggaattgatctgaaccaagtcctttaaattaaacataataaacaaatgagtttcataacttatttgaatgaattagacatcttaaaattttttcagagtttcacagtaacccatatactttatcagaccaaagagattcaagtacacaatatctggggcatttcttttacgttttacaaaa

SEQ ID NO: 1431 - protein, 727 aa, Homo sapiens
MVSFRLSNKTASPSIKLLVDDPIVVNPGEAITLVCVTTGGEPAPSLTWVRSFGTLPEKTVLNGGTLTIPAITSDDAGTYSCIANNNVGNPAKKSTNIIVRALKKGRFWITPDPYHKDDNIQIGREVKISCQVEAVPSEELTFSWFKNGRPLRSSERMVITQTDPDVSPGTTNLDIIDLKFTDFGTYTCVASLKGGGISDISIDVNISSSTVPPNLTVPQEKSPLVTREGDTIELQCQVTGKPKPIILWSRADKEVAMPDGSMQMESYDGTLRIVNVSREMSGMYRCQTSQYNGFNVKPREALVQLIVQYPPAVEPAFLEIRQGQDRSVTMSCRVLRAYPIRVLTYEWRLGNKLLRTGQFDSQEYTEYAVKSLSNENYGVYNCSIINEAGAGRCSFLVTGKAYAPEFYYDTYNPVWQNRHRVYSYSLQWTQMNPDAVDRIVAYRLGIRQAGQQRWWEQEIKINGNIQKGELITYNLTELIKPEAYEVRLTPLTKFGEGDSTIRVIKYSAPVNPHLREFHCGFEDGNICLFTQDDTDNFDWTKQSTATRNTKYTPNTGPNADRSGSKEGFYMYIETSRPRLEGEKARLLSPVFSIAPKNPYGPTNTAYCFSFFYHMYGQHIGVLNVYLRLKGQTTIENPLWSSSGNKGQRWNEAHVNIYPITSFQLIFEGIRGPGIEGDIAIDDVSIAEGECAKQDLATKNSVDGAVGILVHIWLFPIIVLISILSPRR

SEQ ID NO: 1432 - DNA, 2271 bp, Homo sapiens
gtgtgacgctggtatctgtgtgaactcgggcttgtgatgctgagcttggttcatctgctttctcctcccttttcctccccactccttcccaccagcgccacagcaacatcctcagagtctgagcgaactgcgcccagcgcgggcacggagcctcccaccgccagcaacctgcggccccggagaaggcagcgagcgcagtgacagcgcctcaccgccaccagctcctggaccaccatggccaagaaccgcagggacagaaacagttggggtggattttcggaaaagacatatgaatggagctcagaagaggaggagccagtgaaaaaggcaggaccagtccaagtcctcattgtcaaagatgaccattcctttgagttagatgaaactgcattaaatcggatccttctctcggaggctgtcagagacaaggaggttgttgctgtatctgttgctggagcatttagaaaaggaaaatcattcctgatggacttcatgttgagatacatgtacaaccaggaatcagttgattgggttggagactacaatgaaccattgactggtttttcatggagaggtggatctgagcgagagaccacaggaattcagatatggagtgaaatcttccttatcaataaacctgatggtaaaaaggttgcagtgttattgatggatactcagggaacctttgatagtcagtcaactttgagagattcagccacagtatttgcccttagcacaatgatcagctcaatacaggtatataacttatcccaaaatgtccaggaggatgatcttcagcacctccagcttttcactgagtatggcagactggcaatggaggaaacattcctgaagccatttcagagtctgatatttcttgttcgagactggagtttcccatacgaattttcatatggagccgatggtggtgccaaattcttggaaaaacgcctcaaggtctcagggaaccagcatgaagaactacagaacgtcagaaaacacatccattcctgtttcaccaacatttcctgttttctgctacctcatcctggcttaaaagtagctaccaatccaaactttgatggaaaattgaaagaaatagatgatgaattcatcaaaaacttgaaaatactgattccttggctacttagtcccgagagcctagatattaaagagatcaatgggaataaaatcacctgccggggtctggtggagtacttcaaggcttatataaagatctatcaaggtgaagaattaccacatcccaaatccatgttacaggccacagcagaagctaacaatttagcagccgtggcaactgccaaggacacatacaacaaaaaaatggaagagatttgtggtggtgacaaaccatttctggccccaaatgacttgcagaccaaacacctgcaacttaaggaagaatctgtgaagctattccgaggggtgaagaagatgggtggggaagaatttagccggcgttacctgcagcagttggagagtgaaatagatgaactttacatccaatatatcaagcacaatgatagcaaaaatatcttccatgcagctcgtaccccagccacactgtttgtagtcatctttatcacatatgtgattgctggtgtgactggattcattggtttggacatcatagctagcctatgcaatatgataatgggactgacccttatcaccctgtgcacttgggcatatatccggtactctggagaataccgagagctgggagctgtaatagaccaggtggctgcagctctgtgggaccagggaagtacaaatgaggctttgtacaagctttacagtgcagcagcaacccacagacatctgtatcatcaagctttccctacaccaaagtcggaatctactgaacaatcagaaaagaaaaaaatgtaatgcaaattttaagaaatacaggtgcatgaccaattgtcaattaaatattcagttttatgtctccatgcaaacattcaaagtgcttccatcagaacggagtaaaatactaaacacctctgaagactgcaaactggattagttcttttacttcagtgtttaataagcagatgtatgtatgcatggttatactattttgttaacatgtacaatttcctgatttttcttcaaaaatgctgttataaagtatttgtctatttatgataacagtacacgtgttctgcttgaatttactaaattctactactgggttataattaaatcatgtgatattccaaaaaaaaaaaaaaaaaaaaaaaaaaa

SEQ ID NO: 1433 - protein, 558 aa, Homo sapiens
MAKNRRDRNSWGGFSEKTYEWSSEEEEPVKKAGPVQVLIVKDDHSFELDETALNRILLSEAVRDKEVVAVSVAGAFRKGKSFLMDFMLRYMYNQESVDWVGDYNEPLTGFSWRGGSERETTGIQIWSEIFLINKPDGKKVAVLLMDTQGTFDSQSTLRDSATVFALSTMISSIQVYNLSQNVQEDDLQHLQLFTEYGRLAMEETFLKPFQSLIFLVRDWSFPYEFSYGADGGAKFLEKRLKVSGNQHEELQNVRKHIHSCFTNISCFLLPHPGLKVATNPNFDGKLKEIDDEFIKNLKILIPWLLSPESLDIKEINGNKITCRGLVEYFKAYIKIYQGEELPHPKSMLQATAEANNLAAVATAKDTYNKKMEEICGGDKPFLAPNDLQTKHLQLKEESVKLFRGVKKMGGEEFSRRYLQQLESEIDELYIQYIKHNDSKNIFHAARTPATLFVVIFITYVIAGVTGFIGLDIIASLCNMIMGLTLITLCTWAYIRYSGEYRELGAVIDQVAAALWDQGSTNEALYKLYSAAATHRHLYHQAFPTPKSESTEQSEKKKM

SEQ ID NO: 1434 - DNA, 2256 bp, Homo sapiens
gtgtgacgctggtatctgtgtgaactcgggcttgtgatgctgagcttggttcatctgctttctcctcccttttcctccccactccttcccaccagcgccacagcaacatcctcagagtctgagcgaactgcgcccagcgcgggcacggagcctcccaccgccagcaacctgcggccccggagaaggcagcgagcgcagtgacagcgcctcaccgccaccagctcctggaccaccatggccaagaaccgcagggacagaaacagttggggtggattttcggaaaagacatatgaatggagctcagaagaggaggagccagtgaaaaaggcaggaccagtccaagtcctcattgtcaaagatgaccattcctttgagttagatgaaactgcattaaatcggatccttctctcggaggctgtcagagacaaggaggttgttgctgtatctgttgctggagcatttagaaaaggaaaatcattcctgatggacttcatgttgagatacatgtacaaccaggaatcagttgattgggttggagactacaatgaaccattgactggtttttcatggagaggtggatctgagcgagagaccacaggaattcagatatggagtgaaatcttccttatcaataaacctgatggtaaaaaggttgcagtgttattgatggatactcagggaacctttgatagtcagtcaactttgagagattcagccacagtatttgcccttagcacaatgatcagctcaatacaggtatataacttatcccaaaatgtccaggaggatgatcttcagcacctccagcttttcactgagtatggcagactggcaatggaggaaacattcctgaagccatttcagagtctgatatttcttgttcgagactggagtttcccatacgaattttcatatggagccgatggtggtgccaaattcttggaaaaacgcctcaaggtctcagggaaccagcatgaagaactacagaacgtcagaaaacacatccattcctgtttcaccaacatttcctgttttctgctacctcatcctggcttaaaagtagctaccaatccaaactttgatggaaaattgaaagaaatagatgatgaattcatcaaaaacttgaaaatactgattccttggctacttagtcccgagagcctagatattaaagagatcaatgggaataaaatcacctgccggggtctggtggagtacttcaaggcttatataaagatctatcaaggtgaagaattaccacatcccaaatccatgttacaggccacagcagaagctaacaatttagcagccgtggcaactgccaaggacacatacaacaaaaaaatggaagagatttgtggtggtgacaaaccatttctggccccaaatgacttgcagaccaaacacctgcaacttaaggaagaatctgtgaagctattccgaggggtgaagaagatgggtggggaagaatttagccggcgttacctgcagcagttggagagtgaaatagatgaactttacatccaatatatcaagcacaatgatagcaaaaatatcttccatgcagctcgtaccccagccacactgtttgtagtcatctttatcacatatgtgattgctggtgtgactggattcattggtttggacatcatagctagcctatgcaatatgataatgggactgacccttatcaccctgtgcacttgggcatatatccggtactctggagaataccgagagctgggagctgtaatagaccaggtggctgcagctctgtgggaccaggctttgtacaagctttacagtgcagcagcaacccacagacatctgtatcatcaagctttccctacaccaaagtcggaatctactgaacaatcagaaaagaaaaaaatgtaatgcaaattttaagaaatacaggtgcatgaccaattgtcaattaaatattcagttttatgtctccatgcaaacattcaaagtgcttccatcagaacggagtaaaatactaaacacctctgaagactgcaaactggattagttcttttacttcagtgtttaataagcagatgtatgtatgcatggttatactattttgttaacatgtacaatttcctgatttttcttcaaaaatgctgttataaagtatttgtctatttatgataacagtacacgtgttctgcttgaatttactaaattctactactgggttataattaaatcatgtgatattccaaaaaaaaaaaaaaaaaaaaaaaaaaa

SEQ ID NO: 1435 - protein, 553 aa, Homo sapiens
MAKNRRDRNSWGGFSEKTYEWSSEEEEPVKKAGPVQVLIVKDDHSFELDETALNRILLSEAVRDKEVVAVSVAGAFRKGKSFLMDFMLRYMYNQESVDWVGDYNEPLTGFSWRGGSERETTGIQIWSEIFLINKPDGKKVAVLLMDTQGTFDSQSTLRDSATVFALSTMISSIQVYNLSQNVQEDDLQHLQLFTEYGRLAMEETFLKPFQSLIFLVRDWSFPYEFSYGADGGAKFLEKRLKVSGNQHEELQNVRKHIHSCFTNISCFLLPHPGLKVATNPNFDGKLKEIDDEFIKNLKILIPWLLSPESLDIKEINGNKITCRGLVEYFKAYIKIYQGEELPHPKSMLQATAEANNLAAVATAKDTYNKKMEEICGGDKPFLAPNDLQTKHLQLKEESVKLFRGVKKMGGEEFSRRYLQQLESEIDELYIQYIKHNDSKNIFHAARTPATLFVVIFITYVIAGVTGFIGLDIIASLCNMIMGLTLITLCTWAYIRYSGEYRELGAVIDQVAAALWDQALYKLYSAAATHRHLYHQAFPTPKSESTEQSEKKKM

SEQ ID NO: 1436 - DNA, 3031 bp, Homo sapiens
gtggtagcggttattcggcggcccgcggcggaccatggccctggccctggcccggcgtcgctgggctttcctcacggcgtccccgagcagcgtcgcagagcgggccgacttccgggaaggaactgaccagcgactgagcggcggccggcgcgcttagcgccctgaacatgcggcagtccctgcgggcgaccccgggctccggacaggcggcggcggaggcggcggctcgggagggaaggaggcggcggcgccggcggaggtggcggcggagacggccggcgcccggcgcggagccctagggaggcagttcagcgcggcctcgggcctcgtcgagaaggatgctgtcccgaaagaaaaccaaaaacgaagtgtccaagccggccgaggtgcaggggaagtacgtgaagaaggagacgtcgcctctgcttcggaatcttatgccttcattcatccggcatggtccaacaattccaagacgaactgatatctgtcttccagattcaagccctaatgccttttcaacttctggagatgtagtttcaagaaaccagagtttccttagaactccaattcaaagaacacctcatgaaataatgagaagagaaagcaacagattatctgcaccttcttatcttgccagaagtctagcagatgtccctagagagtatggttcttctcagtcatttgtaacggaagttagttttgctgttgaaaatggagactctggttcccgatattattattcagacaatttttttgatggtcagagaaagcggccacttggagatcgtgcacatgaagactacagatattatgaatacaaccatgatctcttccaaagaatgccacagaatcaggggaggcatgcttcaggtattgggagagttgctgctacatctttaggaaatttgactaaccatggttctgaagatttaccccttcctcctggctggtctgtggactggacaatgagagggagaaaatattatatagatcataacacaaatacaactcactggagccatcctcttgagcgagaaggacttcctcctggatgggaacgagttgagtcatccgaatttggaacctattatgtagatcacacaaataagaaggcccaatacaggcatccctgtgctcctagtgtacctcggtatgatcaaccacctcctgtcacataccagccacagcaaactgaaagaaatcagtcccttctggtacctgcaaatccatatcatactgcagaaattcctgactggcttcaggtttacgcacgagcccctgtgaaatatgaccacattctgaagtgggaactcttccagctggctgacctggatacataccagggaatgctaaagttgctcttcatgaaagaattggagcagattgttaaaatgtatgaagcatacagacaagcccttcttacagagttggaaaaccgaaagcagagacagcagtggtatgcccaacaacatggaaaaaatttttgagctgattttttaaaaatttaagttttgtaagagctttaaaatattttcacagataaaaaattgcaaacaagtactctggttaataaatgctgcttcctttgtggaaattataaaattctaactttacatgtattttgttattagaaattttcttttattgaatgagaaaaattagtctatcattttaagagccaatatggcaaacactttcaaatactgtatattaggaaactgttttggtattcttgatggaaaaaaacgcagcggaaatgtcattatgaacagatgttaaataggaaattattacttgttaacttcttacagcagtagtaccttctttaaaaaaaaaaaagaatctgcggtatttttttaaaaaaaaagtttaccgctgtagtgtgaaatattgtctggaaagggatggtttaaatattaccatgatgtagttgaaatataaaataggatttggaaccttattgtgataaatatttatatatgatgtatgtttgtctcccctctccaaagtaaggaacccagctgggcgtggtggctcactcctgtaatcccagcattttgggaggccgaggtgggtggaccgcttgagtccacgagtttaagaccagcctgggcaacatggtgaagccccatctctacaaaaaatacaaaaaaattagccgggtatgatggtgtgtgcctctagtcccagctacttgggaggctgaggtcagaggatggcttgagcccaagaggcagaggttgcagggtcaagatcgcaccacttgcactgcagcctgagagagagagagccagaccttgtctcaaaaaataaaaaataaaaaaataaaaacaaaataaggaatccttttaaagcatgttgagaaagtattttttggtatgaatgggtgacgggccttttaatctttcaggaatacatataagcaggaatacttagcctgtattgggaaggtgcgtgaaactcaaagttgctaacatcatcttccttattttcagccagtgctgttactgcatttagcatggctctgacgaggcagtggagagttcctgacagcatagcatactgccttctgacagactgggttaagctaccaaaaatgacaaccagggattcaaaaaaaatttttggtcattaaatcgaatgtatattattactttttaattttctaagtatttatcacaggactttaacaccatatatttccctcccagtttttctccccttttggtttaatagttaaaacatttttcataattagtgctgtacatttgattgcaaacaaattggtgatacttctaaactataactataaatctctagaattctgtgaatttcaacattatttgaagtagttcttcagttatatttacatgtgttgtaaatatgtaaatatacttttagcttaggaagtcttccagaatacaaactactcccagttagatatcagtgagtttgaataactgaagaaatgttgacaatgttaagtgtttgattttatataacaagcttattaaatatatttttgtgg

SEQ ID NO: 1437 - protein, 383 aa, Homo sapiens
MLSRKKTKNEVSKPAEVQGKYVKKETSPLLRNLMPSFIRHGPTIPRRTDICLPDSSPNAFSTSGDVVSRNQSFLRTPIQRTPHEIMRRESNRLSAPSYLARSLADVPREYGSSQSFVTEVSFAVENGDSGSRYYYSDNFFDGQRKRPLGDRAHEDYRYYEYNHDLFQRMPQNQGRHASGIGRVAATSLGNLTNHGSEDLPLPPGWSVDWTMRGRKYYIDHNTNTTHWSHPLEREGLPPGWERVESSEFGTYYVDHTNKKAQYRHPCAPSVPRYDQPPPVTYQPQQTERNQSLLVPANPYHTAEIPDWLQVYARAPVKYDHILKWELFQLADLDTYQGMLKLLFMKELEQIVKMYEAYRQALLTELENRKQRQQWYAQQHGKNF

SEQ ID NO: 1438 - DNA, 6683 bp, Homo sapiens
tcacatttatcttctgtgtccacccagttctgctgaaacccctggcaagatcgtggccctgttgtagcttgtcatgttttgaacagctgtctatggaaagaaagcaaacacaacctagagcaacattgatttgttttagaaagctcttttattttcagttctggctgtgttcaacatcttagcttacgtttttcatgttgtaatgatctgccgtacggacgatcacctctaagttagagagttctgtaatttggcttggattaaagatgcttggttagtgaaagctgctgctttttttatagtcaaaggactggttctgagagccttgttgcagatggctgaggtcaccgtcccaagggtgtatgtcgtgtttggcatccattgcatcatggcgaaggcatcttcagatgtgcaggtttcaggctttcatcggaaaatccagcacgttaaaaatgaactttgccacatgttgagcttggaggaggtggccccagtgctgcagcagacattacttcaggacaacctcttgggcagggtacattttgaccaatttaaagaagcattaatactcatcttgtccagaactctgtcaaatgaagaacactttcaagaaccagactgctcactagaagctcagcccaaatatgttagaggtgggaagcgttacggacgaaggtccttgcccgagttccaagagtccgtggaggagtttcctgaagtgacggtgattgagccactggatgaagaagcgcggccttcacacatcccagccggtgactgcagtgagcactggaagacgcaacgcagtgaggagtatgaagcggaaggccagttaaggttttggaacccagatgacttgaatgcttcacagagtggatcttcccctccccaagactggatagaagagaaactgcaagaagtttgtgaagatttggggatcacccgtgatggtcacctgaaccggaagaagctggtctccatctgtgagcagtatggtttacagaatgtggatggagagatgctcgaggaagtattccataatcttgatcctgacggtacaatgagtgtagaagattttttctatggtttgtttaaaaatggaaaatctcttacaccatcagcatctactccatatagacaactaaaaaggcacctttccatgcagtctttcgatgagagtggacgacgtaccacaacctcatcagcaatgacaagtaccattggctttcgggtcttctcctgcctggatgatgggatgggccatgcatctgtggagagaatactggacacctggcaggaagagggcattgagaacagccaggagatcctgaaggccttggatttcagcctcgatggaaacatcaatttgacagaattaacactggcccttgaaaatgaacttttggttaccaagaacagcattcaccaggcggctctggccagctttaaggctgaaatccggcatttgttggaacgagttgatcaggtggtcagagaaaaagagaagctacggtcagatctggacaaggccgagaagctcaagtctttaatggcctcggaggtggatgatcaccatgcggccatagagcggcggaatgagtacaacctcaggaaactggatgaagagtacaaggagcgaatagcagccttaaaaaatgaactccgaaaagagagagagcagatcctgcagcaggcaggcaagcagcgtttagaacttgaacaggaaattgaaaaggcaaaaacagaagagaactatatccgggaccgccttgccctctctttaaaggaaaacagtcgtctggaaaatgagcttctagaaaatgcagagaagttggcagaatatgagaatctgacaaacaaacttcagagaaatttggaaaatgtgttagcagaaaagtttggtgacctcgatcctagcagtgctgagttcttcctgcaagaagagagactgacacagatgagaaatgaatatgagcggcagtgcagggtactacaagaccaagtagatgaactccagtctgagctggaagaatatcgtgcacaaggcagagtgctcaggcttccgttgaagaactcaccgtcagaagaagttgaggctaacagcggtggcattgagcccgaacacgggctcggttctgaagaatgcaatccattgaatatgagcattgaggcagagctggtcattgaacagatgaaagaacaacatcacagggacatatgttgcctcagactggagctcgaagataaagtgcgccattatgaaaagcagctggacgaaaccgtggtcagctgcaagaaggcacaggagaacatgaagcaaaggcatgagaacgaaacgcacaccttagaaaaacaaataagtgaccttaaaaatgaaattgctgaacttcaggggcaagcagcagtgctcaaggaggcacatcatgaggccacttgcaggcatgaggaggagaaaaaacaactgcaagtgaagcttgaggaggaaaagactcacctgcaggagaagctgaggctgcaacatgagatggagctcaaggctagactgacacaggctcaagcaagctttgagcgggagagggaaggccttcagagtagcgcctggacagaagagaaggtgagaggcttgactcaggaactagagcagtttcaccaggagcagctgacaagcctggtggagaaacacactcttgagaaagaggagttaagaaaagagctcttggaaaagcaccaaagggagcttcaggagggaagggaaaaaatggaaacagagtgtaatagaagaacctctcaaatagaagcccagtttcagtctgattgtcagaaagtcactgagaggtgtgaaagcgctctgcaaagcctggaggggcgctaccgccaagagctgaaggacctccaggaacagcagcgtgaggagaaatcccagtgggaatttgagaaggacgagctcacccaggagtgtgcggaagcccaggagctgctgaaagagactcttaagagagagaaaacaacttctctggtcctgacccaggagagagagatgctggagaaaacatacaaagaacatttgaacagcatggtcgtcgagagacagcagctactccaagacctggaagacctaagaaatgtatctgaaacccagcaaagcctgctgtctgaccagatacttgagctgaagagcagtcacaaaagggaactgagggagcgtgaggaggtcctgtgccaggcaggggcttcggagcagctggccagccagcggctggaaagactagaaatggaacatgaccaggaaaggcaggaaatgatgtccaagcttctagccatggagaacattcacaaagcgacctgtgagacagcagatcgagaaagagccgagatgagcacagaaatctccagacttcagagtaaaataaaggaaatgcagcaggcaacatctcctctctcaatgcttcagagtggttgccaggtgataggagaggaggaggtggaaggagatggagccctgtccctgcttcagcaaggggagcagctgttggaagaaaatggggacgtcctcttaagcctgcagagagctcatgaacaggcagtgaaggaaaatgtgaaaatggctactgaaatttctagattgcaacagaggctacaaaagttagagccagggttagtaatgtcttcttgtttggatgagccagctactgagttttttggaaatactgcggaacaaacagagccgtttttacagcaaaaccgaacgaagcaagtagaaggtgtgaccaggcggcatgtcctaagtgacctggaagatgatgaggtccgggacctgggaagtacagggacgagctctgttcagagacaggaagtcaaaatagaggagtctgaagcttcagtagagggtttttctgagcttgaaaacagtgaagagaccaggactgaatcctgggagctgaagaatcagattagtcagcttcaggaacagctaatgatgttatgtgcggactgtgatcgagcttctgaaaagaaacaggacctactttttgatgtttctgtgctaaaaaagaaactgaagatgcttgagagaatccctgaggcttctcccaaatataagctgttgtatgaagatgtgagccgagaaaatgactgccttcaggaagagctgagaatgatggagacacgctacgatgaggcactagaaaataacaaagaactcactgcagaggttttcaggttgcaggatgagctgaagaaaatggaggaagtcactgaaacattcctcagcctggaaaagagttacgatgaggtcaaaatagaaaatgaggagctgaatgttctggttttgagacttcaaggcaagattgagaagcttcaggaaagcgtggtccagcggtgtgactgctgcttatgggaagccagtttagagaacctggaaatcgaacctgatggaaatatactccagctcaatcagacactggaagagtgtgtgcccagggttaggagtgtacatcatgtcatagaggaatgtaagcaagaaaaccagtaccttgaggggaacacacagctcttggaaaaagtaaaagcacatgaaattgcctggttacatggaacaattcagacacatcaagaaaggccaagagtacagaatcaagttatactggaggaaaacactactctcctaggctttcaagacaaacattttcagcatcaggccaccatagcagagttagaactggagaaaacaaagttacaggagctgactaggaagttgaaggagagagtcactattttagttaagcaaaaagatgtactttctcacggagaaaaggaggaagagctgaaggcaatgatgcatgacttgcagatcacgtgcagtgagatgcagcaaaaagttgaacttctgagatatgaatctgaaaagcttcaacaggaaaattctattttgagaaatgaaattactactttaaatgaagaagatagcatttctaacctgaaattagggacattaaatggatctcaggaagaaatgtggcaaaaaacggaaactgtaaaacaagaaaatgctgcagttcagaagatggttgaaaatttaaagaaacagatttcagaattaaaaatcaaaaaccaacaattggatttggaaaatacagaacttagccaaaagaactctcaaaaccaggaaaaactgcaagaacttaatcaacgtctaacagaaatgctatgccagaaggaaaaagagccaggaaacagtgcattggaggaacgggaacaagagaagtttaatctgaaagaagaactggaacgttgtaaagtgcagtcctccactttagtgtcttctctggaggcggagctctctgaagttaaaatacagacccatattgtgcaacaggaaaaccaccttctcaaagatgaactggagaaaatgaaacagctgcacagatgtcccgatctctctgacttccagcaaaaaatctctagtgttctaagctacaacgaaaaactgctgaaagaaaaggaagctctgagtgaggaattaaatagctgtgtcgataagttggcaaaatcaagtcttttagagcatagaattgcgacgatgaagcaggaacagaaatcctgggaacatcagagtgcgagcttaaagtcacagctggtggcttctcaggaaaaggttcagaatttagaagacaccgtgcagaatgtaaacctgcaaatgtcccggatgaaatctgacctacgagtgactcagcaggaaaaggaggctttaaaacaagaagtgatgtctttacataagcaacttcagaatgctggtggcaagagctgggccccagagatagctactcatccatcagggctccataaccagcagaaaaggctgtcctgggacaagttggatcatctgatgaatgaggaacagcagctgctttggcaagagaatgagaggctccagaccatggtacagaacaccaaagccgaactcacgcactcccgggagaaggtccgtcagttggaatccaatcttcttcccaagcaccaaaaacatctaaacccatcaggtaccatgaatcccacagagcaagaaaaattgagcttaaagagagagtgtgatcagtttcagaaagaacaatctcctgctaacaggaaggtcagtcagatgaattcccttgaacaagaattagaaacaattcatttggaaaatgaaggcctgaaaaagaaacaagtaaaactggatgagcagctcatggagatgcagcacctgaggtccactgcgacgcctagcccgtcccctcatgcttgggatttgcagctgctccagcagcaagcctgtccgatggtgcccagggagcagtttctgcagcttcaacgccagctgctgcaggcagaaaggataaaccagcacctgcaggaggaacttgaaaacaggacctccgaaaccaacacaccacagggaaaccaggaacaactggtaactgtcatggaggaacgaatgatagaagttgaacagaaactgaaactagtgaaaaggcttcttcaagagaaagtgaatcagctcaaagaacaagtgagcctacccggtcatctctgttcacccacctcacattccagctttaactccagttttacatccctttattgccattaactcgttaacttatgttgtctaataaaggcaaattctattataaaaaaaaaaaaaaaaa

SEQ ID NO: 1439 - protein, 2096 aa, Homo sapiens
MAEVTVPRVYVVFGIHCIMAKASSDVQVSGFHRKIQHVKNELCHMLSLEEVAPVLQQTLLQDNLLGRVHFDQFKEALILILSRTLSNEEHFQEPDCSLEAQPKYVRGGKRYGRRSLPEFQESVEEFPEVTVIEPLDEEARPSHIPAGDCSEHWKTQRSEEYEAEGQLRFWNPDDLNASQSGSSPPQDWIEEKLQEVCEDLGITRDGHLNRKKLVSICEQYGLQNVDGEMLEEVFHNLDPDGTMSVEDFFYGLFKNGKSLTPSASTPYRQLKRHLSMQSFDESGRRTTTSSAMTSTIGFRVFSCLDDGMGHASVERILDTWQEEGIENSQEILKALDFSLDGNINLTELTLALENELLVTKNSIHQAALASFKAEIRHLLERVDQVVREKEKLRSDLDKAEKLKSLMASEVDDHHAAIERRNEYNLRKLDEEYKERIAALKNELRKEREQILQQAGKQRLELEQEIEKAKTEENYIRDRLALSLKENSRLENELLENAEKLAEYENLTNKLQRNLENVLAEKFGDLDPSSAEFFLQEERLTQMRNEYERQCRVLQDQVDELQSELEEYRAQGRVLRLPLKNSPSEEVEANSGGIEPEHGLGSEECNPLNMSIEAELVIEQMKEQHHRDICCLRLELEDKVRHYEKQLDETVVSCKKAQENMKQRHENETHTLEKQISDLKNEIAELQGQAAVLKEAHHEATCRHEEEKKQLQVKLEEEKTHLQEKLRLQHEMELKARLTQAQASFEREREGLQSSAWTEEKVRGLTQELEQFHQEQLTSLVEKHTLEKEELRKELLEKHQRELQEGREKMETECNRRTSQIEAQFQSDCQKVTERCESALQSLEGRYRQELKDLQEQQREEKSQWEFEKDELTQECAEAQELLKETLKREKTTSLVLTQEREMLEKTYKEHLNSMVVERQQLLQDLEDLRNVSETQQSLLSDQILELKSSHKRELREREEVLCQAGASEQLASQRLERLEMEHDQERQEMMSKLLAMENIHKATCETADRERAEMSTEISRLQSKIKEMQQATSPLSMLQSGCQVIGEEEVEGDGALSLLQQGEQLLEENGDVLLSLQRAHEQAVKENVKMATEISRLQQRLQKLEPGLVMSSCLDEPATEFFGNTAEQTEPFLQQNRTKQVEGVTRRHVLSDLEDDEVRDLGSTGTSSVQRQEVKIEESEASVEGFSELENSEETRTESWELKNQISQLQEQLMMLCADCDRASEKKQDLLFDVSVLKKKLKMLERIPEASPKYKLLYEDVSRENDCLQEELRMMETRYDEALENNKELTAEVFRLQDELKKMEEVTETFLSLEKSYDEVKIENEELNVLVLRLQGKIEKLQESVVQRCDCCLWEASLENLEIEPDGNILQLNQTLEECVPRVRSVHHVIEECKQENQYLEGNTQLLEKVKAHEIAWLHGTIQTHQERPRVQNQVILEENTTLLGFQDKHFQHQATIAELELEKTKLQELTRKLKERVTILVKQKDVLSHGEKEEELKAMMHDLQITCSEMQQKVELLRYESEKLQQENSILRNEITTLNEEDSISNLKLGTLNGSQEEMWQKTETVKQENAAVQKMVENLKKQISELKIKNQQLDLENTELSQKNSQNQEKLQELNQRLTEMLCQKEKEPGNSALEEREQEKFNLKEELERCKVQSSTLVSSLEAELSEVKIQTHIVQQENHLLKDELEKMKQLHRCPDLSDFQQKISSVLSYNEKLLKEKEALSEELNSCVDKLAKSSLLEHRIATMKQEQKSWEHQSASLKSQLVASQEKVQNLEDTVQNVNLQMSRMKSDLRVTQQEKEALKQEVMSLHKQLQNAGGKSWAPEIATHPSGLHNQQKRLSWDKLDHLMNEEQQLLWQENERLQTMVQNTKAELTHSREKVRQLESNLLPKHQKHLNPSGTMNPTEQEKLSLKRECDQFQKEQSPANRKVSQMNSLEQELETIHLENEGLKKKQVKLDEQLMEMQHLRSTATPSPSPHAWDLQLLQQQACPMVPREQFLQLQRQLLQAERINQHLQEELENRTSETNTPQGNQEQLVTVMEERMIEVEQKLKLVKRLLQEKVNQLKEQVSLPGHLCSPTSHSSFNSSFTSLYCH

SEQ ID NO: 1440 - DNA, 10293 bp, Homo sapiens
ccgagccgggagccgagcgcgctgggcgcggccgtcccgctgccgccgccaagcccggagtgcgccagcggccatggttcccgcggcggcgccgggcgcctgagccccgggacgcaagcgctggaggcgggctgccggctgtgcgggcgctccggagagaccgacagaaggtgagcactgtgggctatgggatggatgaggtggagcaggaccagcatgaggcccgactcaaggagctgtttgacagttttgacacgacgggcacagggtccctggggcaggaggaactcaccgacctttgccacatgttgagcttggaggaggtggccccagtgctgcagcagacattacttcaggacaacctcttgggcagggtacattttgaccaatttaaagaagcattaatactcatcttgtccagaactctgtcaaatgaagaacactttcaagaaccagactgctcactagaagctcagcccaaatatgttagaggtgggaagcgttacggacgaaggtccttgcccgagttccaagagtccgtggaggagtttcctgaagtgacggtgattgagccactggatgaagaagcgcggccttcacacatcccagccggtgactgcagtgagcactggaagacgcaacgcagtgaggagtatgaagcggaaggccagttaaggttttggaacccagatgacttgaatgcttcacagagtggatcttcccctccccaagactggatagaagagaaactgcaagaagtttgtgaagatttggggatcacccgtgatggtcacctgaaccggaagaagctggtctccatctgtgagcagtatggtttacagaatgtggatggagagatgctcgaggaagtattccataatcttgatcctgacggtacaatgagtgtagaagattttttctatggtttgtttaaaaatggaaaatctcttacaccatcagcatctactccatatagacaactaaaaaggcacctttccatgcagtctttcgatgagagtggacgacgtaccacaacctcatcagcaatgacaagtaccattggctttcgggtcttctcctgcctggatgatgggatgggccatgcatctgtggagagaatactggacacctggcaggaagagggcattgagaacagccaggagatcctgaaggccttggatttcagcctcgatggaaacatcaatttgacagaattaacactggcccttgaaaatgaacttttggttaccaagaacagcattcaccaggcggctctggccagctttaaggctgaaatccggcatttgttggaacgagttgatcaggtggtcagagaaaaagagaagctacggtcagatctggacaaggccgagaagctcaagtctttaatggcctcggaggtggatgatcaccatgcggccatagagcggcggaatgagtacaacctcaggaaactggatgaagagtacaaggagcgaatagcagccttaaaaaatgaactccgaaaagagagagagcagatcctgcagcaggcaggcaagcagcgtttagaacttgaacaggaaattgaaaaggcaaaaacagaagagaactatatccgggaccgccttgccctctctttaaaggaaaacagtcgtctggaaaatgagcttctagaaaatgcagagaagttggcagaatatgagaatctgacaaacaaacttcagagaaatttggaaaatgtgttagcagaaaagtttggtgacctcgatcctagcagtgctgagttcttcctgcaagaagagagactgacacagatgagaaatgaatatgagcggcagtgcagggtactacaagaccaagtagatgaactccagtctgagctggaagaatatcgtgcacaaggcagagtgctcaggcttccgttgaagaactcaccgtcagaagaagttgaggctaacagcggtggcattgagcccgaacacgggctcggttctgaagaatgcaatccattgaatatgagcattgaggcagagctggtcattgaacagatgaaagaacaacatcacagggacatatgttgcctcagactggagctcgaagataaagtgcgccattatgaaaagcagctggacgaaaccgtggtcagctgcaagaaggcacaggagaacatgaagcaaaggcatgagaacgaaacgcacaccttagaaaaacaaataagtgaccttaaaaatgaaattgctgaacttcaggggcaagcagcagtgctcaaggaggcacatcatgaggccacttgcaggcatgaggaggagaaaaaacaactgcaagtgaagcttgaggaggaaaagactcacctgcaggagaagctgaggctgcaacatgagatggagctcaaggctagactgacacaggctcaagcaagctttgagcgggagagggaaggccttcagagtagcgcctggacagaagagaaggtgagaggcttgactcaggaactagagcagtttcaccaggagcagctgacaagcctggtggagaaacacactcttgagaaagaggagttaagaaaagagctcttggaaaagcaccaaagggagcttcaggagggaagggaaaaaatggaaacagagtgtaatagaagaacctctcaaatagaagcccagtttcagtctgattgtcagaaagtcactgagaggtgtgaaagcgctctgcaaagcctggaggggcgctaccgccaagagctgaaggacctccaggaacagcagcgtgaggagaaatcccagtgggaatttgagaaggacgagctcacccaggagtgtgcggaagcccaggagctgctgaaagagactcttaagagagagaaaacaacttctctggtcctgacccaggagagagagatgctggagaaaacatacaaagaacatttgaacagcatggtcgtcgagagacagcagctactccaagacctggaagacctaagaaatgtatctgaaacccagcaaagcctgctgtctgaccagatacttgagctgaagagcagtcacaaaagggaactgagggagcgtgaggaggtcctgtgccaggcaggggcttcggagcagctggccagccagcggctggaaagactagaaatggaacatgaccaggaaaggcaggaaatgatgtccaagcttctagccatggagaacattcacaaagcgacctgtgagacagcagatcgagaaagagccgagatgagcacagaaatctccagacttcagagtaaaataaaggaaatgcagcaggcaacatctcctctctcaatgcttcagagtggttgccaggtgataggagaggaggaggtggaaggagatggagccctgtccctgcttcagcaaggggagcagctgttggaagaaaatggggacgtcctcttaagcctgcagagagctcatgaacaggcagtgaaggaaaatgtgaaaatggctactgaaatttctagattgcaacagaggctacaaaagttagagccagggttagtaatgtcttcttgtttggatgagccagctactgagttttttggaaatactgcggaacaaacagagccgtttttacagcaaaaccgaacgaagcaagtagaaggtgtgaccaggcggcatgtcctaagtgacctggaagatgatgaggtccgggacctgggaagtacagggacgagctctgttcagagacaggaagtcaaaatagaggagtctgaagcttcagtagagggtttttctgagcttgaaaacagtgaagagaccaggactgaatcctgggagctgaagaatcagattagtcagcttcaggaacagctaatgatgttatgtgcggactgtgatcgagcttctgaaaagaaacaggacctactttttgatgtttctgtgctaaaaaagaaactgaagatgcttgagagaatccctgaggcttctcccaaatataagctgttgtatgaagatgtgagccgagaaaatgactgccttcaggaagagctgagaatgatggagacacgctacgatgaggcactagaaaataacaaagaactcactgcagaggttttcaggttgcaggatgagctgaagaaaatggaggaagtcactgaaacattcctcagcctggaaaagagttacgatgaggtcaaaatagaaaatgaggagctgaatgttctggttttgagacttcaaggcaagattgagaagcttcaggaaagcgtggtccagcggtgtgactgctgcttatgggaagccagtttagagaacctggaaatcgaacctgatggaaatatactccagctcaatcagacactggaagagtgtgtgcccagggttaggagtgtacatcatgtcatagaggaatgtaagcaagaaaaccagtaccttgaggggaacacacagctcttggaaaaagtaaaagcacatgaaattgcctggttacatggaacaattcagacacatcaagaaaggccaagagtacagaatcaagttatactggaggaaaacactactctcctaggctttcaagacaaacattttcagcatcaggccaccatagcagagttagaactggagaaaacaaagttacaggagctgactaggaagttgaaggagagagtcactattttagttaagcaaaaagatgtactttctcacggagaaaaggaggaagagctgaaggcaatgatgcatgacttgcagatcacgtgcagtgagatgcagcaaaaagttgaacttctgagatatgaatctgaaaagcttcaacaggaaaattctattttgagaaatgaaattactactttaaatgaagaagatagcatttctaacctgaaattagggacattaaatggatctcaggaagaaatgtggcaaaaaacggaaactgtaaaacaagaaaatgctgcagttcagaagatggttgaaaatttaaagaaacagatttcagaattaaaaatcaaaaaccaacaattggatttggaaaatacagaacttagccaaaagaactctcaaaaccaggaaaaactgcaagaacttaatcaacgtctaacagaaatgctatgccagaaggaaaaagagccaggaaacagtgcattggaggaacgggaacaagagaagtttaatctgaaagaagaactggaacgttgtaaagtgcagtcctccactttagtgtcttctctggaggcggagctctctgaagttaaaatacagacccatattgtgcaacaggaaaaccaccttctcaaagatgaactggagaaaatgaaacagctgcacagatgtcccgatctctctgacttccagcaaaaaatctctagtgttctaagctacaacgaaaaactgctgaaagaaaaggaagctctgagtgaggaattaaatagctgtgtcgataagttggcaaaatcaagtcttttagagcatagaattgcgacgatgaagcaggaacagaaatcctgggaacatcagagtgcgagcttaaagtcacagctggtggcttctcaggaaaaggttcagaatttagaagacaccgtgcagaatgtaaacctgcaaatgtcccggatgaaatctgacctacgagtgactcagcaggaaaaggaggctttaaaacaagaagtgatgtctttacataagcaacttcagaatgctggtggcaagagctgggccccagagatagctactcatccatcagggctccataaccagcagaaaaggctgtcctgggacaagttggatcatctgatgaatgaggaacagcagctgctttggcaagagaatgagaggctccagaccatggtacagaacaccaaagccgaactcacgcactcccgggagaaggtccgtcagttggaatccaatcttcttcccaagcaccaaaaacatctaaacccatcaggtaccatgaatcccacagagcaagaaaaattgagcttaaagagagagtgtgatcagtttcagaaagaacaatctcctgctaacaggaaggtcagtcagatgaattcccttgaacaagaattagaaacaattcatttggaaaatgaaggcctgaaaaagaaacaagtaaaactggatgagcagctcatggagatgcagcacctgaggtccactgcgacgcctagcccgtcccctcatgcttgggatttgcagctgctccagcagcaagcctgtccgatggtgcccagggagcagtttctgcagcttcaacgccagctgctgcaggcagaaaggataaaccagcacctgcaggaggaacttgaaaacaggacctccgaaaccaacacaccacagggaaaccaggaacaactggtaactgtcatggaggaacgaatgatagaagttgaacagaaactgaaactagtgaaaaggcttcttcaagagaaagtgaatcagctcaaagaacaactctgcaagaacactaaggcagacgcaatggtgaaggacttgtatgttgaaaatgcccagttgttgaaagctctggaagtgactgaacagcgacagaaaacagcagagaagaaaaattacctcctggaggagaagattgccagcctcagtaatatagttaggaatctgacaccagcgccattgacttctacacctcctttgaggtcatagccaaaccaaagggtacactcatatttgtgcactttactgaaatagatgaacatttcagtaggttctcaacttaaaattaagcctaacctaaaactgccagcaacacaactggagtttccatttatcataattagtttttctaaatagacccttatgggagtttgaaaataaatactcacatatttcactacttaaattattcccaagatttgaatttattttaaaattttaatagccaccaagaatgtggacatatgaaaattcaagaacctaaaaaataccagttttgaatgagtttttgtggttttggttttttttttaattattacaaatctatgtgtaaaatctagatatttgaagtttgagatctgatgagaatggttgttataaactttattttaaaaccaaatttaggtgttcttacatatttaaatactggaaagtcattataatagttttggttctttgaattggtagacaattagtagagtataattggttaggaggcagggcttattaagtggttattaaccgctgacatcagacaaacccaaatctgtagaattctaaccttctaacacctgtgacagtattaccactcttcttgtattatagatttagaactgatttactcaattgcactcttaactaatgttaaaagcttacttgctttaaacagccttttcttctttctcttaaaagtttcatttggggagctggtcttctaagaaacggataaagccacataattaaagcagttgaactatagggaaagcactgaacaaaccactttggagtaaatagctactcttagaaaagagggataagcagaccatgtaggttttctgtctctcaaatcttagagttcataaatttacttgaggttgcctcaagaactcagggaacaatactgtaaactgtcttcctgaactactgtagggcctctctaagaatttgaaatgtataaaccatgtgacctcatttatttgtcttatatatttacagccatactagaatttttatttctacgtttttagtaaatttaatattctgggggaaaaaaggccttgattttagggttaaaaacctgacttatagaagagtttatttaatataggtcaaaattttctgtgtttcttattccttctatacctcaaatctgattctaagaatttcttactgtgataatcattggcatgccacctgaggtcaaggagtgccaaataggactttccactcatgctcaagatcaaaactttatagaacagtcaacattttagattcggtaaccttttttttcttccaattataatctctgctagccacttccgccagcagttggtggaagacttactaggtgcagggcactttccaagttcatcacaacaacctgcttgttttcatgagacaataatccgaaaagttcgctttgatatattcctggagggccaagcccatctatttacaaaaggtgaacagcaaaatcaagcactgctttatgggcaggaacacaagagaaagcaaactgcccaagaagtcatcatgtcagaaactcaatctcaacaaaataatttccatcagggaacttcagggtttcttgggggcttatgagtctcaccggtcaacccaggaggcctcactacaagagccttgacaaggcactgttttttgtgggactgggagttcacactgatgaagcaaacctttgaatttttgcacagctcttgtcagaaagccctgagttccccctggataaagagttaattttaatccttccctataattatacttcaaaatatttgacatctgctattatgccttctttagatctttcttctgtggtgcagacatttctagtaagtgtttgactacttgtatggcattagctttcacagaaaattgtttcacttaaaactgtggattggcctaggctaaggacaaaaataaactaagtacctgtagtgtatttatgtgatatgtgtcaagttactcaaagttattgctgttggaactgaacaataatatttcccagatagctggccttagcatgtgatcacggttgttgtatttttaatttttgtcttttacagtatgagaggtgtaggttaatttgtttatttcctataaatttgtatttatgtgtatataaaatgtacaatgaatgtaaatatgactttctggaaagtttagactacatttagaatctctattcaaaatcaaaatgctgctcaaatgaatttaaccaacatctaggtgcttaatttctcattttatcccacttatgagattgggaaaaagatcaatatgagaaataccatacagataccttaaatgtatgcatttgtgcaacaatttttgagaaggtgagtggcaatttataatttagttggcaatttataatagaacttatagcttttaaaagaccttttaaagacattaaatgtaaacttaaaaatgtttagatcttgtttcaaactttacaatagcattcttcaaaatattaagttatatattttataggcatttagttgcttattaaaagcactgattttcaaactttttgatttaagaacaattatttaagatcgtctcagaagatgggatcttcgtttcaagaaaagggaatcaagtttgcctttgagataatacgttacactaagaaaaggaaaatgtggatagtaaaacccacctctctcatcctattgtactctcttctgctttttagaagcctgcacttaagcttagatttgtgaagggagagtagaaggggagaagtagaaccacagtgttttatttatttttctaaaactcttactaaatccagattttttaaactgttttaaatgtgaattcttcccagaaatttcaatgcattgcatatttagccttcggcatatttttcatgaatagatcatgaagtcataggcttccaaggcataggaagagatcttgcaggtctagtattttaataatgcactattacccagggcagatattatgagaaactgtttcttctctaagggtttatggcagactttgcttttttaacatgtgagaaatgaattttttattttgtgatttatgtgatttcttttgctgagtgaaggaaaggagaaattgttgctattgtcagcatcttaaaggtatttccagtcaaggcaaggctaagtgctttgtgatagtattaagcaagtcatgttttgaatggattacctgtagtgactcattggaatgatataattatacaagtaatgccaaaaaccaagtcaaagcctaattaaccaaagcactcatttaaaaatcatcatgtttggacctatctggacctctcagcactgtaaaatagttttggttttgtggcatatgaatagctgtttaacaaatcaaagttagctttttgcttctcagcttttttgggcaatacaagttaagttcttaatggggagacattatcatggcatgacttaagggaacattggtttgtgaaggaaaaacagattatctaaagccatctctatgtttctgttcagataaagattaatgagttctgtgtttatatcagctttgtatatttcatcttagccattctatcctagaaagattttaatgtgagcttaagatgtaaataaataattttgcaaacatgccttttgttttctatataccctgaccttttaataaagtttcagtgtatttatca

SEQ ID NO: 1441 - protein, 2133 aa, Homo sapiens
MDEVEQDQHEARLKELFDSFDTTGTGSLGQEELTDLCHMLSLEEVAPVLQQTLLQDNLLGRVHFDQFKEALILILSRTLSNEEHFQEPDCSLEAQPKYVRGGKRYGRRSLPEFQESVEEFPEVTVIEPLDEEARPSHIPAGDCSEHWKTQRSEEYEAEGQLRFWNPDDLNASQSGSSPPQDWIEEKLQEVCEDLGITRDGHLNRKKLVSICEQYGLQNVDGEMLEEVFHNLDPDGTMSVEDFFYGLFKNGKSLTPSASTPYRQLKRHLSMQSFDESGRRTTTSSAMTSTIGFRVFSCLDDGMGHASVERILDTWQEEGIENSQEILKALDFSLDGNINLTELTLALENELLVTKNSIHQAALASFKAEIRHLLERVDQVVREKEKLRSDLDKAEKLKSLMASEVDDHHAAIERRNEYNLRKLDEEYKERIAALKNELRKEREQILQQAGKQRLELEQEIEKAKTEENYIRDRLALSLKENSRLENELLENAEKLAEYENLTNKLQRNLENVLAEKFGDLDPSSAEFFLQEERLTQMRNEYERQCRVLQDQVDELQSELEEYRAQGRVLRLPLKNSPSEEVEANSGGIEPEHGLGSEECNPLNMSIEAELVIEQMKEQHHRDICCLRLELEDKVRHYEKQLDETVVSCKKAQENMKQRHENETHTLEKQISDLKNEIAELQGQAAVLKEAHHEATCRHEEEKKQLQVKLEEEKTHLQEKLRLQHEMELKARLTQAQASFEREREGLQSSAWTEEKVRGLTQELEQFHQEQLTSLVEKHTLEKEELRKELLEKHQRELQEGREKMETECNRRTSQIEAQFQSDCQKVTERCESALQSLEGRYRQELKDLQEQQREEKSQWEFEKDELTQECAEAQELLKETLKREKTTSLVLTQEREMLEKTYKEHLNSMVVERQQLLQDLEDLRNVSETQQSLLSDQILELKSSHKRELREREEVLCQAGASEQLASQRLERLEMEHDQERQEMMSKLLAMENIHKATCETADRERAEMSTEISRLQSKIKEMQQATSPLSMLQSGCQVIGEEEVEGDGALSLLQQGEQLLEENGDVLLSLQRAHEQAVKENVKMATEISRLQQRLQKLEPGLVMSSCLDEPATEFFGNTAEQTEPFLQQNRTKQVEGVTRRHVLSDLEDDEVRDLGSTGTSSVQRQEVKIEESEASVEGFSELENSEETRTESWELKNQISQLQEQLMMLCADCDRASEKKQDLLFDVSVLKKKLKMLERIPEASPKYKLLYEDVSRENDCLQEELRMMETRYDEALENNKELTAEVFRLQDELKKMEEVTETFLSLEKSYDEVKIENEELNVLVLRLQGKIEKLQESVVQRCDCCLWEASLENLEIEPDGNILQLNQTLEECVPRVRSVHHVIEECKQENQYLEGNTQLLEKVKAHEIAWLHGTIQTHQERPRVQNQVILEENTTLLGFQDKHFQHQATIAELELEKTKLQELTRKLKERVTILVKQKDVLSHGEKEEELKAMMHDLQITCSEMQQKVELLRYESEKLQQENSILRNEITTLNEEDSISNLKLGTLNGSQEEMWQKTETVKQENAAVQKMVENLKKQISELKIKNQQLDLENTELSQKNSQNQEKLQELNQRLTEMLCQKEKEPGNSALEEREQEKFNLKEELERCKVQSSTLVSSLEAELSEVKIQTHIVQQENHLLKDELEKMKQLHRCPDLSDFQQKISSVLSYNEKLLKEKEALSEELNSCVDKLAKSSLLEHRIATMKQEQKSWEHQSASLKSQLVASQEKVQNLEDTVQNVNLQMSRMKSDLRVTQQEKEALKQEVMSLHKQLQNAGGKSWAPEIATHPSGLHNQQKRLSWDKLDHLMNEEQQLLWQENERLQTMVQNTKAELTHSREKVRQLESNLLPKHQKHLNPSGTMNPTEQEKLSLKRECDQFQKEQSPANRKVSQMNSLEQELETIHLENEGLKKKQVKLDEQLMEMQHLRSTATPSPSPHAWDLQLLQQQACPMVPREQFLQLQRQLLQAERINQHLQEELENRTSETNTPQGNQEQLVTVMEERMIEVEQKLKLVKRLLQEKVNQLKEQLCKNTKADAMVKDLYVENAQLLKALEVTEQRQKTAEKKNYLLEEKIASLSNIVRNLTPAPLTSTPPLRS

SEQ ID NO: 1442 - DNA, 6808 bp, Homo sapiens
ccgagccgggagccgagcgcgctgggcgcggccgtcccgctgccgccgccaagcccggagtgcgccagcggccatggttcccgcggcggcgccgggcgcctgagccccgggacgcaagcgctggaggcgggctgccggctgtgcgggcgctccggagagaccgacagaaggtgagcactgtgggctatgggatggatgaggtggagcaggaccagcatgaggcccgactcaaggagctgtttgacagttttgacacgacgggcacagggtccctggggcaggaggaactcaccgacctttgccacatgttgagcttggaggaggtggccccagtgctgcagcagacattacttcaggacaacctcttgggcagggtacattttgaccaatttaaagaagcattaatactcatcttgtccagaactctgtcaaatgaagaacactttcaagaaccagactgctcactagaagctcagcccaaatatgttagaggtgggaagcgttacggacgaaggtccttgcccgagttccaagagtccgtggaggagtttcctgaagtgacggtgattgagccactggatgaagaagcgcggccttcacacatcccagccggtgactgcagtgagcactggaagacgcaacgcagtgaggagtatgaagcggaaggccagttaaggttttggaacccagatgacttgaatgcttcacagagtggatcttcccctccccaagactggatagaagagaaactgcaagaagtttgtgaagatttggggatcacccgtgatggtcacctgaaccggaagaagctggtctccatctgtgagcagtatggtttacagaatgtggatggagagatgctcgaggaagtattccataatcttgatcctgacggtacaatgagtgtagaagattttttctatggtttgtttaaaaatggaaaatctcttacaccatcagcatctactccatatagacaactaaaaaggcacctttccatgcagtctttcgatgagagtggacgacgtaccacaacctcatcagcaatgacaagtaccattggctttcgggtcttctcctgcctggatgatgggatgggccatgcatctgtggagagaatactggacacctggcaggaagagggcattgagaacagccaggagatcctgaaggccttggatttcagcctcgatggaaacatcaatttgacagaattaacactggcccttgaaaatgaacttttggttaccaagaacagcattcaccaggcggctctggccagctttaaggctgaaatccggcatttgttggaacgagttgatcaggtggtcagagaaaaagagaagctacggtcagatctggacaaggccgagaagctcaagtctttaatggcctcggaggtggatgatcaccatgcggccatagagcggcggaatgagtacaacctcaggaaactggatgaagagtacaaggagcgaatagcagccttaaaaaatgaactccgaaaagagagagagcagatcctgcagcaggcaggcaagcagcgtttagaacttgaacaggaaattgaaaaggcaaaaacagaagagaactatatccgggaccgccttgccctctctttaaaggaaaacagtcgtctggaaaatgagcttctagaaaatgcagagaagttggcagaatatgagaatctgacaaacaaacttcagagaaatttggaaaatgtgttagcagaaaagtttggtgacctcgatcctagcagtgctgagttcttcctgcaagaagagagactgacacagatgagaaatgaatatgagcggcagtgcagggtactacaagaccaagtagatgaactccagtctgagctggaagaatatcgtgcacaaggcagagtgctcaggcttccgttgaagaactcaccgtcagaagaagttgaggctaacagcggtggcattgagcccgaacacgggctcggttctgaagaatgcaatccattgaatatgagcattgaggcagagctggtcattgaacagatgaaagaacaacatcacagggacatatgttgcctcagactggagctcgaagataaagtgcgccattatgaaaagcagctggacgaaaccgtggtcagctgcaagaaggcacaggagaacatgaagcaaaggcatgagaacgaaacgcacaccttagaaaaacaaataagtgaccttaaaaatgaaattgctgaacttcaggggcaagcagcagtgctcaaggaggcacatcatgaggccacttgcaggcatgaggaggagaaaaaacaactgcaagtgaagcttgaggaggaaaagactcacctgcaggagaagctgaggctgcaacatgagatggagctcaaggctagactgacacaggctcaagcaagctttgagcgggagagggaaggccttcagagtagcgcctggacagaagagaaggtgagaggcttgactcaggaactagagcagtttcaccaggagcagctgacaagcctggtggagaaacacactcttgagaaagaggagttaagaaaagagctcttggaaaagcaccaaagggagcttcaggagggaagggaaaaaatggaaacagagtgtaatagaagaacctctcaaatagaagcccagtttcagtctgattgtcagaaagtcactgagaggtgtgaaagcgctctgcaaagcctggaggggcgctaccgccaagagctgaaggacctccaggaacagcagcgtgaggagaaatcccagtgggaatttgagaaggacgagctcacccaggagtgtgcggaagcccaggagctgctgaaagagactcttaagagagagaaaacaacttctctggtcctgacccaggagagagagatgctggagaaaacatacaaagaacatttgaacagcatggtcgtcgagagacagcagctactccaagacctggaagacctaagaaatgtatctgaaacccagcaaagcctgctgtctgaccagatacttgagctgaagagcagtcacaaaagggaactgagggagcgtgaggaggtcctgtgccaggcaggggcttcggagcagctggccagccagcggctggaaagactagaaatggaacatgaccaggaaaggcaggaaatgatgtccaagcttctagccatggagaacattcacaaagcgacctgtgagacagcagatcgagaaagagccgagatgagcacagaaatctccagacttcagagtaaaataaaggaaatgcagcaggcaacatctcctctctcaatgcttcagagtggttgccaggtgataggagaggaggaggtggaaggagatggagccctgtccctgcttcagcaaggggagcagctgttggaagaaaatggggacgtcctcttaagcctgcagagagctcatgaacaggcagtgaaggaaaatgtgaaaatggctactgaaatttctagattgcaacagaggctacaaaagttagagccagggttagtaatgtcttcttgtttggatgagccagctactgagttttttggaaatactgcggaacaaacagagccgtttttacagcaaaaccgaacgaagcaagtagaaggtgtgaccaggcggcatgtcctaagtgacctggaagatgatgaggtccgggacctgggaagtacagggacgagctctgttcagagacaggaagtcaaaatagaggagtctgaagcttcagtagagggtttttctgagcttgaaaacagtgaagagaccaggactgaatcctgggagctgaagaatcagattagtcagcttcaggaacagctaatgatgttatgtgcggactgtgatcgagcttctgaaaagaaacaggacctactttttgatgtttctgtgctaaaaaagaaactgaagatgcttgagagaatccctgaggcttctcccaaatataagctgttgtatgaagatgtgagccgagaaaatgactgccttcaggaagagctgagaatgatggagacacgctacgatgaggcactagaaaataacaaagaactcactgcagaggttttcaggttgcaggatgagctgaagaaaatggaggaagtcactgaaacattcctcagcctggaaaagagttacgatgaggtcaaaatagaaaatgaggagctgaatgttctggttttgagacttcaaggcaagattgagaagcttcaggaaagcgtggtccagcggtgtgactgctgcttatgggaagccagtttagagaacctggaaatcgaacctgatggaaatatactccagctcaatcagacactggaagagtgtgtgcccagggttaggagtgtacatcatgtcatagaggaatgtaagcaagaaaaccagtaccttgaggggaacacacagctcttggaaaaagtaaaagcacatgaaattgcctggttacatggaacaattcagacacatcaagaaaggccaagagtacagaatcaagttatactggaggaaaacactactctcctaggctttcaagacaaacattttcagcatcaggccaccatagcagagttagaactggagaaaacaaagttacaggagctgactaggaagttgaaggagagagtcactattttagttaagcaaaaagatgtactttctcacggagaaaaggaggaagagctgaaggcaatgatgcatgacttgcagatcacgtgcagtgagatgcagcaaaaagttgaacttctgagatatgaatctgaaaagcttcaacaggaaaattctattttgagaaatgaaattactactttaaatgaagaagatagcatttctaacctgaaattagggacattaaatggatctcaggaagaaatgtggcaaaaaacggaaactgtaaaacaagaaaatgctgcagttcagaagatggttgaaaatttaaagaaacagatttcagaattaaaaatcaaaaaccaacaattggatttggaaaatacagaacttagccaaaagaactctcaaaaccaggaaaaactgcaagaacttaatcaacgtctaacagaaatgctatgccagaaggaaaaagagccaggaaacagtgcattggaggaacgggaacaagagaagtttaatctgaaagaagaactggaacgttgtaaagtgcagtcctccactttagtgtcttctctggaggcggagctctctgaagttaaaatacagacccatattgtgcaacaggaaaaccaccttctcaaagatgaactggagaaaatgaaacagctgcacagatgtcccgatctctctgacttccagcaaaaaatctctagtgttctaagctacaacgaaaaactgctgaaagaaaaggaagctctgagtgaggaattaaatagctgtgtcgataagttggcaaaatcaagtcttttagagcatagaattgcgacgatgaagcaggaacagaaatcctgggaacatcagagtgcgagcttaaagtcacagctggtggcttctcaggaaaaggttcagaatttagaagacaccgtgcagaatgtaaacctgcaaatgtcccggatgaaatctgacctacgagtgactcagcaggaaaaggaggctttaaaacaagaagtgatgtctttacataagcaacttcagaatgctggtggcaagagctgggccccagagatagctactcatccatcagggctccataaccagcagaaaaggctgtcctgggacaagttggatcatctgatgaatgaggaacagcagctgctttggcaagagaatgagaggctccagaccatggtacagaacaccaaagccgaactcacgcactcccgggagaaggtccgtcagttggaatccaatcttcttcccaagcaccaaaaacatctaaacccatcaggtaccatgaatcccacagagcaagaaaaattgagcttaaagagagagtgtgatcagtttcagaaagaacaatctcctgctaacaggaaggtcagtcagatgaattcccttgaacaagaattagaaacaattcatttggaaaatgaaggcctgaaaaagaaacaagtaaaactggatgagcagctcatggagatgcagcacctgaggtccactgcgacgcctagcccgtcccctcatgcttgggatttgcagctgctccagcagcaagcctgtccgatggtgcccagggagcagtttctgcagcttcaacgccagctgctgcaggcagaaaggataaaccagcacctgcaggaggaacttgaaaacaggacctccgaaaccaacacaccacaggccttgctaccggagcagcgagcagtgcacgcagattcctacagaaggattgggcacctgtgaaaactgggctgctattgatggcatttcttaccatggcagacagatgcacacacccacccatgcacacacaccacacacagagacataagctaagatatgttggaattaagtgctcttttaaattattttattatttttactgttaaacctttgcagtattatgtctcttatttatttatgtagaaatgacagatcttgtgaatcaaattcacaaacatcagcttgttacaaatcattttatttataccctttaaagagtgtggatttaagattcttgaaaggatgtagtctatatattttctcattccatatgttgtaactatttttaaccaaaggtactacttttatatatggaatttgaagaaaaccaggggtatttatactgttttgtataagatgtacaaatctttttgacaggaaatttttgatgaaacaataaaataaattttaagtataaaaaaaaaaaaaaaaaaaaa

SEQ ID NO: 1443 - protein, 2046 aa, Homo sapiens
MDEVEQDQHEARLKELFDSFDTTGTGSLGQEELTDLCHMLSLEEVAPVLQQTLLQDNLLGRVHFDQFKEALILILSRTLSNEEHFQEPDCSLEAQPKYVRGGKRYGRRSLPEFQESVEEFPEVTVIEPLDEEARPSHIPAGDCSEHWKTQRSEEYEAEGQLRFWNPDDLNASQSGSSPPQDWIEEKLQEVCEDLGITRDGHLNRKKLVSICEQYGLQNVDGEMLEEVFHNLDPDGTMSVEDFFYGLFKNGKSLTPSASTPYRQLKRHLSMQSFDESGRRTTTSSAMTSTIGFRVFSCLDDGMGHASVERILDTWQEEGIENSQEILKALDFSLDGNINLTELTLALENELLVTKNSIHQAALASFKAEIRHLLERVDQVVREKEKLRSDLDKAEKLKSLMASEVDDHHAAIERRNEYNLRKLDEEYKERIAALKNELRKEREQILQQAGKQRLELEQEIEKAKTEENYIRDRLALSLKENSRLENELLENAEKLAEYENLTNKLQRNLENVLAEKFGDLDPSSAEFFLQEERLTQMRNEYERQCRVLQDQVDELQSELEEYRAQGRVLRLPLKNSPSEEVEANSGGIEPEHGLGSEECNPLNMSIEAELVIEQMKEQHHRDICCLRLELEDKVRHYEKQLDETVVSCKKAQENMKQRHENETHTLEKQISDLKNEIAELQGQAAVLKEAHHEATCRHEEEKKQLQVKLEEEKTHLQEKLRLQHEMELKARLTQAQASFEREREGLQSSAWTEEKVRGLTQELEQFHQEQLTSLVEKHTLEKEELRKELLEKHQRELQEGREKMETECNRRTSQIEAQFQSDCQKVTERCESALQSLEGRYRQELKDLQEQQREEKSQWEFEKDELTQECAEAQELLKETLKREKTTSLVLTQEREMLEKTYKEHLNSMVVERQQLLQDLEDLRNVSETQQSLLSDQILELKSSHKRELREREEVLCQAGASEQLASQRLERLEMEHDQERQEMMSKLLAMENIHKATCETADRERAEMSTEISRLQSKIKEMQQATSPLSMLQSGCQVIGEEEVEGDGALSLLQQGEQLLEENGDVLLSLQRAHEQAVKENVKMATEISRLQQRLQKLEPGLVMSSCLDEPATEFFGNTAEQTEPFLQQNRTKQVEGVTRRHVLSDLEDDEVRDLGSTGTSSVQRQEVKIEESEASVEGFSELENSEETRTESWELKNQISQLQEQLMMLCADCDRASEKKQDLLFDVSVLKKKLKMLERIPEASPKYKLLYEDVSRENDCLQEELRMMETRYDEALENNKELTAEVFRLQDELKKMEEVTETFLSLEKSYDEVKIENEELNVLVLRLQGKIEKLQESVVQRCDCCLWEASLENLEIEPDGNILQLNQTLEECVPRVRSVHHVIEECKQENQYLEGNTQLLEKVKAHEIAWLHGTIQTHQERPRVQNQVILEENTTLLGFQDKHFQHQATIAELELEKTKLQELTRKLKERVTILVKQKDVLSHGEKEEELKAMMHDLQITCSEMQQKVELLRYESEKLQQENSILRNEITTLNEEDSISNLKLGTLNGSQEEMWQKTETVKQENAAVQKMVENLKKQISELKIKNQQLDLENTELSQKNSQNQEKLQELNQRLTEMLCQKEKEPGNSALEEREQEKFNLKEELERCKVQSSTLVSSLEAELSEVKIQTHIVQQENHLLKDELEKMKQLHRCPDLSDFQQKISSVLSYNEKLLKEKEALSEELNSCVDKLAKSSLLEHRIATMKQEQKSWEHQSASLKSQLVASQEKVQNLEDTVQNVNLQMSRMKSDLRVTQQEKEALKQEVMSLHKQLQNAGGKSWAPEIATHPSGLHNQQKRLSWDKLDHLMNEEQQLLWQENERLQTMVQNTKAELTHSREKVRQLESNLLPKHQKHLNPSGTMNPTEQEKLSLKRECDQFQKEQSPANRKVSQMNSLEQELETIHLENEGLKKKQVKLDEQLMEMQHLRSTATPSPSPHAWDLQLLQQQACPMVPREQFLQLQRQLLQAERINQHLQEELENRTSETNTPQALLPEQRAVHADSYRRIGHL

SEQ ID NO: 1444 - DNA, 6522 bp, Homo sapiens
ccgagccgggagccgagcgcgctgggcgcggccgtcccgctgccgccgccaagcccggagtgcgccagcggccatggttcccgcggcggcgccgggcgcctgagccccgggacgcaagcgctggaggcgggctgccggctgtgcgggcgctccggagagaccgacagaaggtgagcactgtgggctatgggatggatgaggtggagcaggaccagcatgaggcccgactcaaggagctgtttgacagttttgacacgacgggcacagggtccctggggcaggaggaactcaccgacctttgccacatgttgagcttggaggaggtggccccagtgctgcagcagacattacttcaggacaacctcttgggcagggtacattttgaccaatttaaagaagcattaatactcatcttgtccagaactctgtcaaatgaagaacactttcaagaaccagactgctcactagaagctcagcccaaatatgttagaggtgggaagcgttacggacgaaggtccttgcccgagttccaagagtccgtggaggagtttcctgaagtgacggtgattgagccactggatgaagaagcgcggccttcacacatcccagccggtgactgcagtgagcactggaagacgcaacgcagtgaggagtatgaagcggaaggccagttaaggttttggaacccagatgacttgaatgcttcacagagtggatcttcccctccccaagactggatagaagagaaactgcaagaagtttgtgaagatttggggatcacccgtgatggtcacctgaaccggaagaagctggtctccatctgtgagcagtatggtttacagaatgtggatggagagatgctcgaggaagtattccataatcttgatcctgacggtacaatgagtgtagaagattttttctatggtttgtttaaaaatggaaaatctcttacaccatcagcatctactccatatagacaactaaaaaggcacctttccatgcagtctttcgatgagagtggacgacgtaccacaacctcatcagcaatgacaagtaccattggctttcgggtcttctcctgcctggatgatgggatgggccatgcatctgtggagagaatactggacacctggcaggaagagggcattgagaacagccaggagatcctgaaggccttggatttcagcctcgatggaaacatcaatttgacagaattaacactggcccttgaaaatgaacttttggttaccaagaacagcattcaccaggcggctctggccagctttaaggctgaaatccggcatttgttggaacgagttgatcaggtggtcagagaaaaagagaagctacggtcagatctggacaaggccgagaagctcaagtctttaatggcctcggaggtggatgatcaccatgcggccatagagcggcggaatgagtacaacctcaggaaactggatgaagagtacaaggagcgaatagcagccttaaaaaatgaactccgaaaagagagagagcagatcctgcagcaggcaggcaagcagcgtttagaacttgaacaggaaattgaaaaggcaaaaacagaagagaactatatccgggaccgccttgccctctctttaaaggaaaacagtcgtctggaaaatgagcttctagaaaatgcagagaagttggcagaatatgagaatctgacaaacaaacttcagagaaatttggaaaatgtgttagcagaaaagtttggtgacctcgatcctagcagtgctgagttcttcctgcaagaagagagactgacacagatgagaaatgaatatgagcggcagtgcagggtactacaagaccaagtagatgaactccagtctgagctggaagaatatcgtgcacaaggcagagtgctcaggcttccgttgaagaactcaccgtcagaagaagttgaggctaacagcggtggcattgagcccgaacacgggctcggttctgaagaatgcaatccattgaatatgagcattgaggcagagctggtcattgaacagatgaaagaacaacatcacagggacatatgttgcctcagactggagctcgaagataaagtgcgccattatgaaaagcagctggacgaaaccgtggtcagctgcaagaaggcacaggagaacatgaagcaaaggcatgagaacgaaacgcacaccttagaaaaacaaataagtgaccttaaaaatgaaattgctgaacttcaggggcaagcagcagtgctcaaggaggcacatcatgaggccacttgcaggcatgaggaggagaaaaaacaactgcaagtgaagcttgaggaggaaaagactcacctgcaggagaagctgaggctgcaacatgagatggagctcaaggctagactgacacaggctcaagcaagctttgagcgggagagggaaggccttcagagtagcgcctggacagaagagaaggtgagaggcttgactcaggaactagagcagtttcaccaggagcagctgacaagcctggtggagaaacacactcttgagaaagaggagttaagaaaagagctcttggaaaagcaccaaagggagcttcaggagggaagggaaaaaatggaaacagagtgtaatagaagaacctctcaaatagaagcccagtttcagtctgattgtcagaaagtcactgagaggtgtgaaagcgctctgcaaagcctggaggggcgctaccgccaagagctgaaggacctccaggaacagcagcgtgaggagaaatcccagtgggaatttgagaaggacgagctcacccaggagtgtgcggaagcccaggagctgctgaaagagactcttaagagagagaaaacaacttctctggtcctgacccaggagagagagatgctggagaaaacatacaaagaacatttgaacagcatggtcgtcgagagacagcagctactccaagacctggaagacctaagaaatgtatctgaaacccagcaaagcctgctgtctgaccagatacttgagctgaagagcagtcacaaaagggaactgagggagcgtgaggaggtcctgtgccaggcaggggcttcggagcagctggccagccagcggctggaaagactagaaatggaacatgaccaggaaaggcaggaaatgatgtccaagcttctagccatggagaacattcacaaagcgacctgtgagacagcagatcgagaaagagccgagatgagcacagaaatctccagacttcagagtaaaataaaggaaatgcagcaggcaacatctcctctctcaatgcttcagagtggttgccaggtgataggagaggaggaggtggaaggagatggagccctgtccctgcttcagcaaggggagcagctgttggaagaaaatggggacgtcctcttaagcctgcagagagctcatgaacaggcagtgaaggaaaatgtgaaaatggctactgaaatttctagattgcaacagaggctacaaaagttagagccagggttagtaatgtcttcttgtttggatgagccagctactgagttttttggaaatactgcggaacaaacagagccgtttttacagcaaaaccgaacgaagcaagtagaaggtgtgaccaggcggcatgtcctaagtgacctggaagatgatgaggtccgggacctgggaagtacagggacgagctctgttcagagacaggaagtcaaaatagaggagtctgaagcttcagtagagggtttttctgagcttgaaaacagtgaagagaccaggactgaatcctgggagctgaagaatcagattagtcagcttcaggaacagctaatgatgttatgtgcggactgtgatcgagcttctgaaaagaaacaggacctactttttgatgtttctgtgctaaaaaagaaactgaagatgcttgagagaatccctgaggcttctcccaaatataagctgttgtatgaagatgtgagccgagaaaatgactgccttcaggaagagctgagaatgatggagacacgctacgatgaggcactagaaaataacaaagaactcactgcagaggttttcaggttgcaggatgagctgaagaaaatggaggaagtcactgaaacattcctcagcctggaaaagagttacgatgaggtcaaaatagaaaatgaggagctgaatgttctggttttgagacttcaaggcaagattgagaagcttcaggaaagcgtggtccagcggtgtgactgctgcttatgggaagccagtttagagaacctggaaatcgaacctgatggaaatatactccagctcaatcagacactggaagagtgtgtgcccagggttaggagtgtacatcatgtcatagaggaatgtaagcaagaaaaccagtaccttgaggggaacacacagctcttggaaaaagtaaaagcacatgaaattgcctggttacatggaacaattcagacacatcaagaaaggccaagagtacagaatcaagttatactggaggaaaacactactctcctaggctttcaagacaaacattttcagcatcaggccaccatagcagagttagaactggagaaaacaaagttacaggagctgactaggaagttgaaggagagagtcactattttagttaagcaaaaagatgtactttctcacggagaaaaggaggaagagctgaaggcaatgatgcatgacttgcagatcacgtgcagtgagatgcagcaaaaagttgaacttctgagatatgaatctgaaaagcttcaacaggaaaattctattttgagaaatgaaattactactttaaatgaagaagatagcatttctaacctgaaattagggacattaaatggatctcaggaagaaatgtggcaaaaaacggaaactgtaaaacaagaaaatgctgcagttcagaagatggttgaaaatttaaagaaacagatttcagaattaaaaatcaaaaaccaacaattggatttggaaaatacagaacttagccaaaagaactctcaaaaccaggaaaaactgcaagaacttaatcaacgtctaacagaaatgctatgccagaaggaaaaagagccaggaaacagtgcattggaggaacgggaacaagagaagtttaatctgaaagaagaactggaacgttgtaaagtgcagtcctccactttagtgtcttctctggaggcggagctctctgaagttaaaatacagacccatattgtgcaacaggaaaaccaccttctcaaagatgaactggagaaaatgaaacagctgcacagatgtcccgatctctctgacttccagcaaaaaatctctagtgttctaagctacaacgaaaaactgctgaaagaaaaggaagctctgagtgaggaattaaatagctgtgtcgataagttggcaaaatcaagtcttttagagcatagaattgcgacgatgaagcaggaacagaaatcctgggaacatcagagtgcgagcttaaagtcacagctggtggcttctcaggaaaaggttcagaatttagaagacaccgtgcagaatgtaaacctgcaaatgtcccggatgaaatctgacctacgagtgactcagcaggaaaaggaggctttaaaacaagaagtgatgtctttacataagcaacttcagaatgctggtggcaagagctgggccccagagatagctactcatccatcagggctccataaccagcagaaaaggctgtcctgggacaagttggatcatctgatgaatgaggaacagcagctgctttggcaagagaatgagaggctccagaccatggtacagaacaccaaagccgaactcacgcactcccgggagaaggtccgtcagttggaatccaatcttcttcccaagcaccaaaaacatctaaacccatcaggtaccatgaatcccacagagcaagaaaaattgagcttaaagagagagtgtgatcagtttcagaaagaacaatctcctgctaacaggaaggtcagtcagatgaattcccttgaacaagaattagaaacaattcatttggaaaatgaaggcctgaaaaagaaacaagtaaaactggatgagcagctcatggagatgcagcacctgaggtccactgcgacgcctagcccgtcccctcatgcttgggatttgcagctgctccagcagcaagcctgtccgatggtgcccagggagcagtttctgcagcttcaacgccagctgctgcaggcagaaaggataaaccagcacctgcaggaggaacttgaaaacaggacctccgaaaccaacacaccacagggaaaccaggaacaactggtaactgtcatggaggaacgaatgatagaagttgaacagaaactgaaactagtgaaaaggcttcttcaagagaaagtgaatcagctcaaagaacaagtgagcctacccggtcatctctgttcacccacctcacattccagctttaactccagttttacatccctttattgccattaactcgttaacttatgttgtctaataaaggcaaattctattataaaaaaaaaaaaaaaaa

SEQ ID NO: 1445 - protein, 2090 aa, Homo sapiens
MDEVEQDQHEARLKELFDSFDTTGTGSLGQEELTDLCHMLSLEEVAPVLQQTLLQDNLLGRVHFDQFKEALILILSRTLSNEEHFQEPDCSLEAQPKYVRGGKRYGRRSLPEFQESVEEFPEVTVIEPLDEEARPSHIPAGDCSEHWKTQRSEEYEAEGQLRFWNPDDLNASQSGSSPPQDWIEEKLQEVCEDLGITRDGHLNRKKLVSICEQYGLQNVDGEMLEEVFHNLDPDGTMSVEDFFYGLFKNGKSLTPSASTPYRQLKRHLSMQSFDESGRRTTTSSAMTSTIGFRVFSCLDDGMGHASVERILDTWQEEGIENSQEILKALDFSLDGNINLTELTLALENELLVTKNSIHQAALASFKAEIRHLLERVDQVVREKEKLRSDLDKAEKLKSLMASEVDDHHAAIERRNEYNLRKLDEEYKERIAALKNELRKEREQILQQAGKQRLELEQEIEKAKTEENYIRDRLALSLKENSRLENELLENAEKLAEYENLTNKLQRNLENVLAEKFGDLDPSSAEFFLQEERLTQMRNEYERQCRVLQDQVDELQSELEEYRAQGRVLRLPLKNSPSEEVEANSGGIEPEHGLGSEECNPLNMSIEAELVIEQMKEQHHRDICCLRLELEDKVRHYEKQLDETVVSCKKAQENMKQRHENETHTLEKQISDLKNEIAELQGQAAVLKEAHHEATCRHEEEKKQLQVKLEEEKTHLQEKLRLQHEMELKARLTQAQASFEREREGLQSSAWTEEKVRGLTQELEQFHQEQLTSLVEKHTLEKEELRKELLEKHQRELQEGREKMETECNRRTSQIEAQFQSDCQKVTERCESALQSLEGRYRQELKDLQEQQREEKSQWEFEKDELTQECAEAQELLKETLKREKTTSLVLTQEREMLEKTYKEHLNSMVVERQQLLQDLEDLRNVSETQQSLLSDQILELKSSHKRELREREEVLCQAGASEQLASQRLERLEMEHDQERQEMMSKLLAMENIHKATCETADRERAEMSTEISRLQSKIKEMQQATSPLSMLQSGCQVIGEEEVEGDGALSLLQQGEQLLEENGDVLLSLQRAHEQAVKENVKMATEISRLQQRLQKLEPGLVMSSCLDEPATEFFGNTAEQTEPFLQQNRTKQVEGVTRRHVLSDLEDDEVRDLGSTGTSSVQRQEVKIEESEASVEGFSELENSEETRTESWELKNQISQLQEQLMMLCADCDRASEKKQDLLFDVSVLKKKLKMLERIPEASPKYKLLYEDVSRENDCLQEELRMMETRYDEALENNKELTAEVFRLQDELKKMEEVTETFLSLEKSYDEVKIENEELNVLVLRLQGKIEKLQESVVQRCDCCLWEASLENLEIEPDGNILQLNQTLEECVPRVRSVHHVIEECKQENQYLEGNTQLLEKVKAHEIAWLHGTIQTHQERPRVQNQVILEENTTLLGFQDKHFQHQATIAELELEKTKLQELTRKLKERVTILVKQKDVLSHGEKEEELKAMMHDLQITCSEMQQKVELLRYESEKLQQENSILRNEITTLNEEDSISNLKLGTLNGSQEEMWQKTETVKQENAAVQKMVENLKKQISELKIKNQQLDLENTELSQKNSQNQEKLQELNQRLTEMLCQKEKEPGNSALEEREQEKFNLKEELERCKVQSSTLVSSLEAELSEVKIQTHIVQQENHLLKDELEKMKQLHRCPDLSDFQQKISSVLSYNEKLLKEKEALSEELNSCVDKLAKSSLLEHRIATMKQEQKSWEHQSASLKSQLVASQEKVQNLEDTVQNVNLQMSRMKSDLRVTQQEKEALKQEVMSLHKQLQNAGGKSWAPEIATHPSGLHNQQKRLSWDKLDHLMNEEQQLLWQENERLQTMVQNTKAELTHSREKVRQLESNLLPKHQKHLNPSGTMNPTEQEKLSLKRECDQFQKEQSPANRKVSQMNSLEQELETIHLENEGLKKKQVKLDEQLMEMQHLRSTATPSPSPHAWDLQLLQQQACPMVPREQFLQLQRQLLQAERINQHLQEELENRTSETNTPQGNQEQLVTVMEERMIEVEQKLKLVKRLLQEKVNQLKEQVSLPGHLCSPTSHSSFNSSFTSLYCH

SEQ ID NO: 1446 - DNA, 2111 bp, Homo sapiens
gggcgcgcatgcgccggccgctgccacctacggcgaccctggcatgtgccagggattctccccgcccccttcctcgctgcgccggtggagagcgtagcagcagcatccaccgcctagcagagccgcgggccacagcgggacggcacagttccagcagggcagcggctgcgcacgccggctccggctcgcacacaggcgtaggccgccctctaccgcctgaaggccggaggctgagcggggcgcgagcggatcctggatcccgggaggagactcgcctccagagaatgctgtgctccctacagcgccgggaatggaccggcccgtgccagctcagtcggcggccctagggggcacccgcactagaggttttgaagctggctccttgctacttttaggggtgcgcgctgctgctgctcagcccctgcagcccgcatttggccgcttgactgctgcttccagcgcgatcctacaatggcatcgctcccccaggagactcagcgaagccctactttatcttgtaagagctgtttccacattcactcgaagagaaagaccccccccacgagggcctgagttcgatgcccggcctctcccgacccgcggctgcgacagcccctctgaggcggaagtttatttagtacgggaaagagaacagcacggggagaggggagaggctttgccctaggatgcgtcctacccgctcggactcggaaaattcccggcgcccgcgatgcagagcagtggaccgaagggctgccccagagcagcccagaccgccagctgagcgggaggaccggagcgcgccgccccagcacacaaagtagtcgcgggacgaggggtgccgccgaggccaatcagagctgcgcgccgcgtgagtggagtgcgagccggccaatcagagggccggaagatgagcttcccgttccaaactcttccctgtagccttgggacccagatcccaagcctggggcgctttacggtgggagagcgaaatggtgcccttaagacaagaatcatttctctaggcttgggcattttaaagtacataccggggatacttatcccaaagcaagtagcggcggccttttagatgttaaatattaaaagatcacagaaaggagatttaagaggcagtggcctgtcaaggttgcaatctgcctaatattcataaattcacatatttattgagaccttcttatgtaccaggaactctatcacagatacacaaataaggtactgctgattcaaaagaaaatcccttgtcctcaagcagctcaggttgtgagggaggctttcctagaccttgagactcgtatttattgtcagctctttaaacaaaaagcactctatgaagtgctgtactttacagtcgtttttatgattatctccctgtgagaaaagaaaattgaaaggaaagtagagtgacttgtccaagatcacacagaagatgtactagcagagccagaattatgttctagctcagtttgggtgtcatcattcaataaaataattcaataacaatttgtaaatgcatggatgctctctcccatgagatttctgtactaaacgtataagcaggacaaaattctggtataaaagtgacacactttggttgttggaaatgaacacaaattttagacttatgtgggattaaaggtaaaaatcttaccagtcatactttagataatttttagaagtcagaggtggggtggatatttacttcttagtttaaacacagcattttaaaaatattttaacaagcaagcgtaactttttttttttaagatagaagaagcaggaaggatcacttaagcccaagagttccaggctgcagtgccacatcgtgcctgtcagtagccacttcagcctgggcaacatagcaagaccctcatgtctaaaattaaaaataaaatttaaaaaaaagaactacttctagttggttaataatcatgatagtttacactgtataatactttgagatacccaagtacaaagctttacatttgcctaaaaattccatttttgtctggtgttccatttttacttccaaaatcctaggaattaaagcacttattttccctacctccttccaactgaaaaaaaaaaaaaaa

SEQ ID NO: 1447 - DNA, 2963 bp, Homo sapiens
ggccgacccgagcagccggttccctcctctccaggccccctccccatcccacccccgccgcctggccccagccgacccgtcccttcgtctccccgcggaatggggccggcactgctcagggtcgcgcgccctggacccagctcgctctcggtctcgcgctgtcagcgactgcccggctcgcgccgcctcgcgctctgcctcagtcagtggcgccgaaggctccgttaagcggcggcggcggttcctgtttccgtttcttcctctccgttcggtcgggagtagcatcctccactcagccacccttcccactcccccatcgtggggcagctgcggctgagggctgtggctttggcagctgcgacggggagcggcggagaccgcctctgctcccgcctggggttgctgcttttgctcagaggacatccatgaccctaatggtctttttgttcaagataaagtgattttttgcctttgttgattaactggacaaattcaggataccagaaggccctattgatcaggggccagctataggaagagtacgcgttttagaagagcagcttgttaaggccaaagaacagattgaaaattacaagaaacagaccagaaatggtctggggaaggatcatgaaatcctgaggaggaggattgaaaatggagctaaagagctctggtttttcctacagagtgaattgaagaaattaaagaacttagaaggaaatgaactccaaagacatgcagatgaatttcttttggatttaggacatcatgaaaggattctgatggcaattactgtctcattagtgaacaataaaagaaaaattgttgtattagcacaacctactactgtgaagaggaaaagaattaccccatacaagtctataatgacggatctatactacctcagtcagacagatggagcaggtgattggcgggaaaaagaggccaaagatctgacagaactggttcagcggagaataacatatcttcagaatcccaaggactgcagcaaagccaaaaagctggtgtgtaatatcaacaaaggctgtggctatggctgtcagctccatcatgtggtctactgcttcatgattgcatatggcacccagcgaacactcatcttggaatctcagaattggcgctatgctactggtggatgggagactgtatttaggcctgtaagtgagacatgcacagacagatctggcatctccactggacactggtcaggtgaagtgaaggacaaaaatgttcaagtggtcgagcttcccattgtagacagtcttcatccccgtcctccatatttacccttggctgtaccagaagacctcgcagatcgacttgtacgagtgcatggtgaccctgcagtgtggtgggtgtctcagtttgtcaaatacttgatccgcccacagccttggctagaaaaagaaatagaagaagccaccaagaagcttggcttcaaacatccagttattggagtccatgtcagacgcacagacaaagtgggaacagaagctgccttccatcccattgaagagtacatggtgcatgttgaagaacattttcagcttcttgcacgcagaatgcaagtggacaaaaaaagagtgtatttggccacagatgacccttctttattaaaggaggcaaaaacaaagtaccccaattatgaatttattagtgataactctatttcctggtcagctggactgcacaatcgatacacagaaaattcacttcgtggagtgatcctggatatacattttctctctcaggcagacttcctagtgtgtactttttcatcccaggtctgtcgagttgcttatgaaattatgcaaacactacatcctgatgcctctgcaaacttccattctttagatgacatctactattttgggggccagaatgcccacaatcaaattgccatttatgctcaccaaccccgaactgcagatgaaattcccatggaacctggagatatcattggtgtggctggaaatcattgggatggctattctaaaggtgtcaacaggaaattgggaaggacgggcctatatccctcctacaaagttcgagagaagatagaaacggtcaagtaccccacatatcctgaggctgagaaataaagctcagatggaagagataaacgaccaaactcagttcgaccaaactcagttcaaaccatttcagccaaactgtagatgaagagggctctgatctaacaaaataaggttatatgagtagatactctcagcaccaagagcagctgggaactgacataggcttcaattggtggaattcctctttaacaagggctgcaatgccctcatacccatgcacagtacaataatgtactcacatataacatgcaaacaggttgttttctactttgcccctttcagtatgtccccataagacaaacactgccatattgtgtaatttaagtgacacagacattttgtgtgagacttaaaacatggtgcctatatctgagagacctgtgtgaactattgagaagatcggaacagctccttactctgaggaagttgattcttatttgatggtggtattgtgaccactgaattcactccagtcaacagattcagaatgagaatggacgtttggtttttttttgtttttgtttttgttttttcctttataaggttgtctgtttttttttttttaaataattgcatcagttcattgacctcatcattaataagtgaagaatacatcagaaaataaaatattcactctccattagaaaattttgtaaaacaatgccatgaacaaattctttagtactcaatgtttctggacattctctttgataacaaaaaataaattttaaaaaggaattttgtaaagtttctagaattttatatcattggatgatatgttgatcagccttatgtggaagaactgtgataaaaagaggagctttttagtttttcagcttaaaaaaa

SEQ ID NO: 1448 - protein, 446 aa, Homo sapiens
MAITVSLVNNKRKIVVLAQPTTVKRKRITPYKSIMTDLYYLSQTDGAGDWREKEAKDLTELVQRRITYLQNPKDCSKAKKLVCNINKGCGYGCQLHHVVYCFMIAYGTQRTLILESQNWRYATGGWETVFRPVSETCTDRSGISTGHWSGEVKDKNVQVVELPIVDSLHPRPPYLPLAVPEDLADRLVRVHGDPAVWWVSQFVKYLIRPQPWLEKEIEEATKKLGFKHPVIGVHVRRTDKVGTEAAFHPIEEYMVHVEEHFQLLARRMQVDKKRVYLATDDPSLLKEAKTKYPNYEFISDNSISWSAGLHNRYTENSLRGVILDIHFLSQADFLVCTFSSQVCRVAYEIMQTLHPDASANFHSLDDIYYFGGQNAHNQIAIYAHQPRTADEIPMEPGDIIGVAGNHWDGYSKGVNRKLGRTGLYPSYKVREKIETVKYPTYPEAEK

SEQ ID NO: 1449 - DNA, 3291 bp, Homo sapiens
ggccgacccgagcagccggttccctcctctccaggccccctccccatcccacccccgccgcctggccccagccgacccgtcccttcgtctccccgcggaatggggccggcactgctcagggtcgcgcgccctggacccagctcgctctcggtctcgcgctgtcagcgactgcccggctcgcgccgcctcgcgctctgcctcagtcagtggcgccgaaggctccgttaagcggcggcggcggttcctgtttccgtttcttcctctccgttcggtcgggagtagcatcctccactcagccacccttcccactcccccatcgtggggcagctgcggctgagggctgtggctttggcagctgcgacggggagcggcggagaccgcctctgctcccgcctggggttgctgcttttgctcagaggacatccatgaccctaatggtctttttgttcaagataaagtgattttttgcctttgttgattaactggacaaattcagcatgtagagcgcatgaagtacaggacaataaagcttcctacacatatcaccaggaggatctctttgaaagattcactgcaggactaccagagagaataatttgtctgaagcatcatgtgttgaaacaacagaagtctattcacctgtgcactaactagaaacagagttacaatgttttcaattctttgagctccaggactccagggaagtgagttgaaaatctgaaaatgcggccatggactggttcctggcgttggattatgctcattctttttgcctgggggaccttgctgttttatataggtggtcacttggtacgagataatgaccatcctgatcactctagccgagaactgtccaagattctggcaaagcttgaacgcttaaaacaacagaatgaagacttgaggcgaatggccgaatctctccggataccagaaggccctattgatcaggggccagctataggaagagtacgcgttttagaagagcagcttgttaaggccaaagaacagattgaaaattacaagaaacagaccagaaatggtctggggaaggatcatgaaatcctgaggaggaggattgaaaatggagctaaagagctctggtttttcctacagagtgaattgaagaaattaaagaacttagaaggaaatgaactccaaagacatgcagatgaatttcttttggatttaggacatcatgaaaggtctataatgacggatctatactacctcagtcagacagatggagcaggtgattggcgggaaaaagaggccaaagatctgacagaactggttcagcggagaataacatatcttcagaatcccaaggactgcagcaaagccaaaaagctggtgtgtaatatcaacaaaggctgtggctatggctgtcagctccatcatgtggtctactgcttcatgattgcatatggcacccagcgaacactcatcttggaatctcagaattggcgctatgctactggtggatgggagactgtatttaggcctgtaagtgagacatgcacagacagatctggcatctccactggacactggtcaggtgaagtgaaggacaaaaatgttcaagtggtcgagcttcccattgtagacagtcttcatccccgtcctccatatttacccttggctgtaccagaagacctcgcagatcgacttgtacgagtgcatggtgaccctgcagtgtggtgggtgtctcagtttgtcaaatacttgatccgcccacagccttggctagaaaaagaaatagaagaagccaccaagaagcttggcttcaaacatccagttattggagtccatgtcagacgcacagacaaagtgggaacagaagctgccttccatcccattgaagagtacatggtgcatgttgaagaacattttcagcttcttgcacgcagaatgcaagtggacaaaaaaagagtgtatttggccacagatgacccttctttattaaaggaggcaaaaacaaagtaccccaattatgaatttattagtgataactctatttcctggtcagctggactgcacaatcgatacacagaaaattcacttcgtggagtgatcctggatatacattttctctctcaggcagacttcctagtgtgtactttttcatcccaggtctgtcgagttgcttatgaaattatgcaaacactacatcctgatgcctctgcaaacttccattctttagatgacatctactattttgggggccagaatgcccacaatcaaattgccatttatgctcaccaaccccgaactgcagatgaaattcccatggaacctggagatatcattggtgtggctggaaatcattgggatggctattctaaaggtgtcaacaggaaattgggaaggacgggcctatatccctcctacaaagttcgagagaagatagaaacggtcaagtaccccacatatcctgaggctgagaaataaagctcagatggaagagataaacgaccaaactcagttcgaccaaactcagttcaaaccatttcagccaaactgtagatgaagagggctctgatctaacaaaataaggttatatgagtagatactctcagcaccaagagcagctgggaactgacataggcttcaattggtggaattcctctttaacaagggctgcaatgccctcatacccatgcacagtacaataatgtactcacatataacatgcaaacaggttgttttctactttgcccctttcagtatgtccccataagacaaacactgccatattgtgtaatttaagtgacacagacattttgtgtgagacttaaaacatggtgcctatatctgagagacctgtgtgaactattgagaagatcggaacagctccttactctgaggaagttgattcttatttgatggtggtattgtgaccactgaattcactccagtcaacagattcagaatgagaatggacgtttggtttttttttgtttttgtttttgttttttcctttataaggttgtctgtttttttttttttaaataattgcatcagttcattgacctcatcattaataagtgaagaatacatcagaaaataaaatattcactctccattagaaaattttgtaaaacaatgccatgaacaaattctttagtactcaatgtttctggacattctctttgataacaaaaaataaattttaaaaaggaattttgtaaagtttctagaattttatatcattggatgatatgttgatcagccttatgtggaagaactgtgataaaaagaggagctttttagtttttcagcttaaaaaaa

SEQ ID NO: 1450 - protein, 575 aa, Homo sapiens
MRPWTGSWRWIMLILFAWGTLLFYIGGHLVRDNDHPDHSSRELSKILAKLERLKQQNEDLRRMAESLRIPEGPIDQGPAIGRVRVLEEQLVKAKEQIENYKKQTRNGLGKDHEILRRRIENGAKELWFFLQSELKKLKNLEGNELQRHADEFLLDLGHHERSIMTDLYYLSQTDGAGDWREKEAKDLTELVQRRITYLQNPKDCSKAKKLVCNINKGCGYGCQLHHVVYCFMIAYGTQRTLILESQNWRYATGGWETVFRPVSETCTDRSGISTGHWSGEVKDKNVQVVELPIVDSLHPRPPYLPLAVPEDLADRLVRVHGDPAVWWVSQFVKYLIRPQPWLEKEIEEATKKLGFKHPVIGVHVRRTDKVGTEAAFHPIEEYMVHVEEHFQLLARRMQVDKKRVYLATDDPSLLKEAKTKYPNYEFISDNSISWSAGLHNRYTENSLRGVILDIHFLSQADFLVCTFSSQVCRVAYEIMQTLHPDASANFHSLDDIYYFGGQNAHNQIAIYAHQPRTADEIPMEPGDIIGVAGNHWDGYSKGVNRKLGRTGLYPSYKVREKIETVKYPTYPEAEK

SEQ ID NO: 1451 - DNA, 3775 bp, Homo sapiens
cgtttagtacagaaatctcatgggagagagcatccatgcatttacaaattgttattgaattattttattgaatgatgacacccaaactgagctagaacataattctggctctgctagtacatcttctgtgtgatcttggacaagtcactctactttcctttcaattttcttttctcacagggagataatcataaaaacgactgtaaagtacagcacttcatagagtgctttttgtttaaagagctgacaataaatacgagtctcaaggtctaggaaagcctccctcacaacctgagctgcttgaggacaagggattttcttttgaatcagcagtaccttatttgtgtatctgtgatagagttcctggtacataagaaggtctcaataaatatgtgaatttatgaatattaggcagattgcaaccttgacaggccactgcctcttaaatctcctttctgtgatcttttaatatttaacatctaaaaggccgccgctacttgctttgggataagtatccccggtatgtactttaaaatgcccaagcctagagaaatgattcttgtcttaagggcaccatttcgctctcccaccgtaaagcgccccaggcttgggatctgggtcccaaggctacagggaagagtttggaacgggaagctcatcttccggccctctgattggccggctcgcactccactcacgcggcgcgcagctctgattggcctcggcggcacccctcgtcccgcgactactttgtgtgctggggcggcgcgctccggtcctcccgctcagctggcggtctgggctgctctggggcagcccttcggtccactgctctgcatcgcgggcgccgggaattttccgagtccgagcgggttgctgcttttgctcagaggacatccatgaccctaatggtctttttgttcaagataaagtgattttttgcctttgttgattaactggacaaattcagcatgtagagcgcatgaagtacaggacaataaagcttcctacacatatcaccaggaggatctctttgaaagattcactgcaggactaccagagagaataatttgtctgaagcatcatgtgttgaaacaacagaagtctattcacctgtgcactaactagaaacagagttacaatgttttcaattctttgagctccaggactccagggaagtgagttgaaaatctgaaaatgcggccatggactggttcctggcgttggattatgctcattctttttgcctgggggaccttgctgttttatataggtggtcacttggtacgagataatgaccatcctgatcactctagccgagaactgtccaagattctggcaaagcttgaacgcttaaaacaacagaatgaagacttgaggcgaatggccgaatctctccggataccagaaggccctattgatcaggggccagctataggaagagtacgcgttttagaagagcagcttgttaaggccaaagaacagattgaaaattacaagaaacagaccagaaatggtctggggaaggatcatgaaatcctgaggaggaggattgaaaatggagctaaagagctctggtttttcctacagagtgaattgaagaaattaaagaacttagaaggaaatgaactccaaagacatgcagatgaatttcttttggatttaggacatcatgaaaggtctataatgacggatctatactacctcagtcagacagatggagcaggtgattggcgggaaaaagaggccaaagatctgacagaactggttcagcggagaataacatatcttcagaatcccaaggactgcagcaaagccaaaaagctggtgtgtaatatcaacaaaggctgtggctatggctgtcagctccatcatgtggtctactgcttcatgattgcatatggcacccagcgaacactcatcttggaatctcagaattggcgctatgctactggtggatgggagactgtatttaggcctgtaagtgagacatgcacagacagatctggcatctccactggacactggtcaggtgaagtgaaggacaaaaatgttcaagtggtcgagcttcccattgtagacagtcttcatccccgtcctccatatttacccttggctgtaccagaagacctcgcagatcgacttgtacgagtgcatggtgaccctgcagtgtggtgggtgtctcagtttgtcaaatacttgatccgcccacagccttggctagaaaaagaaatagaagaagccaccaagaagcttggcttcaaacatccagttattggagtccatgtcagacgcacagacaaagtgggaacagaagctgccttccatcccattgaagagtacatggtgcatgttgaagaacattttcagcttcttgcacgcagaatgcaagtggacaaaaaaagagtgtatttggccacagatgacccttctttattaaaggaggcaaaaacaaagtaccccaattatgaatttattagtgataactctatttcctggtcagctggactgcacaatcgatacacagaaaattcacttcgtggagtgatcctggatatacattttctctctcaggcagacttcctagtgtgtactttttcatcccaggtctgtcgagttgcttatgaaattatgcaaacactacatcctgatgcctctgcaaacttccattctttagatgacatctactattttgggggccagaatgcccacaatcaaattgccatttatgctcaccaaccccgaactgcagatgaaattcccatggaacctggagatatcattggtgtggctggaaatcattgggatggctattctaaaggtgtcaacaggaaattgggaaggacgggcctatatccctcctacaaagttcgagagaagatagaaacggtcaagtaccccacatatcctgaggctgagaaataaagctcagatggaagagataaacgaccaaactcagttcgaccaaactcagttcaaaccatttcagccaaactgtagatgaagagggctctgatctaacaaaataaggttatatgagtagatactctcagcaccaagagcagctgggaactgacataggcttcaattggtggaattcctctttaacaagggctgcaatgccctcatacccatgcacagtacaataatgtactcacatataacatgcaaacaggttgttttctactttgcccctttcagtatgtccccataagacaaacactgccatattgtgtaatttaagtgacacagacattttgtgtgagacttaaaacatggtgcctatatctgagagacctgtgtgaactattgagaagatcggaacagctccttactctgaggaagttgattcttatttgatggtggtattgtgaccactgaattcactccagtcaacagattcagaatgagaatggacgtttggtttttttttgtttttgtttttgttttttcctttataaggttgtctgtttttttttttttaaataattgcatcagttcattgacctcatcattaataagtgaagaatacatcagaaaataaaatattcactctccattagaaaattttgtaaaacaatgccatgaacaaattctttagtactcaatgtttctggacattctctttgataacaaaaaataaattttaaaaaggaattttgtaaagtttctagaattttatatcattggatgatatgttgatcagccttatgtggaagaactgtgataaaaagaggagctttttagtttttcagcttaaaaaaaaaaaaaaaaa

SEQ ID NO: 1452 - protein, 575 aa, Homo sapiens; identical to SEQ ID NO: 1450

SEQ ID NO: 1453 - DNA, 3677 bp, Homo sapiens
cgtttagtacagaaatctcatgggagagagcatccatgcatttacaaattgttattgaattattttattgaatgatgacacccaaactgagctagaacataattctggctctgctagtacatcttctgtgtgatcttggacaagtcactctactttcctttcaattttcttttctcacagggagataatcataaaaacgactgtaaagtacagcacttcatagagtgctttttgtttaaagagctgacaataaatacgagtctcaaggtctaggaaagcctccctcacaacctgagctgcttgaggacaagggattttcttttgaatcagcagtaccttatttgtgtatctgtgatagagttcctggtacataagaaggtctcaataaatatgtgaatttatgaatattaggcagattgcaaccttgacaggccactgcctcttaaatctcctttctgtgatcttttaatatttaacatctaaaaggccgccgctacttgctttgggataagtatccccggtatgtactttaaaatgcccaagcctagagaaatgattcttgtcttaagggcaccatttcgctctcccaccgtaaagcgccccaggcttgggatctgggtcccaaggctacagggaagagtttggaacgggaagctcatcttccggccctctgattggccggctcgcactccactcacgcggcgcgcagctctgattggcctcggcggcacccctcgtcccgcgactactttgtgtgctggggcggcgcgctccggtcctcccgctcagctggcggtctgggctgctctggggcagcccttcggtccactgctctgcatcgcgggcgccgggaattttccgagtccgagcggcatgtagagcgcatgaagtacaggacaataaagcttcctacacatatcaccaggaggatctctttgaaagattcactgcaggactaccagagagaataatttgtctgaagcatcatgtgttgaaacaacagaagtctattcacctgtgcactaactagaaacagagttacaatgttttcaattctttgagctccaggactccagggaagtgagttgaaaatctgaaaatgcggccatggactggttcctggcgttggattatgctcattctttttgcctgggggaccttgctgttttatataggtggtcacttggtacgagataatgaccatcctgatcactctagccgagaactgtccaagattctggcaaagcttgaacgcttaaaacaacagaatgaagacttgaggcgaatggccgaatctctccggataccagaaggccctattgatcaggggccagctataggaagagtacgcgttttagaagagcagcttgttaaggccaaagaacagattgaaaattacaagaaacagaccagaaatggtctggggaaggatcatgaaatcctgaggaggaggattgaaaatggagctaaagagctctggtttttcctacagagtgaattgaagaaattaaagaacttagaaggaaatgaactccaaagacatgcagatgaatttcttttggatttaggacatcatgaaaggtctataatgacggatctatactacctcagtcagacagatggagcaggtgattggcgggaaaaagaggccaaagatctgacagaactggttcagcggagaataacatatcttcagaatcccaaggactgcagcaaagccaaaaagctggtgtgtaatatcaacaaaggctgtggctatggctgtcagctccatcatgtggtctactgcttcatgattgcatatggcacccagcgaacactcatcttggaatctcagaattggcgctatgctactggtggatgggagactgtatttaggcctgtaagtgagacatgcacagacagatctggcatctccactggacactggtcaggtgaagtgaaggacaaaaatgttcaagtggtcgagcttcccattgtagacagtcttcatccccgtcctccatatttacccttggctgtaccagaagacctcgcagatcgacttgtacgagtgcatggtgaccctgcagtgtggtgggtgtctcagtttgtcaaatacttgatccgcccacagccttggctagaaaaagaaatagaagaagccaccaagaagcttggcttcaaacatccagttattggagtccatgtcagacgcacagacaaagtgggaacagaagctgccttccatcccattgaagagtacatggtgcatgttgaagaacattttcagcttcttgcacgcagaatgcaagtggacaaaaaaagagtgtatttggccacagatgacccttctttattaaaggaggcaaaaacaaagtaccccaattatgaatttattagtgataactctatttcctggtcagctggactgcacaatcgatacacagaaaattcacttcgtggagtgatcctggatatacattttctctctcaggcagacttcctagtgtgtactttttcatcccaggtctgtcgagttgcttatgaaattatgcaaacactacatcctgatgcctctgcaaacttccattctttagatgacatctactattttgggggccagaatgcccacaatcaaattgccatttatgctcaccaaccccgaactgcagatgaaattcccatggaacctggagatatcattggtgtggctggaaatcattgggatggctattctaaaggtgtcaacaggaaattgggaaggacgggcctatatccctcctacaaagttcgagagaagatagaaacggtcaagtaccccacatatcctgaggctgagaaataaagctcagatggaagagataaacgaccaaactcagttcgaccaaactcagttcaaaccatttcagccaaactgtagatgaagagggctctgatctaacaaaataaggttatatgagtagatactctcagcaccaagagcagctgggaactgacataggcttcaattggtggaattcctctttaacaagggctgcaatgccctcatacccatgcacagtacaataatgtactcacatataacatgcaaacaggttgttttctactttgcccctttcagtatgtccccataagacaaacactgccatattgtgtaatttaagtgacacagacattttgtgtgagacttaaaacatggtgcctatatctgagagacctgtgtgaactattgagaagatcggaacagctccttactctgaggaagttgattcttatttgatggtggtattgtgaccactgaattcactccagtcaacagattcagaatgagaatggacgtttggtttttttttgtttttgtttttgttttttcctttataaggttgtctgtttttttttttttaaataattgcatcagttcattgacctcatcattaataagtgaagaatacatcagaaaataaaatattcactctccattagaaaattttgtaaaacaatgccatgaacaaattctttagtactcaatgtttctggacattctctttgataacaaaaaataaattttaaaaaggaattttgtaaagtttctagaattttatatcattggatgatatgttgatcagccttatgtggaagaactgtgataaaaagaggagctttttagtttttcagcttaaaaaaaaaaaaaaaaa

SEQ ID NO: 1454 - protein, 575 aa, Homo sapiens; identical to SEQ ID NO: 1450

SEQ ID NO: 1455 - DNA, 1396 bp, Homo sapiens
ctgtatttaggcctgtaagtgagacatgcacagacagatctggcatctccactggacactggtcaggtaccccaattatgaatttattagtgataactctatttcctggtcagctggactgcacaatcgatacacagaaaattcacttcgtggagtgatcctggatatacattttctctctcaggcagacttcctagtgtgtactttttcatcccaggtctgtcgagttgcttatgaaattatgcaaacactacatcctgatgcctctgcaaacttccattctttagatgacatctactattttgggggccagaatgcccacaatcaaattgccatttatgctcaccaaccccgaactgcagatgaaattcccatggaacctggagatatcattggtgtggctggaaatcattgggatggctattctaaaggtgtcaacaggaaattgggaaggacgggcctatatccctcctacaaagttcgagagaagatagaaacggtcaagtaccccacatatcctgaggctgagaaataaagctcagatggaagagataaacgaccaaactcagttcgaccaaactcagttcaaaccatttcagccaaactgtagatgaagagggctctgatctaacaaaataaggttatatgagtagatactctcagcaccaagagcagctgggaactgacataggcttcaattggtggaattcctctttaacaagggctgcaatgccctcatacccatgcacagtacaataatgtactcacatataacatgcaaacaggttgttttctactttgcccctttcagtatgtccccataagacaaacactgccatattgtgtaatttaagtgacacagacattttgtgtgagacttaaaacatggtgcctatatctgagagacctgtgtgaactattgagaagatcggaacagctccttactctgaggaagttgattcttatttgatggtggtattgtgaccactgaattcactccagtcaacagattcagaatgagaatggacgtttggtttttttttgtttttgtttttgttttttcctttataaggttgtctgtttttttttttttaaataattgcatcagttcattgacctcatcattaataagtgaagaatacatcagaaaataaaatattcactctccattagaaaattttgtaaaacaatgccatgaacaaattctttagtactcaatgtttctggacattctctttgataacaaaaaataaattttaaaaaggaattttgtaaagtttctagaattttatatcattggatgatatgttgatcagccttatgtggaagaactgtgataaaaagaggagctttttagtttttcagcttaaaaaaaaaaaaaaaaaaaaaaaaaaaa

SEQ ID NO: 1456 - protein, 169 aa, Homo sapiens
MHRQIWHLHWTLVRYPNYEFISDNSISWSAGLHNRYTENSLRGVILDIHFLSQADFLVCTFSSQVCRVAYEIMQTLHPDASANFHSLDDIYYFGGQNAHNQIAIYAHQPRTADEIPMEPGDIIGVAGNHWDGYSKGVNRKLGRTGLYPSYKVREKIETVKYPTYPEAEK

SEQ ID NO: 1457 - DNA, 5333 bp, Homo sapiens
ctgtcactgcagcctggcggcctgagcgccgagcctggggctggggccgcggtgctgaggacgcaaatcagccccgtagctgggtggagcctccgggcctgacgtggatcttcactggagaagtgactcagggatcctcccaggatgtctgcctcaccagacaacctgagtacagggggaaggttacagaacatgacagtggatgaatgcctccagtctcggaacaccgtcctccaggggcagccctttgggggtgtccccaccgtgctgtgcctcaacatcgccctgtgggtgctcgtccttgtggtttactccttcctccggaaagctgcgtgggactatgggcgcctggctctgctgatacacaatgacagcctgacctcgctgatctatggggagcagagcgagaagacatctccctcggagacttccttggagatggaacgcagagacaagggattctgttcctggttcttcaacagcataacaatgaaggacgaggatctgattaacaagtgtggggacgacgcgcgcatctacatcgtgttccagtaccacctcatcatctttgtgctcatcatctgtatcccctccctgggcatcattttgcccatcaactatactggatctgttctggactggagcagtcactttgctcggaccaccattgtcaatgtctccacagagagcaagctcctgtggctgcatagcctgctgtccttcttctacttcatcaccaacttcatgttcatggctcatcactgcctggggtttgcgcccaggaatagccaaaaggtcacaaggacactaatgatcacctatgtgcccaaggacattgaagacccagaactcatcattaagcattttcacgaggcctatccaggcagtgtcgtgacaagagtccacttctgctacgacgtcaggaacctgatcgacttggacgatcagaggcgccatgccatgcggggccggcttttctatacagccaaggccaagaagactgggaaggtgatgatcaggatccacccctgtgcccgcctgtgcttctgcaagtgctggacctgcttcaaggaggtggatgcagagcagtattacagcgagctagaggagcagctaacggacgagttcaacgccgagctcaaccgcgtgccgctcaagcggctggacctgatctttgtcaccttccaggactccaggatggccaagcgtgtccgtaaggattacaagtatgtccagtgtggtgtgcaaccccagcagtcctcagtgaccaccatcgtcaaatcatattactggagggtcactatggccccacaccccaaagacattatttggaaacacctgtctgtccgccgcttcttttggtgggcccgctttatcgcaatcaacaccttcctcttcttcctcttcttctttctcaccacgcctgccatcatcatgaacactatcgacatgtacaacgtcacccgccccatcgagaagctgcagaacccaattgtgacccagttcttcccctctgtgatgctctggggcttcacagtgatactgcctctgattgtctacttctccgccttcctcgaggcccactggaccagatcaagtcagaatctggtcatggtgcacaagtgctacatctttctggtgttcatggtagtcattctgccctctatgggactgaccagtttggatgtctttctccgctggctctttgacatctactatctagagcaagcatccatcaggttccagtgtgtgttcctgccagacaacggcgccttctttgtcaactacgtgatcacggcagctttacttggcacaggcatggagctgctgcgtctggggtcactcttctgctacagcacccgcctcttcttctctagatcagagccagagagagtcaacatcagaaagaaccaggccatagacttccagtttgggcgtgagtatgcgtggatgatgaacgtgttcagcgtggtgatggcgtacagcatcacttgccccatcattgtgccttttgggttgctctacctgtgcatgaagcacttgacggatcgctataacatgtactactcctttgcacccaccaaactgaacgagcagatccacatggctgccgtctcccaggccatctttgcgccactcttgggtctgttctggatgctgttcttctccatcctgcggttgggttctctccacgccatcaccatcttttccctgtccaccctcctcattgccatggtgattgcctttgttggcatttttctggggaagcttcggatggttgccgactacgagcccgaggaggaggagatccagacagtgtttgacatggagccaagcagcacctcctccacgcccacctccctcctgtatgtggccaccgtgctgcaagaaccggagttgaatctgacccccgcctcctccccagccaggcacacctatggcaccatgaacaaccagccggaagagggagaagaagagagtggtctgaggggctttgcgagggagctagactcggcccagttccaggaagggctggaactggagggccagaaccagtaccactgaccgggacctgaggcctccactggcgacttgttgaggggtcaggggagggcctggcaaggggaggcaggagggtggcctggacctccccactacctcctgcagactttgagaagcctacagtggagacatccaccaccccagccatgggccatacgggggtcctgacctgctgcccggctggaactggggctgctcggcagtgctgaaggagcctgggaagggatgggaggatacaggcaagcacatgtcttgagagaggtggctggagccccggcacagagactgaacgctggggtcccttcctgggaccaagatggagaaggtgttcctaagggaggagacagaaggaggctgccgaaggctctgtggggtcatcaccactctgcatcagctgcccttaaaaggagcttctgctgctgctcctcctcccagccccggcccattcctcccctgcagtctgaggaggcaaaggtatgtgcacggggcacattgacaggacacggaggaccacctcatcacagggttccctgcatggggatctgtaaagagaaagtttctgcacccaccagagcaagagccaactgaaagcgtagacctgagaagaggtaactcagccccttcctgctcctctgccctcatcagatgtccccaggagcagcagggcagaggcccttctttctattcttacaagggtagctagagcgtgatcactcagggctcatcaaatgagactcgtgtgcatttttcagaaggaaaccttggttagtccttgctgggtaacacaaagtggggtgagacgacagaagccgaattcatggaaggggggtcttctccccaaaactctgtgtggtgggaaaccagctatacctccccaagccccagggcctaaagagaagacccccgaagccaaagatgtggccacttaaaagcgtctcctgcctcctacccaactgagtgcctgggcccccagcttggccaagatgggcagtacgttagggtaagaaccccatgcttcaaacttaaggactgaccatcacctgcgtcccaagtaggacccttcctcccttctcggggctgcccctgcaccctgccttgaagaccacccaagcggcctccagtgtgggcctggtccagacattgcagatgcttcaaccgtgatgtcgccccaggcctgccaggggtgtggtggaggggaaggccacgtgctccagggagaagccctttctggagaagcaaggctgtcctcccagggctgccactaccagagacctgggggagctgaattccgaacagtgatggtgacactcagcacctttgccacagccggggggaaccggcttctgcctctgggatgggctctcatcagggccaccgtgcagcccagccagggaggacatgagaagggccagtgggggcctcaatgaaccagaacaagccaagctgaatggggtctgtgtgctccagggccctcttcagccccctcccccaaaggtctgggtccctgccaccaacctactgaaggccggcccccggctcacctcacctgagcacctgcaccaggccccaggcacatggctgccctgaactcagatcacctagaccttgtccctgccccacctttgccccatcctagccccagaagctccaagcttcaccgcaggtgagaaattgtgctcaatgggcagaaactgctatacccccagggcatggcccacattttggcatgagggtgtctttccagagagcttgggttggctggagagaggctgtctttcccattccttgtccagctaggaataaaggggaaatggtcctagcctggcccctacacacccaggtcccacaggccccctccccactggaatttcaccaaccaacaaggggaaagtacgctgttacagcatagcggtcaggcccagcaggagcttggcacatgatggggaggtggccagctccaggccctgcccgaccccatcatgtgtatttggtgtatggggtgtgggggtcacaccagaagctggcctggggtctcttctttgctggacacagctccctggcccctgcccccagcccctgcagcccctgccggactgtggaagccacatatgggaaaagtcctggcagacaatgtggcgggatgactgggggcttctccctctgaacctgggtccagtgtagcctggctctgagagaaggtggtgagcatgtggagaaggttccatagtccactcttaggggaaccagcaaagcctcatggcagttggctccatctggacctcccatggtcactacaggatggtggagcagggggcatcttttagcctccccccgccaccacatccaggccctctcaggcacctcctgcctcagcccacacctgcctcacccattgcccccctccccccacctactgccatcccactcctctgccagccacttcccagccgccccaccccactccatccaccaaatcacctcctgacttaatcctttctggaaggagctgccgcccaggaaccggtattgcctagagcctccaggaggggccctcctcaggcctccagtggccccatgcccacctgcctgaccctccactgcccctggaagcaaagtgcctatcagcagcgttgcgtcctctggggcccccggtcgggggggagggggtgtgggctaaccttggccaccaccacaaaaggaatgtgccagaatgctgaaccttcttgttaatgctatgaccgtgccttgaataaacaagtcctcccaacctc

SEQ ID NO: 1458 - protein, 806 aa, Homo sapiens
MSASPDNLSTGGRLQNMTVDECLQSRNTVLQGQPFGGVPTVLCLNIALWVLVLVVYSFLRKAAWDYGRLALLIHNDSLTSLIYGEQSEKTSPSETSLEMERRDKGFCSWFFNSITMKDEDLINKCGDDARIYIVFQYHLIIFVLIICIPSLGIILPINYTGSVLDWSSHFARTTIVNVSTESKLLWLHSLLSFFYFITNFMFMAHHCLGFAPRNSQKVTRTLMITYVPKDIEDPELIIKHFHEAYPGSVVTRVHFCYDVRNLIDLDDQRRHAMRGRLFYTAKAKKTGKVMIRIHPCARLCFCKCWTCFKEVDAEQYYSELEEQLTDEFNAELNRVPLKRLDLIFVTFQDSRMAKRVRKDYKYVQCGVQPQQSSVTTIVKSYYWRVTMAPHPKDIIWKHLSVRRFFWWARFIAINTFLFFLFFFLTTPAIIMNTIDMYNVTRPIEKLQNPIVTQFFPSVMLWGFTVILPLIVYFSAFLEAHWTRSSQNLVMVHKCYIFLVFMVVILPSMGLTSLDVFLRWLFDIYYLEQASIRFQCVFLPDNGAFFVNYVITAALLGTGMELLRLGSLFCYSTRLFFSRSEPERVNIRKNQAIDFQFGREYAWMMNVFSVVMAYSITCPIIVPFGLLYLCMKHLTDRYNMYYSFAPTKLNEQIHMAAVSQAIFAPLLGLFWMLFFSILRLGSLHAITIFSLSTLLIAMVIAFVGIFLGKLRMVADYEPEEEEIQTVFDMEPSSTSSTPTSLLYVATVLQEPELNLTPASSPARHTYGTMNNQPEEGEEESGLRGFARELDSAQFQEGLELEGQNQYH

SEQ ID NO: 1459 - DNA, 7907 bp, Homo sapiens
gggaggacgcgcggcgcgcccggcggacgccgcaggtcccatgccgcgccgcgacccccgcgcccctgccgcccgcgcccgcggccgccccccgccgcccgccgccccgggctcgccgcgccgcgcccgcgcgtccttagcggggccaccgagcgatgcccgccgggcgcccgcgaaagtttgtcggctcctgctgaagggcagcggcgcccccgcacccccgtgccccgctccggccaggagccttcacgtaaatgggtccagtcatgcctcccagtaagaagccagaaagctcaggaattagtgtctccagtggactgagtcagtgttacgggggcagcggtttctccaaggcccttcaggaagacgatgacctcgacttttctctgcctgacatccgattagaagagggggccatggaagatgaagagctgaccaacctgaactggctgcacgagagcaagaacttgctgaagagctttggggagtcggtcctcaggagtgtcagccccgtccaggacctggacgatgacacccccccatcccctgcccactctgacatgccctacgatgccaggcagaaccccaactgcaaacccccctactccttcagctgcctcatatttatggccatcgaggactctccaaccaagcgcctgccagtgaaggatatctacaactggatcttggaacattttccgtattttgcaaatgcacctactgggtggaaaaactcagtgagacacaatttatcattgaataagtgttttaagaaagtggacaaagagaggagtcagagtattgggaaagggtcgttgtggtgcatagacccagagtatagacaaaatctaattcaggctttgaaaaagacaccttatcacccacacccacacgtgttcaatacacctcccacctgtcctcaggcatatcaaagcacatcaggtccacccatctggccgggcagtaccttcttcaagagaaatggagcccttctccaagttcctccaggagtgatccaaaatggagcgcgggtcctgagccgagggctgtttcctggcgtgcggccgctgccaatcactcccattggggtgacagcggccatgaggaatggcatcaccagctgccggatgcggactgagagtgagccatcttgtggctccccagtggtcagcggagaccccaaggaggatcacaactacagcagtgccaagtcctccaacgcccggagcacctcgcccaccagcgactccatctcctcctcctcctcctcagccgacgaccactatgagtttgccaccaaggggagccaggagggcagcgagggcagcgaggggagcttccggagccacgagagccccagcgacacggaagaggacgacaggaagcacagccagaaggagcccaaggattctctgggggacagcgggtacgcatcccagcacaagaagcgccagcacttcgccaaggccaggaaggtccccagcgacacactgcccctcaaaaagagacgcaccgaaaagccccccgagagcgatgatgaggagatgaaagaagcggcagggtccctcctgcacttagcagggatccggtcctgtttgaataacatcaccaatcggacggcaaaggggcagaaagagcaaaaggaaaccacaaaaaattaaaaacaagtcactgatttgttttgaacttacgaccatttggtttcagcatgtcaggagatttctaatgatttgtggcaatatcagcaattttttttcttttttcttgtttttggtttggttttctttcttttcttttccttttattttgttttaatttgccccctcttctttgttttggacccttaagaattttatttttaaaggagattgaagccatagaactcatattgacactcagctgttttacaaaagcttttcattatctgaagacaaaaccgaaaaagccaaaattaccattgcttcctccagcttgtcagaaacctgtggctgaatccgcagggatgtcaacgtcaatatcacaggaacacacattcggcacctagaaggcacgtgggcaaagtaatcatcgttcaggcccaacccttaggtttaaaaagtcaggttgtccatcccattgggttcactgagtgaaggcacataaagcaattgaggaggaggaggaacccctcgtccccctaggagcagacccaagcttgtggcaccaggcatctgatggtgccaggaaagccactggaattgtcacacggcgagcacagagggccggccaccagtcctcgatgcttctgaaccctgaagcccgatgacatcttacgaggtggacgttggactgttcatgcgcatcgggtgtcagtgactcatggagaagaaatggggtaaatttttagtgatgttgctaatcattgaattctgttctctattaaattaagaaaatgttccaaaagccataagcctgaagattggccctgtgcacgcacgcacacacacacacacacacacacacacacacacacacacacgaaggagagagagagaaaactgatggggaaaacaagctgtgtcttcttaactgcccaagtgaaaagcaaccaagtccaggaaattacaatagctgttaaggaaaggaaataatggtacagatctttttctgtctatcaaaactatttgatccaagtgaaaaaaaaaaaaaaactagaaagctacggaacctgccattagtattgtggtgtatttttaagattaaaggtacactgatggacaaaaaaaaaaagtaaaacatggcaaaaaataaaataactcctatactgccctcaaaatggagtttgcaattaatatcaggatttatctttgcaaaaatcagtgatttccacattcagccagtatagccagcagaaatttctgatccacaatgcatggattcctttgaagaaaaaaaagaaaaagagaaaaaaatcacaaaaacaaactttttttattcaaaagtaacaaagttcttgtaaggtaaataatgtatttagcatgaagcatgaattattttcatataaatatagaaaatagagaaaaggctatgcctgtaatttttaagcccttaggcttagagtttcttttggttttcttcttttttctttccttttctttgctttctttttttcctttttgtttttgtttttgttttttgtttttgtttttttttcgggttattttgttttggttttttgaagcaggtgtttaaggtttaaccttcttcagggacaaattctgactgttggggaacttactctgcaatataaaaatatcttcatgctctggtagggcttggatggttgaactctgtactgccttgtgtgcacttcagccccgaccccctctgattctctgttgaaaagtgtgtcctttctctctgtctgtacatgtttaacatgacgcaataatttgagggcaaacttagtagtgagtgtgtatgatagaatcaagagaattatgggacgcttacttgagaaaatcattaccatgatttggttctaggaaaaaggcagtgaataattatgcaaattagccagaagaaggggaaccgtgctaatgggccttattgggtgaggggacgagatggggttcatgtgaaggaggaagcgatgccgaggtaggaaaggccagccccagacatcctatcgccacaatgccatgtcgcaataggaagcaggggccggccatcgctaccttcagcacactgaccaacctggaattaagaccacctagattgcgagagctgaatttagaaaccagacaacgtcatgcagcccagaaactcctgttgttacctttgcctaagaaattttctttaatggcgggggcggggggcgggggtacaaagagaaatctctaaaagaatatgatcttccatccaagtggagggaaactttaaaacaaaaacacccagtactgtggctcaggatatgatgcgtgaggagagggagggaacagagatgaccttaacttttaaaaaagggactgctgtgggccaaagccaagcccatctgccaggacgaggtaatgtcagagctccatcagcccggacagtgggaactaactggtgcattccccacacttaccttccggtgggttgctgatgagagaacctgaaaaaacctacacctctacagcaggtcgaattcatgacctgaagctgaatacttccagcatatttattcagggtgtaggtgggaataaagtatcttcgcagtgctctgttccctccgtctccccagacatctgacaccctaaaagccatccacagctatggaacctgagcgacaccttgatttgtgttgtcacctgaccaagcctaaagacctccagctcagtcccccaccttcatcccaccccacagatgataaaattcagacctctctcctgaaaggcagaggttcaacattcaggactgtttctggccgaggacttcttccaattaaaacccccaccgtgggctgtctcccctcatttcatttttctaaaggggcagaggcctcttttagaaaataataaaatgcaatgtgtgtgatttacttttctgatctctttgagaaatagagaaatataaaagtgtgttcttaactccagaaccactctttttgcataaatacctcatcgggcagctttctaagtgtgattttcctgagtctcccttcgttggatctgccggaagacttgtcggggaacctttagtgagggtacttcttcctatttttcttctgtttttggaggcatacacattatgcataaccaaaacaatggctcaattgtgtttaactttgtattttgattgttgagaacaaaaacaaaaagtatcaatgtgtatgtggctgtttgtagtgaatttattggagaatgaggttgtccgtgtccttaacaagccaaggggcaggaggcaccctctcttatcccctcctccaagagcagtagagaatttaagcacaagcctatttgtgaaagaatattttgcttaagtgtcattcactttagtcttggaattccttcccaaacgtcaggtgttcttttagcttccaaactagcatatgtatccattagtctgacagatcgcctgaacaccattaagaggtgtggcgtttttgctttcatttctcctgctgggagaagtggcggttcatgtgtcattccagtatctcacatactcacacggggcaggggggagggggaaacggggaactatagcaatatttaaagatgctttggaaaccaaccgtgaacacatcaacaccacgacgtctacgattacttgctattggccctcggatacatttaagagaaagagacagtcactcttttttttcttaaatgatatacatataaacagttatttttatcctattataattgtcttttgtctttatctagtactatgtggaaagggtttgcatcatagatttttcccagccttataatataccataagctcctacttccctgcccctccctaatcagtattctttcaagagttctttggtgaagccatctatctgaaactaaaatgaaccaaacccatatttcactggtggttggagaaaaccatggccaaaacgattgtggcaggtctcaatcttgggagtttttaagaaggaatgtgccagaggccgattcccaagaacagagttttcttttgttttgcagaggcattcaatgtgtctagtgcttgctggccacagcagttactaccacagagccttctgggaggggccgttgtgttgaaggaggctcctgcctgagggacagcatcaggcagtgggctctgtagagtgagaaccaggtggaggccttctgtgcccagctcagagttctgcaccacgccaggactgcccaggccaagggctactgacgcaagttccactcattccactctgtggggggcgccttgggcctctcctggaagggctcttggagaaggaattggagttacgtacaagtgacctaaatgggaagcttttctagatgagattggattaaattccatgtgatttctctttccctttaatccaggttgggactcgtttctttctggtggatcacagctgcccagatgttgcaattgatttttatgtttctgtagagaagtatttttctttcatcttcaggattttttttgccaccaaaagaaaacattggaactctgtgtttcctcttgattgtgacttcccagtgttgacagttaagtccttagtgtcgtaggtcccagcccaccaatactatatcaaacactgttatgcacataatgcagcactgtgatctaatttaaataatacttttttattatttatactactatatataatatacatcaacacttttgctatataacctaagtgataaccctcttttagttacctgccaaactctggacttggtttatattgcagttaacacagttacaaagctgtaatggtgtctttttttcctttgtaacggaatgtgtaaatcaaagtatatacattgtgtggtgttcctgtttctggagtttcatgaggatttacacatggcattcagtgttctgtatagatctgcctacctttgtgaattcatctgttaacccctcttcctttgagagagcaccggcgatggtggttaactccttgtgttttctctctctcctactggttattcttgaattaagcacagactcgtcagctcggttgctttatcatgaataatgtgtgtgaccttgcagttcttccacagttcagcaaacaagtgctagcttcactgaccaaaaattaaggaaggaaaacacagtttttaaaacgatccatcttttaacagccgaaaccgatgtgtctatggtgctgcaccttgctgttgtacttctgaaatcagacgtgtgtgaacgatcatttctgacttaaccgtgagatgctcacgagtacccttcctgttgttttgttagcattgaaatcgagactatttatttggaatatatacaacagtgtttttccactgtatttcatttgcaaaagttgagaactgctttctctaccttttgcaaaataattgatattccatattggattctcaaagacttcgatatggtgaacctattaaacctagaaattgtattcatcctttcatgactgtggcctgagttccccagcccctctcctccttttttttagatgagatttagcacactctcagttatttaaacatgcaacatttcttgagtatgtatgttgaggccatctgagctcatagctgattcagtaaccagtttcatgctgtgtcattcacactcactacttaatactgccatggtgaaaatgtggaggaaaaatgtatccatgtgtgtctgggaagcatatacacttgtacattttttaatactctgattctgtaacatttctgagttttgttttgttttacagaaaaaaaaaaaaagtgataaagcaatcagaagaccaagaggtttactattgatgcttagggtcgtctgaccttggctggccaatagacctacacggccaaattaatttacgagagtaataatttttcaaaagccaattttttttctgtattttctgtatgaaactgccaatatcatgaatagaaagggagaaccataaaggagaaagaacgtgatgttctgttatgttcatgtaaacctaaagaaacagtgtggaggcaggcgcgatcagccgaactctagggacttggtgttgcttggaaggcatccatacctgcattttgcattcttcgtatgtaatcatattgccaaagacaaactatttcatcatttattgtaaataacacttttccccagacctaccataaagtttctgtgatgtattgtcttccagttgcaataaaaattactgagttgcatcaattgaagaaaaacaccaaaaa

SEQ ID NO: 1460 - protein, 468 aa, Homo sapiens
MGPVMPPSKKPESSGISVSSGLSQCYGGSGFSKALQEDDDLDFSLPDIRLEEGAMEDEELTNLNWLHESKNLLKSFGESVLRSVSPVQDLDDDTPPSPAHSDMPYDARQNPNCKPPYSFSCLIFMAIEDSPTKRLPVKDIYNWILEHFPYFANAPTGWKNSVRHNLSLNKCFKKVDKERSQSIGKGSLWCIDPEYRQNLIQALKKTPYHPHPHVFNTPPTCPQAYQSTSGPPIWPGSTFFKRNGALLQVPPGVIQNGARVLSRGLFPGVRPLPITPIGVTAAMRNGITSCRMRTESEPSCGSPVVSGDPKEDHNYSSAKSSNARSTSPTSDSISSSSSSADDHYEFATKGSQEGSEGSEGSFRSHESPSDTEEDDRKHSQKEPKDSLGDSGYASQHKKRQHFAKARKVPSDTLPLKKRRTEKPPESDDEEMKEAAGSLLHLAGIRSCLNNITNRTAKGQKEQKETTKN

SEQ ID NO: 1461 - DNA, 1510 bp, Homo sapiens
atccaccgcaggcttactgtacacatgctagggtccaggacagcaggaccaagccagcagaaacagcctgagcccaccgcagactggcctggctatactggacaatgccactcctcctgtacacctgtcttctctggctgcccaccagcggcctctggaccgtccaggccatggatcctaacgctgcttatgtgaacatgagtaaccatcaccggggcctggcttcagccaacgttgactttgccttcagcctgtataagcacctagtggccttgagtcccaaaaagaacattttcatctcccctgtgagcatctccatggccttagctatgctgtccctgggcacctgtggccacacacgggcccagcttctccagggcctgggtttcaacctcactgagaggtctgagactgagatccaccagggtttccagcacctgcaccaactctttgcaaagtcagacaccagcttagaaatgaccatgggcaatgccttgtttcttgatggcagcctggagttgctggagtcattctcagcagacatcaagcactactatgagtcagaggtcttggctatgaatttccaggactgggcaacagccagcagacagatcaacagctatgtcaagaataagacacaggggaaaattgtcgacttgttttcagggctggatagcccagccatcctcgtcctggtcaactatatcttcttcaaaggcacatggacacagccctttgacctggcaagcaccagggaggagaacttctatgtggacgagacaactgtggtgaaggtgcccatgatgttgcagtcgagcaccatcagttaccttcatgacgcggagctcccctgccagctggtgcagatgaactacgtgggcaatgggactgtcttcttcatccttccggacaaggggaagatgaacacagtcatcgctgcactgagccgggacacgattaacaggtggtccgcaggcctgaccagcagccaggtggacctgtacattccaaaggtcaccatctctggagtctatgacctcggagatgtgctggaggaaatgggcattgcagacttgttcaccaaccaggcaaatttctcacgcatcacccaggacgcccagctgaagtcatcaaaggtggtccataaagctgtgctgcaactcaatgaggagggtgtggacacagctggctccactggggtcaccctaaacctgacgtccaagcctatcatcttgcgtttcaaccagcccttcatcatcatgatcttcgaccacttcacctggagcagccttttcctggcgagggttatgaacccagtgtaagagaccacccacccagagcctcagcactgtctgactttgggaaccagggatcccacagaaatgttttggagagcgggaggtttcccccaatctcctccaagttcttctccctccaaccagagttgtgtctaactttaggcatcttttaataaatgtcattgcgactctgaaaaaaaaaaaaaaaaaaa

SEQ ID NO: 1462 - protein, 405 aa, Homo sapiens
MPLLLYTCLLWLPTSGLWTVQAMDPNAAYVNMSNHHRGLASANVDFAFSLYKHLVALSPKKNIFISPVSISMALAMLSLGTCGHTRAQLLQGLGFNLTERSETEIHQGFQHLHQLFAKSDTSLEMTMGNALFLDGSLELLESFSADIKHYYESEVLAMNFQDWATASRQINSYVKNKTQGKIVDLFSGLDSPAILVLVNYIFFKGTWTQPFDLASTREENFYVDETTVVKVPMMLQSSTISYLHDAELPCQLVQMNYVGNGTVFFILPDKGKMNTVIAALSRDTINRWSAGLTSSQVDLYIPKVTISGVYDLGDVLEEMGIADLFTNQANFSRITQDAQLKSSKVVHKAVLQLNEEGVDTAGSTGVTLNLTSKPIILRFNQPFIIMIFDHFTWSSLFLARVMNPV

SEQ ID NO: 1463 - DNA, 1752 bp, Homo sapiens
atgaccccaggctccaccaagcatcttcatgtccccctgctcatcccccactcccccccacccagagttgctcatcctgccagggctggctgtgcccaccccaaggctgccctcctgggggccccagaactgcctgatcgtgccgtggcccagttttgtggcatctgcagcaacacaagagagaggacaattcacatggccataggcctgctgatggctcaggaaggccattgcaaggactcctcagctatgggagaggaagcacatcacccattgacccccgcaacccctccctttcctcctctgagtcccgactggggccacatgcagcctgacttctttgtgcctgttgctgtccctgcagtcttcagagggccaccgcagctccagtgccacggcaggaggctgttcctgaatagcccctgtgcccagaaatcttcctctggcctagttgtggagcctggcctaagtcgcacattgctggagatggtgaagctgaccagcatgagaggcagtggcacagcagagccagggccagatctggaggtggctgtgcccccctggggggtgcagactcacagcccctccaacagggagcccctccagagtggagagaacgagtccttcccagtcacacccaggagccctcgggtggcacttggcagctggtgtcaccaccctaagtacccacacaaatgggctatggaggcagagcaacaaggattccagctcctggtgagagattcccaggccagggtcttggtagacacaagcctggtgacttcaggcagctggcaattactgggcatctaccaagggacaataccattctctgtctcatggggcgtcctcctgctggcaggcctgtgctgcctggtccccagctccctggttgaggatccccaggaagatgctgcccaaaagacggatacatcccaccatgatcaaggggactgggaggaccttgcttgccagaagatctcctataacgtcaccgacctcgcctttgatttgtacaaagagctggctgatctatcacaaaccagcaatgtcttagtcaccccaacaagcgtggctatggcctttgcaatgctctccctggggaccaaggctgacactcgcacagagatcctggaaggcctgaatgtcaacctcacagagacgcctgaggccaagatccacgaatgcttccagcaagttctccaagccctcagcaggccagacacccggctccagctgaccaccggcagtagcctgtttgttaacaagagtatgaagctagtggacacgtttttggaggataccaagaagctgtaccactcagaagcctcttccatcaacttcagggacaccgaggaggccaaagagcagatcaacaattatgtggagaaaagaactggaagaaaagtagtggatttggtcaaacacctgaaaaaagacacaagtcttgccctggtggattacatttcctttcacggcaagtggaaagataaattcaaggctgagcgcattatggtagagggcttccatgtggatgataagaccatcatcagagtgcctatgataaaccacctgggtagatttgacatccaccgggacagggagttatccagctgggtgctggcacagcactatgtggggaacgccactgccttcttcatcctgcccgatccaaagaagatgtggcagttggaagaaaaattgacctacagccaccttgaaaatatccagagagcctttgacataaggtga

SEQ ID NO: 1464 - protein, 583 aa, Homo sapiens [sequence omitted]

SEQ ID NO: 1465 - DNA, 1607 bp, Homo sapiens
aatgactcctttcggtaagtgcagtggaagctgtacactgcccaggcaaagcgtccgggcagcgtaggcgggcgactcagatcccagccagtggacttagcccctgtttgctcctccgataactggggtgaccttggttaatattcaccagcagcctcccccgttgcccctctggatccactgcttaaatacggacgaggacagggccctgtctcctcagcttcaggcaccaccactgacctgggacagtgaatcgacaatgccgtcttctgtctcgtggggcatcctcctgctggcaggcctgtgctgcctggtccctgtctccctggctgaggatccccagggagatgctgcccagaagacagatacatcccaccatgatcaggatcacccaaccttcaacaagatcacccccaacctggctgagttcgccttcagcctataccgccagctggcacaccagtccaacagcaccaatatcttcttctccccagtgagcatcgctacagcctttgcaatgctctccctggggaccaaggctgacactcacgatgaaatcctggagggcctgaatttcaacctcacggagattccggaggctcagatccatgaaggcttccaggaactcctccgtaccctcaaccagccagacagccagctccagctgaccaccggcaatggcctgttcctcagcgagggcctgaagctagtggataagtttttggaggatgttaaaaagttgtaccactcagaagccttcactgtcaacttcggggacaccgaagaggccaagaaacagatcaacgattacgtggagaagggtactcaagggaaaattgtggatttggtcaaggagcttgacagagacacagtttttgctctggtgaattacatcttctttaaaggcaaatgggagagaccctttgaagtcaaggacaccgaggaagaggacttccacgtggaccaggtgaccaccgtgaaggtgcctatgatgaagcgtttaggcatgtttaacatccagcactgtaagaagctgtccagctgggtgctgctgatgaaatacctgggcaatgccaccgccatcttcttcctgcctgatgaggggaaactacagcacctggaaaatgaactcacccacgatatcatcaccaagttcctggaaaatgaagacagaaggtctgccagcttacatttacccaaactgtccattactggaacctatgatctgaagagcgtcctgggtcaactgggcatcactaaggtcttcagcaatggggctgacctctccggggtcacagaggaggcacccctgaagctctccaaggccgtgcataaggctgtgctgaccatcgacgagaaagggactgaagctgctggggccatgtttttagaggccatacccatgtctatcccccccgaggtcaagttcaacaaaccctttgtcttcttaatgattgaacaaaataccaagtctcccctcttcatgggaaaagtggtgaatcccacccaaaaataactgcctctcgctcctcaacccctcccctccatccctggccccctccctggatgacattaaagaagggttgagctggtccctgcctgcaaaa

SEQ ID NO: 1466 - protein, 418 aa, Homo sapiens
MPSSVSWGILLLAGLCCLVPVSLAEDPQGDAAQKTDTSHHDQDHPTFNKITPNLAEFAFSLYRQLAHQSNSTNIFFSPVSIATAFAMLSLGTKADTHDEILEGLNFNLTEIPEAQIHEGFQELLRTLNQPDSQLQLTTGNGLFLSEGLKLVDKFLEDVKKLYHSEAFTVNFGDTEEAKKQINDYVEKGTQGKIVDLVKELDRDTVFALVNYIFFKGKWERPFEVKDTEEEDFHVDQVTTVKVPMMKRLGMFNIQHCKKLSSWVLLMKYLGNATAIFFLPDEGKLQHLENELTHDIITKFLENEDRRSASLHLPKLSITGTYDLKSVLGQLGITKVFSNGADLSGVTEEAPLKLSKAVHKAVLTIDEKGTEAAGAMFLEAIPMSIPPEVKFNKPFVFLMIEQNTKSPLFMGKVVNPTQK

SEQ ID NO: 1467 - DNA, 1588 bp, Homo sapiens
tgggcaggaactgggcactgtgcccagggcatgcactgcctccacgcagcaaccctcagagtcctgagctgaaccaagaaggaggagggggtcgggcctccgaggaaggcctagccgctgctgctgccaggaattccaggttggaggggcggcaacctcctgccagccttcaggccactctcctgtgcctgccagaagagacagagcttgaggagagcttgaggagagcaggaaaggacaatgccgtcttctgtctcgtggggcatcctcctgctggcaggcctgtgctgcctggtccctgtctccctggctgaggatccccagggagatgctgcccagaagacagatacatcccaccatgatcaggatcacccaaccttcaacaagatcacccccaacctggctgagttcgccttcagcctataccgccagctggcacaccagtccaacagcaccaatatcttcttctccccagtgagcatcgctacagcctttgcaatgctctccctggggaccaaggctgacactcacgatgaaatcctggagggcctgaatttcaacctcacggagattccggaggctcagatccatgaaggcttccaggaactcctccgtaccctcaaccagccagacagccagctccagctgaccaccggcaatggcctgttcctcagcgagggcctgaagctagtggataagtttttggaggatgttaaaaagttgtaccactcagaagccttcactgtcaacttcggggacaccgaagaggccaagaaacagatcaacgattacgtggagaagggtactcaagggaaaattgtggatttggtcaaggagcttgacagagacacagtttttgctctggtgaattacatcttctttaaaggcaaatgggagagaccctttgaagtcaaggacaccgaggaagaggacttccacgtggaccaggtgaccaccgtgaaggtgcctatgatgaagcgtttaggcatgtttaacatccagcactgtaagaagctgtccagctgggtgctgctgatgaaatacctgggcaatgccaccgccatcttcttcctgcctgatgaggggaaactacagcacctggaaaatgaactcacccacgatatcatcaccaagttcctggaaaatgaagacagaaggtctgccagcttacatttacccaaactgtccattactggaacctatgatctgaagagcgtcctgggtcaactgggcatcactaaggtcttcagcaatggggctgacctctccggggtcacagaggaggcacccctgaagctctccaaggccgtgcataaggctgtgctgaccatcgacgagaaagggactgaagctgctggggccatgtttttagaggccatacccatgtctatcccccccgaggtcaagttcaacaaaccctttgtcttcttaatgattgaacaaaataccaagtctcccctcttcatgggaaaagtggtgaatcccacccaaaaataactgcctctcgctcctcaacccctcccctccatccctggccccctccctggatgacattaaagaagggttgagctggtccctgcctgcaaaa

SEQ ID NO: 1468 - protein, 418 aa, Homo sapiens; identical to SEQ ID NO: 1466

SEQ ID NO: 1469 - DNA, 1902 bp, Homo sapiens
tgggcaggaactgggcactgtgcccagggcatgcactgcctccacgcagcaaccctcagagtcctgagctgaaccaagaaggaggagggggtcgggcctccgaggaaggcctagccgctgctgctgccaggaattccaggttggaggggcggcaacctcctgccagccttcaggccactctcctgtgcctgccagaagagacagagcttgaggagagcttgaggagagcaggaaagggcggcagtaagtcttcagcatcaggcattttggggtgactcagtaaatggtagatcttgctaccagtggaacagccactaaggattctgcagtgagagcagagggccagctaagtggtactctcccagagactgtctgactcacgccaccccctccaccttggacacaggacgctgtggtttctgagccaggtacaatgactcctttcgcagcctcccccgttgcccctctggatccactgcttaaatacggacgaggacagggccctgtctcctcagcttcaggcaccaccactgacctgggacagtgaatcgacaatgccgtcttctgtctcgtggggcatcctcctgctggcaggcctgtgctgcctggtccctgtctccctggctgaggatccccagggagatgctgcccagaagacagatacatcccaccatgatcaggatcacccaaccttcaacaagatcacccccaacctggctgagttcgccttcagcctataccgccagctggcacaccagtccaacagcaccaatatcttcttctccccagtgagcatcgctacagcctttgcaatgctctccctggggaccaaggctgacactcacgatgaaatcctggagggcctgaatttcaacctcacggagattccggaggctcagatccatgaaggcttccaggaactcctccgtaccctcaaccagccagacagccagctccagctgaccaccggcaatggcctgttcctcagcgagggcctgaagctagtggataagtttttggaggatgttaaaaagttgtaccactcagaagccttcactgtcaacttcggggacaccgaagaggccaagaaacagatcaacgattacgtggagaagggtactcaagggaaaattgtggatttggtcaaggagcttgacagagacacagtttttgctctggtgaattacatcttctttaaaggcaaatgggagagaccctttgaagtcaaggacaccgaggaagaggacttccacgtggaccaggtgaccaccgtgaaggtgcctatgatgaagcgtttaggcatgtttaacatccagcactgtaagaagctgtccagctgggtgctgctgatgaaatacctgggcaatgccaccgccatcttcttcctgcctgatgaggggaaactacagcacctggaaaatgaactcacccacgatatcatcaccaagttcctggaaaatgaagacagaaggtctgccagcttacatttacccaaactgtccattactggaacctatgatctgaagagcgtcctgggtcaactgggcatcactaaggtcttcagcaatggggctgacctctccggggtcacagaggaggcacccctgaagctctccaaggccgtgcataaggctgtgctgaccatcgacgagaaagggactgaagctgctggggccatgtttttagaggccatacccatgtctatcccccccgaggtcaagttcaacaaaccctttgtcttcttaatgattgaacaaaataccaagtctcccctcttcatgggaaaagtggtgaatcccacccaaaaataactgcctctcgctcctcaacccctcccctccatccctggccccctccctggatgacattaaagaagggttgagctggtccctgcctgcaaaa

SEQ ID NO: 1470 - protein, 418 aa, Homo sapiens; identical to SEQ ID NO: 1466

SEQ ID NO: 1471 - DNA, 3780 bp, Homo sapiens
acatgtccttaaccttggcacaacaaatctctaaatcgattgagacctgtctcagatacttcttggtttacaagatggaggctgaaattaaagagaaagatcctcactcaactcacagaggagcagaatgggaagaggacttagtgagaattccctgaacacaggagaaaaccgaagcccagagagtggatggccaagtccaaggtcacacagccaagtgcatccgagcagcgcaggatccaggtttcctgccccagtgctctttctgcagcccatgccacctgttttcatgctatctcagttcaccttccagctacacacctgcaatcagaaacagaaagtctgagagtgtgtgtggagccaaagaggggacagcagtggtgaggccagtttcatgtcttgtgatttattttctccctttctttttggactttaatcttaagtggacagcaatttggaacagtgtcagcaccttgttggattgtgctgtttgggagaggtgacacagagtattttaaaagagcaggttaagaacttttcacaaggaatcaattgagagaaaataaaatagaaacagactgtcccacatttgggctgagcaccaaacacatttttttttttttttttgagactgagtcttgctctgtcactcaggctggaatgcagtggcgcgatctcggctcactgcagccttcacctcccgggttcaagtgattcttctgcctcagcctcccaagtagctgggattacaggtgcccaccaccatgccaggctaatttttgtatttttagtagagacgaggtttcaccatgttggccaggctggtcttgaactcctgaccaagtgatccacctgcttcggcctcccaaagtgctgggattacaggcacgagccaccgcacctggcctcaaacaagctttttaattgcattcagaagtgcaccaactaggcacagacctctggcatggagacagaatgggaggttcttggtgtctggcctggtcttgcagaaatcagggagttgtggggaccaggcagccactgtgcatcagataggagtttcagcagcaggcaacagaaagcctgccaatgtagctgaaataagaagggcttatttttatccctgaacagaagcttccagcactggttcatcagatcagggcactgagctggcatccccatttatacagttttcctttccttcacctttgtaagatgcctggcacagctctgagcatcaaatatctgtgccatgtgggagcacacgaggggacaagtggggaatagggtctcctctgtcctctgtccccaggctggcttctctcgtggtagaaggacccccacagcaccaggcctcataactaccctgctggtaaactgcaggtgctgtcacggcttcctgccttcgtatatgaaatgttccttggcagctggactgctgtttgtttaccgcacgcacagctctgctgcctcttggttacaccagtgagctattgctccatgacaagccacaccgaaatgtagcaagcacttattgttgcccacatgtgtcaagtcagttgagtgtttctgccaaccggggcctggcttggcccaccttggctgagcttgctctggtgctagggtcagctagacaggtcggcaggagaccagctgctctagaagagcctggacaggatgaattggttctccttccacgtgcatcttgcatccctccagccaaggatttgaacccaggtctcgtctgactccaaatgcaccaagaggatggagcccagagtgacacagaggaagaggcccctggatggatgcatggggaagatcacgggaattacaagtgacatcctgaagtatgatcacaaatgtttcaaattaagccttcctgctaagtttccagaggtgtgtggctcggacgaagtgtttccagaccctgatctactgcatgtcctgcctgttgctggttctttgcagcagtccattgaccaatgctgtctacagcttgagagcctctgcaggccagggctgctctgtgcacatcctacgttactattcaaactgcacagcagcatgaaaaacaggcccttcttttctctcatttacacatatgtgaagaagacacagcaagtgagaaaacgtgaccgaaagccacgcggacaggtggccgcagggccaaacccaacttccgtgatgtgatctggctacagtttggagcccacatatttcaatagttatccccaggcctggcacgtcaaagaggctccagaaatgtttgctgagtgagtgatgaatcagcaatttctgattttctcctaaacttagagaataagtggcttgtctgcagtcacccagggcgtccctgacagaggtacaagtaaagcccagatctctgcatctctggttcaaggccttttgtactacacaccgctgtctctttgtcatcattaaaagcaaggctcaagggacatgttttctagccttagttccccatctacaaaatgggcctcatggaatggaatgtctccacttcactccagcatcaacaagtggggaattctgatggattcaattcgacttctttccatgggcgtgttctaagcagcctctttgttccagaagctgccctcagccagagttggataagccaatcctcactccccagcctcctctggatagggatgaagaccccactggggttggaagtgcagaggcagacaggtgtatggagtcacctgtaaattgattcaagtgagccaggaaagcagcaaaggaaagagaaacctgagtgacgacgtggtggaggaacagggctggaaagaggctgctggctgtctggcttcgcagctctggcctcctaatcagcctcgctcttgtctctggtgttctctggctcttgtccatctgtctgtgtttctttttgccagctattgactaatctttgctgaagctgagctagaattctggtgtttataagcaggtaactagctgagcactagttgataactttggagttagtggataaccacagggctgggctactaagctttttcagttgaaaaataaataaataaataaataaacaccacacccagctaatttttgtatttttagtagagacagggtttcaccgtgttagccaggatggactccatctcctgacctcgtgatccgcctacctcggcctcccaaagtgctgggattacaggcgtgagccaccacgcccggtcacctttgtcctgttttctacaggttagaagcaaggcacaagtcatacctacattcaaggagaggggaccatgcaaaggataaactgcagagagacaacagatttacatcccagacacattcacactgggccaagagcagctgccattgcagattcgagtcacgtccttttttccttccttctccttcttggagttacaacagaagctggggaggtgagagtgcagaaaggacgtggatgaagcagagaggcacgtgcctgtctcattcgcctctggatctgctgcatccaggactgtgccagcacaaagtgggagcccgataaatatttattgaagaaatgaaaggtgacaaaaggcagaaggagggagaccccaaaaagagcagcacaggaagctgccccctcaaacactaaaggctcctggagctattcacagtgctggggaacaaccagaggaggaggaggacagagggagagaatactttttttaaaaatcccaaacaaaaccaaattctatacatgtatatctcgagtgagtaaatgtgtaacactcagca

SEQ ID NO: 1472 - protein, 141 aa, Homo sapiens
MEPRVTQRKRPLDGCMGKITGITSDILKYDHKCFKLSLPAKFPEVCGSDEVFPDPDLLHVLPVAGSLQQSIDQCCLQLESLCRPGLLCAHPTLLFKLHSSMKNRPFFSLIYTYVKKTQQVRKRDRKPRGQVAAGPNPTSVM

SEQ ID NO: 1473 - DNA, 4232 bp, Homo sapiens
acatgtccttaaccttggcacaacaaatctctaaatcgattgagacctgtctcagatacttcttggtttacaagatggaggctgaaattaaagagaaagatcctcactcaactcacagaggagcagaatgggaagaggacttagtgagaattccctgaacacaggagaaaaccgaagcccagagagtggatggccaagtccaaggtcacacagccaagtgcatccgagcagcgcaggatccaggtttcctgccccagtgctctttctgcagcccatgccacctgttttcatgctatctcagttcaccttccagctacacacctgcaatcagaaacagaaagtctgagagtgtgtgtggagccaaagaggggacagcagtggtgaggccagtttcatgtcttgtgatttattttctccctttctttttggactttaatcttaagtggacagcaatttggaacagtgtcagcaccttgttggattgtgctgtttgggagaggtgacacagagtattttaaaagagcaggttaagaacttttcacaaggaatcaattgagagaaaataaaatagaaacagactgtcccacatttgggctgagcaccaaacacatttttttttttttttttgagactgagtcttgctctgtcactcaggctggaatgcagtggcgcgatctcggctcactgcagccttcacctcccgggttcaagtgattcttctgcctcagcctcccaagtagctgggattacaggtgcccaccaccatgccaggctaatttttgtatttttagtagagacgaggtttcaccatgttggccaggctggtcttgaactcctgaccaagtgatccacctgcttcggcctcccaaagtgctgggattacaggcacgagccaccgcacctggcctcaaacaagctttttaattgcattcagaagtgcaccaactaggcacagacctctggcatggagacagaatgggaggttcttggtgtctggcctggtcttgcagaaatcagggagttgtggggaccaggcagccactgtgcatcagataggagtttcagcagcaggcaacagaaagcctgccaatgtagctgaaataagaagggcttatttttatccctgaacagaagcttccagcactggttcatcagatcagggcactgagctggcatccccatttatacagttttcctttccttcacctttgtaagatgcctggcacagctctgagcatcaaatatctgtgccatgtgggagcacacgaggggacaagtggggaatagggtctcctctgtcctctgtccccaggctggcttctctcgtggtagaaggacccccacagcaccaggcctcataactaccctgctggtaaactgcaggtgctgtcacggcttcctgccttcgtatatgaaatgttccttggcagctggactgctgtttgtttaccgcacgcacagctctgctgcctcttggttacaccagtgagctattgctccatgacaagccacaccgaaatgtagcaagcacttattgttgcccacatgtgtcaagtcagttgagtgtttctgccaaccggggcctggcttggcccaccttggctgagcttgctctggtgctagggtcagctagacaggtcggcaggagaccagctgctctagaagagcctggacaggatgaattggttctccttccacgtgcatcttgcatccctccagccaaggatttgaacccaggtctcgtctgactccaaatgcaccaagaggatggagcccagagtgacacagaggaagaggcccctggatggatgcatggggaagatcacgggaattacaagtgacatcctgaagtatgatcacaaatgtttcaaattaagccttcctgctaagtttccagaggtgtgtggctcggacgaagtgtttccagaccctgatctactgcatgtcctgcctgttgctggttctttgcagcagtccattgaccaatgctgtctacagcttgagagcctctgcaggccagggctgctctgtgcacatcctacgttactattcaaactgcacagcagcatgaaaaacaggcccttcttttctctcatttacacatatgtgaagaagacacagcaagtgagaaaacgtgaccgaaagccacgcggacaggtggccgcagggccaaacccaacttccgtgatgtgatctggctacagtttggagcccacatatttcaatagttatccccaggcctggcacgtcaaagaggctccagaaatgtttgctgagtgagtgatgaatcagcaatttctgattttctcctaaacttagagaataagtggcttgtctgcagtcacccagggcgtccctgacagaggtacaagtaaagcccagatctctgcatctctggttcaaggccttttgtactacacaccgctgtctctttgtcatcattaaaagcaaggctcaagggacatgttttctagccttagttccccatctacaaaatgggcctcatggaatggaatgtctccacttcactccagcatcaacaagtggggaattctgatggattcaattcgacttctttccatgggcgtgttctaagcagcctctttgttccagaagctgccctcagccagagttggataagccaatcctcactccccagcctcctctggatagggatgaagaccccactggggttggaagtgcagaggcagacaggtgtatggagtcacctgtaaattgattcaagtgagccaggaaagcagcaaaggaaagagaaacctgagtgacgacgtggtggaggaacagggctggaaagaggctgctggctgtctggcttcgcagctctggcctcctaatcagcctcgctcttgtctctggtgttctctggctcttgtccatctgtctgtgtttctttttgccagctattgactaatctttgctgaagctgagctagaattctggtgtttataagcaggtaactagctgagcactagttgataactttggagttagtggataaccacagggctgggctactaagctttttcagttgaaaaataaataaataaataaataaacaccacacccagctaatttttgtatttttagtagagacagggtttcaccgtgttagccaggatggactccatctcctgacctcgtgatccgcctacctcggcctcccaaagtgctgggattacaggcgtgagccaccacgcccggtcacctttgtcctgttttctacaggttagaagcaaggcacaagtcatacctacattcaaggagaggggaccatgcaaaggataaactgcagaaaggacgtggatgaagcagagaggcacgtgcctgtctcattcgcctctggatctgctgcatccaggactgtgccagcacaaagtgggagcccgataaatatttattgaagaaatgaaaggtgacaaaaggcagaaggagggagaccccaaaaagagttacactggaagaagagcccctccttccttcaagccaagtcatccccttgggctctcaccacttcagtttataccttgcctgtagtccagtctctccagcatcaattccatcagcacaaagacataatttaattccttctaccttaaaaaaaaaaaaaaaaaaaaaacagctctccctctcttagggtgagatgaagtggttggcaacaggccaatgctactttcagaggcgtttgaatcagagtgactccattttgaataggggttgagtaaaataaggctgagacctactgggctgcattcccatgagcttaggcattctaagtcacaggatgagacaggaggtcagcacaagatacacgtcacaaagaccttgctgataaaacagattgtgataagaaaagccagtcaaaacccaccaaaaccaagatggcgacaaaagtgatctctggttgtcctcactgctgattattcactaattataaaattaacatgataaaagacactcccaccagcaccgtgacagtttacaaatgacatggacacatcaggaagttaccctatatgtctaaaaggggaggagccctccattccaattgtccacccctttcctggaaaactcatgaataatccaccccttgtttagcatataatcaagaaataaccatgaaaatagccaaccagcagccctcagggctgctttgcctatggagtagccattctatattcctttactttcttaataaacttgctttcacttta

SEQ ID NO: 1474 - protein, 141 aa, Homo sapiens; identical to SEQ ID NO: 1472

SEQ ID NO: 1475 - DNA, 3398 bp, Homo sapiens
acatgtccttaaccttggcacaacaaatctctaaatcgattgagacctgtctcagatacttcttggtttacaagatggaggctgaaattaaagagaaagatcctcactcaactcacagaggagcagaatgggaagaggacttagtgagaattccctgaacacaggagaaaaccgaagcccagagagtggatggccaagtccaaggtcacacagccaagtgcatccgagcagcgcaggatccaggtttcctgccccagtgctctttctgcagcccatgccacctgttttcatgctatctcagttcaccttccagctacacacctgcaatcagaaacagaaagtctgagagtgtgtgtggagccaaagaggggacagcagtggtgaggccagtttcatgtcttgtgatttattttctccctttctttttggactttaatcttaagtggacagcaatttggaacagtgtcagcaccttgttggattgtgctgtttgggagaggtgacacagagtattttaaaagagcaggttaagaacttttcacaaggaatcaattgagagaaaataaaatagaaacagactgtcccacatttgggctgagcaccaaacacatttttttttttttttttgagactgagtcttgctctgtcactcaggctggaatgcagtggcgcgatctcggctcactgcagccttcacctcccgggttcaagtgattcttctgcctcagcctcccaagtagctgggattacaggtgcccaccaccatgccaggctaatttttgtatttttagtagagacgaggtttcaccatgttggccaggctggtcttgaactcctgaccaagtgatccacctgcttcggcctcccaaagtgctgggattacaggcacgagccaccgcacctggcctcaaacaagctttttaattgcattcagaagtgcaccaactaggcacagacctctggcatggagacagaatgggaggttcttggtgtctggcctggtcttgcagaaatcagggagttgtggggaccaggcagccactgtgcatcagataggagtttcagcagcaggcaacagaaagcctgccaatgtagctgaaataagaagggcttatttttatccctgaacagaagcttccagcactggttcatcagatcagggcactgagctggcatccccatttatacagttttcctttccttcacctttgtaagatgcctggcacagctctgagcatcaaatatctgtgccatgtgggagcacacgaggggacaagtggggaatagggtctcctctgtcctctgtccccaggctggcttctctcgtggtagaaggacccccacagcaccaggcctcataactaccctgctggtaaactgcaggtgctgtcacggcttcctgccttcgtatatgaaatgttccttggcagctggactgctgtttgtttaccgcacgcacagctctgctgcctcttggttacaccagtgagctattgctccatgacaagccacaccgaaatgtagcaagcacttattgttgcccacatgtgtcaagtcagttgagtgtttctgccaaccggggcctggcttggcccaccttggctgagcttgctctggtgctagggtcagctagacaggtcggcaggagaccagctgctctagaagagcctggacaggatgaattggttctccttccacgtgcatcttgcatccctccagccaaggatttgaacccaggtctcgtctgactccaaatgcaccaagaggatggagcccagagtgacacagaggaagaggcccctggatggatgcatggggaagatcacgggaattacaagtgacatcctgaagtatgatcacaaatgtttcaaattaagccttcctgctaagtttccagaggtgtgtggctcggacgaagtgtttccagaccctgatctactgcatgtcctgcctgttgctggttctttgcagcagtccattgaccaatgctgtctacagcttgagagcctctgcaggccagggctgctctgtgcacatcctacgttactattcaaactgcacagcagcatgaaaaacaggcccttcttttctctcatttacacatatgtgaagaagacacagcaagtgagaaaacgtgaccgaaagccacgcggacaggtggccgcagggccaaacccaacttccgtgatgtgatctggctacagtttggagcccacatatttcaatagttatccccaggcctggcacgtcaaagaggctccagaaatgtttgctgagttagaagcaaggcacaagtcatacctacattcaaggagaggggaccatgcaaaggataaactgcagagagacaacagatttacatcccagacacattcacactgggccaagagcagctgccattgcagattcgagtcacgtccttttttccttccttctccttcttggagttacaacagaagctggggaggtgagagtgcagaaaggacgtggatgaagcagagaggcacgtgcctgtctcattcgcctctggatctgctgcatccaggactgtgccagcacaaagtgggagcccgataaatatttattgaagaaatgaaaggtgacaaaaggcagaaggagggagaccccaaaaagagttacactggaagaagagcccctccttccttcaagccaagtcatccccttgggctctcaccacttcagtttataccttgcctgtagtccagtctctccagcatcaattccatcagcacaaagacataatttaattccttctaccttaaaaaaaaaaaaaaaaaaaaaacagctctccctctcttagggtgagatgaagtggttggcaacaggccaatgctactttcagaggcgtttgaatcagagtgactccattttgaataggggttgagtaaaataaggctgagacctactgggctgcattcccatgagcttaggcattctaagtcacaggatgagacaggaggtcagcacaagatacacgtcacaaagaccttgctgataaaacagattgtgataagaaaagccagtcaaaacccaccaaaaccaagatggcgacaaaagtgatctctggttgtcctcactgctgattattcactaattataaaattaacatgataaaagacactcccaccagcaccgtgacagtttacaaatgacatggacacatcaggaagttaccctatatgtctaaaaggggaggagccctccattccaattgtccacccctttcctggaaaactcatgaataatccaccccttgtttagcatataatcaagaaataaccatgaaaatagccaaccagcagccctcagggctgctttgcctatggagtagccattctatattcctttactttcttaataaacttgctttcacttta

SEQ ID NO: 1476 - protein, 141 aa, Homo sapiens; identical to SEQ ID NO: 1472

SEQ ID NO: 1477 - DNA, 3663 bp, Homo sapiens
acatgtccttaaccttggcacaacaaatctctaaatcgattgagacctgtctcagatacttcttggtttacaagatggaggctgaaattaaagagaaagatcctcactcaactcacagaggagcagaatgggaagaggacttagtgagaattccctgaacacaggagaaaaccgaagcccagagagtggatggccaagtccaaggtcacacagccaagtgcatccgagcagcgcaggatccaggtttcctgccccagtgctctttctgcagcccatgccacctgttttcatgctatctcagttcaccttccagctacacacctgcaatcagaaacagaaagtctgagagtgtgtgtggagccaaagaggggacagcagtggtgaggccagtttcatgtcttgtgatttattttctccctttctttttggactttaatcttaagtggacagcaatttggaacagtgtcagcaccttgttggattgtgctgtttgggagaggtgacacagagtattttaaaagagcaggttaagaacttttcacaaggaatcaattgagagaaaataaaatagaaacagactgtcccacatttgggctgagcaccaaacacatttttttttttttttttgagactgagtcttgctctgtcactcaggctggaatgcagtggcgcgatctcggctcactgcagccttcacctcccgggttcaagtgattcttctgcctcagcctcccaagtagctgggattacaggtgcccaccaccatgccaggctaatttttgtatttttagtagagacgaggtttcaccatgttggccaggctggtcttgaactcctgaccaagtgatccacctgcttcggcctcccaaagtgctgggattacaggcacgagccaccgcacctggcctcaaacaagctttttaattgcattcagaagtgcaccaactaggcacagacctctggcatggagacagaatgggaggttcttggtgtctggcctggtcttgcagaaatcagggagttgtggggaccaggcagccactgtgcatcagataggagtttcagcagcaggcaacagaaagcctgccaatgtagctgaaataagaagggcttatttttatccctgaacagaagcttccagcactggttcatcagatcagggcactgagctggcatccccatttatacagttttcctttccttcacctttgtaagatgcctggcacagctctgagcatcaaatatctgtgccatgtgggagcacacgaggggacaagtggggaatagggtctcctctgtcctctgtccccaggctggcttctctcgtggtagaaggacccccacagcaccaggcctcataactaccctgctggtaaactgcaggtgctgtcacggcttcctgccttcgtatatgaaatgttccttggcagctggactgctgtttgtttaccgcacgcacagctctgctgcctcttggttacaccagtgagctattgctccatgacaagccacaccgaaatgtagcaagcacttattgttgcccacatgtgtcaagtcagttgagtgtttctgccaaccggggcctggcttggcccaccttggctgagcttgctctggtgctagggtcagctagacaggtcggcaggagaccagctgctctagaagagcctggacaggatgaattggttctccttccacgtgcatcttgcatccctccagccaaggatttgaacccaggtctcgtctgactccaaatgcaccaagaggatggagcccagagtgacacagaggaagaggcccctggatggatgcatggggaaggttagaagcaaggcacaagtcatacctacattcaaggagaggggaccatgcaaaggataaactgcagagagacaacagatttacatcccagacacattcacactgggccaagagcagctgccattgcagattcgagtcacgtccttttttccttccttctccttcttggagttacaacagaagctggggaggtgagagtgcagaaaggacgtggatgaagcagagaggcacgtgcctgtctcattcgcctctggatctgctgcatccaggactgtgccagcacaaagtgggagcccgataaatatttattgaagaaatgaaaggtgacaaaaggcagaaggagggagaccccaaaaagagagatgggatcccactatattgcacaggctggtctcaaactcctgagctcaagcgatcctcctgccttggcctcccacggtgctgagactacaggtgtgagccaccactcccagcctgatttatattttataaagaggcaacgatggagtacacagctgagcaatctcttgcatttctggaccttgagcatcaggaagcttagggagggtgaaaactcagaagaaagctcagagttgagacctttgattttttgcccagagagtccagctaacacactttataacccaaaaggccttacaaatatttcagagcagaggcagcatttttgcactggataaacaaaggtacggtaatttcttcatagtttattttcattacaagtaattcttttcctgaagaaaaatttatatttcagatttatttcccctctcaaaggggaggggagttataatattctgtttccatagcaccattcctcaagatcaaacccaggcaggcatttttacagcacacacttccatatgtcattgctaatcctcgcaaccttgaggaaactgaggtgcaaaggggttgaggaatgtgttcaccatcccaaagccaacgaagtgccagaacccaaatccaagcttggctgtctcatccccaaggacgtactctttatgccgttccttatgacttttcatgcagcaggtgcaaggcagcaagaatttggctcttctgacatttatcaggcacctggtatgtgccaggcctactgtaaaccccaagatgacatggtccatgtctatccattcagcatcagagagactgttatcaggacttgaggcctgagacacagccctgaatcagatgcaggcctctggtgtttgcaaaggatgcgtgagtatgtgtatgtgtatgcgtgcattgtgtgtaggggtgtgtgtatgttgggggttgggggcagaaaatgctccctgaactgttggtattaaggcagatctttgatggagggactggggtgtggagacttgaaccctagtttcaaagtggggacctcgaacactagtatggccagcagacaggctggagttgctgaattgtcagctaggtctttaatccactccccttctctaaatcagggtggaattggactcagggctggttcagggctgaggtttccgggggatgaatgattccagacagtgggaaggggtgatggatgatgaacctggcaagtcacaggactatggacttggctgtatgttgcatgtatgtgtaagatctgagttgagacctttgatttttgcccagaaagtccagctaacatactatataagccagtgagaccagccagtgtctgttcattgcctctgccttgcccctatgcctgcccgcctcctatagcaggtccctatagcataatgaaaatgcgaacaaccttttctctggacactggggaatctagtctggtggataaagatggatggctgttaaacgatc

SEQ ID NO: 1478 - protein, 105 aa, Homo sapiens
MDAWGRLEARHKSYLHSRRGDHAKDKLQRDNRFTSQTHSHWAKSSCHCRFESRPFFLPSPSWSYNRSWGGESAERTWMKQRGTCLSHSPLDLLHPGLCQHKVGAR

SEQ ID NO: 1479 - DNA, 3307 bp, Homo sapiens
gtcaacagccacttcctccctggggcttaacaggcattccttgaagcctgccccgggcagttagtccttcccttttgtgtgaactctcggctgttttcgttgtctgcacacagagcagtggtctagggagcgaagggttttggaatggaccttttcctttcttagcttgctgtagggattgtgcttcagctaagtaaagtggaaaaacagaagtacaaaagcaacagccccagatctaagggcaccgtagctctggaatctggattttattccagattcaaccctcagcagggagttgaagtggtcagccctgtgctttacaaggctgattgggcagcacccatagtagaattgtcaatataaagtaattgaaaggatcagaatccagggttttcgttgtttttaagtttttaagttttaaaaacaaagttgtttttgttcgtttttaagtttacttctctttaatcggtctcactttattgaccaggctggtttcgaactcctgggcttaagtgatttctcctgtctcagcttctcaaagtgctgggattacaggcgtgagccgctgcacccagcccagaatccagttttaaagagtttattcaagccaaaagctgggaatggccatctgagaaacacagactctaggaaaatggggccagggccctgaagttaaaagttaaagtcttgcttacataggcagaaagcaaagacatttagtaaccttgtagaacattttcttgtataacttttcttgttttaactttcttgtttaacattttctatgcaaggctggtttatgagttacaacctataattaattataggttgttcccctgcctccaccttgttttcttttctctacagcttgttttcatttcctttccaatttaagaatgtgtttaacattctatcccagacaatgtgatggtcatgaagtctctgtcagagaggaaagagggagttaatctataatgaagatcaacagtgaagaggaaaggggtcttccctggaacgcttcagtcatatacgacattttacacaacaataatggacctgtgtaaggaggtatgtgtgggagaagattccagaaggtcttgagacactccagatgaaggttggtgtggggctgtgctgctggagcaccagagagtgaaaagaggttatctccctctgtgccaggccagagtgcagtggtgcaatcacggctcactgtagtctcaacctcctgggctcaagagatcctcccacttcagcctcccaagcagctaagactacagttattttattcttatgagcttgtgggctccatctaccaacctctgggcaaatgctcatctgacttccatagacacacagcaagcagacaaccacacaaagaggaagagggagaatatttaccagccatggaacatctgctctgtgcttatatctcatatgcattatctctaattatcaaaagaaggttagaagcaaggcacaagtcatacctacattcaaggagaggggaccatgcaaaggataaactgcagagagacaacagatttacatcccagacacattcacactgggccaagagcagctgccattgcagattcgagtcacgtccttttttccttccttctccttcttggagttacaacagaagctggggaggtgagagtgcagaaaggacgtggatgaagcagagaggcacgtgcctgtctcattcgcctctggatctgctgcatccaggactgtgccagcacaaagtgggagcccgataaatatttattgaagaaatgaaaggtgacaaaaggcagaaggagggagaccccaaaaagagagatgggatcccactatattgcacaggctggtctcaaactcctgagctcaagcgatcctcctgccttggcctcccacggtgctgagactacaggtgtgagccaccactcccagcctgatttatattttataaagaggcaacgatggagtacacagctgagcaatctcttgcatttctggaccttgagcatcaggaagcttagggagggtgaaaactcagaagaaagctcagagttgagacctttgattttttgcccagagagtccagctaacacactttataacccaaaaggccttacaaatatttcagagcagaggcagcatttttgcactggataaacaaaggtacggtaatttcttcatagtttattttcattacaagtaattcttttcctgaagaaaaatttatatttcagatttatttcccctctcaaaggggaggggagttataatattctgtttccatagcaccattcctcaagatcaaacccaggcaggcatttttacagcacacacttccatatgtcattgctaatcctcgcaaccttgaggaaactgaggtgcaaaggggttgaggaatgtgttcaccatcccaaagccaacgaagtgccagaacccaaatccaagcttggctgtctcatccccaaggacgtactctttatgccgttccttatgacttttcatgcagcaggtgcaaggcagcaagaatttggctcttctgacatttatcaggcacctggtatgtgccaggcctactgtaaaccccaagatgacatggtccatgtctatccattcagcatcagagagactgttatcaggacttgaggcctgagacacagccctgaatcagatgcaggcctctggtgtttgcaaaggatgcgtgagtatgtgtatgtgtatgcgtgcattgtgtgtaggggtgtgtgtatgttgggggttgggggcagaaaatgctccctgaactgttggtattaaggcagatctttgatggagggactggggtgtggagacttgaaccctagtttcaaagtggggacctcgaacactagtatggccagcagacaggctggagttgctgaattgtcagctaggtctttaatccactccccttctctaaatcagggtggaattggactcagggctggttcagggctgaggtttccgggggatgaatgattccagacagtgggaaggggtgatggatgatgaacctggcaagtcacaggactatggacttggctgtatgttgcatgtatgtgtaagatctgagttgagacctttgatttttgcccagaaagtccagctaacatactatataagccagtgagaccagccagtgtctgttcattgcctctgccttgcccctatgcctgcccgcctcctatagcaggtccctatagcataatgaaaatgcgaacaaccttttctctggacactggggaatctagtctggtggataaagatggatggctgttaaacgatc

SEQ ID NO: 1480 - protein, 119 aa, Homo sapiens
MEHLLCAYISYALSLIIKRRLEARHKSYLHSRRGDHAKDKLQRDNRFTSQTHSHWAKSSCHCRFESRPFFLPSPSWSYNRSWGGESAERTWMKQRGTCLSHSPLDLLHPGLCQHKVGAR

SEQ ID NO: 1481 - DNA, 2194 bp, Homo sapiens
gtcaacagccacttcctccctggggcttaacaggcattccttgaagcctgccccgggcagttagtccttcccttttgtgtgaactctcggctgttttcgttgtctgcacacagagcagtggtctagggagcgaagggttttggaatggaccttttcctttcttagcttgctgtagggattgtgcttcagctaagtaaagtggaaaaacagaagtacaaaagcaacagccccagatctaagggcaccgtagctctggaatctggattttattccagattcaaccctcagcagggagttgaagtggtcagccctgtgctttacaaggctgattgggcagcacccatagtagaattgtcaatataaagtaattgaaaggatcagaatccagggttttcgttgtttttaagtttttaagttttaaaaacaaagttgtttttgttcgtttttaagtttacttctctttaatcggtctcactttattgaccaggctggtttcgaactcctgggcttaagtgatttctcctgtctcagcttctcaaagtgctgggattacaggcgtgagccgctgcacccagcccagaatccagttttaaagagtttattcaagccaaaagctgggaatggccatctgagaaacacagactctaggaaaatggggccagggccctgaagttaaaagttaaagtcttgcttacataggcagaaagcaaagacatttagtaaccttgtagaacattttcttgtataacttttcttgttttaactttcttgtttaacattttctatgcaaggctggtttatgagttacaacctataattaattataggttgttcccctgcctccaccttgttttcttttctctacagcttgttttcatttcctttccaatttaagaatgtgtttaacattctatcccagacaatgtgatggtcatgaagtctctgtcagagaggaaagagggagttaatctataatgaagatcaacagtgaagaggaaaggggtcttccctggaacgcttcagtcatatacgacattttacacaacaataatggacctgtgtaaggaggtatgtgtgggagaagattccagaaggtcttgagacactccagatgaaggttggtgtggggctgtgctgctggagcaccagagagtgaaaagaggttatctccctctgtgccaggccagagtgcagtggtgcaatcacggctcactgtagtctcaacctcctgggctcaagagatcctcccacttcagcctcccaagcagctaagactacagacatgtccttaaccttggcacaacaaatctctaaatcgattgagacctgtctcagatacttcttggtttacaagatggaggctgaaattaaagagaaagatcctcactcaactcacagaggagcagaatgggaagaggacttagtgagaattccctgaacacaggagaaaaccgaagcccagagagtggatggccaagtccaaggtcacacagccaagtgcatccgagcagcgcaggatccaggtttcctgccccagtgctctttctgcagcccatgccacctgttttcatgctatctcagttcaccttccagctacacacctgcaatcagaaacagaaagtctgagagtgtgtgtggagccaaagaggggacagcagtggttagaagcaaggcacaagtcatacctacattcaaggagaggggaccatgcaaaggataaactgcagagagacaacagatttacatcccagacacattcacactgggccaagagcagctgccattgcagattcgagtcacgtccttttttccttccttctccttcttggagttacaacagaagctggggaggtgagagtgcagaaaggacgtggatgaagcagagaggcacgtgcctgtctcattcgcctctggatctgctgcatccaggactgtgccagcacaaagtgggagcccgataaatatttattgaagaaatgaaaggtgacaaaaggcagaaggagggagaccccaaaaagagcagcacaggaagctgccccctcaaacactaaaggctcctggagctattcacagtgctggggaacaaccagaggaggaggaggacagagggagagaatactttttttaaaaatcccaaacaaaaccaaattctatacatgtatatctcgagtgagtaaatgtgtaacactcagca

SEQ ID NO: 1482 - protein, 163 aa, Homo sapiens
MAKSKVTQPSASEQRRIQVSCPSALSAAHATCFHAISVHLPATHLQSETESLRVCVEPKRGQQWLEARHKSYLHSRRGDHAKDKLQRDNRFTSQTHSHWAKSSCHCRFESRPFFLPSPSWSYNRSWGGESAERTWMKQRGTCLSHSPLDLLHPGLCQHKVGAR

SEQ ID NO: 1483 - DNA, 1161 bp, Homo sapiens
acacgtgtgagcctagaggcgggtcccggttgcagacttgccatggcctccgaagcttctgtgcgtctaggggtgccccctggccgtctgtggatccagaggcctggcatctacgaagatgaggaggggagaacctgggtgactgtggtcgtgcggttcaatccctcgcgtagggaatgggccagggcctcccagggcagcagatatgaacccagcatcacagtgcacttgtggcagatggcagtgcatacccgggagctactctcctccggccagatgcccttctcccagctgcccgccgtgtggcagctctaccccgggaggaagtaccgagcagcggattccagtttctgggaaatagcagaccatggccagattgactctatggagcagctggtcctaacatatcagccggagaggaaagactgacactgggagtggctggccctgctggccctgcctcttctggcctggtgtctcctcatgccccctcagtgaggatcttcatgtacctgctcttctgtttgcacacccagcatagcctccttgcaggcagaaggcagtagggcccctgcacactcagtttctctcgttttccttagttatcagtcctgtcctgtcccactcaggtctgtacttagggcagctggcctggatgggcttcactggggccctgtctgtgtgctgagccagtttcccctgctggctgcaagctgtgggttctttctcctctgtgcccctcatgctgatcttctagatgccactcccaaatccccttcatacccaccaggatgtgtgcccagccaggcctccagcacccccagtgcagctcgtgattggaaactcaccatcggcaggcagtggttcggtttaagagatggcattagagggagcccagtctggatgtggacttggatgccctgtgggtatcagttctgctgacactttggcccgaaatagatccagtgctgagcaagcaatgtacaccagagcctcagtgagcccatctgcacagtggggagcatggagggatgggtttggcctgtgcttctgcttattcagtccttcagctcacggaagggatgctagtccgtgaaggtgacctcacagtactggttaattaaactttattgctcactgtccaaaaaaaaaaaaaaaaaa

SEQ ID NO: 1484 - protein, 128 aa, Homo sapiens
MASEASVRLGVPPGRLWIQRPGIYEDEEGRTWVTVVVRFNPSRREWARASQGSRYEPSITVHLWQMAVHTRELLSSGQMPFSQLPAVWQLYPGRKYRAADSSFWEIADHGQIDSMEQLVLTYQPERKD

SEQ ID NO: 1485 - DNA, 1754 bp, Homo sapiens
acacgtgtgagcctagaggcgggtcccggttgcagacttgccatggcctccgaagcttctgtgcgtctaggggtgccccctggccgtctgtggatccagaggcctggcatctacgaagatgaggaggggagaacctgggtgactgtggtcgtgcggttcaatccctcgcgtagggaatgggccagggcctcccagggcagcagatatgaacccagcatcacagtgcacttgtggcagatggcagtgcatacccgggagctactctcctccggccagatgcccttctcccagctgcccgccgtgtggcagctctaccccgggaggaagtaccgagcagcggattccagtttctgggaaatagcagaccatggccagattgactctatggagcagctggtcctaacatatcagccggagaggaaagactgacactgggagtggctggtatgttggggccctgtgcgtctcggtgtagggatcagacgaaagtgagaagacctctcctcttttcagaaagacggcgtggcctcctcctccctgctgtttgctgagatttttcttacatagccacctgtcacctctgttccccagccccttggatgtgatggtacacagtgggtgggcccccataataagttcctaaagcatgggatctcatcgaataagactcatcatttaatccttgtgagaattttgtgaggtgtacgtgttaatgtcccatttcacgacgaaaagacaagactctggggatgggaatgacttcctcgagaccatacagccaggaaatagcggtgaatctagtgatctcgggtccctagatttaaccatggcactgaggtgccgtgtgacggtggccttggaggacccagcactgacccatagagggctcctctcagatgggcagcagcttggagcaggcaggcagggcctggtccattggaggggctggcactggacttgcctttgaccccagcagcttggatggggtgccgggctcccccatagttcactgactgtctcctttggtcttctcgcaggccctgctggccctgcctcttctggcctggtgtctcctcatgccccctcagtgaggatcttcatgtacctgctcttctgtttgcacacccagcatagcctccttgcaggcagaaggcagtagggcccctgcacactcagtttctctcgttttccttagttatcagtcctgtcctgtcccactcaggtctgtacttagggcagctggcctggatgggcttcactggggccctgtctgtgtgctgagccagtttcccctgctggctgcaagctgtgggttctttctcctctgtgcccctcatgctgatcttctagatgccactcccaaatccccttcatacccaccaggatgtgtgcccagccaggcctccagcacccccagtgcagctcgtgattggaaactcaccatcggcaggcagtggttcggtttaagagatggcattagagggagcccagtctggatgtggacttggatgccctgtgggtatcagttctgctgacactttggcccgaaatagatccagtgctgagcaagcaatgtacaccagagcctcagtgagcccatctgcacagtggggagcatggagggatgggtttggcctgtgcttctgcttattcagtccttcagctcacggaagggatgctagtccgtgaaggtgacctcacagtactggttaattaaactttattgctcactgtccaaaaaaaaaaaaaaaaaa

SEQ ID NO: 1486 - protein, 128 aa, Homo sapiens; identical to SEQ ID NO: 1484

SEQ ID NO: 1487 - DNA, 1410 bp, Homo sapiens
gtcctcccgccccgccgcttggtggcggccgcatgctgcccggatataaagggtcggccccacatcccagggaccagcgagcggccttgagaggctctggctcttgcttcttaggcggcccgaggacgccatggccgagtgcccgacactcggggaggcagtcaccgaccacccggaccgcctgtgggcctgggagaagttcgtgtatttggacgagaagcagcacgcctggctgcccttaaccatcgagataaaggataggttacagttacgggtgctcttgcgtcgggaagacgtcgtcctggggaggcctatgacccccacccagataggcccaagcctgctgcctatcatgtggcagctctaccctgatggacgataccgatcctcagactccagtttctggcgcttagtgtaccacatcaagattgacggcgtggaggacatgcttctcgagctgctgccagatgactgatgtatggtcttggcagcacctgtctcctttcaccccagggcctgagcctggccagcctacaatggggatgttgtgtttctgttcaccttcgtttactatgcctgtgtcttctccaccacgctggggtctgggaggaatggacagacagaggatgagctctacccagggcctgcaggacctgcctgtagcccactctgctcgccttagcactaccactcctgccaaggaggattccatttggcagagcttcttccaggtgcccagctatacctgtgcctcggcttttctcagctggatgatggtcttcagcctctttctgtcccttctgtccctcacagcactagtatttcatgttgcacacccactcagctccgtgaacttgtgagaacacagccgattcacctgagcaggacctctgaaaccctggaccagtggtctcacatggtgctacgcctgcatgtaaacacgcctgcaaacgctgcctgccggtaaacacgcctgcaaacgctgcctgcccgtaaacacgcctgcaaacgctgcctgcccacacaggttcacgtgcagctcaaggaaaggcctgaaaggagcccttatctgtgctcaggactcagaagcctctgggtcagtggtccacatcccgggacgcagcaggaggccaggccggcgagccctgtggatgagccctcagaacccttggcttgcccacgtggaaaagggatagaggttgggtttccccccttttatagatggtcacgcacctgggtgttacaaagttgtatgtggcatgaatactttttgtaatgattgattaaatgcaagatagtttatctaacttcgtgcggaatcagcttctatccttgacttagattctggtggagagaagtgagaataggcagcccccaaataaaaaatattcatggaaaaaaaaaaaaaaa

SEQ ID NO: 1488 - protein, 114 aa, Homo sapiens
MAECPTLGEAVTDHPDRLWAWEKFVYLDEKQHAWLPLTIEIKDRLQLRVLLRREDVVLGRPMTPTQIGPSLLPIMWQLYPDGRYRSSDSSFWRLVYHIKIDGVEDMLLELLPDD

SEQ ID NO: 1489 - DNA, 1897 bp, Homo sapiens
acttcctctccaggaatccgcggagggagcgcaggctcgaagagctcctggacgcagaggccctgcccttgccagacggcgcagacatgtcagaacaaagtaaggatctgagcgaccctaactttgcagccgaggcccccaactccgaggtgcacagcagccctggggtttcggagggggttcctccgtccgcgaccctggcagagccgcagagccctcctctaggcccgacggccgctccgcaggccgcgccgcctccccaggccccgaacgacgagggcgacccgaaggccctgcagcaggctgcggaggagggccgcgcccaccaggccccgagcgcggcccagccgggcccggcaccgccagccccggcgcagctggtgcagaaggcgcacgagctcatgtggtacgtgctggtcaaggaccagaagaagatgatcatctggtttccagacatggtgaaagatgtcatcggcagctacaagaagtggtgcaggagcatcctccggcgcaccagcctcatcctcgcccgggtgttcgggctgcacctgaggctaaccagcctgcacaccatggagtttgcgctggtcaaagcgctggagcccgaggagctggacagggtggcgctgagcaaccgcatgcccatgacaggcctcctgctcatgatcctgagcctcatctacgtgaagggccgcggcgccagagagagcgccgtctggaacgtgctgcgcatcctggggctgcggccctggaagaagcactccaccttcggggacgtgcggaagctcatcactgaggagttcgtccaaatgaattacctgaagtaccagcgcgtcccatacgtggagccgcccgaatacgagttcttttggggctcccgggccagccgcgaaatcaccaagatgcaaatcatggagttcctggccagggtctttaagaaagacccccaggcctggccctcccgatacagagaagctctggaggaggccagagctctgcgggaggctaatcccactgcccactaccctcgcagcagtgtctctgaggactagcaaagtctggaggcagatgaatggtttctgaccctcaccagggctgtggaagggtgggggtgggtcattatagtattcaggatttacagtgcagtattcacgtgtaacttttaagttttcagtacagtgcttttatacctttaatgcaatgttgtattcatttgggtactattgtgtagtatttaggatgtatgcatgtttgtttatatgtaagcttggttggtgctttcgcttttgtgctacctttcttggatttttgtaccagagatgtgctaaactgatgaaatacattgagaaagtttccatcttattcttttatatgggactgatgatgtgtgttggggtagactgctcctgcagagtttggaagaagtcaccagcaaagccggcctaaccaagaaaagtcaaggcccttcatgaccttgctgggcacagaaaacaccctcgtggagtacactaatttgaactggactggtctcagtgtgagcacttggcacactttactaaacacatatacaaccccaccgtgagtcaactttaaagtaaacattaaagattcttgtgatacaatcatttttggaaaagtgtactttatcattttaacaaagcagtatggttgggaatgagacaattctctattttacagtgtatacagatacaactatttcccctaatagggtgggaaaaatcgctactcatgattactcctaaatttgtgaagtttatagttctattgtctttaaatgtaactcatgtttatttcaaaaacattcacaaatatagaaaagtatacaaaacaaaacagtaagattgtctgtaatcacatcatatgggaataaaaaaca

SEQ ID NO: 1490 - protein, 321 aa, Homo sapiens
MSEQSKDLSDPNFAAEAPNSEVHSSPGVSEGVPPSATLAEPQSPPLGPTAAPQAAPPPQAPNDEGDPKALQQAAEEGRAHQAPSAAQPGPAPPAPAQLVQKAHELMWYVLVKDQKKMIIWFPDMVKDVIGSYKKWCRSILRRTSLILARVFGLHLRLTSLHTMEFALVKALEPEELDRVALSNRMPMTGLLLMILSLIYVKGRGARESAVWNVLRILGLRPWKKHSTFGDVRKLITEEFVQMNYLKYQRVPYVEPPEYEFFWGSRASREITKMQIMEFLARVFKKDPQAWPSRYREALEEARALREANPTAHYPRSSVSED

SEQ ID NO: 1491 - DNA, 678 bp, Homo sapiens
atgatgttcagtacaatcataaaaatttggggcttcaaatgtggctttgacttcttggttgtaaaggacgctatgatggaagacgttggacagaatccactggatgatgtcctggaaagaaagctggccttgtcactagaagaagccaaagaggaggaggagttgaactatgtcatagatgaacaggaggaatccctgagggagctggaattagagacagcaaagctggagaaaagtaacgcaatcctaagcaggaatgtggtggaggttcagaaaaagatttcagggttatttacaaatattggccttgaagaagaaaccacaaagcagatcctggaggaaatgaaggcaagactacagaagtcaacagagtcctgtgcaaagcaagaggaggaactggccaaggcagaggcaatgtctcttccactgagggtctgcccgggatagaatgggagagaatcccaagggtcttagaaacagatctgcttgaggcataggagggggagaaataccaggaagttctgaggaagatgaaagaggaaaaggagacgctgcttcttgaaaaacaaatcttttcacacagtttggaaatttgaatgtcctcttttgtgacatgtctttcgcctgcatctgtgagatgatccaaagcccaggatgactcctctcaaacagtgaaac

SEQ ID NO: 1492 - protein, 148 aa, Homo sapiens
MMFSTIIKIWGFKCGFDFLVVKDAMMEDVGQNPLDDVLERKLALSLEEAKEEEELNYVIDEQEESLRELELETAKLEKSNAILSRNVVEVQKKISGLFTNIGLEEETTKQILEEMKARLQKSTESCAKQEEELAKAEAMSLPLRVCPG

SEQ ID NO: 1493 - DNA, 15563 bp, Homo sapiens
cgcacgccgagcggctgccgggggaagcagaggcgccggaggctggggcaccgccgacgcctcgggagccatggccgaagggggagaaggaggcgaggacgagatccagtttctgaggactgaggatgaagtggtactccagtgcatcgccaccattcataaggagcagaggaagttctgcctggcagccgagggacttgggaatcgcctgtgcttcttggaacccacttcagaagccaagtacattcctccagatctctgcgtctgcaattttgtgctggaacagtccctatctgtcagagccctgcaggaaatgcttgccaacacaggtgaaaatggcggcgaaggggcagcacaaggaggtggccacaggaccctgttatacggccatgcagttctcctgaggcactctttcagcggaatgtatctaacatgcttgactacatcaagatcccagacagacaaacttgcctttgatgtaggtctacgggaacatgccacaggagaagcctgttggtggactatacatcctgcttccaaacagaggtccgaaggagagaaagttcgaattggcgatgacctcatcctcgtcagcgtgtcctctgaaagataccttcatctctcagtatcaaatggtaacatacaagtggatgcctcctttatgcaaacactctggaatgtacatcctacgtgctcaggaagtagcatcgaagaaggatacctacttggtgggcatgtagtacgtcttttccatggtcatgatgaatgtttgacgataccatctacagaccagaatgattcccagcacaggaggatattctacgaagctgggggagctgggactcgagccaggtctctttggagagtggaaccccttcggataagctggagtggcagtaacatcagatggggccaggctttccgactccggcatctcaccacaggccactacctggccttgacagaagaccaaggccttatactgcaagaccgggcaaagtcagacaccaagtccacagctttctctttccgggcatcaaaggaactcaaggagaaattagactccagtcacaagcgagacatagaaggcatgggagttccagaaatcaagtatggagattctgtctgctttgtgcagcatatagccagtggtctgtgggtgacctacaaagcacaagacgccaaaacttcccgcctgggacctctaaaaagaaaggtcatactccatcaggaaggccacatggatgatggattaacactgcagagatgccagcgtgaggagtcccaggctgctcggatcatccggaacactacagccttattcagccagtttgtcagcggaaacaatcgcacagctgcccccatcaccctgcctatagaagaagtcctgcagaccctacaggacttgatcgcctacttccagcccccagaggaggagatgcgacatgaagacaagcagaacaagctccgctcactcaaaaacagacaaaatcttttcaaggaagagggaatgttggcccttgtcttaaattgcattgaccgcttaaatgtctacaatagcgtagcacactttgcagggattgcaagggaagagagtggcatggcctggaaagaaattctgaacctcctctacaaattgctggctgctctcattcgcggaaacagaaacaattgcgctcaattctccaataaccttgattggctcatcagtaaattggacagactagaatcttcctcaggtatcttggaagttttgcactgcatcttaactgaaagcccagaagccttaaatctgatagcggagggccacatcaagtcgatcatctccctgttggataagcacgggcggaatcacaaggttctggatatcctgtgctccctctgtctctgcaatggggttgcagtgagagccaaccagaatctgatctgtgacaacttgctgccccggagaaacctactcctgcagacacgactgattaacgatgtaaccagtatccggccaaacatcttcctgggagtcgcggagggctcagcccagtacaagaagtggtacttcgagctgattatcgaccaggtggaccccttcctaacagcagagcccacacatctgcgggtgggctgggcctcttcttcaggctatgccccatacccaggaggtggagaaggatggggaggcaatggtgttggtgacgacctgtactcctatggctttgatggacttcacctttggtcaggccggatacccagagctgtggcttccatcaaccagcacctcctgagatcggatgacgtggtaagctgctgcctggacctcggggtgcccagcatctcattccgcatcaatgggcagcccgtgcaggggatgtttgagaacttcaacacagacgggctcttcttccctgtgatgagcttttcagcaggtgtcaaagtacgtttcctgatgggtggacgtcatggagagtttaagttcctgcctccctctggctatgccccttgctatgaagccttacttccaaaagagaagatgagattggagcctgtcaaagaatataaacgtgatgctgatggcattagagatctcttgggtaccacccagttcctctcccaagcctctttcatcccatgccccgtagacaccagtcaggttattttgccacctcacctagaaaagatccgagacagactagctgaaaacatccatgagctttggggaatgaataaaatagaacttggctggactttcggcaagatacgagatgacaataaaagacaacacccttgccttgtggagttttcaaagctcccagaaactgagaagaactataacctgcaaatgtcaactgaaaccttaaaaaccctcttggccctggggtgccacattgctcatgttaacccagctgctgaggaggatctcaagaaggtcaaactgcccaaaaactatatgatgtccaacggctataagccagcccctttggatttgtctgatgtgaagctgttacctcctcaagaaattttagtggataagcttgcagaaaatgcacacaatgtttgggcaaaagacagaataaaacaaggatggacctatggcatccaacaggatttgaagaacaaaagaaatccccgtctggtgccatatgcattactggatgagcgtaccaagaagtcaaacagggacagcctgcgggaagctgtgcgcacttttgttggttacgggtataacattgagccatcagaccaagaactagctgactcggctgtggagaaggtcagcatagacaagatccgatttttccgggtagagcgatcttatgcagtgagatctggaaagtggtattttgagtttgaagtggtgactggaggagacatgcgagtcggctgggcgaggccaggctgtcgacctgatgtcgagctgggggccgatgaccaagcctttgtgtttgaaggcaacaggggccagcgttggcatcaaggaagtgggtattttgggcgtacctggcagccaggggatgtggtcggatgtatgattaacctggatgatgcttcaatgatcttcacactgaatggggagctgctgatcaccaacaaaggctctgaacttgccttcgctgactacgagattgagaatggcttcgtgcccatctgctgtctgggtctatctcagatcggccgcatgaatctcgggacagatgccagtaccttcaagttttataccatgtgcggtctccaagagggctttgagccttttgctgtcaacatgaacagagatgttgctatgtggttcagcaagcgcctcccgacgtttgtcaacgtgccaaaggatcatccacacatagaggtcatgaggattgatggcaccatggacagccctccgtgtctcaaggtgacgcataagacatttggcacacagaatagcaatgccgacatgatctattgccgcttgagcatgcctgtcgagtgccactcctccttcagccacagcccctgtctggacagtgaagctttccagaaaaggaaacagatgcaagaaatactctctcatacaacaacacagtgctactacgccatccgcatctttgctggacaggatccatcctgtgtctgggtcggatgggtgactccagactatcacttgtacagtgaaaagtttgacctgaataaaaactgcacagtgactgtcaccctaggggatgaaagaggccgggtccatgaaagtgtgaaacgcagcaactgctacatggtctggggtggagacattgtagccagttcccagagatcaaatcggagcaacgtggacctggagatcggctgtctcgtggatctggccatgggcatgttgtccttctcagccaatggaaaggaactgggcacctgctaccaggtggagcctaataccaaagtgtttccagcagtcttcctgcagcctacaagtacttctttgtttcagtttgaacttggaaagctgaagaacgcaatgcccctgtcagcggccatattcaggagtgaagagaagaacccagtcccacagtgtccacctcggctggacgtccaaaccatccagcccgtgctctggagccgcatgcccaacagcttcctgaaggtggagaccgagcgtgtgagcgagcgccacggctgggtggtgcagtgcctggagcccctgcagatgatggcgctccacatccccgaggagaacaggtgtgtggatatcctggagctctgtgagcaggaggacctgatgcggttccattaccacacgctgaggctctacagcgcggtgtgcgccctgggaaacagccgcgtggcctacgccctgtgcagccacgtggacctctcccagctcttctatgccattgacaacaagtacctccccggcctccttcgatctggtttctatgacctgctcatcagcatccacctggccagcgccaaggagaggaagctgatgatgaagaacgagtacatcatccccattaccagcaccaccaggaatatccgcctcttcccggacgagtccaagaggcatggactgcctggggtgggcctgagaacatgtctcaagcccgggttcaggttctccaccccttgctttgttgtgactggtgaggatcaccaaaagcagagccccgagattcccttggagagtctcaggacgaaggctctgagtatgctgacagaggcagtgcagtgcagcggggcccacatccgagaccctgtaggggggtctgtggagttccagtttgtgcctgtgctgaaactcattggaaccctgctggtcatgggcgtgtttgatgatgatgatgttcggcagatcctcctcctgattgatccctctgtgtttggggagcatagtgcggggacagaggagggagcagaaaaggaggaagtgacccaggtggaggagaaggctgtggaggctggggagaaggccggcaaggaggctcctgtcaaaggcttgttgcagactcgattacccgaatccgtcaagctgcagatgtgtgagctcctcagctatctctgcgactgtgagctgcagcaccgagtggaggccattgtggcatttggtgacatttatgtctccaagctgcaggcaaatcagaagttccgctacaatgagctcatgcaggccctgaacatgtctgcggccctgactgcccggaagaccaaggagttccgctcacccccacaggagcagatcaacatgctgcttaactttcaactgggagagaactgcccctgcccagaggagattcgggaggagctgtatgatttccatgaggaccttctccttcactgtggggttcctttggaagaagaggaagaggaggaggaggacacctcctggacaggaaaactctgtgccttggtttacaaaatcaaaggcccacccaagccagagaaggagcagccgacggaggaggaggagagatgccccacaacattgaaggaactcatctcacagacgatgatctgctgggcccaggaggaccagatccaggattcagagctggtccgaatgatgttcaacctcctccggaggcagtatgacagcattggggagctgctgcaggcgctgcggaagacctacaccatcagccacacctctgtaagcgacaccatcaacctgctggctgccctgggccaaatccgctccctcctcagtgtcaggatgggcaaggaagaggagttgctcatgatcaatgggctgggagacataatgaacaacaaggtgttttaccagcatcccaacctcatgagagtcctgggcatgcacgagacggtgatggaggtgatggtgaacgtgttgggtacagagaaatctcagattgcatttccaaagatggttgctagctgctgccgtttcctttgctatttctgtcgaattagccggcaaaatcagaaggccatgtttgagcatctgagttatcttctggagaatagcagtgttggcctagcctccccgtcgatgaggggatccaccccgctggatgtggcagcttcctctgtgatggacaacaatgagttagcgctgagcttagaggaaccagacctcgagaaggtggtgacctacttggcaggctgtggcctacagagctgccccatgcttctggccaaaggataccctgatgtcggctggaaccccattgaaggggaacgctacctgtccttcctgaggtttgctgtcttcgtgaacagtgagagtgtggaagaaaacgccagcgttgtggtcaagctgctcatcagacgcccagagtgcttcggcccggccctgcggggtgaggggggaaacgggctcttggcagccatgcagggtgccattaagatctctgagaacccagcgctcgacctcccctctcaaggatacaaaagagaagtcagcacgggggacgatgaagaggaagaagaaatcgtgcatatgggcaatgcaattatgtcattttattcggcccttatagatctactgggccgctgtgctcctgaaatgcacctcatccagacaggaaagggggaagccatccgcatcaggtccatcctgcgctccctggtccccacagaagacctggttgggatcatcagcatccccttgaaactgccctccctcaacaaagatgggtcggtcagtgagccagatatggcggccaatttctgccctgaccacaaggcacctatggtgctgttcttggaccgcgtttatggcattaaggatcaaacttttctgctccacttgctggaggttggatttttacctgacctaagagcttctgcctctctagatacagtttccctaagcaccacagaggctgcgcttgcactaaataggtatatatgttctgctgtgctcccgctcctcacaagatgtgcccctctctttgccggaacagaacactgcacctctctgattgattccacactgcagacaatatacaggctatccaagggacgttccctcaccaaagcacaaagggacactatagaagaatgtttgcttgccatttgcaatcacttgaggccttccatgttacagcaactcctgcgacgcctcgtttttgatgtgccgcaactcaatgaatactgcaaaatgcctctcaagcttctgacgaatcactatgaacagtgttggaagtattactgcctgccttcaggatgggggagctacgggctagctgtggaagaagagctgcacctaacggagaagcttttctgggggatttttgactcgctctcccataagaaatatgacccagatcttttccgaatggccctgccttgtctcagtgctatagctggggccttgccaccagattatttagataccagaatcacagccacgttggagaaacagatctcagtggatgcggatggcaactttgacccaaaacctattaacaccatgaatttttccttgcctgaaaaattggaatacatcgtcaccaagtatgctgagcattcacatgataaatgggcctgtgacaagagtcagagtggatggaaatatgggatttccctggatgaaaatgtgaagacccacccactgataaggcctttcaagacattaacggagaaggagaaggaaatttatcgctggcctgcgcgagagtccctgaaaaccatgctggctgtgggctggactgtggagaggaccaaagagggagaagctttggttcaacagcgggaaaatgagaagcttcgaagtgtgtcccaggccaaccagggcaacagctacagtcctgctcccctcgacctctcaaacgttgtgctctccagagagctccagggaatggtggaggtcgtggctgagaactatcacaatatctgggccaagaagaagaagctggagctggagagcaaaggtggtggcagccaccctcttctggtaccatatgacaccttgactgccaaggaaaagttcaaggaccgggagaaggcacaggacctgtttaagttcctccaagtgaatggcatcatagtttccaggggtatgaaggatatggagctggatgcctcctccatggagaagaggtttgcctataagttcttgaagaagatcctgaaatacgttgattctgctcaagaatttattgcccatttagaagccattgtcagcagtgggaaaactgaaaagtctccccgtgaccaggagatcaaattctttgccaaagttctcctcccgctggttgaccagtacttcaccagtcattgcctctacttcttgtcatcccctctgaagccccttagcagcagcggatatgcctcccataaggagaaagaaatggtggccggcctgttctgcaaacttgccgctctcgttagacacagaatttccctctttggtagtgattctactacaatggtgagctgtcttcacatcttagctcagacacttgacacaaggactgtcatgaagtcaggctcagagctggtgaaggctgggttacgagcattctttgaaaatgctgcagaagatttggagaagacttcagaaaacctgaaacttgggaagttcacccattcccgaacgcagattaaaggcgtttctcagaatattaactacactacagtggctctgctccccatcctgacgtccatctttgagcacgtcactcagcatcagtttggaatggatctactcttgggtgatgtgcagatttcatgctaccacatactgtgcagcctctactcccttgggacgggaaagaacatttatgttgaaaggcaacgccctgcccttggagaatgtctggcctcgctggcagctgccataccagtggcattcctggagcccacccttaatcgctacaatccactctcggtcttcaacaccaaaacccccagggagaggtctattctggggatgccagacacggtagaagacatgtgtcctgacatcccccagctggaaggcctgatgaaggaaatcaacgacctggccgagtcaggggcccggtacacagagatgccccatgtcatcgaggtgatcttacccatgctctgcaactacttgtcctactggtgggagcggggtcctgagaacctgccccccagcacagggccatgctgcaccaaggtcacctctgaacacctcagtctcatcctgggcaacattctgaaaatcatcaacaacaacctgggcatcgatgaggcctcctggatgaagcgcattgcagtgtatgcacagcccatcatcagcaaagccaggcccgacctgctgagaagccacttcatcccaactctggagaagctgaagaaaaaggctgtcaagacggtgcaggaggaggagcagttgaaagccgatggcaaaggggacacccaggaggcagaactcctcatcctggacgagttcgcggtcctctgcagagatctctatgccttctaccccatgctgatccgctacgtggacaacaacagatctaactggctgaaaagtcctgatgctgattctgaccagctcttccgcatggtggcagaagtcttcattctgtggtgtaaatctcataacttcaagagagaagagcaaaattttgtgattcagaatgaaattaataatttggcatttttaactggagacagcaaaagcaagatgtcaaaagccatgcaagtaaagtctggaggacaagaccaggagcggaagaagacaaagcggcggggagacttgtattccatccagacctccctcatcgtggctgcactcaagaaaatgctgcccattggtttgaatatgtgtactccaggcgaccaggagctgatctccctcgcaaaatcgcgatacagccatagggacacagatgaagaggtcagagaacatctgcggaacaacttgcacttgcaggaaaagtctgatgacccagctgtaaaatggcaactgaacctctacaaggatgttctgaagagtgaagaacctttcaatccggaaaagacagtggagcgtgtgcagagaatttcagcagctgtcttccacctggaacaggtggaacagcctttgaggtccaagaaggccgtctggcacaaactgttatcaaagcaacggaaacgggcagtggtggcctgtttcaggatggcccctctctacaacctgcccaggcaccgctctattaacctcttcctccatggctatcagagattttggatagaaacagaggagtattcctttgaagagaaactagtacaggatttggctaaatctccaaaggtggaagaggaggaggaggaagagacagaaaaacaacctgacccactacatcagatcattctctattttagccgcaacgctctcacggagaggagcaaattggaagacgaccctttgtacacctcctattccagcatgatggccaagagttgtcaaagtggtgaggatgaagaagaagatgaagacaaggaaaaaacattcgaagagaaagagatggagaagcaaaaaaccctctatcagcaagctcggctgcatgagcgtggtgctgcagagatggtccttcagatgataagcgctagcaaaggtgagatgagccccatggtggttgagacgctgaagctggggatcgccattctgaacggaggcaatgctggtgtgcaacagaaaatgctagattacctaaaggagaaaaaggatgctggattctttcaaagcctttctggtcttatgcagtcttgcagtgtccttgatttgaatgcatttgagaggcagaataaagctgaaggcctggggatggtgactgaagaaggaacactcattgttcgggaacgtggtgaaaaagtactccagaatgacgagttcacgcgtgatctctttagattcctacagttactttgtgagggacataacagtgactttcagaacttcctgcggactcagatgggcaacaccaccaccgtgaatgtcatcatcagcactgtggactaccttctgcgtctgcaggaatcaatcagtgatttctactggtattattcagggaaggacatcattgatgaatctggacagcacaatttttccaaagctctggcagtcaccaagcagattttcaattctcttacagaatacatccagggcccttgcattggtaatcaacagagcctggctcacagcaggctgtgggacgcagtggttggcttcctccatgtctttgctaatatgcagatgaaactctctcaggattccagtcagatcgagctgctgaaggaactcttggatctccttcaggacatggtggtgatgcttctgtccctcctggaagggaatgtggtaaatggcaccattggcaagcagatggttgacacactggtagaatcatctaccaatgtagaaatgatcttgaaattctttgacatgttcttgaaacttaaagacttaaccagctcagacaccttcaaagaatatgacccagatggtaaaggaattatctccaaaaaagaattccagaaggccatggaagggcaaaaacagtacacgcagtcagagattgactttctcctgtcgtgtgcagaagctgatgagaatgacatgtttaattacgttgattttgtagaccggttccatgagccagccaaggacatagggtttaatgtggctgtgttattgacaaatctttctgaacacatgccaaacgattcccgcctgaagtgtctgttggacccagcagaaagtgtgctaaattacttcgaaccctacctaggacgcatcgagatcatgggtggggccaagaagattgagcgtgtttattttgagatcagtgaatccagtcgcactcagtgggagaagccccaggtgaaggaatctaagcgacagttcatttttgatgttgtcaatgaaggtggggagcaggaaaagatggagctgtttgtgaacttctgtgaggacaccatctttgaaatgcagttagcatctcagatctctgaatccgattcagctgacaggccagaagaggaggaagaagatgaagattcttcttacgtgttagaaattgcgggtgaagaggaagaagacgggtctcttgagccggcctctgcatttgctatggcctgtgcctctgtgaagaggaatgtcaccgacttcctgaagagagcaaccctgaagaacctcaggaagcagtacaggaacgtgaaaaagatgactgcgaaggagctggtgaaggtgctcttctcctttttctggatgctgttcgtggggctattccagttgctcttcaccatcctgggaggaatctttcagatcctctggagcacagtgtttggagggggcctggtagaaggggcaaagaacatcagagtgaccaagatcctgggtgacatgcctgacccaacccaatttggtatccatgatgacactatggaggctgagagggcagaggtgatggagccaggtatcaccactgaactagtacacttcataaagggggagaagggagatacagatatcatgtcagacctctttggactccacccaaagaaagagggcagcttaaagcatgggcctgaagtgggtttgggtgacctctcagaaattattggcaaggatgaaccccctacattagagagtactgtacagaagaagaggaaagctcaggcagcagaaatgaaagcagcaaatgaagcagaaggaaaagtagaatccgagaaggcagacatggaagatggagagaaggaagacaaagacaaagaagaggagcaagctgagtacctgtggacagaagtgacaaaaaagaagaagcggcggtgtggtcagaaggttgagaagccggaagctttcacagccaatttctttaaagggctggaaatctatcagaccaagttactgcattacctggccaggaatttctacaacctgaggttccttgctctgtttgtagccttcgctatcaacttcatcctgcttttttataaggtcactgaagaacctttagaagaagagacagaggatgttgcaaacctatggaattcctttaatgacgaggaagaggaagaagcgatggtattctttgtccttcaggagagcaccgggtatatggcaccaaccctgcgtgccctggccatcatccataccatcatctctctagtctgtgtggtgggctactactgcctgaaggtgcctttggtggttttcaaaagggaaaaagaaatcgccaggaagctggagtttgatggcctatatatcaccgaacagccatctgaagatgacatcaaggggcagtgggaccgcttggtgatcaacacaccatcttttcctaataactactgggacaagtttgtaaagagaaaggtgatcaacaagtatggagatctctacggagcagaacgcattgctgaacttctgggtttggacaaaaatgctcttgactttagcccagtagaagagaccaaagcagaagcggcttctctggtgtcatggctaagttccatagacatgaagtaccatatctggaagcttggagttgtttttactgacaactcctttctctaccttgcctggtatacaaccatgtcagtcctgggccactacaataacttcttctttgctgctcacctattggacatcgcaatgggcttcaagacactgaggaccattctgtcatctgtaactcacaatggcaaacagttggttctgactgtcggtctcctggccgtggtggtttatctctatactgtggtggctttcaacttcttccgcaagttctacaacaaaagcgaagacgatgacgagcccgatatgaagtgcgacgacatgatgacgtgttaccttttccacatgtacgtgggagtgagagcaggaggtggcattggtgatgaaattgaagaccctgctggtgatccttatgaaatgtatcgcattgtctttgacattacctttttcttcttcgtcattgtcatcttgctggccatcattcaaggtcttattattgatgctttcggagagctaagagaccagcaggaacaagtacgagaagatatggagactaaatgtttcatctgtgggattggcaatgactactttgacacaacccctcatggttttgaaacacatacattacaagagcacaacttagccaactacttgttctttctgatgtatttgattaataaagatgaaacagagcacacgggtcaggaatcttatgtctggaagatgtaccaagaaaggtgttgggatttcttcccagccggtgactgctttcgtaaacaatatgaagatcagcttggataaatctgaatcaaagaagcgcgacaattctggacagtcaacttcccatgaaataaagtcccctttttacagttctgcaacatatctgaaatgtgacattttctaaatgcctcccttaaaaaaaaaactgctgaaaatctgtgctattttgaaattgatttggctttttgtgcctaatggacatacactgtgggagagaacctgtcaaaatgtcgaagaaggaaggcgaagaatcaagtaatctctaggcaaatgccttcaagttttccagttctgaggtaactagttcagtttgttgggatggaagcatgaaggaaagggctagagaagtatgaaatctcgaatgtgtaatacctgaaaatttaaacacttgaatgtcatcatggtatccaacttgtgactcatagggtctgaactcactccaaaagataataactgcagtctaatttttcccatggtacttgctagtgactgtatccagaaaagctttaagcagttaaagaaacagaaaaaaaccgacactttgtcgacactgaaatatcgattaagtgccttaaaacctctttagacatagctatgcaagttttttatgtttgtgttccagaaggacagttccattcattagttgtgatcttccgtcttactttatgaaactgcacttgaaggttattcatacaagtttttttagtaacagctgtcagtcaactgctgttattagaagaaaagtactgtactgaaaattcagaaaaaaaatctcaaccttatgccaaaatggagtaatgctttatggtcccttgtaagtagtggagctgctctgtttaggtgaatctcctcaaatacaatgaagtgcccactgcaataaagtaatacgtaccaataaaaa

SEQ ID NO: 1494 - protein, 4870 aa, Homo sapiens
MAEGGEGGEDEIQFLRTEDEVVLQCIATIHKEQRKFCLAAEGLGNRLCFLEPTSEAKYIPPDLCVCNFVLEQSLSVRALQEMLANTGENGGEGAAQGGGHRTLLYGHAVLLRHSFSGMYLTCLTTSRSQTDKLAFDVGLREHATGEACWWTIHPASKQRSEGEKVRIGDDLILVSVSSERYLHLSVSNGNIQVDASFMQTLWNVHPTCSGSSIEEGYLLGGHVVRLFHGHDECLTIPSTDQNDSQHRRIFYEAGGAGTRARSLWRVEPLRISWSGSNIRWGQAFRLRHLTTGHYLALTEDQGLILQDRAKSDTKSTAFSFRASKELKEKLDSSHKRDIEGMGVPEIKYGDSVCFVQHIASGLWVTYKAQDAKTSRLGPLKRKVILHQEGHMDDGLTLQRCQREESQAARIIRNTTALFSQFVSGNNRTAAPITLPIEEVLQTLQDLIAYFQPPEEEMRHEDKQNKLRSLKNRQNLFKEEGMLALVLNCIDRLNVYNSVAHFAGIAREESGMAWKEILNLLYKLLAALIRGNRNNCAQFSNNLDWLISKLDRLESSSGILEVLHCILTESPEALNLIAEGHIKSIISLLDKHGRNHKVLDILCSLCLCNGVAVRANQNLICDNLLPRRNLLLQTRLINDVTSIRPNIFLGVAEGSAQYKKWYFELIIDQVDPFLTAEPTHLRVGWASSSGYAPYPGGGEGWGGNGVGDDLYSYGFDGLHLWSGRIPRAVASINQHLLRSDDVVSCCLDLGVPSISFRINGQPVQGMFENFNTDGLFFPVMSFSAGVKVRFLMGGRHGEFKFLPPSGYAPCYEALLPKEKMRLEPVKEYKRDADGIRDLLGTTQFLSQASFIPCPVDTSQVILPPHLEKIRDRLAENIHELWGMNKIELGWTFGKIRDDNKRQHPCLVEFSKLPETEKNYNLQMSTETLKTLLALGCHIAHVNPAAEEDLKKVKLPKNYMMSNGYKPAPLDLSDVKLLPPQEILVDKLAENAHNVWAKDRIKQGWTYGIQQDLKNKRNPRLVPYALLDERTKKSNRDSLREAVRTFVGYGYNIEPSDQELADSAVEKVSIDKIRFFRVERSYAVRSGKWYFEFEVVTGGDMRVGWARPGCRPDVELGADDQAFVFEGNRGQRWHQGSGYFGRTWQPGDVVGCMINLDDASMIFTLNGELLITNKGSELAFADYEIENGFVPICCLGLSQIGRMNLGTDASTFKFYTMCGLQEGFEPFAVNMNRDVAMWFSKRLPTFVNVPKDHPHIEVMRIDGTMDSPPCLKVTHKTFGTQNSNADMIYCRLSMPVECHSSFSHSPCLDSEAFQKRKQMQEILSHTTTQCYYAIRIFAGQDPSCVWVGWVTPDYHLYSEKFDLNKNCTVTVTLGDERGRVHESVKRSNCYMVWGGDIVASSQRSNRSNVDLEIGCLVDLAMGMLSFSANGKELGTCYQVEPNTKVFPAVFLQPTSTSLFQFELGKLKNAMPLSAAIFRSEEKNPVPQCPPRLDVQTIQPVLWSRMPNSFLKVETERVSERHGWVVQCLEPLQMMALHIPEENRCVDILELCEQEDLMRFHYHTLRLYSAVCALGNSRVAYALCSHVDLSQLFYAIDNKYLPGLLRSGFYDLLISIHLASAKERKLMMKNEYIIPITSTTRNIRLFPDESKRHGLPGVGLRTCLKPGFRFSTPCFVVTGEDHQKQSPEIPLESLRTKALSMLTEAVQCSGAHIRDPVGGSVEFQFVPVLKLIGTLLVMGVFDDDDVRQILLLIDPSVFGEHSAGTEEGAEKEEVTQVEEKAVEAGEKAGKEAPVKGLLQTRLPESVKLQMCELLSYLCDCELQHRVEAIVAFGDIYVSKLQANQKFRYNELMQALNMSAALTARKTKEFRSPPQEQINMLLNFQLGENCPCPEEIREELYDFHEDLLLHCGVPLEEEEEEEEDTSWTGKLCALVYKIKGPPKPEKEQPTEEEERCPTTLKELISQTMICWAQEDQIQDSELVRMMFNLLRRQYDSIGELLQALRKTYTISHTSVSDTINLLAALGQIRSLLSVRMGKEEELLMINGLGDIMNNKVFYQHPNLMRVLGMHETVMEVMVNVLGTEKSQIAFPKMVASCCRFLCYFCRISRQNQKAMFEHLSYLLENSSVGLASPSMRGSTPLDVAASSVMDNNELALSLEEPDLEKVVTYLAGCGLQSCPMLLAKGYPDVGWNPIEGERYLSFLRFAVFVNSESVEENASVVVKLLIRRPECFGPALRGEGGNGLLAAMQGAIKISENPALDLPSQGYKREVSTGDDEEEEEIVHMGNAIMSFYSALIDLLGRCAPEMHLIQTGKGEAIRIRSILRSLVPTEDLVGIISIPLKLPSLNKDGSVSEPDMAANFCPDHKAPMVLFLDRVYGIKDQTFLLHLLEVGFLPDLRASASLDTVSLSTTEAALALNRYICSAVLPLLTRCAPLFAGTEHCTSLIDSTLQTIYRLSKGRSLTKAQRDTIEECLLAICNHLRPSMLQQLLRRLVFDVPQLNEYCKMPLKLLTNHYEQCWKYYCLPSGWGSYGLAVEEELHLTEKLFWGIFDSLSHKKYDPDLFRMALPCLSAIAGALPPDYLDTRITATLEKQISVDADGNFDPKPINTMNFSLPEKLEYIVTKYAEHSHDKWACDKSQSGWKYGISLDENVKTHPLIRPFKTLTEKEKEIYRWPARESLKTMLAVGWTVERTKEGEALVQQRENEKLRSVSQANQGNSYSPAPLDLSNVVLSRELQGMVEVVAENYHNIWAKKKKLELESKGGGSHPLLVPYDTLTAKEKFKDREKAQDLFKFLQVNGIIVSRGMKDMELDASSMEKRFAYKFLKKILKYVDSAQEFIAHLEAIVSSGKTEKSPRDQEIKFFAKVLLPLVDQYFTSHCLYFLSSPLKPLSSSGYASHKEKEMVAGLFCKLAALVRHRISLFGSDSTTMVSCLHILAQTLDTRTVMKSGSELVKAGLRAFFENAAEDLEKTSENLKLGKFTHSRTQIKGVSQNINYTTVALLPILTSIFEHVTQHQFGMDLLLGDVQISCYHILCSLYSLGTGKNIYVERQRPALGECLASLAAAIPVAFLEPTLNRYNPLSVFNTKTPRERSILGMPDTVEDMCPDIPQLEGLMKEINDLAESGARYTEMPHVIEVILPMLCNYLSYWWERGPENLPPSTGPCCTKVTSEHLSLILGNILKIINNNLGIDEASWMKRIAVYAQPIISKARPDLLRSHFIPTLEKLKKKAVKTVQEEEQLKADGKGDTQEAELLILDEFAVLCRDLYAFYPMLIRYVDNNRSNWLKSPDADSDQLFRMVAEVFILWCKSHNFKREEQNFVIQNEINNLAFLTGDSKSKMSKAMQVKSGGQDQERKKTKRRGDLYSIQTSLIVAALKKMLPIGLNMCTPGDQELISLAKSRYSHRDTDEEVREHLRNNLHLQEKSDDPAVKWQLNLYKDVLKSEEPFNPEKTVERVQRISAAVFHLEQVEQPLRSKKAVWHKLLSKQRKRAVVACFRMAPLYNLPRHRSINLFLHGYQRFWIETEEYSFEEKLVQDLAKSPKVEEEEEEETEKQPDPLHQIILYFSRNALTERSKLEDDPLYTSYSSMMAKSCQSGEDEEEDEDKEKTFEEKEMEKQKTLYQQARLHERGAAEMVLQMISASKGEMSPMVVETLKLGIAILNGGNAGVQQKMLDYLKEKKDAGFFQSLSGLMQSCSVLDLNAFERQNKAEGLGMVTEEGTLIVRERGEKVLQNDEFTRDLFRFLQLLCEGHNSDFQNFLRTQMGNTTTVNVIISTVDYLLRLQESISDFYWYYSGKDIIDESGQHNFSKALAVTKQIFNSLTEYIQGPCIGNQQSLAHSRLWDAVVGFLHVFANMQMKLSQDSSQIELLKELLDLLQDMVVMLLSLLEGNVVNGTIGKQMVDTLVESSTNVEMILKFFDMFLKLKDLTSSDTFKEYDPDGKGIISKKEFQKAMEGQKQYTQSEIDFLLSCAEADENDMFNYVDFVDRFHEPAKDIGFNVAVLLTNLSEHMPNDSRLKCLLDPAESVLNYFEPYLGRIEIMGGAKKIERVYFEISESSRTQWEKPQVKESKRQFIFDVVNEGGEQEKMELFVNFCEDTIFEMQLASQISESDSADRPEEEEEDEDSSYVLEIAGEEEEDGSLEPASAFAMACASVKRNVTDFLKRATLKNLRKQYRNVKKMTAKELVKVLFSFFWMLFVGLFQLLFTILGGIFQILWSTVFGGGLVEGAKNIRVTKILGDMPDPTQFGIHDDTMEAERAEVMEPGITTELVHFIKGEKGDTDIMSDLFGLHPKKEGSLKHGPEVGLGDLSEIIGKDEPPTLESTVQKKRKAQAAEMKAANEAEGKVESEKADMEDGEKEDKDKEEEQAEYLWTEVTKKKKRRCGQKVEKPEAFTANFFKGLEIYQTKLLHYLARNFYNLRFLALFVAFAINFILLFYKVTEEPLEEETEDVANLWNSFNDEEEEEAMVFFVLQESTGYMAPTLRALAIIHTIISLVCVVGYYCLKVPLVVFKREKEIARKLEFDGLYITEQPSEDDIKGQWDRLVINTPSFPNNYWDKFVKRKVINKYGDLYGAERIAELLGLDKNALDFSPVEETKAEAASLVSWLSSIDMKYHIWKLGVVFTDNSFLYLAWYTTMSVLGHYNNFFFAAHLLDIAMGFKTLRTILSSVTHNGKQLVLTVGLLAVVVYLYTVVAFNFFRKFYNKSEDDDEPDMKCDDMMTCYLFHMYVGVRAGGGIGDEIEDPAGDPYEMYRIVFDITFFFFVIVILLAIIQGLIIDAFGELRDQQEQVREDMETKCFICGIGNDYFDTTPHGFETHTLQEHNLANYLFFLMYLINKDETEHTGQESYVWKMYQERCWDFFPAGDCFRKQYEDQLG

SEQ ID NO: 1495 - DNA, 2009 bp, Homo sapiens
gggacgacagcggggggggggttagacgggaagttccgcctcagcctctcaatcagcggcggtgtcgcacttctcccgagaggctccggcgaggggcagggccgcgttcgtccgggacccgcctcaagcctcgcagcctttcacccagtttcctcccgattcttgctgggacaacaaaattgggaagcggttctcgaaacatactgtcaaggcgtagttgcatttggtcgcccaactcacattgaagcctaagacccagctgatttctcttcatttctgcaaagttactgtaccatggcaggccaacgaacatgtcaaaggaggagcagcagagctggccccgggaaaatgcaagaacctccaaagagcattgaagaattcttaaagtttcaaaattgggattattggccaagggaaatccattttagagatgatgataaatggtcatgcactctgaaaaaaataaaagaagatagttcatttgtttcaatttatacacacctatgggaaaatgttcctcgaatatttgaagcacttttgatcatggaatcaaaattaaaggaatattcacttattttgcaaaaccacacctctgaaatatttaagtggaaaagcatgatttctgagacaagttcttatagaaaattggaacgatatggggaatttctaaagaagtaccataagaaaaaaaagataatgctttcagatgaaatggagacagagaagaatatagagggttgcagcttcacaggattcaaagcaaatgaacttactcagctacccagacatttggatgctgaacaaatttatctttttattttaaaagcccataattttgatgaaagagtttttaaaatctggaagactcattttctctcagaagcctccattgctcttttgcatgactccttttggtggtggtttctccataaatttaggcctgacagagaaaaccaagattgcttattcgatagaatttcagaaagttatgtgacacttttcatgagcatacctctaagtcgaaaggatgcattttttcagatatatcctgattgtttggcacaagccatatatgcaacgttccatgaagcatttccagaatcgagttacctctttaatgatgaatttaaagaagatctagggaataacatttttctttggtgttcaggtttaaaacctcaaaaaggcttttggatccactggaaactgaaagaactctccacaaccaccattcatggtagcaaaaaagcacctgcaaaatcagtaaaggaaagaattgcagacagtcaagaacatatatcaactagtatcgacttcaatattataaagattctgaacaacccaagagcatatacgttgcccatatccaaggaagaatcaagattatcaagactagcaacaaagtcgcactatagtagtactggtccagagtttaatcgtgttctcttcaattttggaggtcagagtccattgattttatattatcttaagatgcatgagctggctggtatttccaaagcacctaagaaaaccaagattaaactcactaagatattccaggaaccactacctgctccaacataccgtgatgttataaaggaggcaaaaagacaatttgcaaggaaccaaaaggattttaggatactccaagcaaaggctaccaagaaacctcatgaagtgaaacaggactttgagaagttcctacataaactgcgttccgaagctgaaattgagagagaatgtgtggcatcactatcgtcatcatcatcatcatcaccatcatcaacagacaactacaactttgaggaagaagaatactaagagaaaccagaaatgaactctattcaagaataatgcatacaattcagtggtatcagtttaattgtaacaatatatttaattcaagtccaatccatgtaatcagtattaagagtgtgttttaccattcatctttaaaatcttcaaatcaataaatctcagtaagttattcttaaaaaaaaaaaaaaaaa

SEQ ID NO: 1496 - protein, 508 aa, Homo sapiens
MAGQRTCQRRSSRAGPGKMQEPPKSIEEFLKFQNWDYWPREIHFRDDDKWSCTLKKIKEDSSFVSIYTHLWENVPRIFEALLIMESKLKEYSLILQNHTSEIFKWKSMISETSSYRKLERYGEFLKKYHKKKKIMLSDEMETEKNIEGCSFTGFKANELTQLPRHLDAEQIYLFILKAHNFDERVFKIWKTHFLSEASIALLHDSFWWWFLHKFRPDRENQDCLFDRISESYVTLFMSIPLSRKDAFFQIYPDCLAQAIYATFHEAFPESSYLFNDEFKEDLGNNIFLWCSGLKPQKGFWIHWKLKELSTTTIHGSKKAPAKSVKERIADSQEHISTSIDFNIIKILNNPRAYTLPISKEESRLSRLATKSHYSSTGPEFNRVLFNFGGQSPLILYYLKMHELAGISKAPKKTKIKLTKIFQEPLPAPTYRDVIKEAKRQFARNQKDFRILQAKATKKPHEVKQDFEKFLHKLRSEAEIERECVASLSSSSSSSPSSTDNYNFEEEEY

SEQ ID NO: 1497 - DNA, 3853 bp, Homo sapiens
acgcgctcacacacagagagaaaatccttctgcctgttgatttatggaaacaattatgattctgctggagaacttttcagctgagaaatagtttgtagctacagtagaaaggctcaagttgcaccaggcagacaacagacatggaattcttatatatccagctgttagcaacaaaacaaaagtcaaatagcaaacagcgtcacagcaactgaacttactacgaactgtttttatgaggatttatcaacagagttatttaaggaggaatcctgtgttgttatcaggaactaaaaggataaggctaacaatttggaaagagcaactactctttcttaaatcaatctacaattcacagataggaagaggtcaatgacctaggagtaacaatcaactcaagattcattttcattatgttattcatgaacacccggagcactacactataatgcacaaatggatactgacatggatcctgccaactttgctctacagatcatgctttcacattatctgtctagtgggtactatatctttagcttgcaatgacatgactccagagcaaatggctacaaatgtgaactgttccagccctgagcgacacacaagaagttatgattacatggaaggaggggatataagagtgagaagactcttctgtcgaacacagtggtacctgaggatcgataaaagaggcaaagtaaaagggacccaagagatgaagaataattacaatatcatggaaatcaggacagtggcagttggaattgtggcaatcaaaggggtggaaagtgaattctatcttgcaatgaacaaggaaggaaaactctatgcaaagaaagaatgcaatgaagattgtaacttcaaagaactaattctggaaaaccattacaacacatatgcatcagctaaatggacacacaacggaggggaaatgtttgttgccttaaatcaaaaggggattcctgtaagaggaaaaaaaacgaagaaagaacaaaaaacagcccactttcttcctatggcaataacttaattgcatatggtatataaagaacccagttccagcagggagatttctttaagtggactgttttctttcttctcaaaattttctttccttttattttttagtaatcaagaaaggctggaaaaactactgaaaaactgatcaagctggacttgtgcatttatgtttgttttaagacactgcattaaagaaagatttgaaaagtatacacaaaaatcagatttagtaactaaaggttgtaaaaaattgtaaaactggttgtacaatcatgatgttagtaacagtaatttttttcttaaattaatttacccttaagagtatgttagatttgattatctgataatgattatttaaatattcctatctgcttataaaatggctgctataataataataatacagatgttgttatataaggtatatcagacctacaggcttctggcaggatttgtcagataatcaagccacactaactatggaaaatgagcagcattttaaatgctttctagtgaaaaattataatctacttaaactctaatcagaaaaaaaattctcaaaaaaactattatgaaagtcaataaaatagataatttaacaaaagtacaggattagaacatgcttatacctataaataagaacaaaatttctaatgctgctcaagtggaaagggtattgctaaaaggatgtttccaaaaatcttgtatataagatagcaacagtgattgatgataatactgtacttcatcttacttgccacaaaataacattttataaatcctcaaagtaaaattgagaaatctttaagtttttttcaagtaacataatctatctttgtataattcatatttgggaatatggcttttaataatgttcttcccacaaataatcatgcttttttcctatggttacagcattaaactctattttaagttgtttttgaactttattgttttgttatttaagtttatgttatttataaaaaaaaaaccttaataagctgtatctgtttcatatgcttttaattttaaaggaataacaaaactgtctggctcaacggcaagtttccctcccttttctgactgacactaagtctagcacacagcacttgggccagcaaatcctggaagcagacaaaaataagagcctgaagcaatgcttacaatagatgtctcacacagaacaatacaaatatgtaaaaactctttcaccacatattcttgccaattaattggatcatataagtaaaatcattacaaatataagtatttacaggattttaaagttagaatatatttgaatgcatgggtagaaaatatcatattttaaaactatgtatatttaaatttagtaattttctaatctctagaaatctctgctgttcaaaaggtggcagcactgaaagttgttttcctgttagatggcaagagcacaatgcccaaaatagaagatgcagttaagaataaggggccctgaatgtcatgaaggcttgaggtcagcctacagataacaggattattacaaggatgaatttccacttcaaaagtctttcattggcagatcttggtagcactttatatgttcaccaatgggaggtcaatatttatctaatttaaaaggtatgctaaccactgtggttttaatttcaaaatatttgtcattcaagtccctttacataaatagtatttggtaatacatttatagatgagagttatatgaaaaggctaggtcaacaaaaacaatagattcatttaattttcctgtggttgacctatacgaccaggatgtagaaaactagaaagaactgcccttcctcagatatactcttgggagagagcatgaatggtattctgaactatcacctgattcaaggactttgctagctaggttttgaggtcaggcttcagtaactgtagtcttgtgagcatattgagggcagaggaggacttagtttttcatatgtgtttccttagtgcctagcagactatctgttcataatcagttttcagtgtgaattcactgaatgtttatagacaaaagaaaatacacactaaaactaatcttcattttaaaagggtaaaacatgactatacagaaatttaaatagaaatagtgtatatacatataaaatacaagctatgttaggaccaaatgctctttgtctatggagttatacttccatcaaattacatagcaatgctgaattaggcaaaaccaacatttagtggtaaatccattcctggtagtataagtcacctaaaaaagacttctagaaatatgtactttaattatttgtttttctcctatttttaaatttattatgcaaattttagaaaataaaatttgctctagttacacacctttagaattctagaatattaaaactgtaaggggcctccatccctcttactcatttgtagtctaggaaattgagattttgatacacctaaggtcacgcagctgggtagatatacagctgtcacaagagtctagatcagttagcacatgctttctactcttcgattattagtattattagctaatggtctttggcatgtttttgttttttatttctgttgagatatagcctttacatttgtacacaaatgtgactatgtcttggcaatgcacttcatacacaatgactaatctatactgtgatgatttgactcaaaaggagaaaagaaattatgtagttttcaattctgattcctattcaccttttgtttatgaatggaaagctttgtgcaaaatatacatataagcagagtaagccttttaaaaatgttctttgaaagataaaattaaatacatgagtttctaacaattaga

SEQ ID NO: 1498 - protein, 194 aa, Homo sapiens
MHKWILTWILPTLLYRSCFHIICLVGTISLACNDMTPEQMATNVNCSSPERHTRSYDYMEGGDIRVRRLFCRTQWYLRIDKRGKVKGTQEMKNNYNIMEIRTVAVGIVAIKGVESEFYLAMNKEGKLYAKKECNEDCNFKELILENHYNTYASAKWTHNGGEMFVALNQKGIPVRGKKTKKEQKTAHFLPMAIT

SEQ ID NO: 1499 - DNA, 1232 bp, Homo sapiens
gacgcgtgggttcgaggactcgcgggtgtgcagggatgcggtttaatattttcatgtgattcctaaaagaatctgaggctcaagaaaagagggcatcttaatatcctgcactttcagtcattgagggcatgatcacaaagatcaaagccatttttaggcagtgcacctatgatatgtgttttagaaatagccgttaaactttggtttgaatgaagaatgtctctcaatccacctatatttctcaaacgaagtgaagaaaatagttcaaaatttgtggaaacaaaacagtcacaaactacttccatagcttcagaagatccccttcaaaacttatgtttagcatctcaagaagttcttcaaaaagctcagcaaagtgggagatcaaaatgtctcaaatgtggtggttccagaatgttctactgctatacatgttatgttccagttgaaaatgtacctattgaacagattccacttgtgaagcttccattgaagattgacatcattaaacatccaaatgaaacagatggcaaaagtactgctatacatgcaaaactcttagcacctgaatttgtaaacatttacacgtatccgtgtattccagaatatgaagaaaaggaccatgaagttgcactcatttttcctggacctcagtctatctcaataaaagatatttcttttcatctgcaaaaaaggattcaaaataatgttagaggcaaaaatgatgaccctgacaagccatcttttaaacgcaaaagaactgaagaacaagagttctgtgatttgaatgacagcaagtgcaaaggcacaacactgaaaaaaattatatttatagatagcacctggaaccaaacaaacaaaatattcactgatgagcgacttcaagggttgttacaagttgagttgaaaacaagaaaaacttgcttttggcgccatcaaaaaggaaagccagatactttcctttctacaattgaagccatttactactttctggtagactaccatactgatatattaaaagagaaatacagagggcaatatgacaatcttttatttttctattcttttatgtaccagttgataaagaatgccaaatgctctggagataaggaaacaggaaaacttacacattagtttttaacaagccacttatgtctttttattttgctaacattaataaacttatatttgtgctttgttttttcttaagaaataatcataaaaaaaaaaaaaaa

SEQ ID NO: 1500 - protein, 304 aa, Homo sapiens
MSLNPPIFLKRSEENSSKFVETKQSQTTSIASEDPLQNLCLASQEVLQKAQQSGRSKCLKCGGSRMFYCYTCYVPVENVPIEQIPLVKLPLKIDIIKHPNETDGKSTAIHAKLLAPEFVNIYTYPCIPEYEEKDHEVALIFPGPQSISIKDISFHLQKRIQNNVRGKNDDPDKPSFKRKRTEEQEFCDLNDSKCKGTTLKKIIFIDSTWNQTNKIFTDERLQGLLQVELKTRKTCFWRHQKGKPDTFLSTIEAIYYFLVDYHTDILKEKYRGQYDNLLFFYSFMYQLIKNAKCSGDKETGKLTH

SEQ ID NO: 1501 - DNA, 2010 bp, Homo sapiens
aagaggaagtcgcgctgctgtggcggccgctgtagcagcggcggtccagtcgtagcccggccgcccgcgcctgtccggtccggtccggccacggaggcagcgcagcggcgggactccgagcctaccccgccgagtgagctgcgccgcaccgtgccgtcccacccggcacccaccagtccgatggggccgcagcggcggctgtcccctgccggggccgccctactctggggcttcctgctccagctgacagccgctcaggaagcaatcttgcatgcgtctggaaatggcacaaccaaggactactgcatgctttataacccttattggacagctcttccaagtaccctagaaaatgcaacttccattagtttgatgaatctgacttccacaccactatgcaacctttctgatattcctcctgttggcataaagagcaaagcagttgtggttccatggggaagctgccattttcttgaaaaagccagaattgcacagaaaggaggtgctgaagcaatgttagttgtcaataacagtgtcctatttcctccctcaggtaacagatctgaatttcctgatgtgaaaatactgattgcatttataagctacaaagactttagagatatgaaccagactctaggagataacattactgtgaaaatgtattctccatcgtggcctaactttgattatactatggtggttatttttgtaattgcggtgttcactgtggcattaggtggatactggagtggactagttgaattggaaaacttgaaagcagtgacaactgaagatagagaaatgaggaaaaagaaggaagaatatttaacttttagtcctcttacagttgtaatatttgtggtcatctgctgtgttatgatggtcttactttatttcttctacaaatggttggtttatgttatgatagcaattttctgcatagcatcagcaatgagtctgtacaactgtcttgctgcactaattcataagataccatatggacaatgcacgattgcatgtcgtggcaaaaacatggaagtgagacttatttttctctctggactgtgcatagcagtagctgttgtttgggctgtgtttcgaaatgaagacaggtgggcttggattttacaggatatcttggggattgctttctgtctgaatttaattaaaacactgaagttgcccaacttcaagtcatgtgtgatacttctaggccttctcctcctctatgatgtattttttgttttcataacaccattcatcacaaagaatggtgagagtatcatggttgaactcgcagctggaccttttggaaataatgaaaagttgccagtagtcatcagagtaccaaaactgatctatttctcagtaatgagtgtgtgcctcatgcctgtttcaatattgggttttggagacattattgtaccaggcctgttgattgcatactgtagaagatttgatgttcagactggttcttcttacatatactatgtttcgtctacagttgcctatgctattggcatgatacttacatttgttgttctggtgctgatgaaaaaggggcaacctgctctcctctatttagtaccttgcacacttattactgcctcagttgttgcctggagacgtaaggaaatgaaaaagttctggaaaggtaacagctatcagatgatggaccatttggattgtgcaacaaatgaagaaaaccctgtgatatctggtgaacagattgtccagcaataatattatgtggaactgctataatgtgtcattgattttctacaaatagacttcgactttttaaattgacttttgaattgacaatctgaaagagtcttcaatgatatgcttgcaaaaatatatttttatgagctggtactgacagttacatcataaataactaaaacgctttgcttttaatgttaaagttgtgccttcacattaaataaaacatatggtctgtgtagtttccgagatgtactatatacagtatatttttctaaaaaaaaa

SEQ ID NO: 1502 - protein, 520 aa, Homo sapiens
MGPQRRLSPAGAALLWGFLLQLTAAQEAILHASGNGTTKDYCMLYNPYWTALPSTLENATSISLMNLTSTPLCNLSDIPPVGIKSKAVVVPWGSCHFLEKARIAQKGGAEAMLVVNNSVLFPPSGNRSEFPDVKILIAFISYKDFRDMNQTLGDNITVKMYSPSWPNFDYTMVVIFVIAVFTVALGGYWSGLVELENLKAVTTEDREMRKKKEEYLTFSPLTVVIFVVICCVMMVLLYFFYKWLVYVMIAIFCIASAMSLYNCLAALIHKIPYGQCTIACRGKNMEVRLIFLSGLCIAVAVVWAVFRNEDRWAWILQDILGIAFCLNLIKTLKLPNFKSCVILLGLLLLYDVFFVFITPFITKNGESIMVELAAGPFGNNEKLPVVIRVPKLIYFSVMSVCLMPVSILGFGDIIVPGLLIAYCRRFDVQTGSSYIYYVSSTVAYAIGMILTFVVLVLMKKGQPALLYLVPCTLITASVVAWRRKEMKKFWKGNSYQMMDHLDCATNEENPVISGEQIVQQ

SEQ ID NO: 1503 - DNA, 6682 bp, Homo sapiens
gcggcggcggcatcgcgggcggcggcggcgatgagcgacatagtggagaagacgctgacggcgctgccgggactctttctgcagaaccagcccggtggtgggcccgcggccgccaaggcgtccttctcctcgaggctgggcagccttgtccgcggcatcacagccctcacctccaagcacgaagaagaaaaattaatccagcaggaactgagtagtctgaaagcgactgtttctgctcctactacaacactgaaaatgatgaaggaatgtatggtgagacttatatattgtgaaatgcttggatatgatgcttcctttggctatattcatgcaatcaagttagcccaacaaggaaacctcttagaaaaaagagtaggttatttggctgtttccttatttctacatgaaagtcatgaattattgcttctccttgtgaatacagttgtaaaggatctgcagagcactaacctagtagaagtgtgtatggcactgactgttgttagccagattttcccctgcgaaatgattccagctgttcttccattaatagaagataaacttcaacattctaaggagattgtacgaagaaaagctgttctggcattatacaaattccatctcattgctcctaatcaagtacaacatattcatattaagtttcggaaagcactttgtgacagagatgttggggtcatggctgcctccttgcatatatatcttagaatgattaaggagaattcatctggatataaagacttgactgggagttttgtaaccattttgaagcaagtagttggaggaaagctcccagtagaattcaattaccacagtgtgccagcaccatggttacaaattcagctcttgagaatactgggacttctaggaaaagatgatcaaaggacaagtgaattaatgtatgatgttcttgatgaatccttacgaagagctgagttaaatcacaatgtcacatatgctattttgtttgaatgtgtgcatacagtctattctatttatcctaaatcggaattacttgagaaggctgccaagtgcattggaaaatttgttctgtcacctaaaataaatctaaaatatttaggactgaaggctcttacctatgttatccaacaggatcctactctggctcttcaacaccagatgacaataattgaatgtttagatcatcctgatcccattattaaaagagagactctggaacttctttacagaattactaatgcacagaatataacagttattgtccagaaaatgcttgaatatttacatcagagcaaagaagagtatgtcatcgtcaatttggtcggcaaaatagcagagctggctgagaaatatgctcctgataatgcatggtttattcagacaatgaatgctgtgttttcagtaggaggagatgtaatgcatcctgatattcccaataactttctgagactactagcggaaggttttgatgatgaaacagaagatcagcaattaagactctatgcagttcagtcttatctcactttactggatatggaaaatgtgttctatccacagagatttcttcaagttatgagttgggtattaggggaatattcctacctcttagataaggaaacgccagaggaagttatagctaagctctacaagttacttatgaatgactctgtgtcttcagaaacaaaagcctggttaattgctgctgtgaccaaattgacatctcaggcgcactcttctaatacagttgagagattaatccatgaatttaccatatctttggatacttgtatgagacaacatgcatttgaattaaaacatttgcatgagaatgtggaacttatgaagagcttgcttccagttgacaggagttgtgaagacttggtggtagatgcttctttatcttttctggatggttttgtggctgaaggactcagtcagggtgcagcgccttacaaacctccccatcaacgccaggaggaaaagctttctcaggaaaaagttctcaattttgaaccatatggactctccttttcttcatctggcttcactggacgacagtctcctgctggcatttctcttggttcagatgtatctgggaatagtgctgagacaggactgaaagagacaaatagcttgaagctggaaggtataaagaaattgtgggggaaagaaggctatcttcccaagaaggaaagcaaaactggtgatgaaagtggagctctgcctgttcctcaagagagtataatggagaatgtagatcaagctataactaaaaaggatcaatctcaagttcttacccaatctaaagaggagaaagaaaagcagctgctggcatcatcattatttgttggtctaggatcagaaagtacaatcaacctgctgggaaaagcagatactgtctctcacaagttcagaaggaaatcaaaagtcaaagaagctaaaagtggcgaaacaaccagtactcataatatgacctgttcttcctttagttctttgtcaaatgtggcatatgaagatgattattattcgaatactttgcacgatacaggagacaaggaattaaagaaattttctctcacttcagaacttttggattctgagtcactcacagaactgcccttggttgagaaattctcatattgtagtctgtctacaccttcattgtttgctaataacaacatggaaatttttcaccctcctcaatctactgcagcctcagttgccaaggaaagctctttagcttcatcttttttggaagaaactactgaatacatacactcaaatgctatggaagtctgtaataatgaaactatatcagtgtcttcttataaaatttggaaagatgattgtttattgatggtctggtcagtcactaataagagtggtttggaattgaaaagtgctgacttagaaatttttcctgcagaaaatttcaaggtgactgagcaacctggatgctgtttgcctgtaatggaagcagaaagcaccaaaagctttcaatatagtgtgcagatagaaaaaccttttacagaaggaaatcttactggttttattagttatcatatgatggatactcattctgctcagctggaattttctgtaaacttatcactattagatttcattagaccattaaaaatctcaagtgacgactttgggaaactctggttatccttcgcaaatgatgtgaaacaaaatgtaaaaatgtcagaatctcaagctgcacttccttctgcactaaagactctgcaacagaaactaagactccatattattgagattataggcaatgaagggctattggcctgtcagctgctcccatccatcccctgcttactgcattgccgagttcatgcagatgtattagccctgtggttcagatcctcctgttctactcttcctgactatttactgtatcagtgtcaaaaggtgatggagggatcctagcagaagccctgctaaattttactccatcaagatcaatggtttacatagataaacttatttaccaaagtaaaaagaactcatggtacttctaatgaaaatggggattattacaagtgtggtttatatgttttctttgtgattcctggtcaagaaagatccccaaaactgtatccctaacctttaactcaggattgtacagtatgtttaggtccctcaaaaagtgacctaagctaatgttataaactgctaatgatttatatatcacttagtgtgtagagggactgaaaatatttattttgttataaataattttatagcacgtttactctagtgctagctaatttgtaataaagccaagtctcagttttctgcattaaatggaagggagacatgaaattgataatctcaaacttaattcatatttggctttggaatgtagtgtatggtttttggtagggaagtcaatattttcgattatgttttgcttagatcagtgttgaactaagttggcatagcacacactaacagttgtaggagatccatgagcatgctggatattgaggggatccaatctgtgatctattttttattatagataactgttacacataatttcagatcgtttggctgtaaaatttgtctgttttccacttggagttattttaaaattcaaagtaaatcactctattcttattttgaaaactcagagccattttatatagaaacaaaacccataagagcacacagtaacaaagcaaacagatacaaaaatgactttttagttatgacaaatattttagttggttactacttaggtccttttggcaaatgaaaatttgtgattagagtataaatggcaaaactatcttttcctggcctttgaatccactagtacttaatggatatagctgaagcagagactaagtataacatacaggttcttcagtaaaatatatcattttcatgttatagttatgcctgtgtggcctctgtcagaactattatcagtaaaagaggttaagcctatatatgaatgatggaccaaaaccttgaggttgtacattaactgaaatagtattttataaaatcttatggtgctgtggaaaatatttattatttcaccttttctgacacttcaccatggagactattcaggtaatacaattttaagtcattgcagttaatactctggttaattggtactgttaatcacccaggtcaggaattctgattttaggttatctcattaatcatggctgataaagaagctaaggggattctccagatctaatagatttcattagtcatttgtgtcgagtattcctccctaaaaacaaaagcagtattttctttctcaattaatttttaagttattcattaaaaaatatataacatcttaattttattcttttaaaaacatacagtgaagccttgctacaagagtcataagtgactggaatttcttgcataataggttcctccttttgaatagatcagattcatccccaggctctcagcagtgtcatgatgaaatgagtgtgctgacttcaggggtgtggtggacactggtagctagccttatcagctccctccttattcctacctctgtcagcagcatgcctcgccccttacctaattctgctgtgactctgacagagaggaagtgccttctcactttgcaaaggaatgcagcatgtcacaaaggaggtgctccaattttttgtgtccttacttccctatgtttgcctagttactgaggctaggtcgagtgtgaagcaataggtgtaagatgctgagagcacatggacagctaccagggagatctgttgcttggttacagggtgtattcatgagtggtagctgcagttgtcgtgagagacatgcttggcatacagagctgtctaatgggtgggagacatgtaatggtagatttagggctgggagcatgattttgggtctgcccaaaggaacatggtgtcacttttgttctttctgacccactaaataaaaagtagtgtaacagggtttcactggaatgtttattagaaagtttacactttttatatttttatgattttaaaaacaaacaataatagaaaaacagattttaaggaacttcagagcagtatatattctgtctaaactcactgaatattttaagttgtaaatcaggtgtccaccaacctttatttttgcattgcaggagatgtgactgtaaagtagggagtttttttttttgagacagagtttcacccttgttgcccaggctagagtgtaatggtgcaatctccgctcactgcaacctctgcctcccaggttcaagcgattctcctgcctcagcctccctagtagctgggattacaggcatgcaccaccacacccggctaatttttttatatttttagtagagacaaggtttctccatgttggtcaggctggtctcgaactcccgacctcaggtgatctgcccgcctcagcctcccaaagtgctgggattacaggcgtgagccactgcgcccggccaaattatttttgtgggtagattcattctctttacctaatagtcataatttagtcagtgaagggacaacatctggggtaagagctatggaggaggtgctcagctttgtgagttttgtgccaggcatctttgctgaaaatggagatggcagcaagtgtgaatctgggggaatataagggaagacagaaaagccttaagagtagacggaggaagaagggtaccagaatagtccctgtggaggcaggcagatcagagctcagggtttgaaagtgggcctgagtaagggtcctgctagagaaactgcagatggaagctgagcagttaccaactgctaatgtgccaagtataccaagcacagcatgtgtcctgtagaggagcattattttaaacaatgttctactatcatctaccaaaataattgtggtaaaagtgtagtattttattttttccttttatgtcagcaatattttaaaatattgatctgtttatcttatatttttatggataaatgtagtatttgcctcatgattgtgagccactgagagtgcactgaacctattcacatgtctttaagatgttttgctgtgttaaaattttaggagagaaaaatacaagtgaataattatttaataggcatttattactttattttggagttgaattctgtcatttgaaaaagttcagtaatgtaataaatacaaagtgatctgcactgtt

SEQ ID NO: 1504 - protein, 1137 aa, Homo sapiens
MSDIVEKTLTALPGLFLQNQPGGGPAAAKASFSSRLGSLVRGITALTSKHEEEKLIQQELSSLKATVSAPTTTLKMMKECMVRLIYCEMLGYDASFGYIHAIKLAQQGNLLEKRVGYLAVSLFLHESHELLLLLVNTVVKDLQSTNLVEVCMALTVVSQIFPCEMIPAVLPLIEDKLQHSKEIVRRKAVLALYKFHLIAPNQVQHIHIKFRKALCDRDVGVMAASLHIYLRMIKENSSGYKDLTGSFVTILKQVVGGKLPVEFNYHSVPAPWLQIQLLRILGLLGKDDQRTSELMYDVLDESLRRAELNHNVTYAILFECVHTVYSIYPKSELLEKAAKCIGKFVLSPKINLKYLGLKALTYVIQQDPTLALQHQMTIIECLDHPDPIIKRETLELLYRITNAQNITVIVQKMLEYLHQSKEEYVIVNLVGKIAELAEKYAPDNAWFIQTMNAVFSVGGDVMHPDIPNNFLRLLAEGFDDETEDQQLRLYAVQSYLTLLDMENVFYPQRFLQVMSWVLGEYSYLLDKETPEEVIAKLYKLLMNDSVSSETKAWLIAAVTKLTSQAHSSNTVERLIHEFTISLDTCMRQHAFELKHLHENVELMKSLLPVDRSCEDLVVDASLSFLDGFVAEGLSQGAAPYKPPHQRQEEKLSQEKVLNFEPYGLSFSSSGFTGRQSPAGISLGSDVSGNSAETGLKETNSLKLEGIKKLWGKEGYLPKKESKTGDESGALPVPQESIMENVDQAITKKDQSQVLTQSKEEKEKQLLASSLFVGLGSESTINLLGKADTVSHKFRRKSKVKEAKSGETTSTHNMTCSSFSSLSNVAYEDDYYSNTLHDTGDKELKKFSLTSELLDSESLTELPLVEKFSYCSLSTPSLFANNNMEIFHPPQSTAASVAKESSLASSFLEETTEYIHSNAMEVCNNETISVSSYKIWKDDCLLMVWSVTNKSGLELKSADLEIFPAENFKVTEQPGCCLPVMEAESTKSFQYSVQIEKPFTEGNLTGFISYHMMDTHSAQLEFSVNLSLLDFIRPLKISSDDFGKLWLSFANDVKQNVKMSESQAALPSALKTLQQKLRLHIIEIIGNEGLLACQLLPSIPCLLHCRVHADVLALWFRSSCSTLPDYLLYQCQKVMEGS

SEQ ID NO: 1505 - DNA, 2292 bp, Homo sapiens
acttgctagtcttacctcaagtaatgggaaacgaccagacctcctaaagagtcagtgtgcaagttagggctactgtcccaagaaggacacctgagtccaaatggggaaaccacggcaaaacccaagcacactggtttccacactctgtgaggcagagccaaaggggaaactgtgggtcaacggatatgcagggacccaaggcacaagggatgccacgttacaaacaagactcatccccttatcttttcatcttcagaggggaaagggacttgccgccccgctgtccgccctgagtgcgccgcggctgcccgagcgccccgcagacgggcgggtggccgtggacgcccagccagcagcccgcagcatggattcggattccggggagcagagcgagggcgagcccgtgaccgccgcaggtcctgatgtttttagttcaaagagtcttgcgcttcaagcccagaagaagattctgagcaaaatagccagcaaaactgtggccaacatgttgattgatgacaccagcagcgagatctttgatgagctctacaaagtcaccaaagagcacacacacaacaagaaggaagcccacaagatcatgaaagacttaatcaaggtggcgatcaaaatcgggatcctctaccggaacaaccagtttagccaagaggagctggttattgtggagaagttccggaagaagctgaaccagaccgccatgaccattgtcagcttctatgaggtggaatacaccttcgataggaacgtgctctccaatctcctgcatgagtgcaaggacctggtgcatgaactggtgcagcggcacctgacgcccaggacccacgggcgcatcaaccacgtctttaaccactttgccgatgtggagttcctctccaccctctatagtctggatggagactgtaggcccaacctcaagaggatttgtgaaggaatcaataagttgctagatgagaaagtcctttaaatgccttccctcctactggactttgctgctttaaagttacagcactcaaccatgatctgggtgagaatcaagaacataagcagaaacccttgtcaaagatgtccatgttctttcctgttcatccctctgatgctgattctgatgctgaactgagctcaggtgtgtttttcttccaagctttctagcaaggtttctacttaaaatcacctgtgtgcaagcccaaaggacatttcatctattctaagcagaaaggctgttttgttcattacagtgagtgctgttcatctcatggagtgggaggagcactaaaccaggagacagaggacatggatttggtttccagcttaaccagttaggactctgtcctctgcattctggaaccatgatgcctgcctgcctgcctcacagggctgttgtgaggaccagatgagatgatgtatgttcatacttttggaatctctaatttaaagtcttaatattttgtcttctgagtgtgaggggataaacctggatgtagactattaagcagcataggagaaaagaacaatagaatctaatggactgggtttgcaatctctctctaaatgcactgcttcagacaaagtgaaatccaaaggtgtgaaaaagtatagctgcaaattggaaaaatgtgtttcaagagtcgtctttttggccaggcatggtggctcacacctgtaatcccagcactttgggaggccgaggtgggcagattgcctgaggtccggagttcaagatcagcctggccaacatgatgaaaccctatctctactaaaattacaaaaattagccaggcgtggtggtacacgcctgtaatcccagctactcaggaggctgaggcaggagaattgtttgaacctgggagatggaggctgcagtgagctgagatcacgccactgtactccagcctgggcaacagagcaagactctgtctctaaaaaataataataataataataatttttttaaaaagaggtgtttttgaggtcttagatgttcaggttgatgatcctgcagagggaaactttccatgggggggtggggagagagagttttccatccacaatatagaaacagagaagcactgtgctccctctgcaggaccagccttcccttatctaaggggcatggagctcagggaggctttattccatatgcacgggagaatcaggcagaatgaacccctacccatcttttttggcttttcagtcattttgtgctgttttctctggttcattaataaattgaaactgccctccaaaaaaaaaaaaaaaaaaaaaaaaaaaaaaaaaaaa

SEQ ID NO: 1506 - protein, 292 aa, Homo sapiens
MGKPRQNPSTLVSTLCEAEPKGKLWVNGYAGTQGTRDATLQTRLIPLSFHLQRGKGLAAPLSALSAPRLPERPADGRVAVDAQPAARSMDSDSGEQSEGEPVTAAGPDVFSSKSLALQAQKKILSKIASKTVANMLIDDTSSEIFDELYKVTKEHTHNKKEAHKIMKDLIKVAIKIGILYRNNQFSQEELVIVEKFRKKLNQTAMTIVSFYEVEYTFDRNVLSNLLHECKDLVHELVQRHLTPRTHGRINHVFNHFADVEFLSTLYSLDGDCRPNLKRICEGINKLLDEKVL

SEQ ID NO: 1507 - DNA, 3007 bp, Homo sapiens
ggagtttctggagggctgaacacgtggaggcaaacaggaaggtgaagaagaacttatcctatcaggacggaaggtcctgtgctcgggatcttccagacgtcgcgactctaaattgccccctctgaggtcaaggaacacaagatggttttggaaatgctgaacccgatacattataacatcaccagcatcgtgcctgaagccatgcctgctgccaccatgccagtcctgctcctcactggcctttttctcttggtgtggaattatgagggcacatcctcaataccaggtcctggctactgcatgggaattggacccctcatctcccacggcagattcctgtggatggggatcggcagtgcctgcaactactacaaccgggtatatggagaattcatgcgagtctggatctctggagaggaaacactcattatcagcaagtcctcaagtatgttccacataatgaagcacaatcattacagctctcgattcggcagcaaacttgggctgcagtgcatcggtatgcatgagaaaggcatcatatttaacaacaatccagagctctggaaaacaactcgacccttctttatgaaagctctgtcaggccccggccttgttcgtatggtcacagtctgtgctgaatccctcaaaacacatctggacaggttggaggaggtgaccaatgaatcgggctatgtggacgtgttgacccttctgcgtcgtgtcatgctggacacctctaacacgctcttcttgaggatccctttggacgaaagtgctatcgtggttaaaatccaaggttattttgatgcatggcaagctctcctcatcaaaccagacatcttctttaagatttcttggctatacaaaaagtatgagaagtctgtcaaggatttgaaagatgccatagaagttctgatagcagaaaaaagacgcaggatttccacagaagagaaactggaagaatgtatggactttgccactgagttgattttagcagagaaacgtggtgacctgacaagagagaatgtgaaccagtgcatattggaaatgctgatcgcagctcctgacaccatgtctgtctctttgttcttcatgctatttctcattgcaaagcaccctaatgttgaagaggcaataataaaggaaatccagactgttattggtgagagagacataaagattgatgatatacaaaaattaaaagtgatggaaaacttcatttatgagagcatgcggtaccagcctgtcgtggacttggtcatgcgcaaagccttagaagatgatgtaatcgatggctacccagtgaaaaaggggacaaacattatcctgaatattggaaggatgcacagactcgagtttttccccaaacccaatgaatttactcttgaaaattttgcaaagaatgttccttataggtactttcagccatttggctttgggccccgtggctgtgcaggaaagtacatcgccatggtgatgatgaaagccatcctcgttacacttctgagacgattccacgtgaagacattgcaaggacagtgtgttgagagcatacagaagatacacgacttgtccttgcacccagatgagactaaaaacatgctggaaatgatctttaccccaagaaactcagacaggtgtctggaacactagagaaggctggtcagtacctactctggagcatttctcatcagtagttcacatacaaatcatccatccttgccaatagtgtcatcctcacagtgaacactcagtggcccatggcattttataggcatacctcctatgggttgtcaccaagctaggtgctattggtcatctgctcctgttcacaccagagaaccaggctacaagagaaaaagcagaggccaagagtttgagggagaaatagtcggtgaagaaaccgtatccataaagacccgattccaccaaatgtgctttgagaaggataggccttcattaacaaaatgtatgtctggttccccagtagagctctactgcctcaacccaaggggatttttatgtctggggcagaaacactcaagttgattagaaagaccaggccaatgtcagggtacctggggccaaacccacctgctagtgtgaattaaagtactttaattttgttttctgtggaggtggaaaagcaacattcatagtctttggagaaatgcttagaaattcagcatttgacccttgctgtgaattaagcccaattaattcctgtttgtctacatatgatctgtctgtggcaaaagtttaatcagaggaaattctttcccagtctgtcgatttatgcctcagccacttgcctgtgctacaattcattgtgttacctgtagattcaggtaatacaaactatatataatcatcaagtaatacaaactaatttagtaatagcctgggttaagtattattagggccctgtgtctgctgtagaaaaaaaaattcacatgatgcacttcaaattcaaataaaaatccttttggcatgttcccatttttgcttagctcaattagtgtggctaaccaagagataactgtaaatgtgacattgatttgctcttactacagcttcagtgattgggggaggaaaagtcccaacccaatgggctcaaacttctaaggggtactcctctcatccccttatccttctccctcgacattttctccctctttcttcccatgaccccaaagccaagggcaacagatcagtaaagaacgtggtcagagtagaacccctgaagtattttttaatcctacctcaaaatttaacagttacctgagagatttaacattatctagttcattgaatcattgtatgtggtcatggataaattgcacaccttggaattcgctttctaaaggaaatcaaatgaatggaggaactttccaaacaccactttacttgtgttatatagccaatataactatctctactgaatgtcattgaaaaactaaaaaattaaacttatttacaaataggtaaaaaaaaaaaaaaaaaaaaa

SEQ ID NO: 1508 - protein, 503 aa, Homo sapiens
MVLEMLNPIHYNITSIVPEAMPAATMPVLLLTGLFLLVWNYEGTSSIPGPGYCMGIGPLISHGRFLWMGIGSACNYYNRVYGEFMRVWISGEETLIISKSSSMFHIMKHNHYSSRFGSKLGLQCIGMHEKGIIFNNNPELWKTTRPFFMKALSGPGLVRMVTVCAESLKTHLDRLEEVTNESGYVDVLTLLRRVMLDTSNTLFLRIPLDESAIVVKIQGYFDAWQALLIKPDIFFKISWLYKKYEKSVKDLKDAIEVLIAEKRRRISTEEKLEECMDFATELILAEKRGDLTRENVNQCILEMLIAAPDTMSVSLFFMLFLIAKHPNVEEAIIKEIQTVIGERDIKIDDIQKLKVMENFIYESMRYQPVVDLVMRKALEDDVIDGYPVKKGTNIILNIGRMHRLEFFPKPNEFTLENFAKNVPYRYFQPFGFGPRGCAGKYIAMVMMKAILVTLLRRFHVKTLQGQCVESIQKIHDLSLHPDETKNMLEMIFTPRNSDRCLEH

SEQ ID NO: 1509 - DNA, 3116 bp, Homo sapiens
ggagtttctggagggctgaacacgtggaggcaaacaggaaggtgaagaagaacttatcctatcaggacggaaggtcctgtgctcgggatcttccagacgtcgcgcggtgtcagaaaccctgtggtgaaattcagcctgtggattccagaaatttggagtgttcttggggggaaaaatccgcacacacaaagcaacatttggaaatccctgtggactctaaattgccccctctgaggtcaaggaacacaagatggttttggaaatgctgaacccgatacattataacatcaccagcatcgtgcctgaagccatgcctgctgccaccatgccagtcctgctcctcactggcctttttctcttggtgtggaattatgagggcacatcctcaataccaggtcctggctactgcatgggaattggacccctcatctcccacggcagattcctgtggatggggatcggcagtgcctgcaactactacaaccgggtatatggagaattcatgcgagtctggatctctggagaggaaacactcattatcagcaagtcctcaagtatgttccacataatgaagcacaatcattacagctctcgattcggcagcaaacttgggctgcagtgcatcggtatgcatgagaaaggcatcatatttaacaacaatccagagctctggaaaacaactcgacccttctttatgaaagctctgtcaggccccggccttgttcgtatggtcacagtctgtgctgaatccctcaaaacacatctggacaggttggaggaggtgaccaatgaatcgggctatgtggacgtgttgacccttctgcgtcgtgtcatgctggacacctctaacacgctcttcttgaggatccctttggacgaaagtgctatcgtggttaaaatccaaggttattttgatgcatggcaagctctcctcatcaaaccagacatcttctttaagatttcttggctatacaaaaagtatgagaagtctgtcaaggatttgaaagatgccatagaagttctgatagcagaaaaaagacgcaggatttccacagaagagaaactggaagaatgtatggactttgccactgagttgattttagcagagaaacgtggtgacctgacaagagagaatgtgaaccagtgcatattggaaatgctgatcgcagctcctgacaccatgtctgtctctttgttcttcatgctatttctcattgcaaagcaccctaatgttgaagaggcaataataaaggaaatccagactgttattggtgagagagacataaagattgatgatatacaaaaattaaaagtgatggaaaacttcatttatgagagcatgcggtaccagcctgtcgtggacttggtcatgcgcaaagccttagaagatgatgtaatcgatggctacccagtgaaaaaggggacaaacattatcctgaatattggaaggatgcacagactcgagtttttccccaaacccaatgaatttactcttgaaaattttgcaaagaatgttccttataggtactttcagccatttggctttgggccccgtggctgtgcaggaaagtacatcgccatggtgatgatgaaagccatcctcgttacacttctgagacgattccacgtgaagacattgcaaggacagtgtgttgagagcatacagaagatacacgacttgtccttgcacccagatgagactaaaaacatgctggaaatgatctttaccccaagaaactcagacaggtgtctggaacactagagaaggctggtcagtacctactctggagcatttctcatcagtagttcacatacaaatcatccatccttgccaatagtgtcatcctcacagtgaacactcagtggcccatggcattttataggcatacctcctatgggttgtcaccaagctaggtgctattggtcatctgctcctgttcacaccagagaaccaggctacaagagaaaaagcagaggccaagagtttgagggagaaatagtcggtgaagaaaccgtatccataaagacccgattccaccaaatgtgctttgagaaggataggccttcattaacaaaatgtatgtctggttccccagtagagctctactgcctcaacccaaggggatttttatgtctggggcagaaacactcaagttgattagaaagaccaggccaatgtcagggtacctggggccaaacccacctgctagtgtgaattaaagtactttaattttgttttctgtggaggtggaaaagcaacattcatagtctttggagaaatgcttagaaattcagcatttgacccttgctgtgaattaagcccaattaattcctgtttgtctacatatgatctgtctgtggcaaaagtttaatcagaggaaattctttcccagtctgtcgatttatgcctcagccacttgcctgtgctacaattcattgtgttacctgtagattcaggtaatacaaactatatataatcatcaagtaatacaaactaatttagtaatagcctgggttaagtattattagggccctgtgtctgctgtagaaaaaaaaattcacatgatgcacttcaaattcaaataaaaatccttttggcatgttcccatttttgcttagctcaattagtgtggctaaccaagagataactgtaaatgtgacattgatttgctcttactacagcttcagtgattgggggaggaaaagtcccaacccaatgggctcaaacttctaaggggtactcctctcatccccttatccttctccctcgacattttctccctctttcttcccatgaccccaaagccaagggcaacagatcagtaaagaacgtggtcagagtagaacccctgaagtattttttaatcctacctcaaaatttaacagttacctgagagatttaacattatctagttcattgaatcattgtatgtggtcatggataaattgcacaccttggaattcgctttctaaaggaaatcaaatgaatggaggaactttccaaacaccactttacttgtgttatatagccaatataactatctctactgaatgtcattgaaaaactaaaaaattaaacttatttacaaataggtaaaaaaaaaaaaaaaaaaaaa

SEQ ID NO: 1510 - protein, 503 aa, Homo sapiens; identical to SEQ ID NO: 1508

SEQ ID NO: 1511 - DNA, 5084 bp, Homo sapiens
ctctgggctgctcgggcgccaccactactgtccccatcccgccccgccagctgggccaaagggtgacttgactcacgacgctgccaccagcccacggcttgcccgaggcgtataaaggctgccagggccgcaggctgccaagccctgccctgcccaaggcgcatagagcatggcccgaggcgctgagggaggccgtggggacgcgggttggggcctgcgtggcgccctggcggccgtggcgctgctctcggcgctcaacgctgcgggcacggtgttcgcgctgtgccagtggcgcgggctgagctcggcgctgcgggctttggaggcgcagcggggccgggagcagcgcgaggacagtgccctgcgctccttcctggccgagttgagccgcgcgccgcgcggggcgtccgcaccaccccaagacccggccagctcagctcgcaacaagcgcagccacagcggcgagcccgcgccgcatatccgcgccgagagccatgacatgctgatgatgatgacctactccatggtgccgatccgagtgatggtggacctgtgcaacagcaccaagggcatctgcctcacaggaccttctggaccaccaggacctccgggagccggcgggttgccaggacacaacggattggatggacagcctggtcctcagggcccaaaaggagaaaaaggagcaaatggaaaaagaggaaaaatggggatacctggagctgcaggaaatccaggggaaaggggagaaaagggagaccatggtgaactgggcctgcagggaaatgagggcccaccagggcagaagggagaaaagggtgacaaaggagatgtgtccaacgacgtgctcctggcaggtgccaaaggtgaccaaggcccacccggtccacctgggcccccaggccctccaggtcctccagggccccctggaagcagaagagccaaaggccctcggcagccaagcatgttcaacggccagtgcccaggtgagacttgtgccataccaaatgatgataccttggttggaaaagctgatgagaaagccagtgaacaccattccccacaagcagaatccatgatcacttccattggaaacccagtgcaagtactgaaagtgacagagacatttgggacttggataagagagtctgctaacaagagtgatgaccggatttgggtgacagagcatttttcaggcatcatggttaaggaattcaaggatcagccctcacttctgaatggcagttacacgttcatccaccttccatactatttccatggctgtgggcacgttgtttacaacaactctctctactaccacaaagggggttctaataccctagtgagatttgaatttggccaggaaacatcccaaactctgaagcttgaaaatgccttgtattttgatcgaaaatacctttttgcaaattccaaaacttacttcaatctagctgtagatgaaaagggcctttggattatctatgcgtcaagtgtggacggctcgagcattcttgtagcacaactggatgagaggacattctcagtggtgcaacacgtcaataccacgtaccctaaatccaaggctggcaacgccttcattgcccgaggaatcctctatgtcacagacaccaaagatatgagggtcacatttgcctttgatttgttaggagggaaacagatcaatgcaaactttgatttaagaacttcccagtctgttcttgccatgttagcatacaacatgagagatcagcatttatattcatgggaagatggccatttaatgctttatcctgtgcagtttttgtcaactaccttaaatcagtgatgtgctgcattcggctcccttcagcaaatttcaggggttttctgggaccagttctcccccaacaggaaacttgtttttttaacgtcagccagatatttagaaaataacctcaaaagtgtttatatggtcagtgagccccgcttagtgaaatagcaacagattggaagttgaaatggctgagatttggtgatctccccacagctggctctgcaagttacctctttctccttgggccttagtttccccattggtaatctgaattggctaagatgattggggagattttctgtacctgtaggtaatttggtgattcttggtggctgctcttctcacaacttttatgtatctgcttctgtcgtttagcttttttagccacatgctgaccaaatttacctttgagttgataagtccagtggcttgagtagtgaatccctcagtgctgacttatatcttgttctttgaaaaaatgcattgactctttaagacatctaaagtatcacattatccataatttattgcttttctttgcatctgcacctgccaccacagaataaccattaccctcagctgctgattgggcagctctgagattagcaaaagccagggacagctacatgttcaggtttttttttttttttttttttcaataagctattttttttcttttcttattttaaatagagagagagtcttgctatgtttcccaggctggtcttgaactcctggggctcaagtgatcctcctgccttggcctcccaaaatgctggattacaggcatgtgtgcctggcccaggtttcttaataaaacagaatcatgatcttccaggttccccccagtttctgatcatgttgatttgtagctgtggatcatgaacactgaatcctcagatcactctgacttcttatgcttctcctgtggatccactatcaaagtactaaatgctgtgtaagtagacgttaatctggctggaaccatgggaagcactttgcagtgttcagaagagaggctccatttgtggctattatgtagaactgggccagagccagtccattgcctgtttttttaaataaggttttactgagcacagccacactcatttgtttatgcagtacggcctgacattgcttttgctctgcaacagcagagtcgagtcattgcaacaaagagcatatggccccacagtgcctaaaatattgaccagctacccctttatggaaaaagattgctgactcctgataaagaatataaagtgagcctgattcttgaaaaaatcagaaccagagcctgttttgttttgttctaaactaagaagccgcataggatgtgacttgcgttttgagtagaggggaaggctgataacggcgtaagatgaagtggccctccacaaaggctggttaggggacagttctttctctaacatagttttaaaggatgtgatctggtccccttggatgccaggagagaatccagttgaacttgctcctaaatgctcttaaatatgcatattttctgccaactcacttctttaaacatctttcagcccagcgctgcggccccgggaagggccactgcgaatagagaggaagctggaaaagttcctggggctctgcagccaggaaggggaaccagggcaaatcttatgtaaagatttttcagcaacttgtcccaatttgtgtgtattctgaaactttctctttgggaccaaattcattctcaatggccctgagttcaatatattattaacagcagtattttaaaacttagggttgaactgggcatggtggcacataactgcaatcccagctactttggaggcagggatgggaggatcacttgaggccaggatctcaggaccagcctagagagatcccatctctaaaaaataaaatataagaaaataaaacttaggggatatacagatttaaatattcaaatctccctgctcccctgaaagtccccaggcagctgtcaatgacttgtttgttgtgttctcaatatgatggctatttgaaacttcacctacttttcattagattggttgtaccatgtcaccttagcttttaaaaatactcttttcagattcacgttctctaacaaagagtctcatgttcaagatcaatatgtctaataagtgctggtgtccttttaaagtatttaaatatatatgttgctgttgctgaatacaggagaccaggttaggaatatagtttcataataatagtacatacaatactaattgtatataaggtagcaaccaaaagaggttgttaattagcacatattccttttagaaaaatgtttcagaaacctcagtcttgatatctgagctatctgggctcccttacttgtgagtaagggatcatgctcaccactggagaagcttacaccgggactttttttcttttttcttttttttttgctatgacagagtaatgctaacgtaaggacaactgagtttgatcagtgtttaatcgcagtgggtaatcttatctgattgtctttaaaagtgaaaaggattaagattttattctttcttgtaaacattacttgattttttaaagaagttttgggctcactgctaaaatagagtatacaactgaatgtttttaagtcaagatactgttttaggagtttaccctctcatttataaccaaagttgctctaaaacactttccaaatatctgcacttctgatgtcagaatcaaaccagataattctctaattcttctttaatctaaagtagatagcttcccactggaaagtaaacaaaaccatccctcccaacctcaaagctaggccacactctatttcaaggcattttctttcagctgataaggtgtcctcctgaagccaagtaggtggttctggtctccaagtatcgttaagcacaggtgctatgacagaaaaagttctggggtggaagttttaagatgaggagttctgatcttaggcatcttaacagtcacaaggtgaaaagtcaaatgaaacagtacaattcttgatgagtgaggtgtcatcttccaaccacacagaggacgttttggctatgatcatctgatggcaagtgaaggagaaatgagtgatagggctttgcgttttcatccagatgctgtggccctgtgtttcacagcattaagagccataatttccaacctgcacagatcctgaacaacaaatgaataacgatgaatgtctttttggttgtaatttaacaagtcaaataaaataatcattgctgagcacaatcacatgttgaaa

SEQ ID NO: 1512 - protein, 551 aa, Homo sapiens
MARGAEGGRGDAGWGLRGALAAVALLSALNAAGTVFALCQWRGLSSALRALEAQRGREQREDSALRSFLAELSRAPRGASAPPQDPASSARNKRSHSGEPAPHIRAESHDMLMMMTYSMVPIRVMVDLCNSTKGICLTGPSGPPGPPGAGGLPGHNGLDGQPGPQGPKGEKGANGKRGKMGIPGAAGNPGERGEKGDHGELGLQGNEGPPGQKGEKGDKGDVSNDVLLAGAKGDQGPPGPPGPPGPPGPPGPPGSRRAKGPRQPSMFNGQCPGETCAIPNDDTLVGKADEKASEHHSPQAESMITSIGNPVQVLKVTETFGTWIRESANKSDDRIWVTEHFSGIMVKEFKDQPSLLNGSYTFIHLPYYFHGCGHVVYNNSLYYHKGGSNTLVRFEFGQETSQTLKLENALYFDRKYLFANSKTYFNLAVDEKGLWIIYASSVDGSSILVAQLDERTFSVVQHVNTTYPKSKAGNAFIARGILYVTDTKDMRVTFAFDLLGGKQINANFDLRTSQSVLAMLAYNMRDQHLYSWEDGHLMLYPVQFLSTTLNQ

SEQ ID NO: 1513 - DNA, 1247 bp, Homo sapiens
atgccacagaacaaatatattgaattacactgtaaacaccatggatactgtttggattaccatgagaaaaagagaaagaaagaaagtcgagaggctcatgaatgttcaaagaaggcaaagaaaatgattggtctcaaggctaagccttaccataaacagggccatgctgagaaaatacaaataaaaaagactatcaagatgcatgaaaagagaaacaccaaaaaaaaaaaaaaatgctgaaaagactccacagggagcagtacctgcctatctgctggacagagagggacaatctcgagctaaagtactttccagtatgatcaaacagaaacgaaaagagaaggcgggaaaatgggaagtccctctgcctaaagtatgtgcccagggagaaacagaagtattaaaagttattcgaacaaggaagagaaagaagaaggcatggaagagggtggttactaatgtctgctttgttcaagatggctttacaagaataccacctaagtatgaaagattcatcaggccaatgggcttgcgtttcaagaaagcccatgtaacatatcctgaactgaaagtcaccttttgcctaccaatatttggtgtaaagaagaacccgtcgtccccactgtatacaactttgggtgttattaccaaaggtactgccatggaggtaaatgtgagcaaattgggccttgtgatgcaaggcggcagttatttggggaaaatatgcccaggttaccaacaatcctgaaaatgatggatgcataaatgcagtcttactgatggctccaaagatgtcctcacctaacataactcatatctgcaagtgttcagtaaggaaccagaaagccagttatccaaaggcaatgctgtcaaaccacttcaaatgttgctttctggtctcgggcttgatagtcgctagttcgggtcttgctaccaggagcgagctgggtccgcagcgttcttcggtggctggcgcgggaggaggactacaggatccagagatctttggaaactccagcagctccaagcttgttggctactacgattgcccggcccgagccgagactcagccagaggagtacggattaagtggccgaagaaagaggagtgaggcaggggagcgaggcggacgctccgagcgcatcggactcacctgggccggcggcgaccggcgagtacgagtggactcttgccctccgcagcatgcgccccgcctgctaagtcgccgccgtctcgccctcacctag

SEQ ID NO: 1514 - DNA, 4022 bp, Homo sapiens
atgcagaaggggatccggctgaatgatggccacgtcgcgtccctgggactgctggcgcgcaaggacggcacgcgcaaaggctacctgagcaagcggagttcggacaacacaaaatggcaaaccaagtggttcgcgctgctgcagaacctgctcttctacttcgagagcgactcgagctcgcggccctcggggctttacctgctggagggctgcgtctgcgaccgcgcgccctcccccaagccggcgctgtcggccaaggagccgctggagaaacagcattacttcacggtgaacttcagccatgagaaccagaaagccttggagctgaggacagaggacgcaaaagattgtgacgaatgggtggcagccattgcacatgccagctacaggaccctcgccacagagcatgaggcattaatgcagaaatacctgcacctgctgcagatcgtggagacagagaagaccgtggccaagcagcttcggcagcagatcgaggatggggagatcgagatcgagcggctgaaggcagagatcacatccctgctcaaggacaatgagcgcatccagtccacccagactgtcgcccccaacgatgaagacagcgacatcaagaaaattaagaaggtgcagagcttcctgcggggctggctgtgccggcggaagtggaagaccatcatccaggactacatccggtcaccccatgctgacagcatgcgcaagaggaaccaggtggtgttcagcatgctggaggctgaggctgagtacgtgcagcagctgcacatccttgtcaacaatttcctgcgcccgctgcggatggccgccagctccaagaagcctcccatcacacacgacgacgtcagcagcatcttcctgaacagcgaaaccatcatgtttttacatcagatcttttaccaaggcctgaaggcccgcatctccagctggcccacgctggtcctggctgacctatttgacatcctgctgcccatgctcaacatctaccaagagttcgtccgcaaccaccagtacagcctgcagatcctggcccactgcaagcagaaccgtgacttcgacaagctgctgaagcactacgaggccaagcctgactgcgaggagaggacgctggagaccttcctcacctaccccatgttccagatccccaggtacatcctgaccctccatgagctcctggcccacacgcctcatgagcacgttgagcgcaacagcctggactacgccaagtccaaactggaggagctgtccagaataatgcacgatgaagtaagtgagacggagaacatccggaaaaacctggccatcgagcgcatgatcatcgaaggctgtgagatcctcctggacaccagccagacctttgtgagacaaggttccctcattcaggtgcccatgtctgaaaagggcaagatcaccagggggcgcctggggtctctctccctaaagaaagagggcgagcgacagtgcttcctgttttctaagcatctgattatctgtaccagaggctctggagggaagcttcacttgaccaagaatggagtcatatccctcattgactgcactttattggaggagccagaaagcacggaggaggaagccaaaggatccggccaagacatagatcacttggattttaaaatcggggtggagccaaaggattccccgccctttacagtcatcctagtggcctcgtccagacaggagaaggcagcgtggaccagtgacatcagccagtgtgtggataacatccgatgcaatgggctcatgatgaacgcatttgaagaaaattccaaggtcactgtgccgcagatgatcaagaggaccagggaggggaccagggaagcagaaatgagcaggtccgacgcctccttatattgtgatgatgttgacattcgcttcagcaaaaccatgaactcctgcaaagtgctgcagatccgctacgccagtgtggagcggctgctggagaggctgacggacctgcgcttcctgagcatcgacttcctcaacaccttcctgcactcctaccgcgtcttcaccaccgccatcgtggtcctggacaagctcattaccatctacaagaagcctatcagtgccattcctgccaggtggctgaggtcgctggagctcctgtttgccagtggccagaacaataagctcctgtacggtgaaccccccaagtccccgcgcgccacccgcaagttctcctcgccgccacctctgtccatcaccaagacatcgtcaccgagccgccggcggaagctctccctgaacatccccatcatcactggcggcaaggccctggacctggccgccctcagctgcaactccaatggctacaccagcatgtactcggccatgtcacccttcagcaaggccacgctggacaccagcaagctctatgtgtccagcagcttcaccaacaagattccagatgagggcgatacgacccctgagaagcccgaagacccttcagcgctcagcaagcagagctcagaagtctccatgagagaggagtcagatattgatcaaaaccagagtgatgatggtgatactgaaacatcaccaactaaatctccaacaacacccaaatcagtcaaaaacaaaaattcttcagagttcccactcttttcctataacaatggagtcgtcatgacctcctgtcgtgaactggacaataaccgcagtgccttgtcggccgcctctgcctttgccatagcaaccgccggggccaacgagggcaccccaaacaaggagaagtaccggaggatgtccttagccagtgcagggtttcccccagaccagaggaatggagacaaggagtttgtgatccgcagagcagccaccaatcgtgtcttgaacgtgctccgccactgggtgtccaagcactctcaggactttgagaccaacgatgagctcaaatgcaaggtgatcggcttcctggaagaagtcatgcacgacccggagctcctgacccaggagcggaaggctgcagccaacatcatcaggactctgacccaggaggacccaggtgacaaccagatcacgctggaggagatcacgcagatggctgaaggcgtgaaggctgagccctttgaaaaccactcagccctggagatcgcggagcagctgaccctgctagatcacctcgtcttcaagaagattccttatgaggagttcttcggacaaggatggatgaaactggaaaagaatgaaaggaccccttatatcatgaaaaccactaagcacttcaatgacatcagtaacttgattgcttcagaaatcatccgcaatgaggacatcaacgccagggtgagcgccatcgagaagtgggtggccgtagctgacatatgccgctgcctccacaactacaatgccgtactggagatcacctcgtccatgaaccgcagtgcaatcttccggctcaaaaagacgtggctcaaagtctctaagcagactaaagctttgattgataagctccaaaagcttgtgtcatctgagggcagatttaagaatctcagagaagctctgaaaaattgtgacccaccctgtgtcccttacctggggatgtacctcaccgacctggccttcatcgaggaggggacgcccaattacacggaagacggcctggtcaacttctccaagatgaggatgatatcccatattatccgagagattcgccagtttcaacaaactgcctacaaaatagagcaccaagcaaaggtaacgcaatatttactggaccaatcttttgtaatggatgaagaaagcctctacgagtcttctctccgaatagaaccaaaactccccacctgaagctgagcccagcccagacccagctgctcccggggacatgtgctagatgatactgtacatattcgtttggtttcactggattttcttcttcagtatgtgcttctccaagaatacaaatcgtccttgttcttagattcctgtagaaccggaatatgaatttctgcaccgtttcagacttcgcccacccatccctcccctcg

SEQ ID NO: 1515 - protein, 1273 aa, Homo sapiens
MQKGIRLNDGHVASLGLLARKDGTRKGYLSKRSSDNTKWQTKWFALLQNLLFYFESDSSSRPSGLYLLEGCVCDRAPSPKPALSAKEPLEKQHYFTVNFSHENQKALELRTEDAKDCDEWVAAIAHASYRTLATEHEALMQKYLHLLQIVETEKTVAKQLRQQIEDGEIEIERLKAEITSLLKDNERIQSTQTVAPNDEDSDIKKIKKVQSFLRGWLCRRKWKTIIQDYIRSPHADSMRKRNQVVFSMLEAEAEYVQQLHILVNNFLRPLRMAASSKKPPITHDDVSSIFLNSETIMFLHQIFYQGLKARISSWPTLVLADLFDILLPMLNIYQEFVRNHQYSLQILAHCKQNRDFDKLLKHYEAKPDCEERTLETFLTYPMFQIPRYILTLHELLAHTPHEHVERNSLDYAKSKLEELSRIMHDEVSETENIRKNLAIERMIIEGCEILLDTSQTFVRQGSLIQVPMSEKGKITRGRLGSLSLKKEGERQCFLFSKHLIICTRGSGGKLHLTKNGVISLIDCTLLEEPESTEEEAKGSGQDIDHLDFKIGVEPKDSPPFTVILVASSRQEKAAWTSDISQCVDNIRCNGLMMNAFEENSKVTVPQMIKRTREGTREAEMSRSDASLYCDDVDIRFSKTMNSCKVLQIRYASVERLLERLTDLRFLSIDFLNTFLHSYRVFTTAIVVLDKLITIYKKPISAIPARWLRSLELLFASGQNNKLLYGEPPKSPRATRKFSSPPPLSITKTSSPSRRRKLSLNIPIITGGKALDLAALSCNSNGYTSMYSAMSPFSKATLDTSKLYVSSSFTNKIPDEGDTTPEKPEDPSALSKQSSEVSMREESDIDQNQSDDGDTETSPTKSPTTPKSVKNKNSSEFPLFSYNNGVVMTSCRELDNNRSALSAASAFAIATAGANEGTPNKEKYRRMSLASAGFPPDQRNGDKEFVIRRAATNRVLNVLRHWVSKHSQDFETNDELKCKVIGFLEEVMHDPELLTQERKAAANIIRTLTQEDPGDNQITLEEITQMAEGVKAEPFENHSALEIAEQLTLLDHLVFKKIPYEEFFGQGWMKLEKNERTPYIMKTTKHFNDISNLIASEIIRNEDINARVSAIEKWVAVADICRCLHNYNAVLEITSSMNRSAIFRLKKTWLKVSKQTKALIDKLQKLVSSEGRFKNLREALKNCDPPCVPYLGMYLTDLAFIEEGTPNYTEDGLVNFSKMRMISHIIREIRQFQQTAYKIEHQAKVTQYLLDQSFVMDEESLYESSLRIEPKLPT

SEQ ID NO: 1516 - DNA, 2843 bp, Homo sapiens
cctttttggcctacttggggtgagtcaacataaggagtgcaggccaccttagcctttgcttctcaaaagtcatggggcaatgaaggacttggccaaggctgtccagcagtaggccaagttcagggattggctcaggcccctaatggacttcactgcatccaggaatggtaggtgattatcttttccgagaggccacctacccagatcccagttgtggacagcccatcccagccctcagaggctcagaggctctctgagtgccctgccccaaaacaccctaggcaagacattatgccagagcctcagctctagggctgcctggagcagagctcctgaatcacactggctccccagggctccccaggaacctcaccattcctcccccaatccacacctctgctgccagagcaacgcaacgacccagaatacacccgttccctcttctgttccctcctcctgcccccacctcaggcctcactggggcagggtacatcttgcctctctgccctgaacttctgaaacctcaatgatcagattcccagggctctgagaaaacagaagcaaacatcccatccaggatggatttaccccctaaaagtcactgagatcattcccaggggcccagcagacagtgtccttcctttcccagcagcagtgccctgcagaacaaagaggctggttcagagccagctctcagccctatggccttggctgagtcccttaacctttctgagactcagtttcctacctgtgacattcctgcagttatcctgtaggaataagagtgcctacgtcctggggcaacagtgagggttaaaagatcaatcctatcctgtgtgcaacgtggagcagacagcctcgatgagacaagctatggtttgcaatgttctggatgtataacctgtttccagcctggcctgaggtggaaccctgtcatgaggatggtcgctggagctcctgtttgccagtggccagaacaataagctcctgtacggtgaaccccccaagtccccgcgcgccacccgcaagttctcctcgccgccacctctgtccatcaccaagacatcgtcaccgagccgccggcggaagctctccctgaacatccccatcatcactggcggcaaggccctggacctggccgccctcagctgcaactccaatggctacaccagcatgtactcggccatgtcacccttcagcaaggccacgctggacaccagcaagctctatgtgtccagcagcttcaccaacaagattccagatgagggcgatacgacccctgagaagcccgaagacccttcagcgctcagcaagcagagctcagaagtctccatgagagaggagtcagatattgatcaaaaccagagtgatgatggtgatactgaaacatcaccaactaaatctccaacaacacccaaatcagtcaaaaacaaaaattcttcagagttcccactcttttcctataacaatggagtcgtcatgacctcctgtcgtgaactggacaataaccgcagtgccttgtcggccgcctctgcctttgccatagcaaccgccggggccaacgagggcaccccaaacaaggagaagtaccggaggatgtccttagccagtgcagggtttcccccagaccagaggaatggagacaaggagtttgtgatccgcagagcagccaccaatcgtgtcttgaacgtgctccgccactgggtgtccaagcactctcaggactttgagaccaacgatgagctcaaatgcaaggtgatcggcttcctggaagaagtcatgcacgacccggagctcctgacccaggagcggaaggctgcagccaacatcatcaggactctgacccaggaggacccaggtgacaaccagatcacgctggaggagatcacgcagatggctgaaggcgtgaaggctgagccctttgaaaaccactcagccctggagatcgcggagcagctgaccctgctagatcacctcgtcttcaagaagattccttatgaggagttcttcggacaaggatggatgaaactggaaaagaatgaaaggaccccttatatcatgaaaaccactaagcacttcaatgacatcagtaacttgattgcttcagaaatcatccgcaatgaggacatcaacgccagggtgagcgccatcgagaagtgggtggccgtagctgacatatgccgctgcctccacaactacaatgccgtactggagatcacctcgtccatgaaccgcagtgcaatcttccggctcaaaaagacgtggctcaaagtctctaagcagactaaagctttgattgataagctccaaaagcttgtgtcatctgagggcagatttaagaatctcagagaagctctgaaaaattgtgacccaccctgtgtcccttacctggggatgtacctcaccgacctggccttcatcgaggaggggacgcccaattacacggaagacggcctggtcaacttctccaagatgaggatgatatcccatattatccgagagattcgccagtttcaacaaactgcctacaaaatagagcaccaagcaaaggtaacgcaatatttactggaccaatcttttgtaatggatgaagaaagcctctacgagtcttctctccgaatagaaccaaaactccccacctgaagctgagcccagcccagacccagctgctcccggggacatgtgctagatgatactgtacatattcgtttggtttcactggattttcttcttcagtatgtgcttctccaagaatacaaatcgtccttgttcttagattcctgtagaaccggaatatgaatttctgcaccgtttcagacttcgcccacccatccctcccctcg

SEQ ID NO: 1517 - protein, 489 aa, Homo sapiens
MYSAMSPFSKATLDTSKLYVSSSFTNKIPDEGDTTPEKPEDPSALSKQSSEVSMREESDIDQNQSDDGDTETSPTKSPTTPKSVKNKNSSEFPLFSYNNGVVMTSCRELDNNRSALSAASAFAIATAGANEGTPNKEKYRRMSLASAGFPPDQRNGDKEFVIRRAATNRVLNVLRHWVSKHSQDFETNDELKCKVIGFLEEVMHDPELLTQERKAAANIIRTLTQEDPGDNQITLEEITQMAEGVKAEPFENHSALEIAEQLTLLDHLVFKKIPYEEFFGQGWMKLEKNERTPYIMKTTKHFNDISNLIASEIIRNEDINARVSAIEKWVAVADICRCLHNYNAVLEITSSMNRSAIFRLKKTWLKVSKQTKALIDKLQKLVSSEGRFKNLREALKNCDPPCVPYLGMYLTDLAFIEEGTPNYTEDGLVNFSKMRMISHIIREIRQFQQTAYKIEHQAKVTQYLLDQSFVMDEESLYESSLRIEPKLPT

SEQ ID NO: 1518 - DNA, 528 bp, Homo sapiens
gttacgtagctgccctgaactgagagcagcgttggccgggggctagggagccgggctgttccacgctcactgtgcgcctcgggcggcggggctcgggctctgtccgaggtgctgaactccggggctccggccgcgccggcagagtgtgccagcgtccattattgccagtgtctgtgggcatcttccagaaggccgagcatgggggtcaggtgaaaccagggcgccatgaatatcaattattacagaaatgaaaagggatcctgcacccaaattcaaatcaagcaagttcacctagaggttgccgtggggtggagggcccagatctgggctgtttggatctctctgcaggatgaaagggatttcctggacctggctttgctgtcccttgctccttttgcctgcacagtggcagcagctgtggccagagggacaccagtggacacagaggcccagggagaggagcagaggccagcaggaaacagcaaatgcagaggcccaaagtgaccaggacaccgtccttgtgcacat

SEQ ID NO: 1519 - protein, 92 aa, Homo sapiens
MNINYYRNEKGSCTQIQIKQVHLEVAVGWRAQIWAVWISLQDERDFLDLALLSLAPFACTVAAAVARGTPVDTEAQGEEQRPAGNSKCRGPK

SEQ ID NO: 1520 - DNA, 2740 bp, Homo sapiens
ggcggcggcggcggcggcgaagaactgttccttccacctcttcagccccggcaggacgggggcggccgccgcgaacccggggcggggacagcacgcagcctcgaggcgcgcacccccgcccggcagcggccccgacacccggggcgagcgggaaaacggcaacggcggcggcggcggcggcggcgggggaaggatgcaggggaagaagccgggcggttcgtcgggcggcggccggagcggcgagctgcagggggacgaggcgcagaggaacaagaaaaagaaaaagaaggtgtcctgcttttccaacatcaagatcttcctggtgtccgagtgcgccctgatgctggcgcagggcacggtgggcgcctacctggtgagcgtcctgaccaccctggagcgtaggttcaacctgcagagcgctgacgtgggtgtgatcgctagcagcttcgagatcgggaacctggcgctcatcctcttcgtgagctacttcggggcacgcgggcaccggccgcgcctgatcggctgcggcggcatcgtcatggcgctgggcgcgctgctgtcggcgctgcccgagttcctgacccaccagtacaagtacgaggcgggcgagatccgctggggcgccgagggccgcgacgtctgcgcagccaacggctcgggcggcgacgaggggcccgaccccgacctcatctgccgcaaccggacggctaccaacatgatgtacttgctgctcattggggcccaggtgctcctgggcatcggtgctacccctgtgcagcccctgggcgtctcctactacgacgaccacgtgcggaggaaggactcctcgctctatataggaatcctgttcacgatgctggtatttggaccagcctgcgggtttatcctgggctctttctgtaccaaaatctacgtggatgcggtcttcattgacacaagtaacctggacatcactccggacgacccccgctggatcggagcctggtggggtggctttctgctctgcggtgccttactcttcttctcttccctcttgatgtttgggtttccacagtccctgcccccgcactcagaccccgccatggaaagcgagcaggccatgctctccgaaagagaatacgagagacccaagcccagcaacggggtcctgaggcaccccctggagccagacagcagtgcctcctgtttccagcagctgagagtgatcccgaaggtcaccaagcacctgctctcaaaccctgtgttcacctgcatcatcctggccgcctgcatggagattgcagtggtggctggcttcgctgcctttttggggaagtacctggagcagcagtttaacctcaccacctcttctgccaaccagctgcttgggatgactgcgatcccgtgtgcttgtctgggtatcttcctgggaggtcttttggtgaagaagctcagcctgtctgccctgggggccattcggatggccatgctcgtcaacctggtgtccactgcttgctacgtctccttcctcttcctgggctgcgacactggccctgtggctggggttactgttccctatggaaacagcacagcacctggctcagccctggacccctactcgccctgcaataataactgtgaatgccaaaccgattccttcactccagtgtgtggggcagatggcatcacctacctgtctgcctgctttgctggctgcaacagcacgaatctcacgggctgtgcgtgcctcaccaccgtccctgctgagaacgcaaccgtggttcctggaaaatgccccagtcctgggtgccaagaggccttcctcactttcctctgtgtgatgtgtatctgcagcctgatcggtgccatggcacagacaccctcagtcatcatcctcatcaggacagtcagccctgaactcaagtcttacgctttgggagttctttttctcctccttcgtttgttgggcttcatccctccacccctcatcttcggggctggcatcgactccacctgcctgttctggagcacgttctgtggggagcaaggcgcctgcgtcctctacgacaatgtggtctaccgatacctgtatgtcagcatcgccatcgcgctcaaatccttcgccttcatcctgtacaccaccacgtggcagtgcctgaggaaaaactataaacgctacatcaaaaaccacgagggcgggctgagcaccagtgagttctttgcctctactctgaccctagacaacctggggagggaccctgtgcccgcaaaccagacacataggacaaagtttatctataacctggaagaccatgagtggtgtgaaaacatggagtccgttttatagtgactaaaggagggctgaactctgtattagtaatccaagggtcatttttttcttaaaaaaagaaaaaaaggttccaaaaaaaaccaaaactcagtacacacacacaggcacagatgcacacacacgcagacagacacaccgactttgtcctttttctcagcatcagagccagacaggattcagaataaggagagaatgacatcgtgcggcagggtcctggaggccactcgcgcggctgggccacagagtctactttgaaggcacctcatggttttcaggatgctgacagctgcaagcaacaggcactgccaaattcagggaacagtggtggccagcttggaggatggacatttctggatacacatacacatacaaaacagaaaacattttttaaaagaagtttcctaaaataaa

SEQ ID NO: 1521 - protein, 710 aa, Homo sapiens
MQGKKPGGSSGGGRSGELQGDEAQRNKKKKKKVSCFSNIKIFLVSECALMLAQGTVGAYLVSVLTTLERRFNLQSADVGVIASSFEIGNLALILFVSYFGARGHRPRLIGCGGIVMALGALLSALPEFLTHQYKYEAGEIRWGAEGRDVCAANGSGGDEGPDPDLICRNRTATNMMYLLLIGAQVLLGIGATPVQPLGVSYYDDHVRRKDSSLYIGILFTMLVFGPACGFILGSFCTKIYVDAVFIDTSNLDITPDDPRWIGAWWGGFLLCGALLFFSSLLMFGFPQSLPPHSDPAMESEQAMLSEREYERPKPSNGVLRHPLEPDSSASCFQQLRVIPKVTKHLLSNPVFTCIILAACMEIAVVAGFAAFLGKYLEQQFNLTTSSANQLLGMTAIPCACLGIFLGGLLVKKLSLSALGAIRMAMLVNLVSTACYVSFLFLGCDTGPVAGVTVPYGNSTAPGSALDPYSPCNNNCECQTDSFTPVCGADGITYLSACFAGCNSTNLTGCACLTTVPAENATVVPGKCPSPGCQEAFLTFLCVMCICSLIGAMAQTPSVIILIRTVSPELKSYALGVLFLLLRLLGFIPPPLIFGAGIDSTCLFWSTFCGEQGACVLYDNVVYRYLYVSIAIALKSFAFILYTTTWQCLRKNYKRYIKNHEGGLSTSEFFASTLTLDNLGRDPVPANQTHRTKFIYNLEDHEWCENMESVL

SEQ ID NO: 1522 - DNA, 6419 bp, Homo sapiens
agtctgcgggcctccggggcagcggcgaggccggagcgtcgcggcggagaggacgagaccgggacaagaccagggcaggagggagccggccagccgcgagaaccccgcacgcccggcaagatgctgtcctggcggctgcagacgggccccgagaaggccgagctccaggagctcaacgcccggctctatgactacgtgtgtcgggtgcgggagctggagcgcgaaaacctactcctggaggaggagctgcgcggccggcgcgggcgagagggcctgtgggccgaggggcaggcccgctgcgccgaggaggcgcgcagcttgcggcagcagctggacgagctgagctgggccactgcgctggcggagggcgagcgggacgctctgcggcgcgagctgcgggagctgcagcgcctggatgcggaggagcgcgccgcccgcggccgcctggacgccgagctgggtgcgcagcagcgcgagctgcaggaggcgctgggcgcgcgcgccgccctcgaggcgctgctgggccggctgcaggccgagcgccgaggcctcgacgcggcccacgaacgcgacgtgagggagctgcgcgcgcgcgccgccagccttaccatgcatttccgcgcccgcgccaccggccccgccgcgccgccgccacgcctgcgggaggtgcacgacagctacgcactgctggtggccgagtcgtggcgggagacggtgcagctgtacgaggacgaggtgcgcgagctggaggaggcgctgcggcgcggccaggagagcagactccaggcggaggaagagacgcggctgtgcgcgcaggaggcagaggcgctgcggcgcgaggcgctcgggttggagcagctgcgcgcgcggctggaggacgcgctgctgcggatgcgcgaggagtacgggatacaggccgaggagcggcagagagtgattgactgcctggaggatgagaaggcaaccctcaccttggccatggctgactggctgcgggactatcaggacctcctgcaggtgaagaccggcctcagtctggaggtggcgacctaccgggccttattggaaggagaaagtaatccagagatagtgatctgggctgagcacgttgaaaacatgccgtcagaattcagaaacaaatcctatcactataccgactcactactacagagggaaaatgaaaggaatctattttcaaggcagaaagcacctttggcaagtttcaatcacagctcggcactgtattctaacctgtcagggcaccgtggatctcagacgggcacatctattggaggtgatgccagaagaggcttcttgggctcgggatattcttcctcggccactacccagcaggaaaactcatacggaaaagccgtcagcagtcaaaccaacgtcagaactttctctccaacctatggccttttaagaaatactgaggctcaagtgaaaacattccctgacagaccaaaagccggagatacaagggaggtccccgtttacataggtgaagattccacaattgcccgcgagtcgtaccgggatcgccgagacaaggtggcagcaggtgcttcggaaagcacacggtcaaatgagaggaccgtcattctgggaaagaaaacagaagtgaaagccacgagggagcaagaaagaaacagaccagaaaccatccgaacaaagccagaagagaaaatgttcgattctaaagagaaggcttccgaggagagaaacctaagatgggaagaattgacaaagttagataaggaagcgagacagagagaaagccagcagatgaaggagaaggctaaggagaaggactcaccgaaggagaagagcgtgcgagagagagaggtgccgattagtctagaagtatcccaggacagaagagcagaggtgtccccgaaaggtttgcagacgcctgtgaaggatgctggtggtgggaccggtagagaggcagaagcaagagagctacggttcaggttgggcaccagtgatgccactggttctctgcaaggcgattccatgacagaaaccgtagcagaaaacatcgttaccagtatcctgaagcagttcactcagtctccagagacagaagcatctgctgattcttttccagacacaaaagtcacttacgtggacaggaaagagcttcctggggaaaggaaaacaaagactgaaatagttgtggagtctaaactgactgaggatgttgatgtttccgatgaagctggcctggactaccttttaagcaaggatattaaggaagtggggctgaaaggcaagtcagccgagcagatgataggagacatcatcaacctcggcctgaaagggagggaggggagagcaaaggtcgtcaacgtggagatcgtggaggagcccgtgagttatgtcagcggggagaagccggaggagttttccgtcccattcaaagtggaggaggtcgaagatgtgtcgccaggcccctgggggttggttaaggaggaggaaggttatggagaaagcgatgtcacattctcagttaatcagcatcgaaggaccaagcagcctcaggagaacacgactcacgtggaagaagtgacagaggcaggtgattcagagggcgagcagagttattttgtgtccactccagatgaacaccccggggggcacgacagagatgacggctcggtgtacgggcagatccacatcgaggaggaatccaccatcaggtactcttggcaggatgaaatcgtgcaggggactcgaaggaggacacagaaggacggtgcagtgggcgagaaggttgtgaagcccttggatgtcccagcgccctctctggagggggacctgggttccactcactggaaagaacaagctagaagcggtgaatttcatgccgaacccacagtcattgaaaaagaaattaaaataccccacgaattccacacctccatgaagggcatctcctccaaggagccccggcagcagctggtggaggtcatcgggcagctggaggaaacccttcccgagcgcatgagggaggagctgtccgccctcaccagagaggggcagggtgggccggggagcgtttccgtggatgtcaagaaggtccagggtgctggtggcagttccgtgaccctggttgctgaagtcaacgtctcacaaactgtggatgccgatcggttagacctggaggagctgagcaaagatgaggccagtgagatggagaaggctgtggagtcggtggttcgggagagcctgagcaggcaacgcagcccagcgcctggcagcccagatgaggaaggtggagcggaggccccggctgctggcattcgctttaggcgttgggccacccgggagctgtacatcccttcaggcgagagcgaggttgctggtggggcctctcacagctcgggacagcgcactccccagggcccagtgtcggccactgtggaggtcagcagccccacaggctttgcccagtcacaggtgctggaggatgtgagccaggctgcaaggcacataaaactcggcccctctgaagtctggaggactgagcgaatgtcatatgaaggacccactgcagaagtggtggagatggatgtgagtaacgtagaggcgatccgcagccggacacaggaagcgggagctctcggtgtgtctgaccgtggttcctggagagacgcggacagtaggaatgaccaggcagttggtgtgagctttaaggcctctgctggggaaggagaccaggcccacagagaacagggcaaggagcaggccatgtttgataagaaggtgcagctccagagaatggtagaccaaaggtcggtgatttcagatgaaaagaaagttgccctcctctatctagacaatgaggaggaggagaatgatgggcattggttttaataagcagaaacattttgttttaatggcagcctgttggcgacgtgccaacatccaaaggccttaacttattttaagaggccgagggagtctatgaaaatctccccttttttacttttttaaagagtactcccggcatggtcaatttcctttatagttaatccgtaaaggtttccagttaattcatgccttaaaaggcactgcaattttatttttgagttgggacttttacaaaacacttttttccctggagtcttctctccacttctggagatgaatttctatgttttgcacctggtcacagacatggcttgcatctgtttgaaactacaattaattatagatgtcaaaacattaaccagattaaagtaatatatttaagagtaaattttgcttgcatgtgctaatatgaaataacagactaacattttaggggaaaaataaatacaatttagactctaaaaagtcttttcaaaaagaaatgggaaataggcagactgtttatgttaaaaaaattcttgctaaatgatttcatctttaggaaaaaattacttgccatatagagctaaattcatcttaagacttgaatgaattgctttctatgtacagaactttaaacaatatagtatttatggcgaggacagctgtagtctgttgtgatatttcacattctatttgcacaggttccctggcactggtagggtagatgattattgggaatcgcttacagtaccatttcattttttggcactaggtcattaagtagcacacagtctgaatgcccttttctggagtggccagttcctatcagactgtgcagacttgcgcttctctgcaccttatcccttagcacccaaacatttaatttcactggtgggaggtagaccttgaagacaatgaagagaatgccgatactcagactgcagctggaccggcaagctggctgtgtacaggaaaattggaagcacacagtggactgtgcctcttaaagatgcctttcccaaccctccattcatgggatgcaggtctttctgagctcaagggtgaaagatgaatacaataacaaccatgaacccacctcacggaagctttttttgcactttgaacagaagtcattgcagttggggtgttttgtccagggaaacagtttattaaatagaaggatgttttggggaaggaactggatatctctcctgcagcccagcaccgagatacccaggacgggcctggggggcgagaaaggcccccatgctcatgggccgcggagtgtggacctgtagataggcaccaccgagtttaagatactgggatgagcatgcttcattggattcattttattttacacgtcagtattgttttaaagtttctgtctgtaaagtgtagcatcatatataaaaagagtttcgctagcagcgcattttttttagttcaggctagcttctttcacataatgctgtctcagctgtatttccagtaacacagcatcatcgcactgactgtggcgcactggggaataacagtctgagctagcaccaccctcagccaggctacaacgacagcactggagggtcttccctctcagattcacctggaggccctcagacccccagggtgcacgtctccccaggtcctgggagtggctaccgcaggtagtttctggagagcacgttttcttcattgataagtggaggagaaatgcagcacagctttcaagatactattttaaaaacaccatgaatcagatagggaaagaaagttgattggaatagcaagtttaaacctttgttgtccatctgccaaatgaactagtgattgtcagactggtatggaggtgactgctttgtaaggttttgtcgtttctaatacagacagagatgtgctgattttgttttagctgtaacaggtaatggtttttggatagatgattgactggtgagaatttggtcaaggtgacagcctcctgtctgatgacaggacagactggtggtgaggagtctaagtgggctcagtttgatgtcagtgtctgggctcatgacttgtaaatggaagctgatgtgaacaggtaattaatattatgacccacttctatttactttgggaaatatcttggatcttaattatcatctgcaagtttcaagaagtattctgccaaaagtatttacaagtatggactcatgagctattgttggttgctaaatgtgaatcacgcgggagtgagtgtgcccttcacactgtgacattgtgacattgtgacaagctccatgtcctttaaaatcagtcactctgcacacaagagaaatcaacttcgtggttggatggggccggaacacaaccagtctttttgtatttattgttactgagacaaaacagtactcactgagtgtttttcagtttcctactggtggttttgatattgtttgtttaagatgtatatttagaatgacatcatctaagaagctgattttgctaaactcctgttccctacaatgggaaatgtcacaagaatgtgcaaaaataaaaatctgaggaaaaaacccaca

SEQ ID NO: 1523 - protein, 1253 aa, Homo sapiens
MLSWRLQTGPEKAELQELNARLYDYVCRVRELERENLLLEEELRGRRGREGLWAEGQARCAEEARSLRQQLDELSWATALAEGERDALRRELRELQRLDAEERAARGRLDAELGAQQRELQEALGARAALEALLGRLQAERRGLDAAHERDVRELRARAASLTMHFRARATGPAAPPPRLREVHDSYALLVAESWRETVQLYEDEVRELEEALRRGQESRLQAEEETRLCAQEAEALRREALGLEQLRARLEDALLRMREEYGIQAEERQRVIDCLEDEKATLTLAMADWLRDYQDLLQVKTGLSLEVATYRALLEGESNPEIVIWAEHVENMPSEFRNKSYHYTDSLLQRENERNLFSRQKAPLASFNHSSALYSNLSGHRGSQTGTSIGGDARRGFLGSGYSSSATTQQENSYGKAVSSQTNVRTFSPTYGLLRNTEAQVKTFPDRPKAGDTREVPVYIGEDSTIARESYRDRRDKVAAGASESTRSNERTVILGKKTEVKATREQERNRPETIRTKPEEKMFDSKEKASEERNLRWEELTKLDKEARQRESQQMKEKAKEKDSPKEKSVREREVPISLEVSQDRRAEVSPKGLQTPVKDAGGGTGREAEARELRFRLGTSDATGSLQGDSMTETVAENIVTSILKQFTQSPETEASADSFPDTKVTYVDRKELPGERKTKTEIVVESKLTEDVDVSDEAGLDYLLSKDIKEVGLKGKSAEQMIGDIINLGLKGREGRAKVVNVEIVEEPVSYVSGEKPEEFSVPFKVEEVEDVSPGPWGLVKEEEGYGESDVTFSVNQHRRTKQPQENTTHVEEVTEAGDSEGEQSYFVSTPDEHPGGHDRDDGSVYGQIHIEEESTIRYSWQDEIVQGTRRRTQKDGAVGEKVVKPLDVPAPSLEGDLGSTHWKEQARSGEFHAEPTVIEKEIKIPHEFHTSMKGISSKEPRQQLVEVIGQLEETLPERMREELSALTREGQGGPGSVSVDVKKVQGAGGSSVTLVAEVNVSQTVDADRLDLEELSKDEASEMEKAVESVVRESLSRQRSPAPGSPDEEGGAEAPAAGIRFRRWATRELYIPSGESEVAGGASHSSGQRTPQGPVSATVEVSSPTGFAQSQVLEDVSQAARHIKLGPSEVWRTERMSYEGPTAEVVEMDVSNVEAIRSRTQEAGALGVSDRGSWRDADSRNDQAVGVSFKASAGEGDQAHREQGKEQAMFDKKVQLQRMVDQRSVISDEKKVALLYLDNEEEENDGHWF

SEQ ID NO: 1524 - DNA, 7355 bp, Homo sapiens
agtctgcgggcctccggggcagcggcgaggccggagcgtcgcggcggagaggacgagaccgggacaagaccagggcaggagggagccggccagccgcgagaaccccgcacgcccggcaagatgctgtcctggcggctgcagacgggccccgagaaggccgagctccaggagctcaacgcccggctctatgactacgtgtgtcgggtgcgggagctggagcgcgaaaacctactcctggaggaggagctgcgcggccggcgcgggcgagagggcctgtgggccgaggggcaggcccgctgcgccgaggaggcgcgcagcttgcggcagcagctggacgagctgagctgggccactgcgctggcggagggcgagcgggacgctctgcggcgcgagctgcgggagctgcagcgcctggatgcggaggagcgcgccgcccgcggccgcctggacgccgagctgggtgcgcagcagcgcgagctgcaggaggcgctgggcgcgcgcgccgccctcgaggcgctgctgggccggctgcaggccgagcgccgaggcctcgacgcggcccacgaacgcgacgtgagggagctgcgcgcgcgcgccgccagccttaccatgcatttccgcgcccgcgccaccggccccgccgcgccgccgccacgcctgcgggaggtgcacgacagctacgcactgctggtggccgagtcgtggcgggagacggtgcagctgtacgaggacgaggtgcgcgagctggaggaggcgctgcggcgcggccaggagagcagactccaggcggaggaagagacgcggctgtgcgcgcaggaggcagaggcgctgcggcgcgaggcgctcgggttggagcagctgcgcgcgcggctggaggacgcgctgctgcggatgcgcgaggagtacgggatacaggccgaggagcggcagagagtgattgactgcctggaggatgagaaggcaaccctcaccttggccatggctgactggctgcgggactatcaggacctcctgcaggtgaagaccggcctcagtctggaggtggcgacctaccgggccttattggaaggagaaagtaatccagagatagtgatctgggctgagcacgttgaaaacatgccgtcagaattcagaaacaaatcctatcactataccgactcactactacagagggaaaatgaaaggaatctattttcaaggcagaaagcacctttggcaagtttcaatcacagctcggcactgtattctaacctgtcagggcaccgtggatctcagacgggcacatctattggaggtgatgccagaagaggcttcttgggctcgggatattcttcctcggccactacccagcaggaaaactcatacggaaaagccgtcagcagtcaaaccaacgtcagaactttctctccaacctatggccttttaagaaatactgaggctcaagtgaaaacattccctgacagaccaaaagccggagatacaagggaggtccccgtttacataggtgaagattccacaattgcccgcgagtcgtaccgggatcgccgagacaaggtggcagcaggtgcttcggaaagcacacggtcaaatgagaggaccgtcattctgggaaagaaaacagaagtgaaagccacgagggagcaagaaagaaacagaccagaaaccatccgaacaaagccagaagagaaaatgttcgattctaaagagaaggcttccgaggagagaaacctaagatgggaagaattgacaaagttagataaggaagcgagacagagagaaagccagcagatgaaggagaaggctaaggagaaggactcaccgaaggagaagagcgtgcgagagagagaggtgccgattagtctagaagtatcccaggacagaagagcagaggtgtccccgaaaggtttgcagacgcctgtgaaggatgctggtggtgggaccggtagagaggcagaagcaagagagctacggttcaggttgggcaccagtgatgccactggttctctgcaaggcgattccatgacagaaaccgtagcagaaaacatcgttaccagtatcctgaagcagttcactcagtctccagagacagaagcatctgctgattcttttccagacacaaaagtcacttacgtggacaggaaagagcttcctggggaaaggaaaacaaagactgaaatagttgtggagtctaaactgactgaggatgttgatgtttccgatgaagctggcctggactaccttttaagcaaggatattaaggaagtggggctgaaaggcaagtcagccgagcagatgataggagacatcatcaacctcggcctgaaagggagggaggggagagcaaaggtcgtcaacgtggagatcgtggaggagcccgtgagttatgtcagcggggagaagccggaggagttttccgtcccattcaaagtggaggaggtcgaagatgtgtcgccaggcccctgggggttggttaaggaggaggaaggttatggagaaagcgatgtcacattctcagttaatcagcatcgaaggaccaagcagcctcaggagaacacgactcacgtggaagaagtgacagaggcaggtgattcagagggcgagcagagttattttgtgtccactccagatgaacaccccggggggcacgacagagatgacggctcggtgtacgggcagatccacatcgaggaggaatccaccatcaggtactcttggcaggatgaaatcgtgcaggggactcgaaggaggacacagaaggacggtgcagtgggcgagaaggttgtgaagcccttggatgtcccagcgccctctctggagggggacctgggttccactcactggaaagaacaagctagaagcggtgaatttcatgccgaacccacagtcattgaaaaagaaattaaaataccccacgaattccacacctccatgaagggcatctcctccaaggagccccggcagcagctggtggaggtcatcgggcagctggaggaaacccttcccgagcgcatgagggaggagctgtccgccctcaccagagaggggcagggtgggccggggagcgtttccgtggatgtcaagaaggtccagggtgctggtggcagttccgtgaccctggttgctgaagtcaacgtctcacaaactgtggatgccgatcggttagacctggaggagctgagcaaagatgaggccagtgagatggagaaggctgtggagtcggtggttcgggagagcctgagcaggcaacgcagcccagcgcctggcagcccagatgaggaaggtggagcggaggccccggctgctggcattcgctttaggcgttgggccacccgggagctgtacatcccttcaggcgagagcgaggttgctggtggggcctctcacagctcgggacagcgcactccccagggcccagtgtcggccactgtggaggtcagcagccccacaggctttgcccagtcacaggtgctggaggatgtgagccaggctgcaaggcacataaaactcggcccctctgaagtctggaggactgagcgaatgtcatatgaaggacccactgcagaagtggtggaggtaagtgcgggaggtgacctaagtcaggcagcgagcccgaccggagccagccggtctgtgaggcatgtcacgctgggtcccggtcaaagtccactgtccagagaagtcatcttcctaggccctgcccctgcctgtccagaggcatggggctcgccagaacctggcccagcagagtcttctgcagatatggacggatcagggaggcacagcacatttggctgcagacaatttcatgctgaaaaggagattatttttcagggccccatttctgctgcagggaaggttggtgattattttgcaacagaagagtcagtgggtacccagacttctgtcaggcaactccagttaggccctaaagaagggttcagtgggcaaatccagttcacagctccactttcagacaaggtggagttgggtgtcataggagattctgtacacatggaagggttgccagggagcagcacatccatcaggcacatcagcattgggcctcagaggcatcagaccacccagcagatagtttaccatgggctggttccccaactgggggaatctggtgactcagagagcactgtgcacggagagggctcagcagatgtgcaccaggccactcacagtcatacctcgggtagacaaaccgttatgactgaaaagagcaccttccaaagtgtcgtttctgaatctccccaggaggatagtgcagaggacacatcaggggcagaaatgacatcgggtgttagcagatcctttaggcacattcgactaggtcctacagaaacggaaacctctgaacacattgccatccgtggacccgtgtccagaacatttgtgcttgctggttcagcggactcccctgagctaggcaagttagcagacagcagcagaacgctaaggcacattgcaccagggcccaaagaaacttcgtttacctttcagatggatgtgagtaacgtagaggcgatccgcagccggacacaggaagcgggagctctcggtgtgtctgaccgtggttcctggagagacgcggacagtaggaatgaccaggcagttggtgtgagctttaaggcctctgctggggaaggagaccaggcccacagagaacagggcaaggagcaggccatgtttgataagaaggtgcagctccagagaatggtagaccaaaggtcggtgatttcagatgaaaagaaagttgccctcctctatctagacaatgaggaggaggagaatgatgggcattggttttaataagcagaaacattttgttttaatggcagcctgttggcgacgtgccaacatccaaaggccttaacttattttaagaggccgagggagtctatgaaaatctccccttttttacttttttaaagagtactcccggcatggtcaatttcctttatagttaatccgtaaaggtttccagttaattcatgccttaaaaggcactgcaattttatttttgagttgggacttttacaaaacacttttttccctggagtcttctctccacttctggagatgaatttctatgttttgcacctggtcacagacatggcttgcatctgtttgaaactacaattaattatagatgtcaaaacattaaccagattaaagtaatatatttaagagtaaattttgcttgcatgtgctaatatgaaataacagactaacattttaggggaaaaataaatacaatttagactctaaaaagtcttttcaaaaagaaatgggaaataggcagactgtttatgttaaaaaaattcttgctaaatgatttcatctttaggaaaaaattacttgccatatagagctaaattcatcttaagacttgaatgaattgctttctatgtacagaactttaaacaatatagtatttatggcgaggacagctgtagtctgttgtgatatttcacattctatttgcacaggttccctggcactggtagggtagatgattattgggaatcgcttacagtaccatttcattttttggcactaggtcattaagtagcacacagtctgaatgcccttttctggagtggccagttcctatcagactgtgcagacttgcgcttctctgcaccttatcccttagcacccaaacatttaatttcactggtgggaggtagaccttgaagacaatgaagagaatgccgatactcagactgcagctggaccggcaagctggctgtgtacaggaaaattggaagcacacagtggactgtgcctcttaaagatgcctttcccaaccctccattcatgggatgcaggtctttctgagctcaagggtgaaagatgaatacaataacaaccatgaacccacctcacggaagctttttttgcactttgaacagaagtcattgcagttggggtgttttgtccagggaaacagtttattaaatagaaggatgttttggggaaggaactggatatctctcctgcagcccagcaccgagatacccaggacgggcctggggggcgagaaaggcccccatgctcatgggccgcggagtgtggacctgtagataggcaccaccgagtttaagatactgggatgagcatgcttcattggattcattttattttacacgtcagtattgttttaaagtttctgtctgtaaagtgtagcatcatatataaaaagagtttcgctagcagcgcattttttttagttcaggctagcttctttcacataatgctgtctcagctgtatttccagtaacacagcatcatcgcactgactgtggcgcactggggaataacagtctgagctagcaccaccctcagccaggctacaacgacagcactggagggtcttccctctcagattcacctggaggccctcagacccccagggtgcacgtctccccaggtcctgggagtggctaccgcaggtagtttctggagagcacgttttcttcattgataagtggaggagaaatgcagcacagctttcaagatactattttaaaaacaccatgaatcagatagggaaagaaagttgattggaatagcaagtttaaacctttgttgtccatctgccaaatgaactagtgattgtcagactggtatggaggtgactgctttgtaaggttttgtcgtttctaatacagacagagatgtgctgattttgttttagctgtaacaggtaatggtttttggatagatgattgactggtgagaatttggtcaaggtgacagcctcctgtctgatgacaggacagactggtggtgaggagtctaagtgggctcagtttgatgtcagtgtctgggctcatgacttgtaaatggaagctgatgtgaacaggtaattaatattatgacccacttctatttactttgggaaatatcttggatcttaattatcatctgcaagtttcaagaagtattctgccaaaagtatttacaagtatggactcatgagctattgttggttgctaaatgtgaatcacgcgggagtgagtgtgcccttcacactgtgacattgtgacattgtgacaagctccatgtcctttaaaatcagtcactctgcacacaagagaaatcaacttcgtggttggatggggccggaacacaaccagtctttttgtatttattgttactgagacaaaacagtactcactgagtgtttttcagtttcctactggtggttttgatattgtttgtttaagatgtatatttagaatgacatcatctaagaagctgattttgctaaactcctgttccctacaatgggaaatgtcacaagaatgtgcaaaaataaaaatctgaggaaaaaacccaca

SEQ ID NO: 1525 - protein, 1565 aa, Homo sapiens
MLSWRLQTGPEKAELQELNARLYDYVCRVRELERENLLLEEELRGRRGREGLWAEGQARCAEEARSLRQQLDELSWATALAEGERDALRRELRELQRLDAEERAARGRLDAELGAQQRELQEALGARAALEALLGRLQAERRGLDAAHERDVRELRARAASLTMHFRARATGPAAPPPRLREVHDSYALLVAESWRETVQLYEDEVRELEEALRRGQESRLQAEEETRLCAQEAEALRREALGLEQLRARLEDALLRMREEYGIQAEERQRVIDCLEDEKATLTLAMADWLRDYQDLLQVKTGLSLEVATYRALLEGESNPEIVIWAEHVENMPSEFRNKSYHYTDSLLQRENERNLFSRQKAPLASFNHSSALYSNLSGHRGSQTGTSIGGDARRGFLGSGYSSSATTQQENSYGKAVSSQTNVRTFSPTYGLLRNTEAQVKTFPDRPKAGDTREVPVYIGEDSTIARESYRDRRDKVAAGASESTRSNERTVILGKKTEVKATREQERNRPETIRTKPEEKMFDSKEKASEERNLRWEELTKLDKEARQRESQQMKEKAKEKDSPKEKSVREREVPISLEVSQDRRAEVSPKGLQTPVKDAGGGTGREAEARELRFRLGTSDATGSLQGDSMTETVAENIVTSILKQFTQSPETEASADSFPDTKVTYVDRKELPGERKTKTEIVVESKLTEDVDVSDEAGLDYLLSKDIKEVGLKGKSAEQMIGDIINLGLKGREGRAKVVNVEIVEEPVSYVSGEKPEEFSVPFKVEEVEDVSPGPWGLVKEEEGYGESDVTFSVNQHRRTKQPQENTTHVEEVTEAGDSEGEQSYFVSTPDEHPGGHDRDDGSVYGQIHIEEESTIRYSWQDEIVQGTRRRTQKDGAVGEKVVKPLDVPAPSLEGDLGSTHWKEQARSGEFHAEPTVIEKEIKIPHEFHTSMKGISSKEPRQQLVEVIGQLEETLPERMREELSALTREGQGGPGSVSVDVKKVQGAGGSSVTLVAEVNVSQTVDADRLDLEELSKDEASEMEKAVESVVRESLSRQRSPAPGSPDEEGGAEAPAAGIRFRRWATRELYIPSGESEVAGGASHSSGQRTPQGPVSATVEVSSPTGFAQSQVLEDVSQAARHIKLGPSEVWRTERMSYEGPTAEVVEVSAGGDLSQAASPTGASRSVRHVTLGPGQSPLSREVIFLGPAPACPEAWGSPEPGPAESSADMDGSGRHSTFGCRQFHAEKEIIFQGPISAAGKVGDYFATEESVGTQTSVRQLQLGPKEGFSGQIQFTAPLSDKVELGVIGDSVHMEGLPGSSTSIRHISIGPQRHQTTQQIVYHGLVPQLGESGDSESTVHGEGSADVHQATHSHTSGRQTVMTEKSTFQSVVSESPQEDSAEDTSGAEMTSGVSRSFRHIRLGPTETETSEHIAIRGPVSRTFVLAGSADSPELGKLADSSRTLRHIAPGPKETSFTFQMDVSNVEAIRSRTQEAGALGVSDRGSWRDADSRNDQAVGVSFKASAGEGDQAHREQGKEQAMFDKKVQLQRMVDQRSVISDEKKVALLYLDNEEEENDGHWF

SEQ ID NO: 1526 - DNA, 3562 bp, Homo sapiens
atcattcattcttttgcctggagttttgtgaggtacccgcttgctttatgggaaaaggctgctccggaactgccctactttagactttttcatggttatcaatctgtacaaagaatcaccaaactgataaagcaggaaccagagggcaaatcacgctgccaagacaactgtgtaattcgctcgaaaaagaaacgatggagtctcgctctgtcacccaggctggagtatagtggtgtgatcttggctcactgcaacctctgcctcccaggttcaagcgattctcctgcctcagcctctcgagtagctggaattacaggtctggcagaaggaacagtatcaactgactgagtaggtctcattggcagttgtgattcagagacctagaaagctgaacccacggctggcaagaagaggatggtttgtgggacctgggctgatgtctgatgaaattttaagccccagctatagctactacaaagaaaagtggctgatgataagcatgtaactcaaaaagacaatgtatataaaaatatgcaagaatcacaggaaacccacatatccaaccacctagatgaagttgttgctgctgttagcatcactcatagaaagaagttccaaaacaagctgcttcagacagcactattccagcctcctcgagagaaactccacctctgtgaagagaaagcaaagtcctattccaacagtcatgagtacaaacaggccgtccatgagcttgtgcgttgcgtagcactgacaagaatttgctatggagactcacattggaaactagcagaggcacatgttaatctggctcaaggctacctccagctgaaaggactgtcactgcaagcaaaacaacatgcagaaaaagccagacaaatcctcgccaactccattgtgcctccctatagtgagaatacagatgttttcaagttttccattgagcttttccataccatgggcagagctttactctcccttcaaaaatttaaggaagctgcagagaatttgacaaaagcagagagactttcaaaggagctgctacaatgtggaagaattataaaggaagaatggatagaaattgaagcacggatcagattatcatttgcacaggtgtatcaaggtcagaagaagtcaaaagaagctttgtcccactatcaagcagctttggaatatgttgagatcagtaaaggtgaaacaagtcgtgagtgtgtacccatattgagagaattagcaggtgtagagcaagccctgggactccacgatgtatccatcaaccacttcctccaggcacatcttatcatcctgagtagaagcccctctcaagtggaggcagcagactcggcacacatcgtcgcccatgctgctgtcgcttcagggagacacgagcaccatgatgtagctgagcagtattttcaagagagcatggctcatcttaaggattctgaagggatgggaagaaccaaatttctttcaattcaagatgaattttgccattttctacaaatgactggacaaaaagagagagcaacctcgatcctgagagagtccctggaagccaaagtggaagcatttggcgatttcagtcccgaggtggcagagacataccggctcctgggaggagcagacctggcgcaggggaaccacagtggggcccgcaagaaactgaagaagtgtctccagatccagaccctcttatatggaccgcaggacaaaaggactctggccacccagcaggccatgggcatgctgtccacggcccccaaggttgcttcgaagccaaggcaggcatcaaaagccaaagtggccttctgcaccagcatccctcaggacaccctgctggggaaggcccggcccggcacaacagcagactgaggcccccaccctgaaaaagcctaggacattcctgggcactgtcatttagggtgctgtacaaatcacctccgcctagaaaatggaattcaacagtcaggatacagatttccaaggccaactgttggccccaacatgcaacagtgagaccataagcctcccgtgggccacattttgacagtggatgcccttcagggtgatatatgctataaagcagttttctatcacctaagtggtttttcttgccaacaagaatttttacccatcagcactactgtggctgaaaaacttctcttcaacagttcagtgcgccctgtgcaggagtcagcccggcatctgcttgtacacacagctccttgcataggtgtggagttagatctggacagtgaacttcaggaagtcctttcttataggaggctaatagggattgagaataacatgagaagaaaacgctaataaagggaaacctgaacacgctgctgtcagcatgtgttttcaaagtgcagcctgcctcagagttcttcggagcctgaaaaggggtttgagaaagagcccagtaggaggggcaggaggccgacacacctgacttggcctggggcccaggaggcaggtgtaagggagtgaaaagaaaggctagccggaggctgcggggggaagaccgcagactccctgctgcttcgcatccctcctgtggcctccactgcaggcaggacaaacctggatgccacctggagctgcttcctgagttggcacactatcgtgtacacagcagtcttcagccccctggaaggaggccatagtcgtgtgaggatggcaaagtcgaacaggaagctttgagtgccttcctccacgatgtcaacgaggagatccagtgccagatcgaggtggatggaacacccaggggtaggggtgcaggtgtgggcagtgatgtcccttcccctccctcccctggtcccacagactgtggccatgaggctgcaggctggtgctatgacagcagattgcagcacagggccctcccctccagcccccagtgggacatcaaaaccaccctggggccatttgtgcagggcaccacctccagtattgatggggaaaataaactcagtagagccacgacagggtggagagaagcagggaccattgtcttcctcaggagcgtgacagctgaccccacagaccatgcttgctggtacacactggtcccagacccaggcctgtcggacatcagcagtgtgctaaaaacgtgtaagatgtcactactcaccgtgtgtcctatctagttgacatgggtggagtcagctaaggggtgaatgttcatatgctcccaattcacgttgaagccctaatccccaaagggatggtattgggggtggggtcttggagaggtgattaggttatgagggtggagccctgatgaatgggattagtgctttataaggagagacaccagagagatgatctctctctccaccatgtgaggacacagtgagaagacagccgtctgcaggcccggaagagagccctcaccaggaaatgaaactgttggcaccttgagacttcccagcttccagaactgtaagaaataaatgtttgttgtttaagcctttcaggctacggctttctgttacagcagcctgaactgagagtccatgccgagtttttgaaataaatgtgaattctgatgtta

SEQ ID NO: 1527 - protein, 447 aa, Homo sapiens
MQESQETHISNHLDEVVAAVSITHRKKFQNKLLQTALFQPPREKLHLCEEKAKSYSNSHEYKQAVHELVRCVALTRICYGDSHWKLAEAHVNLAQGYLQLKGLSLQAKQHAEKARQILANSIVPPYSENTDVFKFSIELFHTMGRALLSLQKFKEAAENLTKAERLSKELLQCGRIIKEEWIEIEARIRLSFAQVYQGQKKSKEALSHYQAALEYVEISKGETSRECVPILRELAGVEQALGLHDVSINHFLQAHLIILSRSPSQVEAADSAHIVAHAAVASGRHEHHDVAEQYFQESMAHLKDSEGMGRTKFLSIQDEFCHFLQMTGQKERATSILRESLEAKVEAFGDFSPEVAETYRLLGGADLAQGNHSGARKKLKKCLQIQTLLYGPQDKRTLATQQAMGMLSTAPKVASKPRQASKAKVAFCTSIPQDTLLGKARPGTTAD

SEQ ID NO: 1528 - DNA, 4559 bp, Homo sapiens
tcgcgggccgaggacgcctctggggcggcaccgcgtcccgagagccccagaagtcggcggggaagtttccccggtggggggcgtttcgggcctcccggacggctctcggccccggagcccggtcgcaggagcgcgggcccgggggcgggaacgcgccgcggccgcctcctcctccccggctcccgcccgcggcggtgttggcggcggcggtggcggcggcggcggcgcttccccggcgcggagcggctttaaaaggcggcactccaccccccggcgcactcgcagctcgggcgccgcgcgagcctgtcgccgctatgcctccgcgcgcgccgcctgcgcccgggccccggccgccgccccgggccgccgccgccaccgacaccgccgcgggcgcggggggcgcggggggcgcggggggcgccggcgggcccgggttccggccgctcgcgccgcgtccctggcgctggctgctgctgctggcgctgcctgccgcctgctccgcgcccccgccgcgccccgtctacaccaaccactgggcggtgcaagtgctgggcggcccggccgaggcggaccgcgtggcggcggcgcacgggtacctcaacttgggccagattggaaacctggaagattactaccatttttatcacagcaaaacctttaaaagatcaaccttgagtagcagaggccctcacaccttcctcagaatggacccccaggtgaaatggctccagcaacaggaagtgaaacgaagggtgaagagacaggtgcgaagtgacccgcaggccctttacttcaacgaccccatttggtccaacatgtggtacctgcattgtggcgacaagaacagtcgctgccggtcggaaatgaatgtccaggcagcgtggaagaggggctacacaggaaaaaacgtggtggtcaccatccttgatgatggcatagagagaaatcaccctgacctggccccaaattatgattcctacgccagctacgacgtgaacggcaatgattatgacccatctccacgatatgatgccagcaatgaaaataaacacggcactcgttgtgcgggagaagttgctgcttcagcaaacaattcctactgcatcgtgggcatagcgtacaatgccaaaataggaggcatccgcatgctggacggcgatgtcacagatgtggtcgaggcaaagtcgctgggcatcagacccaactacatcgacatttacagtgccagctgggggccggacgacgacggcaagacggtggacgggcccggccgactggctaagcaggctttcgagtatggcattaaaaagggccggcagggcctgggctccattttcgtctgggcatctgggaatggcgggagagagggggactactgctcgtgcgatggctacaccaacagcatctacaccatctccgtcagcagcgccaccgagaatggctacaagccctggtacctggaagagtgtgcctccaccctggccaccacctacagcagtggggccttttatgagcgaaaaatcgtcaccacggatctgcgtcagcgctgtaccgatggccacactgggacctcagtctctgcccccatggtggcgggcatcatcgccttggctctagaagcaaacagccagttaacctggagggacgtccagcacctgctagtgaagacatcccggccggcccacctgaaagcgagcgactggaaagtgaacggcgcgggtcataaagttagccatttctatggatttggtttggtggacgcagaagctctcgttgtggaggcaaagaagtggacagcagtgccatcgcagcacatgtgtgtggccgcctcggacaagagacccaggagcatccccttagtgcaggtgctgcggactacggccctgaccagcgcctgcgcggagcactcggaccagcgggtggtctacttggagcacgtggtggttcgcacctccatctcacacccacgccgaggagacctccagatctacctggtttctccctcgggaaccaagtctcaacttctggcaaagaggttgctggatctttccaatgaagggtttacaaactgggaattcatgactgtccactgctggggagaaaaggctgaagggcagtggaccttggaaatccaagatctgccatcccaggtccgcaacccggagaagcaagggaagttgaaagaatggagcctcatactgtatggcacagcagagcacccgtaccacaccttcagtgcccatcagtcccgctcgcggatgctggagctctcagccccagagctggagccacccaaggctgccctgtcaccctcccaggtggaagttcctgaagatgaggaagattacacagctcaatccaccccaggctctgctaatattttacagaccagtgtgtgccatccggagtgtggtgacaaaggctgtgatggccccaatgcagaccagtgcttgaactgcgtccacttcagcctggggagtgtcaagaccagcaggaagtgcgtgagtgtgtgccccttgggctactttggggacacagcagcaagacgctgtcgccggtgccacaaggggtgtgagacctgctccagcagagctgcgacgcagtgcctgtcttgccgccgcgggttctatcaccaccaggagatgaacacctgtgtgaccctctgtcctgcaggattttatgctgatgaaagtcagaaaaattgccttaaatgccacccaagctgtaaaaagtgcgtggatgaacctgagaaatgtactgtctgtaaagaaggattcagccttgcacggggcagctgcattcctgactgtgagccaggcacctactttgactcagagctgatcagatgtggggaatgccatcacacctgcggaacctgcgtggggccaggcagagaagagtgcattcactgtgcgaaaaacttccacttccacgactggaagtgtgtgccagcctgtggtgagggcttctacccagaagagatgccgggcttgccccacaaagtgtgtcgaaggtgtgacgagaactgcttgagctgtgcaggctccagcaggaactgtagcaggtgtaagacgggcttcacacagctggggacctcctgcatcaccaaccacacgtgcagcaacgctgacgagacattctgcgagatggtgaagtccaaccggctgtgcgaacggaagctcttcattcagttctgctgccgcacgtgcctcctggccgggtaagggtgcctagctgcccacagagggcaggcactcccatccatccatccgtccaccttcctccagactgtcggccagagtctgtttcaggagcggcgccctgcacctgacagctttatctccccaggagcagcatctctgagcacccaagccaggtgggtggtggctcttaaggaggtgttcctaaaatggtgatatcctctcaaatgctgcttgttggctccagtcttccgacaaactaacaggaacaaaatgaattctgggaatccacagctctggctttggagcagcttctgggaccataagtttactgaatcttcaagaccaaagcagaaaagaaaggcgcttggcatcacacatcactcttctccccgtgcttttctgcggctgtgtagtaaatctccccggcccagctggcgaaccctgggccatcctcacatgtgacaaagggccagcagtctacctgctcgttgcctgccactgagcagtctggggacggtttggtcagactataaataagataggtttgagggcataaaatgtatgaccactggggccggagtatctatttctacatagtcagctacttctgaaactgcagcagtggcttagaaagtccaattccaaagccagaccagaagattctatcccccgcagcgctctcctttgagcaagccgagctctccttgttaccgtgttctgtctgtgtcttcaggagtctcatggcctgaacgaccacctcgacctgatgcagagccttctgaggagaggcaacaggaggcattctgtggccagccaaaaggtaccccgatggccaagcaattcctctgaacaaaatgtaaagccagccatgcattgttaatcatccatcacttcccattttatggaattgcttttaaaatacatttggcctctgcccttcagaagactcgtttttaaggtggaaactcctgtgtctgtgtatattacaagcctacatgacacagttggatttattctgccaaacctgtgtaggcattttataagctacatgttctaatttttaccgatgttaattattttgacaaatatttcatatattttcattgaaatgcacagatctgcttgatcaattcccttgaatagggaagtaacatttgccttaaattttttcgacctcgtctttctccatattgtcctgctcccctgtttgacgacagtgcatttgccttgtcacctgtgagctggagagaacccagatgttgtttattgaatctacaactctgaaagagaaatcaatgaagcaagtacaatgttaaccctaaattaataaaagagttaacatcccatggcaaaaaa

SEQ ID NO: 1529 - protein, 969 aa, Homo sapiens
MPPRAPPAPGPRPPPRAAAATDTAAGAGGAGGAGGAGGPGFRPLAPRPWRWLLLLALPAACSAPPPRPVYTNHWAVQVLGGPAEADRVAAAHGYLNLGQIGNLEDYYHFYHSKTFKRSTLSSRGPHTFLRMDPQVKWLQQQEVKRRVKRQVRSDPQALYFNDPIWSNMWYLHCGDKNSRCRSEMNVQAAWKRGYTGKNVVVTILDDGIERNHPDLAPNYDSYASYDVNGNDYDPSPRYDASNENKHGTRCAGEVAASANNSYCIVGIAYNAKIGGIRMLDGDVTDVVEAKSLGIRPNYIDIYSASWGPDDDGKTVDGPGRLAKQAFEYGIKKGRQGLGSIFVWASGNGGREGDYCSCDGYTNSIYTISVSSATENGYKPWYLEECASTLATTYSSGAFYERKIVTTDLRQRCTDGHTGTSVSAPMVAGIIALALEANSQLTWRDVQHLLVKTSRPAHLKASDWKVNGAGHKVSHFYGFGLVDAEALVVEAKKWTAVPSQHMCVAASDKRPRSIPLVQVLRTTALTSACAEHSDQRVVYLEHVVVRTSISHPRRGDLQIYLVSPSGTKSQLLAKRLLDLSNEGFTNWEFMTVHCWGEKAEGQWTLEIQDLPSQVRNPEKQGKLKEWSLILYGTAEHPYHTFSAHQSRSRMLELSAPELEPPKAALSPSQVEVPEDEEDYTAQSTPGSANILQTSVCHPECGDKGCDGPNADQCLNCVHFSLGSVKTSRKCVSVCPLGYFGDTAARRCRRCHKGCETCSSRAATQCLSCRRGFYHHQEMNTCVTLCPAGFYADESQKNCLKCHPSCKKCVDEPEKCTVCKEGFSLARGSCIPDCEPGTYFDSELIRCGECHHTCGTCVGPGREECIHCAKNFHFHDWKCVPACGEGFYPEEMPGLPHKVCRRCDENCLSCAGSSRNCSRCKTGFTQLGTSCITNHTCSNADETFCEMVKSNRLCERKLFIQFCCRTCLLAG

SEQ ID NO: 1530 - DNA, 4520 bp, Homo sapiens
tcgcgggccgaggacgcctctggggcggcaccgcgtcccgagagccccagaagtcggcggggaagtttccccggtggggggcgtttcgggcctcccggacggctctcggccccggagcccggtcgcaggagcgcgggcccgggggcgggaacgcgccgcggccgcctcctcctccccggctcccgcccgcggcggtgttggcggcggcggtggcggcggcggcggcgcttccccggcgcggagcggctttaaaaggcggcactccaccccccggcgcactcgcagctcgggcgccgcgcgagcctgtcgccgctatgcctccgcgcgcgccgcctgcgcccgggccccggccgccgccccgggccgccgccgccaccgacaccgccgcgggcgcggggggcgcggggggcgcggggggcgccggcgggcccgggttccggccgctcgcgccgcgtccctggcgctggctgctgctgctggcgctgcctgccgcctgctccgcgcccccgccgcgccccgtctacaccaaccactgggcggtgcaagtgctgggcggcccggccgaggcggaccgcgtggcggcggcgcacgggtacctcaacttgggccagattggaaacctggaagattactaccatttttatcacagcaaaacctttaaaagatcaaccttgagtagcagaggccctcacaccttcctcagaatggacccccaggtgaaatggctccagcaacaggaagtgaaacgaagggtgaagagacaggtgcgaagtgacccgcaggccctttacttcaacgaccccatttggtccaacatgtggtacctgcattgtggcgacaagaacagtcgctgccggtcggaaatgaatgtccaggcagcgtggaagaggggctacacaggaaaaaacgtggtggtcaccatccttgatgatggcatagagagaaatcaccctgacctggccccaaattatgattcctacgccagctacgacgtgaacggcaatgattatgacccatctccacgatatgatgccagcaatgaaaataaacacggcactcgttgtgcgggagaagttgctgcttcagcaaacaattcctactgcatcgtgggcatagcgtacaatgccaaaataggaggcatccgcatgctggacggcgatgtcacagatgtggtcgaggcaaagtcgctgggcatcagacccaactacatcgacatttacagtgccagctgggggccggacgacgacggcaagacggtggacgggcccggccgactggctaagcaggctttcgagtatggcattaaaaagggccggcagggcctgggctccattttcgtctgggcatctgggaatggcgggagagagggggactactgctcgtgcgatggctacaccaacagcatctacaccatctccgtcagcagcgccaccgagaatggctacaagccctggtacctggaagagtgtgcctccaccctggccaccacctacagcagtggggccttttatgagcgaaaaatcgtcaccacggatctgcgtcagcgctgtaccgatggccacactgggacctcagtctctgcccccatggtggcgggcatcatcgccttggctctagaagcaaacagccagttaacctggagggacgtccagcacctgctagtgaagacatcccggccggcccacctgaaagcgagcgactggaaagtgaacggcgcgggtcataaagttagccatttctatggatttggtttggtggacgcagaagctctcgttgtggaggcaaagaagtggacagcagtgccatcgcagcacatgtgtgtggccgcctcggacaagagacccaggagcatccccttagtgcaggtgctgcggactacggccctgaccagcgcctgcgcggagcactcggaccagcgggtggtctacttggagcacgtggtggttcgcacctccatctcacacccacgccgaggagacctccagatctacctggtttctccctcgggaaccaagtctcaacttctggcaaagaggttgctggatctttccaatgaagggtttacaaactgggaattcatgactgtccactgctggggagaaaaggctgaagggcagtggaccttggaaatccaagatctgccatcccaggtccgcaacccggagaagcaagggaagttgaaagaatggagcctcatactgtatggcacagcagagcacccgtaccacaccttcagtgcccatcagtcccgctcgcggatgctggagctctcagccccagagctggagccacccaaggctgccctgtcaccctcccaggtggaagttcctgaagatgaggaagattacacaggtgtgtgccatccggagtgtggtgacaaaggctgtgatggccccaatgcagaccagtgcttgaactgcgtccacttcagcctggggagtgtcaagaccagcaggaagtgcgtgagtgtgtgccccttgggctactttggggacacagcagcaagacgctgtcgccggtgccacaaggggtgtgagacctgctccagcagagctgcgacgcagtgcctgtcttgccgccgcgggttctatcaccaccaggagatgaacacctgtgtgaccctctgtcctgcaggattttatgctgatgaaagtcagaaaaattgccttaaatgccacccaagctgtaaaaagtgcgtggatgaacctgagaaatgtactgtctgtaaagaaggattcagccttgcacggggcagctgcattcctgactgtgagccaggcacctactttgactcagagctgatcagatgtggggaatgccatcacacctgcggaacctgcgtggggccaggcagagaagagtgcattcactgtgcgaaaaacttccacttccacgactggaagtgtgtgccagcctgtggtgagggcttctacccagaagagatgccgggcttgccccacaaagtgtgtcgaaggtgtgacgagaactgcttgagctgtgcaggctccagcaggaactgtagcaggtgtaagacgggcttcacacagctggggacctcctgcatcaccaaccacacgtgcagcaacgctgacgagacattctgcgagatggtgaagtccaaccggctgtgcgaacggaagctcttcattcagttctgctgccgcacgtgcctcctggccgggtaagggtgcctagctgcccacagagggcaggcactcccatccatccatccgtccaccttcctccagactgtcggccagagtctgtttcaggagcggcgccctgcacctgacagctttatctccccaggagcagcatctctgagcacccaagccaggtgggtggtggctcttaaggaggtgttcctaaaatggtgatatcctctcaaatgctgcttgttggctccagtcttccgacaaactaacaggaacaaaatgaattctgggaatccacagctctggctttggagcagcttctgggaccataagtttactgaatcttcaagaccaaagcagaaaagaaaggcgcttggcatcacacatcactcttctccccgtgcttttctgcggctgtgtagtaaatctccccggcccagctggcgaaccctgggccatcctcacatgtgacaaagggccagcagtctacctgctcgttgcctgccactgagcagtctggggacggtttggtcagactataaataagataggtttgagggcataaaatgtatgaccactggggccggagtatctatttctacatagtcagctacttctgaaactgcagcagtggcttagaaagtccaattccaaagccagaccagaagattctatcccccgcagcgctctcctttgagcaagccgagctctccttgttaccgtgttctgtctgtgtcttcaggagtctcatggcctgaacgaccacctcgacctgatgcagagccttctgaggagaggcaacaggaggcattctgtggccagccaaaaggtaccccgatggccaagcaattcctctgaacaaaatgtaaagccagccatgcattgttaatcatccatcacttcccattttatggaattgcttttaaaatacatttggcctctgcccttcagaagactcgtttttaaggtggaaactcctgtgtctgtgtatattacaagcctacatgacacagttggatttattctgccaaacctgtgtaggcattttataagctacatgttctaatttttaccgatgttaattattttgacaaatatttcatatattttcattgaaatgcacagatctgcttgatcaattcccttgaatagggaagtaacatttgccttaaattttttcgacctcgtctttctccatattgtcctgctcccctgtttgacgacagtgcatttgccttgtcacctgtgagctggagagaacccagatgttgtttattgaatctacaactctgaaagagaaatcaatgaagcaagtacaatgttaaccctaaattaataaaagagttaacatcccatggcaaaaaa

SEQ ID NO: 1531 - protein, 956 aa, Homo sapiens
MPPRAPPAPGPRPPPRAAAATDTAAGAGGAGGAGGAGGPGFRPLAPRPWRWLLLLALPAACSAPPPRPVYTNHWAVQVLGGPAEADRVAAAHGYLNLGQIGNLEDYYHFYHSKTFKRSTLSSRGPHTFLRMDPQVKWLQQQEVKRRVKRQVRSDPQALYFNDPIWSNMWYLHCGDKNSRCRSEMNVQAAWKRGYTGKNVVVTILDDGIERNHPDLAPNYDSYASYDVNGNDYDPSPRYDASNENKHGTRCAGEVAASANNSYCIVGIAYNAKIGGIRMLDGDVTDVVEAKSLGIRPNYIDIYSASWGPDDDGKTVDGPGRLAKQAFEYGIKKGRQGLGSIFVWASGNGGREGDYCSCDGYTNSIYTISVSSATENGYKPWYLEECASTLATTYSSGAFYERKIVTTDLRQRCTDGHTGTSVSAPMVAGIIALALEANSQLTWRDVQHLLVKTSRPAHLKASDWKVNGAGHKVSHFYGFGLVDAEALVVEAKKWTAVPSQHMCVAASDKRPRSIPLVQVLRTTALTSACAEHSDQRVVYLEHVVVRTSISHPRRGDLQIYLVSPSGTKSQLLAKRLLDLSNEGFTNWEFMTVHCWGEKAEGQWTLEIQDLPSQVRNPEKQGKLKEWSLILYGTAEHPYHTFSAHQSRSRMLELSAPELEPPKAALSPSQVEVPEDEEDYTGVCHPECGDKGCDGPNADQCLNCVHFSLGSVKTSRKCVSVCPLGYFGDTAARRCRRCHKGCETCSSRAATQCLSCRRGFYHHQEMNTCVTLCPAGFYADESQKNCLKCHPSCKKCVDEPEKCTVCKEGFSLARGSCIPDCEPGTYFDSELIRCGECHHTCGTCVGPGREECIHCAKNFHFHDWKCVPACGEGFYPEEMPGLPHKVCRRCDENCLSCAGSSRNCSRCKTGFTQLGTSCITNHTCSNADETFCEMVKSNRLCERKLFIQFCCRTCLLAG

SEQ ID NO: 1532 - DNA, 3372 bp, Homo sapiens
tcgcgggccgaggacgcctctggggcggcaccgcgtcccgagagccccagaagtcggcggggaagtttccccggtggggggcgtttcgggcctcccggacggctctcggccccggagcccggtcgcaggagcgcgggcccgggggcgggaacgcgccgcggccgcctcctcctccccggctcccgcccgcggcggtgttggcggcggcggtggcggcggcggcggcgcttccccggcgcggagcggctttaaaaggcggcactccaccccccggcgcactcgcagctcgggcgccgcgcgagcctgtcgccgctatgcctccgcgcgcgccgcctgcgcccgggccccggccgccgccccgggccgccgccgccaccgacaccgccgcgggcgcggggggcgcggggggcgcggggggcgccggcgggcccgggttccggccgctcgcgccgcgtccctggcgctggctgctgctgctggcgctgcctgccgcctgctccgcgcccccgccgcgccccgtctacaccaaccactgggcggtgcaagtgctgggcggcccggccgaggcggaccgcgtggcggcggcgcacgggtacctcaacttgggccagattggaaacctggaagattactaccatttttatcacagcaaaacctttaaaagatcaaccttgagtagcagaggccctcacaccttcctcagaatggacccccaggtgaaatggctccagcaacaggaagtgaaacgaagggtgaagagacaggtgcgaagtgacccgcaggccctttacttcaacgaccccatttggtccaacatgtggtacctgcattgtggcgacaagaacagtcgctgccggtcggaaatgaatgtccaggcagcgtggaagaggggctacacaggaaaaaacgtggtggtcaccatccttgatgatggcatagagagaaatcaccctgacctggccccaaattatgattcctacgccagctacgacgtgaacggcaatgattatgacccatctccacgatatgatgccagcaatgaaaataaacacggcactcgttgtgcgggagaagttgctgcttcagcaaacaattcctactgcatcgtgggcatagcgtacaatgccaaaataggaggcatccgcatgctggacggcgatgtcacagatgtggtcgaggcaaagtcgctgggcatcagacccaactacatcgacatttacagtgccagctgggggccggacgacgacggcaagacggtggacgggcccggccgactggctaagcaggctttcgagtatggcattaaaaagggccggcagggcctgggctccattttcgtctgggcatctgggaatggcgggagagagggggactactgctcgtgcgatggctacaccaacagcatctacaccatctccgtcagcagcgccaccgagaatggctacaagccctggtacctggaagagtgtgcctccaccctggccaccacctacagcagtggggccttttatgagcgaaaaatcgtcaccacggatctgcgtcagcgctgtaccgatggccacactgggacctcagtctctgcccccatggtggcgggcatcatcgccttggctctagaagcaaacagccagttaacctggagggacgtccagcacctgctagtgaagacatcccggccggcccacctgaaagcgagcgactggaaagtgaacggcgcgggtcataaagttagccatttctatggatttggtttggtggacgcagaagctctcgttgtggaggcaaagaagtggacagcagtgccatcgcagcacatgtgtgtggccgcctcggacaagagacccaggagcatccccttagtgcaggtgctgcggactacggccctgaccagcgcctgcgcggagcactcggaccagcgggtggtctacttggagcacgtggtggttcgcacctccatctcacacccacgccgaggagacctccagatctacctggtttctccctcgggaaccaagtctcaacttctggcaaagaggttgctggatctttccaatgaagggtttacaaactgggaattcatgactgtccactgctggggagaaaaggctgaagggcagtggaccttggaaatccaagatctgccatcccaggtccgcaacccggagaagcaagggaagttgaaagaatggagcctcatactgtatggcacagcagagcacccgtaccacaccttcagtgcccatcagtcccgctcgcggatgctggagctctcagccccagagctggagccacccaaggctgccctgtcaccctcccaggtggaagttcctgaagatgaggaagattacacagctcaatccaccccaggctctgctaatattttacagaccagtgtgtgccatccggagtgtggtgacaaaggctgtgatggccccaatgcagaccagtgcttgaactgcgtccacttcagcctggggagtgtcaagaccagcaggaagtgcgtgagtgtgtgccccttgggctactttggggacacagcagcaagacgctgtcgccggtgccacaaggggtgtgagacctgctccagcagagctgcgacgcagtgcctgtcttgccgccgcgggttctatcaccaccaggagatgaacacctgtgtgaccctctgtcctgcaggattttatgctgatgaaagtcagaaaaattgccttaaatgccacccaagctgtaaaaagtgcgtggatgaacctgagaaatgtactgtctgtaaagaaggattcagccttgcacggggcagctgcattcctgactgtgagccaggcacctactttgactcagagctgatcagatgtggggaatgccatcacacctgcggaacctgcgtggggccaggcagagaagagtgcattcactgtgcgaaaaacttccacttccacgactggaagtgtgtgccagcctgtggtgagggcttctacccagaagagatgccgggcttgccccacaaagtgtgtcgaaggtacggtcctcctggcggggaacggcaggcagctgtgtccagcaaaggagtgcctggagggcagagtctggcagcatcttccccaggggccggggagggcatgttgcatcaccccactgtggacaggagcccatttacagagctgctgaggggccttcgtccctttgttcactggatgcatatttgttgggtccctgctgtgggcagacaccgtgcagcagcgggataagatgggaagcagaatagcaaggtgctcacaccccattggtggactacgcgggacgtccctgcccatgtcgcgctcagcatgcatcctttgcactgtcgataatcagagaaaccatgttttgggttaaaaa

SEQ ID NO: 1533 - protein, 975 aa, Homo sapiens
MPPRAPPAPGPRPPPRAAAATDTAAGAGGAGGAGGAGGPGFRPLAPRPWRWLLLLALPAACSAPPPRPVYTNHWAVQVLGGPAEADRVAAAHGYLNLGQIGNLEDYYHFYHSKTFKRSTLSSRGPHTFLRMDPQVKWLQQQEVKRRVKRQVRSDPQALYFNDPIWSNMWYLHCGDKNSRCRSEMNVQAAWKRGYTGKNVVVTILDDGIERNHPDLAPNYDSYASYDVNGNDYDPSPRYDASNENKHGTRCAGEVAASANNSYCIVGIAYNAKIGGIRMLDGDVTDVVEAKSLGIRPNYIDIYSASWGPDDDGKTVDGPGRLAKQAFEYGIKKGRQGLGSIFVWASGNGGREGDYCSCDGYTNSIYTISVSSATENGYKPWYLEECASTLATTYSSGAFYERKIVTTDLRQRCTDGHTGTSVSAPMVAGIIALALEANSQLTWRDVQHLLVKTSRPAHLKASDWKVNGAGHKVSHFYGFGLVDAEALVVEAKKWTAVPSQHMCVAASDKRPRSIPLVQVLRTTALTSACAEHSDQRVVYLEHVVVRTSISHPRRGDLQIYLVSPSGTKSQLLAKRLLDLSNEGFTNWEFMTVHCWGEKAEGQWTLEIQDLPSQVRNPEKQGKLKEWSLILYGTAEHPYHTFSAHQSRSRMLELSAPELEPPKAALSPSQVEVPEDEEDYTAQSTPGSANILQTSVCHPECGDKGCDGPNADQCLNCVHFSLGSVKTSRKCVSVCPLGYFGDTAARRCRRCHKGCETCSSRAATQCLSCRRGFYHHQEMNTCVTLCPAGFYADESQKNCLKCHPSCKKCVDEPEKCTVCKEGFSLARGSCIPDCEPGTYFDSELIRCGECHHTCGTCVGPGREECIHCAKNFHFHDWKCVPACGEGFYPEEMPGLPHKVCRRYGPPGGERQAAVSSKGVPGGQSLAASSPGAGEGMLHHPTVDRSPFTELLRGLRPFVHWMHICWVPAVGRHRAAAG

SEQ ID NO: 1534 - DNA, 3333 bp, Homo sapiens
tcgcgggccgaggacgcctctggggcggcaccgcgtcccgagagccccagaagtcggcggggaagtttccccggtggggggcgtttcgggcctcccggacggctctcggccccggagcccggtcgcaggagcgcgggcccgggggcgggaacgcgccgcggccgcctcctcctccccggctcccgcccgcggcggtgttggcggcggcggtggcggcggcggcggcgcttccccggcgcggagcggctttaaaaggcggcactccaccccccggcgcactcgcagctcgggcgccgcgcgagcctgtcgccgctatgcctccgcgcgcgccgcctgcgcccgggccccggccgccgccccgggccgccgccgccaccgacaccgccgcgggcgcggggggcgcggggggcgcggggggcgccggcgggcccgggttccggccgctcgcgccgcgtccctggcgctggctgctgctgctggcgctgcctgccgcctgctccgcgcccccgccgcgccccgtctacaccaaccactgggcggtgcaagtgctgggcggcccggccgaggcggaccgcgtggcggcggcgcacgggtacctcaacttgggccagattggaaacctggaagattactaccatttttatcacagcaaaacctttaaaagatcaaccttgagtagcagaggccctcacaccttcctcagaatggacccccaggtgaaatggctccagcaacaggaagtgaaacgaagggtgaagagacaggtgcgaagtgacccgcaggccctttacttcaacgaccccatttggtccaacatgtggtacctgcattgtggcgacaagaacagtcgctgccggtcggaaatgaatgtccaggcagcgtggaagaggggctacacaggaaaaaacgtggtggtcaccatccttgatgatggcatagagagaaatcaccctgacctggccccaaattatgattcctacgccagctacgacgtgaacggcaatgattatgacccatctccacgatatgatgccagcaatgaaaataaacacggcactcgttgtgcgggagaagttgctgcttcagcaaacaattcctactgcatcgtgggcatagcgtacaatgccaaaataggaggcatccgcatgctggacggcgatgtcacagatgtggtcgaggcaaagtcgctgggcatcagacccaactacatcgacatttacagtgccagctgggggccggacgacgacggcaagacggtggacgggcccggccgactggctaagcaggctttcgagtatggcattaaaaagggccggcagggcctgggctccattttcgtctgggcatctgggaatggcgggagagagggggactactgctcgtgcgatggctacaccaacagcatctacaccatctccgtcagcagcgccaccgagaatggctacaagccctggtacctggaagagtgtgcctccaccctggccaccacctacagcagtggggccttttatgagcgaaaaatcgtcaccacggatctgcgtcagcgctgtaccgatggccacactgggacctcagtctctgcccccatggtggcgggcatcatcgccttggctctagaagcaaacagccagttaacctggagggacgtccagcacctgctagtgaagacatcccggccggcccacctgaaagcgagcgactggaaagtgaacggcgcgggtcataaagttagccatttctatggatttggtttggtggacgcagaagctctcgttgtggaggcaaagaagtggacagcagtgccatcgcagcacatgtgtgtggccgcctcggacaagagacccaggagcatccccttagtgcaggtgctgcggactacggccctgaccagcgcctgcgcggagcactcggaccagcgggtggtctacttggagcacgtggtggttcgcacctccatctcacacccacgccgaggagacctccagatctacctggtttctccctcgggaaccaagtctcaacttctggcaaagaggttgctggatctttccaatgaagggtttacaaactgggaattcatgactgtccactgctggggagaaaaggctgaagggcagtggaccttggaaatccaagatctgccatcccaggtccgcaacccggagaagcaagggaagttgaaagaatggagcctcatactgtatggcacagcagagcacccgtaccacaccttcagtgcccatcagtcccgctcgcggatgctggagctctcagccccagagctggagccacccaaggctgccctgtcaccctcccaggtggaagttcctgaagatgaggaagattacacaggtgtgtgccatccggagtgtggtgacaaaggctgtgatggccccaatgcagaccagtgcttgaactgcgtccacttcagcctggggagtgtcaagaccagcaggaagtgcgtgagtgtgtgccccttgggctactttggggacacagcagcaagacgctgtcgccggtgccacaaggggtgtgagacctgctccagcagagctgcgacgcagtgcctgtcttgccgccgcgggttctatcaccaccaggagatgaacacctgtgtgaccctctgtcctgcaggattttatgctgatgaaagtcagaaaaattgccttaaatgccacccaagctgtaaaaagtgcgtggatgaacctgagaaatgtactgtctgtaaagaaggattcagccttgcacggggcagctgcattcctgactgtgagccaggcacctactttgactcagagctgatcagatgtggggaatgccatcacacctgcggaacctgcgtggggccaggcagagaagagtgcattcactgtgcgaaaaacttccacttccacgactggaagtgtgtgccagcctgtggtgagggcttctacccagaagagatgccgggcttgccccacaaagtgtgtcgaaggtacggtcctcctggcggggaacggcaggcagctgtgtccagcaaaggagtgcctggagggcagagtctggcagcatcttccccaggggccggggagggcatgttgcatcaccccactgtggacaggagcccatttacagagctgctgaggggccttcgtccctttgttcactggatgcatatttgttgggtccctgctgtgggcagacaccgtgcagcagcgggataagatgggaagcagaatagcaaggtgctcacaccccattggtggactacgcgggacgtccctgcccatgtcgcgctcagcatgcatcctttgcactgtcgataatcagagaaaccatgttttgggttaaaaa

SEQ ID NO: 1535 - protein, 962 aa, Homo sapiens
MPPRAPPAPGPRPPPRAAAATDTAAGAGGAGGAGGAGGPGFRPLAPRPWRWLLLLALPAACSAPPPRPVYTNHWAVQVLGGPAEADRVAAAHGYLNLGQIGNLEDYYHFYHSKTFKRSTLSSRGPHTFLRMDPQVKWLQQQEVKRRVKRQVRSDPQALYFNDPIWSNMWYLHCGDKNSRCRSEMNVQAAWKRGYTGKNVVVTILDDGIERNHPDLAPNYDSYASYDVNGNDYDPSPRYDASNENKHGTRCAGEVAASANNSYCIVGIAYNAKIGGIRMLDGDVTDVVEAKSLGIRPNYIDIYSASWGPDDDGKTVDGPGRLAKQAFEYGIKKGRQGLGSIFVWASGNGGREGDYCSCDGYTNSIYTISVSSATENGYKPWYLEECASTLATTYSSGAFYERKIVTTDLRQRCTDGHTGTSVSAPMVAGIIALALEANSQLTWRDVQHLLVKTSRPAHLKASDWKVNGAGHKVSHFYGFGLVDAEALVVEAKKWTAVPSQHMCVAASDKRPRSIPLVQVLRTTALTSACAEHSDQRVVYLEHVVVRTSISHPRRGDLQIYLVSPSGTKSQLLAKRLLDLSNEGFTNWEFMTVHCWGEKAEGQWTLEIQDLPSQVRNPEKQGKLKEWSLILYGTAEHPYHTFSAHQSRSRMLELSAPELEPPKAALSPSQVEVPEDEEDYTGVCHPECGDKGCDGPNADQCLNCVHFSLGSVKTSRKCVSVCPLGYFGDTAARRCRRCHKGCETCSSRAATQCLSCRRGFYHHQEMNTCVTLCPAGFYADESQKNCLKCHPSCKKCVDEPEKCTVCKEGFSLARGSCIPDCEPGTYFDSELIRCGECHHTCGTCVGPGREECIHCAKNFHFHDWKCVPACGEGFYPEEMPGLPHKVCRRYGPPGGERQAAVSSKGVPGGQSLAASSPGAGEGMLHHPTVDRSPFTELLRGLRPFVHWMHICWVPAVGRHRAAAG

SEQ ID NO: 1536 - DNA, 2302 bp, Homo sapiens
tcgcgggccgaggacgcctctggggcggcaccgcgtcccgagagccccagaagtcggcggggaagtttccccggtggggggcgtttcgggcctcccggacggctctcggccccggagcccggtcgcaggagcgcgggcccgggggcgggaacgcgccgcggccgcctcctcctccccggctcccgcccgcggcggtgttggcggcggcggtggcggcggcggcggcgcttccccggcgcggagcggctttaaaaggcggcactccaccccccggcgcactcgcagctcgggcgccgcgcgagcctgtcgccgctatgcctccgcgcgcgccgcctgcgcccgggccccggccgccgccccgggccgccgccgccaccgacaccgccgcgggcgcggggggcgcggggggcgcggggggcgccggcgggcccgggttccggccgctcgcgccgcgtccctggcgctggctgctgctgctggcgctgcctgccgcctgctccgcgcccccgccgcgccccgtctacaccaaccactgggcggtgcaagtgctgggcggcccggccgaggcggaccgcgtggcggcggcgcacgggtacctcaacttgggccagattggaaacctggaagattactaccatttttatcacagcaaaacctttaaaagatcaaccttgagtagcagaggccctcacaccttcctcagaatggacccccaggtgaaatggctccagcaacaggaagtgaaacgaagggtgaagagacaggtgcgaagtgacccgcaggccctttacttcaacgaccccatttggtccaacatgtggtacctgcattgtggcgacaagaacagtcgctgccggtcggaaatgaatgtccaggcagcgtggaagaggggctacacaggaaaaaacgtggtggtcaccatccttgatgatggcatagagagaaatcaccctgacctggccccaaattatgattcctacgccagctacgacgtgaacggcaatgattatgacccatctccacgatatgatgccagcaatgaaaataaacacggcactcgttgtgcgggagaagttgctgcttcagcaaacaattcctactgcatcgtgggcatagcgtacaatgccaaaataggaggcatccgcatgctggacggcgatgtcacagatgtggtcgaggcaaagtcgctgggcatcagacccaactacatcgacatttacagtgccagctgggggccggacgacgacggcaagacggtggacgggcccggccgactggctaagcaggctttcgagtatggcattaaaaagggccggcagggcctgggctccattttcgtctgggcatctgggaatggcgggagagagggggactactgctcgtgcgatggctacaccaacagcatctacaccatctccgtcagcagcgccaccgagaatggctacaagccctggtacctggaagagtgtgcctccaccctggccaccacctacagcagtggggccttttatgagcgaaaaatcgtcaccacggatctgcgtcagcgctgtaccgatggccacactgggacctcagtctctgcccccatggtggcgggcatcatcgccttggctctagaagcaaacagccagttaacctggagggacgtccagcacctgctagtgaagacatcccggccggcccacctgaaagcgagcgactggaaagtgaacggcgcgggtcataaaggtgcggcagtggcgttctggtggaccattgggtggccctggaatgtgtaggaaggggtgtcatgaattccttaaaaggactctccaaatagcattagttgttattattaattgtgtgtcacaagaatttaaaacgcatgtgcagctatttaagaaaagtatcccggaagctcacagtgacattacggaagaaccctcaggtcacaagagtctggggtctcctatactctataactttggccacaccgagacaccacctataccaatatttactcatagttctctttaagccaggagcaatgacgtgtgcctatagtcgcagctactagggaagttgaggcaggaggattgcttgagcccaggaatttgagtctagcctggacaacacagcaggactccatctcttaaaaaaaaaattacttcccccactacttttttttgacataaaaaaatgtattttaaaaggaaactgtactacatctagttaatcataggtttgatatgtagttacgtattttttctaatgtgcattaaaacaaatccataattattaaaataaatgttgtttgtgtgcc

SEQ ID NO: 1537 - protein, 487 aa, Homo sapiens
MPPRAPPAPGPRPPPRAAAATDTAAGAGGAGGAGGAGGPGFRPLAPRPWRWLLLLALPAACSAPPPRPVYTNHWAVQVLGGPAEADRVAAAHGYLNLGQIGNLEDYYHFYHSKTFKRSTLSSRGPHTFLRMDPQVKWLQQQEVKRRVKRQVRSDPQALYFNDPIWSNMWYLHCGDKNSRCRSEMNVQAAWKRGYTGKNVVVTILDDGIERNHPDLAPNYDSYASYDVNGNDYDPSPRYDASNENKHGTRCAGEVAASANNSYCIVGIAYNAKIGGIRMLDGDVTDVVEAKSLGIRPNYIDIYSASWGPDDDGKTVDGPGRLAKQAFEYGIKKGRQGLGSIFVWASGNGGREGDYCSCDGYTNSIYTISVSSATENGYKPWYLEECASTLATTYSSGAFYERKIVTTDLRQRCTDGHTGTSVSAPMVAGIIALALEANSQLTWRDVQHLLVKTSRPAHLKASDWKVNGAGHKGAAVAFWWTIGWPWNV

SEQ ID NO: 1538 - DNA, 3208 bp, Homo sapiens
tcgcgggccgaggacgcctctggggcggcaccgcgtcccgagagccccagaagtcggcggggaagtttccccggtggggggcgtttcgggcctcccggacggctctcggccccggagcccggtcgcaggagcgcgggcccgggggcgggaacgcgccgcggccgcctcctcctccccggctcccgcccgcggcggtgttggcggcggcggtggcggcggcggcggcgcttccccggcgcggagcggctttaaaaggcggcactccaccccccggcgcactcgcagctcgggcgccgcgcgagcctgtcgccgctatgcctccgcgcgcgccgcctgcgcccgggccccggccgccgccccgggccgccgccgccaccgacaccgccgcgggcgcggggggcgcggggggcgcggggggcgccggcgggcccgggttccggccgctcgcgccgcgtccctggcgctggctgctgctgctggcgctgcctgccgcctgctccgcgcccccgccgcgccccgtctacaccaaccactgggcggtgcaagtgctgggcggcccggccgaggcggaccgcgtggcggcggcgcacgggtacctcaacttgggccagattggaaacctggaagattactaccatttttatcacagcaaaacctttaaaagatcaaccttgagtagcagaggccctcacaccttcctcagaatggacccccaggtgaaatggctccagcaacaggaagtgaaacgaagggtgaagagacaggtgcgaagtgacccgcaggccctttacttcaacgaccccatttggtccaacatgtggtacctgcattgtggcgacaagaacagtcgctgccggtcggaaatgaatgtccaggcagcgtggaagaggggctacacaggaaaaaacgtggtggtcaccatccttgatgatggcatagagagaaatcaccctgacctggccccaaattatgattcctacgccagctacgacgtgaacggcaatgattatgacccatctccacgatatgatgccagcaatgaaaataaacacggcactcgttgtgcgggagaagttgctgcttcagcaaacaattcctactgcatcgtgggcatagcgtacaatgccaaaataggaggcatccgcatgctggacggcgatgtcacagatgtggtcgaggcaaagtcgctgggcatcagacccaactacatcgacatttacagtgccagctgggggccggacgacgacggcaagacggtggacgggcccggccgactggctaagcaggctttcgagtatggcattaaaaagggccggcagggcctgggctccattttcgtctgggcatctgggaatggcgggagagagggggactactgctcgtgcgatggctacaccaacagcatctacaccatctccgtcagcagcgccaccgagaatggctacaagccctggtacctggaagagtgtgcctccaccctggccaccacctacagcagtggggccttttatgagcgaaaaatcgtcaccacggatctgcgtcagcgctgtaccgatggccacactgggacctcagtctctgcccccatggtggcgggcatcatcgccttggctctagaagcaaacagccagttaacctggagggacgtccagcacctgctagtgaagacatcccggccggcccacctgaaagcgagcgactggaaagtgaacggcgcgggtcataaagttagccatttctatggatttggtttggtggacgcagaagctctcgttgtggaggcaaagaagtggacagcagtgccatcgcagcacatgtgtgtggccgcctcggacaagagacccaggagcatccccttagtgcaggtgctgcggactacggccctgaccagcgcctgcgcggagcactcggaccagcgggtggtctacttggagcacgtggtggttcgcacctccatctcacacccacgccgaggagacctccagatctacctggtttctccctcgggaaccaagtctcaacttctggcaaagaggttgctggatctttccaatgaagggtttacaaactgggaattcatgactgtccactgctggggagaaaaggctgaagggcagtggaccttggaaatccaagatctgccatcccaggtccgcaacccggagaagcaagggaacctggactaaaacacgtgttccggtggcagattgaacaagagctttggtaatctctgtgaaatactgcagagggacagatgaccaaagccaccacatttagaactttggctgcctttggaagtccagagctggatctctcagctcccgcccccagaggctcagcactttggacatggctcacaaacagttgttgattgactgcatgaatgcgtgtgcgtgcaagcatgaaccttgtttaaatcaagagcttacataattttaaccagttctgtcttcagctgtacatactcagtaaaatgtttaatgaaggggaagagattagtctcttctgtgtgaccatgttttccctttattcatcctaaaaagttccatgaattcttgatttcctttcagtggccctttcaacaatgtcttttttcccaagagcataactgttctcattttattgctagccatcttgatctgtgttttattgacatctcttttgagctaatcttcatttctaagataagagttgagattttgcaatctgtgttcgatggctcaatctatcctgtgcttgatgctagaaaggaagacagatttaaagcacatgccttctgtgccggctttcaagtttgtcactaaactctcatttctggaaagtgcaattatagagtatcactcccacttccttggaaacagagctgaagaacttggcacactctccaaacagtcaccatacacactgttgtcaaaaagttccatttttaaccccatttgcattaatattgcagtcaatctctttacctccttttctctttcacggggccgtgacagtgacgcctttccccaaaactctcctcgtttgagaaaaaaagaagtatgtatccccacttatctcggggagaaatgcaaccaactgctgctgtgcacatttatgaatcacagtattgtttagtcggttctgtatctccagtagaaagcataacaaaaagatgacctttgtctcacctcatagctaatttttgcaaataaaatactaaacattg

SEQ ID NO: 1539 - protein, 623 aa, Homo sapiens
MPPRAPPAPGPRPPPRAAAATDTAAGAGGAGGAGGAGGPGFRPLAPRPWRWLLLLALPAACSAPPPRPVYTNHWAVQVLGGPAEADRVAAAHGYLNLGQIGNLEDYYHFYHSKTFKRSTLSSRGPHTFLRMDPQVKWLQQQEVKRRVKRQVRSDPQALYFNDPIWSNMWYLHCGDKNSRCRSEMNVQAAWKRGYTGKNVVVTILDDGIERNHPDLAPNYDSYASYDVNGNDYDPSPRYDASNENKHGTRCAGEVAASANNSYCIVGIAYNAKIGGIRMLDGDVTDVVEAKSLGIRPNYIDIYSASWGPDDDGKTVDGPGRLAKQAFEYGIKKGRQGLGSIFVWASGNGGREGDYCSCDGYTNSIYTISVSSATENGYKPWYLEECASTLATTYSSGAFYERKIVTTDLRQRCTDGHTGTSVSAPMVAGIIALALEANSQLTWRDVQHLLVKTSRPAHLKASDWKVNGAGHKVSHFYGFGLVDAEALVVEAKKWTAVPSQHMCVAASDKRPRSIPLVQVLRTTALTSACAEHSDQRVVYLEHVVVRTSISHPRRGDLQIYLVSPSGTKSQLLAKRLLDLSNEGFTNWEFMTVHCWGEKAEGQWTLEIQDLPSQVRNPEKQGNLD

SEQ ID NO: 1540 - DNA, 3254 bp, Homo sapiens
tcgcgggccgaggacgcctctggggcggcaccgcgtcccgagagccccagaagtcggcggggaagtttccccggtggggggcgtttcgggcctcccggacggctctcggccccggagcccggtcgcaggagcgcgggcccgggggcgggaacgcgccgcggccgcctcctcctccccggctcccgcccgcggcggtgttggcggcggcggtggcggcggcggcggcgcttccccggcgcggagcggctttaaaaggcggcactccaccccccggcgcactcgcagctcgggcgccgcgcgagcctgtcgccgctatgcctccgcgcgcgccgcctgcgcccgggccccggccgccgccccgggccgccgccgccaccgacaccgccgcgggcgcggggggcgcggggggcgcggggggcgccggcgggcccgggttccggccgctcgcgccgcgtccctggcgctggctgctgctgctggcgctgcctgccgcctgctccgcgcccccgccgcgccccgtctacaccaaccactgggcggtgcaagtgctgggcggcccggccgaggcggaccgcgtggcggcggcgcacgggtacctcaacttgggccagattggaaacctggaagattactaccatttttatcacagcaaaacctttaaaagatcaaccttgagtagcagaggccctcacaccttcctcagaatggacccccaggtgaaatggctccagcaacaggaagtgaaacgaagggtgaagagacaggtgcgaagtgacccgcaggccctttacttcaacgaccccatttggtccaacatgtggtacctgcattgtggcgacaagaacagtcgctgccggtcggaaatgaatgtccaggcagcgtggaagaggggctacacaggaaaaaacgtggtggtcaccatccttgatgatggcatagagagaaatcaccctgacctggccccaaattatgattcctacgccagctacgacgtgaacggcaatgattatgacccatctccacgatatgatgccagcaatgaaaataaacacggcactcgttgtgcgggagaagttgctgcttcagcaaacaattcctactgcatcgtgggcatagcgtacaatgccaaaataggaggcatccgcatgctggacggcgatgtcacagatgtggtcgaggcaaagtcgctgggcatcagacccaactacatcgacatttacagtgccagctgggggccggacgacgacggcaagacggtggacgggcccggccgactggctaagcaggctttcgagtatggcattaaaaagggccggcagggcctgggctccattttcgtctgggcatctgggaatggcgggagagagggggactactgctcgtgcgatggctacaccaacagcatctacaccatctccgtcagcagcgccaccgagaatggctacaagccctggtacctggaagagtgtgcctccaccctggccaccacctacagcagtggggccttttatgagcgaaaaatcgtcaccacggatctgcgtcagcgctgtaccgatggccacactgggacctcagtctctgcccccatggtggcgggcatcatcgccttggctctagaagcaaacagccagttaacctggagggacgtccagcacctgctagtgaagacatcccggccggcccacctgaaagcgagcgactggaaagtgaacggcgcgggtcataaagttagccatttctatggatttggtttggtggacgcagaagctctcgttgtggaggcaaagaagtggacagcagtgccatcgcagcacatgtgtgtggccgcctcggacaagagacccaggagcatccccttagtgcaggtgctgcggactacggccctgaccagcgcctgcgcggagcactcggaccagcgggtggtctacttggagcacgtggtggttcgcacctccatctcacacccacgccgaggagacctccagatctacctggtttctccctcgggaaccaagtctcaacttctggcaaagaggttgctggatctttccaatgaagggtttacaaactgggaattcatgactgtccactgctggggagaaaaggctgaagggcagtggaccttggaaatccaagatctgccatcccaggtccgcaacccggagaagcaaggtgatcttgagactcctgttgcaaatcaactgaccacagaagagagggaacctggactaaaacacgtgttccggtggcagattgaacaagagctttggtaatctctgtgaaatactgcagagggacagatgaccaaagccaccacatttagaactttggctgcctttggaagtccagagctggatctctcagctcccgcccccagaggctcagcactttggacatggctcacaaacagttgttgattgactgcatgaatgcgtgtgcgtgcaagcatgaaccttgtttaaatcaagagcttacataattttaaccagttctgtcttcagctgtacatactcagtaaaatgtttaatgaaggggaagagattagtctcttctgtgtgaccatgttttccctttattcatcctaaaaagttccatgaattcttgatttcctttcagtggccctttcaacaatgtcttttttcccaagagcataactgttctcattttattgctagccatcttgatctgtgttttattgacatctcttttgagctaatcttcatttctaagataagagttgagattttgcaatctgtgttcgatggctcaatctatcctgtgcttgatgctagaaaggaagacagatttaaagcacatgccttctgtgccggctttcaagtttgtcactaaactctcatttctggaaagtgcaattatagagtatcactcccacttccttggaaacagagctgaagaacttggcacactctccaaacagtcaccatacacactgttgtcaaaaagttccatttttaaccccatttgcattaatattgcagtcaatctctttacctccttttctctttcacggggccgtgacagtgacgcctttccccaaaactctcctcgtttgagaaaaaaagaagtatgtatccccacttatctcggggagaaatgcaaccaactgctgctgtgcacatttatgaatcacagtattgtttagtcggttctgtatctccagtagaaagcataacaaaaagatgacctttgtctcacctcatagctaatttttgcaaataaaatactaaacattg

SEQ ID NO: 1541 - protein, 652 aa, Homo sapiens
MPPRAPPAPGPRPPPRAAAATDTAAGAGGAGGAGGAGGPGFRPLAPRPWRWLLLLALPAACSAPPPRPVYTNHWAVQVLGGPAEADRVAAAHGYLNLGQIGNLEDYYHFYHSKTFKRSTLSSRGPHTFLRMDPQVKWLQQQEVKRRVKRQVRSDPQALYFNDPIWSNMWYLHCGDKNSRCRSEMNVQAAWKRGYTGKNVVVTILDDGIERNHPDLAPNYDSYASYDVNGNDYDPSPRYDASNENKHGTRCAGEVAASANNSYCIVGIAYNAKIGGIRMLDGDVTDVVEAKSLGIRPNYIDIYSASWGPDDDGKTVDGPGRLAKQAFEYGIKKGRQGLGSIFVWASGNGGREGDYCSCDGYTNSIYTISVSSATENGYKPWYLEECASTLATTYSSGAFYERKIVTTDLRQRCTDGHTGTSVSAPMVAGIIALALEANSQLTWRDVQHLLVKTSRPAHLKASDWKVNGAGHKVSHFYGFGLVDAEALVVEAKKWTAVPSQHMCVAASDKRPRSIPLVQVLRTTALTSACAEHSDQRVVYLEHVVVRTSISHPRRGDLQIYLVSPSGTKSQLLAKRLLDLSNEGFTNWEFMTVHCWGEKAEGQWTLEIQDLPSQVRNPEKQGDLETPVANQLTTEEREPGLKHVFRWQIEQELW

SEQ ID NO: 1542 - DNA, 2358 bp, Homo sapiens
tcgcgggccgaggacgcctctggggcggcaccgcgtcccgagagccccagaagtcggcggggaagtttccccggtggggggcgtttcgggcctcccggacggctctcggccccggagcccggtcgcaggagcgcgggcccgggggcgggaacgcgccgcggccgcctcctcctccccggctcccgcccgcggcggtgttggcggcggcggtggcggcggcggcggcgcttccccggcgcggagcggctttaaaaggcggcactccaccccccggcgcactcgcagctcgggcgccgcgcgagcctgtcgccgctatgcctccgcgcgcgccgcctgcgcccgggccccggccgccgccccgggccgccgccgccaccgacaccgccgcgggcgcggggggcgcggggggcgcggggggcgccggcgggcccgggttccggccgctcgcgccgcgtccctggcgctggctgctgctgctggcgctgcctgccgcctgctccgcgcccccgccgcgccccgtctacaccaaccactgggcggtgcaagtgctgggcggcccggccgaggcggaccgcgtggcggcggcgcacgggtacctcaacttgggccagattggaaacctggaagattactaccatttttatcacagcaaaacctttaaaagatcaaccttgagtagcagaggccctcacaccttcctcagaatggacccccaggtgaaatggctccagcaacaggaagtgaaacgaagggtgaagagacaggtgcgaagtgacccgcaggccctttacttcaacgaccccatttggtccaacatgtggtacctgcattgtggcgacaagaacagtcgctgccggtcggaaatgaatgtccaggcagcgtggaagaggggctacacaggaaaaaacgtggtggtcaccatccttgatgatggcatagagagaaatcaccctgacctggccccaaattatgattcctacgccagctacgacgtgaacggcaatgattatgacccatctccacgatatgatgccagcaatgaaaataaacacggcactcgttgtgcgggagaagttgctgcttcagcaaacaattcctactgcatcgtgggcatagcgtacaatgccaaaataggaggcatccgcatgctggacggcgatgtcacagatgtggtcgaggcaaagtcgctgggcatcagacccaactacatcgacatttacagtgccagctgggggccggacgacgacggcaagacggtggacgggcccggccgactggctaagcaggctttcgagtatggcattaaaaagggccggcagggcctgggctccattttcgtctgggcatctgggaatggcgggagagagggggactactgctcgtgcgatggctacaccaacagcatctacaccatctccgtcagcagcgccaccgagaatggctacaagccctggtacctggaagagtgtgcctccaccctggccaccacctacagcagtggggccttttatgagcgaaaaatcgtcaccacggatctgcgtcagcgctgtaccgatggccacactgggacctcagtctctgcccccatggtggcgggcatcatcgccttggctctagaagcaaacagccagttaacctggagggacgtccagcacctgctagtgaagacatcccggccggcccacctgaaagcgagcgactggaaagtgaacggcgcgggtcataaagttagccatttctatggatttggtttggtggacgcagaagctctcgttgtggaggcaaagaagtggacagcagtgccatcgcagcacatgtgtgtggccgcctcggacaagagacccaggagcatccccttagtgcaggtgctgcggactacggccctgaccagcgcctgcgcggagcactcggaccagcgggtggtctacttggagcacgtggtggttcgcacctccatctcacacccacgccgaggagacctccagatctacctggtttctccctcgggaaccaagtctcaacttctggcaaagaggttgctggatctttccaatgaagggtttacaaactgggaattcatgactgtccactgctggggagaaaaggctgaagggcagtggaccttggaaatccaagatctgccatcccaggtccgcaacccggagaagcaaggtgatcttgagactcctgttgcaaatcaactgaccacagaagagaggttcgtttccacactctcgattctgttccattggtctgtatatctatcttggagtcagtaccatattgttttgatcactgtagctttgtagtaagttttgaaataagaaagtgcgagtcctccaaaaaaaaaaaaaaaaa

SEQ ID NO: 1543 - protein, 664 aa, Homo sapiens
MPPRAPPAPGPRPPPRAAAATDTAAGAGGAGGAGGAGGPGFRPLAPRPWRWLLLLALPAACSAPPPRPVYTNHWAVQVLGGPAEADRVAAAHGYLNLGQIGNLEDYYHFYHSKTFKRSTLSSRGPHTFLRMDPQVKWLQQQEVKRRVKRQVRSDPQALYFNDPIWSNMWYLHCGDKNSRCRSEMNVQAAWKRGYTGKNVVVTILDDGIERNHPDLAPNYDSYASYDVNGNDYDPSPRYDASNENKHGTRCAGEVAASANNSYCIVGIAYNAKIGGIRMLDGDVTDVVEAKSLGIRPNYIDIYSASWGPDDDGKTVDGPGRLAKQAFEYGIKKGRQGLGSIFVWASGNGGREGDYCSCDGYTNSIYTISVSSATENGYKPWYLEECASTLATTYSSGAFYERKIVTTDLRQRCTDGHTGTSVSAPMVAGIIALALEANSQLTWRDVQHLLVKTSRPAHLKASDWKVNGAGHKVSHFYGFGLVDAEALVVEAKKWTAVPSQHMCVAASDKRPRSIPLVQVLRTTALTSACAEHSDQRVVYLEHVVVRTSISHPRRGDLQIYLVSPSGTKSQLLAKRLLDLSNEGFTNWEFMTVHCWGEKAEGQWTLEIQDLPSQVRNPEKQGDLETPVANQLTTEERFVSTLSILFHWSVYLSWSQYHIVLITVAL

SEQ ID NO: 1544 - DNA, 127 bp, Homo sapiens
gttggttgaaaatcgcccccggctttggccgtggccgcgggtgagattcggcgcccagagcccccgggggcctcagctcaccgcgcgctgccccatgtgcggcggtgaaacccaggccccgacaggc

SEQ ID NO: 1545 - DNA, 796 bp, Homo sapiens
cgcagatcatgggtggcgggtatgatctcaacctcttcgccagccctcctgacagcaacttcgtgtgctccgtctgccatggggttctcaagaggccagcaaggttgccatgcagccacatcttctgcaaaaagtgcatcctccggtggctagccagacaaaagacctgtccgtgctgtaggaaagaggtgaaaaggaaaaaggttgtccacatgaataaactccggaaaaccattggccgcctggaagtcaagtgcaagaacgccgacgctggctgcatagtgacatgccccctggcccatcgcaaggggcaccaggactcatgcccctttgagctaacggcctgccccaacgagggctgcacctcgcaggtgccgcgtgggaccctggcagagcaccggcagcattgccagcaagggtcccagcagcgctgccccctgggctgcggggccaccctggacccggccgagcgtgctcgccacaactgctaccgggagctgcacaacgcctggagcgtgcgccaggagcgccgtcggcccctgctgctgtccctcctgcggcgtgtgcgctggctggaccaagccaccagtgtcgttcgtagagagctggcggagctcagcaacttcctggaggaagacaccgctctgctggagggtgccccacaggaggaggccgaggctgccccagaaggcaacgttggggctgaggtggtgggggagcccagggccaacataccttgtaaataggtaaataaaagcagacccccggcctgcctgcctctgtgcctgcggccctc

SEQ ID NO: 1546 - protein, 245 aa, Homo sapiens
MGGGYDLNLFASPPDSNFVCSVCHGVLKRPARLPCSHIFCKKCILRWLARQKTCPCCRKEVKRKKVVHMNKLRKTIGRLEVKCKNADAGCIVTCPLAHRKGHQDSCPFELTACPNEGCTSQVPRGTLAEHRQHCQQGSQQRCPLGCGATLDPAERARHNCYRELHNAWSVRQERRRPLLLSLLRRVRWLDQATSVVRRELAELSNFLEEDTALLEGAPQEEAEAAPEGNVGAEVVGEPRANIPCK

SEQ ID NO: 1547 - DNA, 2618 bp, Homo sapiens
gggagtgtggcgttctgtgaagagttcggtgctaacctccctcacgcggcggtggctgccgggaccctagcaggtttcagctggagcggcggcggcggcaacatggcagagaccgcggccggagtgggccgcttcaagaccaactatgctgtggagcgcaaaattgagcctttctacaagggcggaaaagcacagctggaccagactggccagcacctcttctgcgtctgtggcaccagagtcaacattctggaagtggcctcgggggccgtgctgcggagtctggagcaggaggaccaggaggacatcactgcctttgacctcagccctgacaacgaggtgctggtgacagccagtcgggcattgctgctggctcagtgggcctggcaagagggcagcgttacccgcctgtggaaggcgatacacacggcccccgtggccaccatggccttcgaccccacctccactctgctagccacaggtggctgtgatggggccgtgcgcgtctgggacatcgtgcggcactacgggacacaccacttccgaggctcgcccggtgtcgtgcacctagtggccttccacccggaccctacacgcctgctgctcttctcctcggccacggatgccgccatccgcgtgtggtcactgcaggaccggtcatgcctggctgtgctgactgcccactacagcgccgtcacctcactggccttcagcgccgacggccacaccatgctcagctccggccgtgacaagatatgtatcatctgggaccttcagagctgccaggccacgaggaccgtgcctgtgtttgagagcgtggaggctgctgtgctgttgccagaggagccagtgtcccagctgggtgtgaagtccccagggctgtactttctgacagctggcgaccaaggcactctgcgcgtgtgggaggcagcttctgggcagtgtgtgtacacgcaggcccagccgccgggccctgggcaggagctgacccactgcaccctggcacacaccgccggcgtggtcctcaccgccaccgccgaccacaacctgttgctctacgaggctcgctccctgcggctgcagaaacagttcgctggctacagtgaggaggttttggatgtccggtttcttgggcccgaggactcccacgttgtcgtggcctccaatagcccctgcctaaaagtgtttgagctgcagacgtcagcctgccagatcctccacggccacacggatatcgtcctggccctggatgtgttccggaaggggtggctctttgccagctgtgccaaggatcagagcgtccgtatctggagaatgaacaaggctggccaggtgatgtgcgtggctcagggttccggtcacacacacagtgtgggcaccgtctgctgctctaggctgaaggagtccttcctggtgacaggcagccaggactgcactgtgaagctgtggcctcttcccaaagccttgctgtccaagaacacagccccagacaacggccctatcctcctgcaggcccagaccactcagcgctgccatgataaggacatcaacagcgtggctattgcccccaacgacaagctgctggccacaggctcacaggaccgcacggccaagctctgggccctgccacagtgccagctgctgggtgtcttctcaggccaccggcgtggcctctggtgcgtccagttctctcccatggaccaggtgctggccacggcctcagctgatggcaccatcaagctctgggcactccaggacttcagctgtctcaagacatttgaggggcacgatgcttctgtgctgaaggtggcctttgtgagccgtggcacgcagctgctgtccagcggttcggatggcctcgtgaagctctggaccatcaagaacaacgagtgtgtgcggacgctggatgcccacgaggacaaggtctgggggctgcactgcagccggctggacgaccacgccctcactggggccagtgactcccgagtcatcctctggaaggatgtgaccgaggcggagcaggcagaggagcaggccaggcaagaggagcaggtggtcaggcagcaagagctggacaacctgctgcatgagaagcggtacctgcgggcgctgggcctggccatctccctggatcggccccacaccgtgctgactgtcatccaggccatccggagggaccctgaggcctgcgagaagctggaagccaccatgctccgactgcggcgcgaccagaaagaggccctgctgcgcttctgcgtcacgtggaacaccaactcgcggcactgccacgaggcccaggccgtgctgggtgtgctcttgaggcgagaggcccccgaggagctgctggcctacgaaggcgtgcgggcagcgcttgaggccctgctgccctacactgagcggcactttcagcggctcagcaggaccctccaggccgccgctttcttggacttcctgtggcacaacatgaagctccctgtgccggccgccgcccccaccccctgggaaacccataaaggcgcactgccctagccggtccggcctctctccagtccatcctgaacccctggaaaacccataaaggccgctctcctggcaaaaaaaaaaaaaaaaaaaaaaaa

SEQ ID NO: 1548 - protein, 808 aa, Homo sapiens
MAETAAGVGRFKTNYAVERKIEPFYKGGKAQLDQTGQHLFCVCGTRVNILEVASGAVLRSLEQEDQEDITAFDLSPDNEVLVTASRALLLAQWAWQEGSVTRLWKAIHTAPVATMAFDPTSTLLATGGCDGAVRVWDIVRHYGTHHFRGSPGVVHLVAFHPDPTRLLLFSSATDAAIRVWSLQDRSCLAVLTAHYSAVTSLAFSADGHTMLSSGRDKICIIWDLQSCQATRTVPVFESVEAAVLLPEEPVSQLGVKSPGLYFLTAGDQGTLRVWEAASGQCVYTQAQPPGPGQELTHCTLAHTAGVVLTATADHNLLLYEARSLRLQKQFAGYSEEVLDVRFLGPEDSHVVVASNSPCLKVFELQTSACQILHGHTDIVLALDVFRKGWLFASCAKDQSVRIWRMNKAGQVMCVAQGSGHTHSVGTVCCSRLKESFLVTGSQDCTVKLWPLPKALLSKNTAPDNGPILLQAQTTQRCHDKDINSVAIAPNDKLLATGSQDRTAKLWALPQCQLLGVFSGHRRGLWCVQFSPMDQVLATASADGTIKLWALQDFSCLKTFEGHDASVLKVAFVSRGTQLLSSGSDGLVKLWTIKNNECVRTLDAHEDKVWGLHCSRLDDHALTGASDSRVILWKDVTEAEQAEEQARQEEQVVRQQELDNLLHEKRYLRALGLAISLDRPHTVLTVIQAIRRDPEACEKLEATMLRLRRDQKEALLRFCVTWNTNSRHCHEAQAVLGVLLRREAPEELLAYEGVRAALEALLPYTERHFQRLSRTLQAAAFLDFLWHNMKLPVPAAAPTPWETHKGALP

SEQ ID NO: 1549 - DNA, 1587 bp, Homo sapiens
cattcttcttcttcctcccagcagctctgcctggaagtcccccaatccctgtgctcctgcccccagatcgtgggcttgggggacagcaagaaagctgcaaaggactcagctggggcggctccacaaggaccccacaggcttgaggtgttgccaggattctatcccagggggttttctgggtcccccagagccctctcaagcacggggaggcagaagggtcctcgcccatttcaggaatctgcagcctggaagccacagccatggcaggcccccgatacccagtttcagtgcaaggggcagccctggtgcagatcaagaggctccaaacgtttgccttctctgtgcgctggtcagacggcagcgacaccttcgtgcgcaggagttgggacgaattcaggcagctcaagaccctcaaggagaccttcccggtggaggcgggcctgctgcggagatctgaccgcgttctcccaaagcttctcgatgcaccactgttgggacgcgtggggcgcacgagccgcggcctggcgcgcctgcagctgttggaaacctattctcggaggctgctggcgactgcagagcgcgtggcacggagcccgacgatcactggcttcttcgcaccgcaacccctggacctggagcccgcgctgccacccggcagccgggtgatcctgcccaccccagaggagcagcctctttctcgcgctgcgggccgcctctccatccacagtctggaggctcagagcctgcgctgcctgcagcccttctgtacccaggacacgcgggataggccttttcaggcgcaggcccaggagagcctggacgtgctgctgcggcacccctcaggctggtggctggtggagaacgaagaccggcagaccgcctggtttccagcgccctacctggaggaggcggccccgggccaaggccgggagggaggcccgtccctagggagcagcggtccccagttctgtgcttcccgcgcctacgagagcagccgcgcagatgagctgtccgtgcccgcgggggcgcgcgtgcgcgtgttggaaacgtcagaccgcggctggtggctatgcaggtacggcgaccgggcgggcctactccccgcggtgctgctgcggccggaagggctgggcgctctcctgagcgggacggggttccgtggaggagacgacccggcgggtgaggcccggggcttccctgaaccctcccaggccaccgcccctccccccaccgtgcccacccgaccttcgccgggcgccatccagagccgctgctgcaccgtcacacgcagggccctggagcggcgcccacggcgccagggccgccctcgagggtgcgtggactctgtgccgcaccccacgacggagcagtgagcgcgaggatcccgatgaggggatggaccgcgccatcccagggctggggaggagcggggagggcggatctccctggccagcagggatgggagggggccatttgctgttcctctgagtaaagcttgttctgcatgaaaaaaaaaaaaaaaaaaaaaaaaaaaaaaaaaaaaaaaaaaaaaaaaaaaaaaaaaaaaaaaaaaaaaaaaaaaaaaaa

SEQ ID NO: 1550 - protein, 370 aa, Homo sapiens
MAGPRYPVSVQGAALVQIKRLQTFAFSVRWSDGSDTFVRRSWDEFRQLKTLKETFPVEAGLLRRSDRVLPKLLDAPLLGRVGRTSRGLARLQLLETYSRRLLATAERVARSPTITGFFAPQPLDLEPALPPGSRVILPTPEEQPLSRAAGRLSIHSLEAQSLRCLQPFCTQDTRDRPFQAQAQESLDVLLRHPSGWWLVENEDRQTAWFPAPYLEEAAPGQGREGGPSLGSSGPQFCASRAYESSRADELSVPAGARVRVLETSDRGWWLCRYGDRAGLLPAVLLRPEGLGALLSGTGFRGGDDPAGEARGFPEPSQATAPPPTVPTRPSPGAIQSRCCTVTRRALERRPRRQGRPRGCVDSVPHPTTEQ

SEQ ID NO: 1551 - DNA, 1132 bp, Homo sapiens
agccatggcaggcccccgatacccagtttcagtgcaaggggcagccctggtgcagatcaagaggctccaaacgtttgccttctctgtgcgctggtcagacggcagcgacaccttcgtgcgcaggagttgggacgaattcaggcagctcaagaagaccctcaaggagaccttcccggtggaggcgggcctgctgcggagatctgaccgcgttctcccaaagcttctcgatgcaccactgttgggacgcgtggggcgcacgagccgcggcctggcgcgcctgcagctgttggaaacctattctcggaggctgctggcgactgcagagcgcgtggcacggagcccgacgatcactggcttcttcgcaccgcaacccctggacctggagcccgcgctgccacccggcagccgggtgatcctgcccaccccagaggagcagcctctttctcgcgctgcgggccgcctctccatccacagtctggaggctcagagcctgcgctgcctgcagcccttctgtacccaggacacgcgggataggccttttcaggcgcaggcccaggagagcctggacgtgctgctgcggcacccctcaggctggtggctggtggagaacgaagaccggcagaccgcctggtttccagcgccctacctggaggaggcggccccgggccaaggccgggagggaggcccgtccctagggagcagcggtccccagttctgtgcttcccgcgcctacgagagcagccgcgcagatgagctgtccgtgcccgcgggggcgcgcgtgcgcgtgttggaaacgtcagaccgcggctggtggctatgcaggtacggcgaccgggcgggcctactccccgcggtgctgctgcggccggaagggctgggcgctctcctgagcgggacggggttccgtggaggagacgacccggcgggtgaggcccggggcttccctgaaccctcccaggccaccgcccctccccccaccgtgcccacccgaccttcgccgggcgccatccagagccgctgctgcaccgtcacacgcagggccctggagcggcgcccacggcgccagggccgccctcgagggtgcgtggactctgtgccgcaccccacgacggagcagtgagcgcgaggatcc

SEQ ID NO: 1552 - protein, 371 aa, Homo sapiens
MAGPRYPVSVQGAALVQIKRLQTFAFSVRWSDGSDTFVRRSWDEFRQLKKTLKETFPVEAGLLRRSDRVLPKLLDAPLLGRVGRTSRGLARLQLLETYSRRLLATAERVARSPTITGFFAPQPLDLEPALPPGSRVILPTPEEQPLSRAAGRLSIHSLEAQSLRCLQPFCTQDTRDRPFQAQAQESLDVLLRHPSGWWLVENEDRQTAWFPAPYLEEAAPGQGREGGPSLGSSGPQFCASRAYESSRADELSVPAGARVRVLETSDRGWWLCRYGDRAGLLPAVLLRPEGLGALLSGTGFRGGDDPAGEARGFPEPSQATAPPPTVPTRPSPGAIQSRCCTVTRRALERRPRRQGRPRGCVDSVPHPTTEQ

SEQ ID NO: 1553 - DNA, 1147 bp, Homo sapiens
agccatggcaggcccccgatacccagtttcagtgcaaggggcagccctggtgcagatcaagaggctccaaacgtttgccttctctgtgcgctggtcagacggcagcgacaccttcgtgcgcaggagttgggacgaattcaggcagctcaagaagaccctcaaggagaccttcccggtggaggcgggcctgctgcggagatctgaccgcgttctcccaaagcttctcggtcaggccagcctggatgcaccactgttgggacgcgtggggcgcacgagccgcggcctggcgcgcctgcagctgttggaaacctattctcggaggctgctggcgactgcagagcgcgtggcacggagcccgacgatcactggcttcttcgcaccgcaacccctggacctggagcccgcgctgccacccggcagccgggtgatcctgcccaccccagaggagcagcctctttctcgcgctgcgggccgcctctccatccacagtctggaggctcagagcctgcgctgcctgcagcccttctgtacccaggacacgcgggataggccttttcaggcgcaggcccaggagagcctggacgtgctgctgcggcacccctcaggctggtggctggtggagaacgaagaccggcagaccgcctggtttccagcgccctacctggaggaggcggccccgggccaaggccgggagggaggcccgtccctagggagcagcggtccccagttctgtgcttcccgcgcctacgagagcagccgcgcagatgagctgtccgtgcccgcgggggcgcgcgtgcgcgtgttggaaacgtcagaccgcggctggtggctatgcaggtacggcgaccgggcgggcctactccccgcggtgctgctgcggccggaagggctgggcgctctcctgagcgggacggggttccgtggaggagacgacccggcgggtgaggcccggggcttccctgaaccctcccaggccaccgcccctccccccaccgtgcccacccgaccttcgccgggcgccatccagagccgctgctgcaccgtcacacgcagggccctggagcggcgcccacggcgccagggccgccctcgagggtgcgtggactctgtgccgcaccccacgacggagcagtgagcgcgaggatcc

SEQ ID NO: 1554 - protein, 376 aa, Homo sapiens
MAGPRYPVSVQGAALVQIKRLQTFAFSVRWSDGSDTFVRRSWDEFRQLKKTLKETFPVEAGLLRRSDRVLPKLLGQASLDAPLLGRVGRTSRGLARLQLLETYSRRLLATAERVARSPTITGFFAPQPLDLEPALPPGSRVILPTPEEQPLSRAAGRLSIHSLEAQSLRCLQPFCTQDTRDRPFQAQAQESLDVLLRHPSGWWLVENEDRQTAWFPAPYLEEAAPGQGREGGPSLGSSGPQFCASRAYESSRADELSVPAGARVRVLETSDRGWWLCRYGDRAGLLPAVLLRPEGLGALLSGTGFRGGDDPAGEARGFPEPSQATAPPPTVPTRPSPGAIQSRCCTVTRRALERRPRRQGRPRGCVDSVPHPTTEQ

SEQ ID NO: 1555 - DNA, 2447 bp, Homo sapiens
gctggcctggaggctgacctggaggctcatctggaggccgagctgacccggcaggccttgcgcgggcaacatggcggcgcccggcgagcggggccgcttccacggcgggaacctcttcttcctgccggggggcgcgcgctccgagatgatggacgacctggcgaccgacgcgcggggccggggcgcggggcggagagacgcggccgcctcggcctcgacgccagcccaggcgccgacctccgattctcctgtcgccgaggacgcctcccggaggcggccgtgccgggcctgcgtcgacttcaagacgtggatgcggacgcagcagaagcgggacaccaagtttagggaggactgcccgccggatcgcgaggaactgggccgccacagctgggctgtcctccacaccctggccgcctactaccccgacctgcccaccccagaacagcagcaagacatggcccagttcatacatttattttctaagttttacccctgtgaggagtgtgctgaagacctaagaaaaaggctgtgcaggaaccacccagacacccgcacccgggcatgcttcacacagtggctgtgccacctgcacaatgaagtgaaccgcaagctgggcaagcctgacttcgactgctcaaaagtggatgagcgctggcgcgacggctggaaggatggctcctgtgactagagggtggtcagccagagctcatgggacagctagccaggcatggttggataggggcagggcactcattaaagtgcatcacagccagagcctgttgtgtctcagttgggtggtccccaggacactgcctgtggggacctgccctgcccctcttaggtttggagcagaagtggaggtgcccacagcaggtacccactggccccctcctcagtggagaccccaaggagctgcagctgaactgcaggggagggaaggaggagcagcctgggctgccccttgacattcaggatgtagcttcctgcccaccgcataccctggcgcctcactcctcacacgggaagacagcgggcctggctgggcatccctgtgcctgtccctggcggccaggccattgccttcccactatgcagccagggatgcccctgccccccatggctctgtgctgctcactttagggggctcaattctccactctgctcagtccctacagggaaagctcaggtcgggtctttctgagggtccaccagccatcctaccctctccctgcctggcacatgcctgccagcgttgtgtcatgcctgtccacaggggattcgtggggctcacttcatcagagtttgaagcccaaatgaaacgctgaagtgactgagaacctggcttcagtatattttctgctggggcttaataaagcagtagacagggcttgttccatccctctgtgctcagctgcatttcctgctggggtcctggttcctcaggagagagagaccacagggtgagagtgagccaggaacagcaaggacgttgattggttggggcaggggggccagagtagctgatgtaggagtactgggaggccagacggcacgaggtctccaaggccccagcaaagccatggcttctacccctagttcccctgacaggaagttcttggcgggtttggagccaggggatggcatggagtgatgtggctttgaagggtcctctggctgctgagctgggatgaggcaggtaagggtggaacaggaggggtggggaggaagccggggcagtcaccgagtgaccaccaagaggaagacccaccccacggcggggacagatgcggggtacgttaaagggagagccagagaactcatggggtgaggatggagtccgaggagactgctgggagccgccgtgtgggtcagagatggagaaggctgagtgcagcaaggtggggggtgactgggacccagcctttgggcctccccagccagagcagcccagcaacagtgtgtcctgtggtcataaaactccagggacctctatcctccaggagtctcagcctttccctgggcgcaggcccaccttggcatggccgcctcaggcctccatggagggagctgctatgtccccaccagattggccccgtgcggctgctggcttctgtagaggctgcccagaggggccaggtggcacaaataagagaggggagatggggggcagccaggagaggaggtgtcccttcctcgcccagacacagcgcgcttctctctggcctttcccgaggcctgtgagtgcctcaggaagcagctgggccctctgggaaggctgtgttcagcttaggaacataccgcctgtatctgctgtccctcccctgcccccctgccccccccaccgccttccctttttccctgtcttccttaaagtttcactcctgaataaaacttcactttgccttagaaaaaaaaaaaaaaaaaaaaaaaaaaaaaaaaaaaaaaaa

SEQ ID NO: 1556 - protein, 205 aa, Homo sapiens
MAAPGERGRFHGGNLFFLPGGARSEMMDDLATDARGRGAGRRDAAASASTPAQAPTSDSPVAEDASRRRPCRACVDFKTWMRTQQKRDTKFREDCPPDREELGRHSWAVLHTLAAYYPDLPTPEQQQDMAQFIHLFSKFYPCEECAEDLRKRLCRNHPDTRTRACFTQWLCHLHNEVNRKLGKPDFDCSKVDERWRDGWKDGSCD

SEQ ID NO: 1557 - DNA, 2054 bp, Homo sapiens
cgggaggcggcagcggctgcagcgttggtagcatcagcatcagcatcagcggcagcggcagcggcctcgggcggggccggccggacggacaggcggacagaaggcgccaggggcgcgcgtcccgcccgggccggccatggagggcgcctccttcggcgcgggccgcgcaggggccgccctggaccccgtgagctttgcgcggcggccccagaccctgctccgggtcgcgtcctgggtgttctccatcgccgtcttcgggcccatcgtcaacgagggctacgtgaacaccgacagcggccccgagctgcgctgcgtgttcaacgggaacgcgggcgcctgccgcttcggcgtcgcgctgggcctcggagccttcctcgcctgcgccgccttcctgctgctcgatgtgcgcttccagcaaatcagcagcgtccgcgaccgccggcgcgcggtgttgctggacctgggcttctcaggactctggtccttcctgtggttcgtgggcttctgcttcctcaccaatcagtggcagcgcacggcgccagggccggccacgacgcaggcgggggacgcggcgcgggccgccatcgccttcagcttcttctccatcctcagctgggtggcgctcaccgtgaaggccctgcagcggttccgcctgggcaccgacatgtcactcttcgccaccgaacagctgagcaccggggcgagccaggcctaccccggctatccggtgggcagcggcgtggagggcaccgagacctaccagagcccgcccttcaccgagaccctggacaccagccccaaagggtaccaggtgcccgcctactagcggctggcaggcacagaccagggctccaaggccaccccaccaacgcaggccccagggtctccgggacctcccttgggtccttccagctcagtgccgcggacagagtaggtggccgctttgcgccatccggggccaagagggggtggacccgcgtgtctgggctgcccctgccaagttcccccagtccctcagcacctggccccaggactgaggtcctgagaaggggatagcactgcccaggacgtgtgtccctagcctggaatggactggcctggggaaggctttcccctcttgggccacacctgctcactctggggttgggggtccagctgccctctacgatcaggtgcaggggctgcccaggacaaagcgggggcaggggaaagacaccaccctcgccccaagactggggatcctggccactgttcccatcccatgtccctgtgggtagtgactgtctcgtttctgtcatggtggtgcgtcccgtccggagccactctccactttctctcacaggctgctagaacagcccagccctgtcagtgttgtgatcatggtccagtcttcgggtttcacctcctagtactccacaagctgctcctctctctgtggccccggcccctgcccaggtgtgggtggttctggccaggaaggcacaaggtagctgtgggccaagacaccagccctgtcctagcccttcagtaagaccttgccaggagaggagaaggatgcctgggtgccaggcaagacaagcccctcagcaggagagaggcccagaggctccagctggccaccgtgccccacaagatggcccctgtgtggttccctttaccttggcttcctggcccagtccctgcctctccacctgcaccctgcttcctggcccagtcccaggttggagtccctctgcatagctgactactcatgcattgctcaaagctggcttttcacattaagtcaacaccaaacgtggttgccacatttcatcagacagacacctccctctggagatgcagttgagtgacaaccttgttacattgtagcctagaccaattctgtgtggatatttaagtgaacatgtttacaatttttgtatatatcactctctccctctcctgaaagaccagagattgtgtattttcagtgtcccatgttccgactgcaccttctttacaataaagactgtaactgagctgactgtgaaaaaaaaaaaaaaaaaaaaaaaaaa

SEQ ID NO: 1558 - protein, 229 aa, Homo sapiens
MEGASFGAGRAGAALDPVSFARRPQTLLRVASWVFSIAVFGPIVNEGYVNTDSGPELRCVFNGNAGACRFGVALGLGAFLACAAFLLLDVRFQQISSVRDRRRAVLLDLGFSGLWSFLWFVGFCFLTNQWQRTAPGPATTQAGDAARAAIAFSFFSILSWVALTVKALQRFRLGTDMSLFATEQLSTGASQAYPGYPVGSGVEGTETYQSPPFTETLDTSPKGYQVPAY

SEQ ID NO: 1559 - DNA, 3210 bp, Homo sapiens
gccggatcccggaccatggcggcggcggggggcgccgaggggcggcgcgcggccctggaggcggcggcggcggcagctcctgagcggggaggcgggagctgcgtgctgtgctgcggagacctggaggccacggcgctgggccgctgcgaccacccggtgtgctaccgctgctctaccaagatgcgggtgctctgcgagcagcgctactgcgccgtgtgccgcgaggagctgcgccaggtggtctttgggaagaagcttcctgcctttgccaccatccccatccaccagctgcagcatgagaagaaatatgatatctactttgcagatggaaaggtgtacgcattgtacaggcagctgctgcagcacgagtgcccgcggtgccccgagctgccacctttcagcctcttcggggacctggagcagcacatgcggaggcagcatgagctcttctgctgccgtctgtgcctccagcacctccagatcttcacatatgagcgcaagtggtactcgcgcaaggacctggcccggcatcgcatgcagggtgaccccgatgacacgtcgcaccgtgggcacccgctctgcaagttctgtgacgagcgctacctggacaatgatgagctgcttaagcacctgcgccgcgaccactacttctgccacttctgcgactcggacggggcccaggactactacagcgactatgcctacctgcgtgagcacttccgggagaagcactttctgtgtgaggaaggccgctgcagcacggagcagttcacccacgccttccgcaccgagatcgacctcaaggcccacaggacggcctgccacagtcgcagccgcgccgaggcacgccagaaccgccacatcgacctgcagttcagctacgcgccacggcactcgcgccggaacgagggggtcgttggtggcgaagactacgaggaggtggacaggtacagccgccagggccgagtggcccgggctggcactcgcggagcccagcagagccgccgaggaagctggaggtacaaaagggaagaagaggaccgagaagtagcagctgctgtccgggcctccgtggccgcacagcagcaggaggaggctcgcaggagtgaggatcaggaggaaggcggtaggcccaagaaggaggaggcagcggcgcggggacctgaggatccccgtggcccccggcgctcaccccggactcagggcgaaggcccaggccccaaggaaacctcgacaaatggtcctgtaagccaagaagccttctcggtgacaggcccagccgccccagggtgtgtgggggtgccaggcgccctcccaccacccagcccgaagctcaaggacgaagacttccccagcctctctgcctccacttcctcctcctgctccactgcagcaaccccgggccctgtggggttggcgctgccgtacgccatccctgccagaggcaggagtgccttccaggaggaggacttccccgccctggtgtcctcggtgcccaagcctggcaccgcccccaccagccttgtctctgcctggaacagcagcagtagcagcaagaaggtagcacagcccccactctcggcgcaggctaccggcagcggccagcccaccaggaaggctgggaaggggagcaggggcggcaggaagggcggcccgcccttcacacaggaggaggaggaggacggcggcccggccctgcaggagcttctgagcacacgccccacgggctccgtctcctccacactggggctggcctccatccaaccctctaaagttgggaagaagaagaaagtgggctcggagaagccaggcaccacattgccacagcccccgcccgctacctgtcccccaggggctttgcaggccccggaagctcctgccagcagagccgaggggccagttgccgtcgtcgttaatggacacacggagggcccggcccctgctcggagtgcccccaaggaaccccctgggctcccaaggcccctggggtccttcccctgccccacgccacaggaggacttcccagcgctcggcggcccctgcccaccccggatgccgccgcccccaggcttcagcgctgtggtgctcctgaagggcacgcctcccccacccccgccgggcctggtgcccccaatcagcaagccgccccctggcttctctggccttctgcctagcccccacccggcctgtgtccccagccccgccaccaccaccaccacaaaagcacccaggctgctgcctgccccacgggcgtacctagtccccgagaacttccgggagaggaaccttcagctcatccagtccatcagggacttcctgcagagcgacgaggcccgcttcagcgagttcaagagccactcaggggagttcagacagggcctgatctccgcagcccagtattacaagagttgccgggacctgctgggggagaatttccagaaggtctttaatgagctgctggtcctgctgcccgacacggccaagcagcaggagctcctgtctgcacacacggacttctgcaaccgcgagaagcctctgagcaccaagtccaagaagaacaagaagagcgcgtggcaggccaccacccagcaggcgggcctggactgccgtgtgtgccccacctgccagcaggtgctcgcgcatggcgatgccagcagccaccaggcgctgcatgctgcccgggacgacgacttcccctccctgcaagccatcgccaggatcatcacgtagctcccgccagcgtggccagagctgtcgcaccgtgagcgtccttcctccttcctctccgggctgccaggcagccaggtaaggcctggtgaggccacttggcctcttggttggccaggcccaccaggaagtcaccaggacagtccacccgccctgttggcacactcaagcgggagtccacccctgcctcagtggtgggccagtctcggtttgcattcttgtgcttttgggaggtgccaggggagggaagggctgggatgctgggacctgttgttgctggcaaagccagaggtcacagtggcctgatctgggccctcccaaagctgagggctgcagcccgtggggcctcagagctgaaagctgcggcgccactggtgccagagtcagatgtcacagatgtgttgtgtaaacagttggctgtttcgtgcttcaagaatgttcaggattaaaagcagacaagaaattgtgaaaaaaaaaaaaaaa

SEQ ID NO: 1560 - protein, 904 aa, Homo sapiens
MAAAGGAEGRRAALEAAAAAAPERGGGSCVLCCGDLEATALGRCDHPVCYRCSTKMRVLCEQRYCAVCREELRQVVFGKKLPAFATIPIHQLQHEKKYDIYFADGKVYALYRQLLQHECPRCPELPPFSLFGDLEQHMRRQHELFCCRLCLQHLQIFTYERKWYSRKDLARHRMQGDPDDTSHRGHPLCKFCDERYLDNDELLKHLRRDHYFCHFCDSDGAQDYYSDYAYLREHFREKHFLCEEGRCSTEQFTHAFRTEIDLKAHRTACHSRSRAEARQNRHIDLQFSYAPRHSRRNEGVVGGEDYEEVDRYSRQGRVARAGTRGAQQSRRGSWRYKREEEDREVAAAVRASVAAQQQEEARRSEDQEEGGRPKKEEAAARGPEDPRGPRRSPRTQGEGPGPKETSTNGPVSQEAFSVTGPAAPGCVGVPGALPPPSPKLKDEDFPSLSASTSSSCSTAATPGPVGLALPYAIPARGRSAFQEEDFPALVSSVPKPGTAPTSLVSAWNSSSSSKKVAQPPLSAQATGSGQPTRKAGKGSRGGRKGGPPFTQEEEEDGGPALQELLSTRPTGSVSSTLGLASIQPSKVGKKKKVGSEKPGTTLPQPPPATCPPGALQAPEAPASRAEGPVAVVVNGHTEGPAPARSAPKEPPGLPRPLGSFPCPTPQEDFPALGGPCPPRMPPPPGFSAVVLLKGTPPPPPPGLVPPISKPPPGFSGLLPSPHPACVPSPATTTTTKAPRLLPAPRAYLVPENFRERNLQLIQSIRDFLQSDEARFSEFKSHSGEFRQGLISAAQYYKSCRDLLGENFQKVFNELLVLLPDTAKQQELLSAHTDFCNREKPLSTKSKKNKKSAWQATTQQAGLDCRVCPTCQQVLAHGDASSHQALHAARDDDFPSLQAIARIIT

SEQ ID NO: 1561 - DNA, 2279 bp, Homo sapiens
tccggctctcctttgtttattttctaatctatatttttactggaagatttcctctttattctctcccgccctcctacaagcgctcttgctggccgtctgggtgcacacaccgctccctcgatcaccccagcccccttcctggtctcccgagcgcggggtttgaaggtcacctcctttccagtccccgtgcgagccgcgctgccgccgcctcctccagccagagtcggtgggactggctgcgctgccctgaagtggttctccaagcagcgcggagggtggcggacggcggacggagcccaggggccgcgtcgggtggggaaacccgaactcgcggaggggaatccctcccccttcgccccagccccccagcagcacccgcggtggggcgggggcgctctgccagccccgggaacagcagaggcggcggcactggctggacccacgcgcgcgcctccggggctgaagaaggaaggagtgagccgagccgagcaccccacatctggaggggacagccagccgtgggccccgccccggcgtccggagcaggagaattccgagcttcttgcccaggcagagagagcaggagcggaccgcgcgcccgggattgagagtccttgcgctccagacccccacccagtggccgccaggtcccgcctgtccggaccctcgccgcgcccaggcaggcgcgccagggcggggctgacctgcccgcgaagttgcggacagtgcgtgagaaaccagcacccccttccgccgcctccagcttatggtgagtgtggctgggggtgcagagagcgcacgggaattcgggggtctggggccgagaacgtgaccgcagccgggctcgccgggagttctaggaaactggtcaaagaactcatgcaagtggaacttacagcttccttgatcggactcagcattcagatatcaaagcagactgcaatacctgcgtggaaatagaagacagaaaggtttcaagacaacagatgaattgtgaaagagagcagctaaggggtaatcaggaagcagccgctgcccctgacacaatggctcagccttacgcttcggcccagtttgctcccccgcagaacggtatccccgcggaatacacggcccctcatccccaccccgcgccagagtacacaggccagaccacggttcccgagcacacattaaacctgtaccctcccgcccagacgcactccgagcagagcccggcggacacgagcgctcagaccgtctctggcaccgccacacagacagatgacgcagcaccgacggatggccagccccagacacaaccttctgaaaacacggaaaacaagtctcagcccaagcggctgcatgtctccaatatccccttcaggttccgggatccggacctcagacaaatgtttggtcaatttggtaaaatcttagatgttgaaattatttttaatgagcgaggctcaaagggatttggtttcgtaactttcgaaaatagtgccgatgcggacagggcgagggagaaattacacggcaccgtggtagagggccgtaaaatcgaggtaaataatgccacagcacgtgtaatgacaaataaaaagaccgtcaacccttatacaaatggctggaaattgaatccagttgtgggtgcagtctacagtcccgaattctatgcaggcacggtcctgttgtgccaggccaaccaggagggatcttccatgtacagtgcccccagttcacttgtatatacttctgcaatgccaggcttcccgtatccagcagccaccgccgcggccgcctaccgaggggcgcacctgcgaggccgcggtcgcaccgtgtacaacaccttcagggccgcggcgcccccgcccccgatcccggcctacggcggtgttgtttaccaggatggattttatggtgcagacatttatggtggttatgctgcataccgctacgcccagcctacccctgccactgccgctgcctacagtgacagttacggacgagtttatgctgccgacccctaccaccacgcacttgctccagcccccacctacggcgttggtgccatgaatgcttttgcacctttgactgatgccaagactaggagccatgctgatgatgtgggtctcgttctttcttcattgcaggctagtatataccgagggggatacaaccgttttgctccatactaaatgacaaaaccataaaaaccttccaatgtggggagaaaggaagctttccgaggcctgagtattgcaatacatgcagtagtacatcattttagcaactct

SEQ ID NO: 1562 - protein, 397 aa, Homo sapiens
MNCEREQLRGNQEAAAAPDTMAQPYASAQFAPPQNGIPAEYTAPHPHPAPEYTGQTTVPEHTLNLYPPAQTHSEQSPADTSAQTVSGTATQTDDAAPTDGQPQTQPSENTENKSQPKRLHVSNIPFRFRDPDLRQMFGQFGKILDVEIIFNERGSKGFGFVTFENSADADRAREKLHGTVVEGRKIEVNNATARVMTNKKTVNPYTNGWKLNPVVGAVYSPEFYAGTVLLCQANQEGSSMYSAPSSLVYTSAMPGFPYPAATAAAAYRGAHLRGRGRTVYNTFRAAAPPPPIPAYGGVVYQDGFYGADIYGGYAAYRYAQPTPATAAAYSDSYGRVYAADPYHHALAPAPTYGVGAMNAFAPLTDAKTRSHADDVGLVLSSLQASIYRGGYNRFAPY

SEQ ID NO: 1563 - DNA, 3262 bp, Homo sapiens
gaccttccattttggtagcttcaactttgcagctgctgtgtctcttcgtcgtctgggaagaaaactttcacattaagagttgctgatgcggattttctttctttcctctcccggcgttgatgagtgcttggctcctgacagaagggatttggctcccagctttgtagttcggaagaagttgggtctatagatttccccctaactctccattgatgtgttgagcttcagagggaataataactctacgtaaagcatgctggcgtctcaaggagttctcctgcatccttatggcgtgcctatgattgtaccggcagctccttaccttcctggactgattcagggtaatcaggaagcagccgctgcccctgacacaatggctcagccttacgcttcggcccagtttgctcccccgcagaacggtatccccgcggaatacacggcccctcatccccaccccgcgccagagtacacaggccagaccacggttcccgagcacacattaaacctgtaccctcccgcccagacgcactccgagcagagcccggcggacacgagcgctcagaccgtctctggcaccgccacacagacagatgacgcagcaccgacggatggccagccccagacacaaccttctgaaaacacggaaaacaagtctcagcccaagcggctgcatgtctccaatatccccttcaggttccgggatccggacctcagacaaatgtttggtcaatttggtaaaatcttagatgttgaaattatttttaatgagcgaggctcaaagggatttggtttcgtaactttcgaaaatagtgccgatgcggacagggcgagggagaaattacacggcaccgtggtagagggccgtaaaatcgaggtaaataatgccacagcacgtgtaatgacaaataaaaagaccgtcaacccttatacaaatggctggaaattgaatccagttgtgggtgcagtctacagtcccgaattctatgcaggcacggtcctgttgtgccaggccaaccaggagggatcttccatgtacagtgcccccagttcacttgtatatacttctgcaatgccaggcttcccgtatccagcagccaccgccgcggccgcctaccgaggggcgcacctgcgaggccgcggtcgcaccgtgtacaacaccttcagggccgcggcgcccccgcccccgatcccggcctacggcggagtagtgtatcaagagcctgtgtatggcaataaattgctgcagggtggttatgctgcataccgctacgcccagcctacccctgccactgccgctgcctacagtgacagttacggacgagtttatgctgccgacccctaccaccacgcacttgctccagcccccacctacggcgttggtgccatgaatgcttttgcacctttgactgatgccaagactaggagccatgctgatgatgtgggtctcgttctttcttcattgcaggctagtatataccgagggggatacaaccgttttgctccatactaaatgacaaaaccataaaaaccttccaatgtggggagaaaggaagctttccgaggcctgagtattgcaatacatgcagtagtacatcattttagcaactctaaaaaaaaaaaaaatacaaataaaaaggaaaaaaaatgacattttttatcttatacctcagatattttgttctgtgtattttaatattgtgggtctttaatttctgaaggttccgtagtttggttgctggctgtaggagtttttgtggttgatctagacagatgctagataatgaataaaaactggtttagggccatatccagagtgctatattatgtaaatgaattatatatgctgaatattaagctactggggttatcagctgtttgggaagagtgtaagtgactacagtagtcatttttttctgcacctgcattattttattttgtgaaaggggaggttgggaggggcttaggggattggaactggggtttggctgaaagaaaaaaaaaaaaatgtaactgatgaatctaaacgacccactgcaccaacaatcatttatcaatggttctaagttactcattgccagttcaagccaaaggtcatgttgttaagggggtgcttctagtagcacttgtgcatctgagttgaatgaagctgtgcaaacccaccctttaaaccattccacccggcagtattcagcttcttaaccagtcgctatttaggaaaaaaaacccactagttaggccatcaacaagcattctttttatatttcttccagtataataaattattgatatcactgctgacttttatattatgggagggaaaaaataacattaataaaaaggtgataaaaaagcactgtttctatttttttctttttttccaaaaaaagaaagtaataaaaacttaaattctttgtaccagttaaaaaaaatgtataaaatttacatctgtgcagtggagttgttaagttctagaaacagtctatgaagctttagttttagcctagtagaacaactgttagagacagacgtataatttttatggaattacatgataatcatattcggatttatagaagcattttacaagtattgcaatcattgagtagagataatcatggtattttcatcagcttggtactttttgaaacgtgactgcgttgtgtgaacaatctgcaatttttcagtccgtgagatcctgcccttccacctctttcccatacccccaaggattatctcaaaatgatctctttagttctgtctccaaggcccaggacacttgtcagaaggatgcaaaaaaagaaaaaagtacatccaccctcttaatcccaaaagaacaaagtctccccacctttctcggatgcagggccagagtgacacagccgaaaaattgcagtttgtctgtacttctgtttgaactttccacgttgtcctgtttacaagttaacttaagttggggtatccgtcacgggtcttcctgttttgtatttaaataaaaacaacagcagcaggctgtccctgagtagttttgctgccataggttaagtcctcatgtgtacagtgcaggccctgtggcccgcacttcagtaagttatcaactctcaccgctgtgaacctgccaatccgctgtaacaactctgctttaaaacaaaaccaaacaaaactttaaaaaaaaatgtgtgatccagctttctcttgccatcctatgtgcatgccgtaagatcagttggatattaaaccatcaataaagtttcacaagatttga

SEQ ID NO: 1564 - protein, 418 aa, Homo sapiens
MLASQGVLLHPYGVPMIVPAAPYLPGLIQGNQEAAAAPDTMAQPYASAQFAPPQNGIPAEYTAPHPHPAPEYTGQTTVPEHTLNLYPPAQTHSEQSPADTSAQTVSGTATQTDDAAPTDGQPQTQPSENTENKSQPKRLHVSNIPFRFRDPDLRQMFGQFGKILDVEIIFNERGSKGFGFVTFENSADADRAREKLHGTVVEGRKIEVNNATARVMTNKKTVNPYTNGWKLNPVVGAVYSPEFYAGTVLLCQANQEGSSMYSAPSSLVYTSAMPGFPYPAATAAAAYRGAHLRGRGRTVYNTFRAAAPPPPIPAYGGVVYQEPVYGNKLLQGGYAAYRYAQPTPATAAAYSDSYGRVYAADPYHHALAPAPTYGVGAMNAFAPLTDAKTRSHADDVGLVLSSLQASIYRGGYNRFAPY

SEQ ID NO: 1565 - DNA, 3184 bp, Homo sapiens
gaccttccattttggtagcttcaactttgcagctgctgtgtctcttcgtcgtctgggaagaaaactttcacattaagagttgctgatgcggattttctttctttcctctcccggcgttgatgagtgcttggctcctgacagaagggatttggctcccagctttgtagttcggaagaagttgggtctatagatttccccctaactctccattgatgtgttgagcttcagagggaataataactctacgtaaagcatgctggcgtctcaaggagttctcctgcatccttatggcgtgcctatgattgtaccggcagctccttaccttcctggactgattcagggtaatcaggaagcagccgctgcccctgacacaatggctcagccttacgcttcggcccagtttgctcccccgcagaacggtatccccgcggaatacacggcccctcatccccaccccgcgccagagtacacaggccagaccacggttcccgagcacacattaaacctgtaccctcccgcccagacgcactccgagcagagcccggcggacacgagcgctcagaccgtctctggcaccgccacacagacagatgacgcagcaccgacggatggccagccccagacacaaccttctgaaaacacggaaaacaagtctcagcccaagcggctgcatgtctccaatatccccttcaggttccgggatccggacctcagacaaatgtttggtcaatttggtaaaatcttagatgttgaaattatttttaatgagcgaggctcaaagggatttggtttcgtaactttcgaaaatagtgccgatgcggacagggcgagggagaaattacacggcaccgtggtagagggccgtaaaatcgaggtaaataatgccacagcacgtgtaatgacaaataaaaagaccgtcaacccttatacaaatggctggaaattgaatccagttgtgggtgcagtctacagtcccgaattctatgcaggcacggtcctgttgtgccaggccaaccaggagggatcttccatgtacagtgcccccagttcacttgtatatacttctgcaatgccaggcttcccgtatccagcagccaccgccgcggccgcctaccgaggggcgcacctgcgaggccgcggtcgcaccgtgtacaacaccttcagggccgcggcgcccccgcccccgatcccggcctacggcggagtagtgtatcaagagcctgtgtatggcaataaattgctgcagggtggttatgctgcataccgctacgcccagcctacccctgccactgccgctgcctacagtgacagttacggacgagtttatgctgccgacccctaccaccacgcacttgctccagcccccacctacggcgttggtgccatggctagtatataccgagggggatacaaccgttttgctccatactaaatgacaaaaccataaaaaccttccaatgtggggagaaaggaagctttccgaggcctgagtattgcaatacatgcagtagtacatcattttagcaactctaaaaaaaaaaaaaatacaaataaaaaggaaaaaaaatgacattttttatcttatacctcagatattttgttctgtgtattttaatattgtgggtctttaatttctgaaggttccgtagtttggttgctggctgtaggagtttttgtggttgatctagacagatgctagataatgaataaaaactggtttagggccatatccagagtgctatattatgtaaatgaattatatatgctgaatattaagctactggggttatcagctgtttgggaagagtgtaagtgactacagtagtcatttttttctgcacctgcattattttattttgtgaaaggggaggttgggaggggcttaggggattggaactggggtttggctgaaagaaaaaaaaaaaaatgtaactgatgaatctaaacgacccactgcaccaacaatcatttatcaatggttctaagttactcattgccagttcaagccaaaggtcatgttgttaagggggtgcttctagtagcacttgtgcatctgagttgaatgaagctgtgcaaacccaccctttaaaccattccacccggcagtattcagcttcttaaccagtcgctatttaggaaaaaaaacccactagttaggccatcaacaagcattctttttatatttcttccagtataataaattattgatatcactgctgacttttatattatgggagggaaaaaataacattaataaaaaggtgataaaaaagcactgtttctatttttttctttttttccaaaaaaagaaagtaataaaaacttaaattctttgtaccagttaaaaaaaatgtataaaatttacatctgtgcagtggagttgttaagttctagaaacagtctatgaagctttagttttagcctagtagaacaactgttagagacagacgtataatttttatggaattacatgataatcatattcggatttatagaagcattttacaagtattgcaatcattgagtagagataatcatggtattttcatcagcttggtactttttgaaacgtgactgcgttgtgtgaacaatctgcaatttttcagtccgtgagatcctgcccttccacctctttcccatacccccaaggattatctcaaaatgatctctttagttctgtctccaaggcccaggacacttgtcagaaggatgcaaaaaaagaaaaaagtacatccaccctcttaatcccaaaagaacaaagtctccccacctttctcggatgcagggccagagtgacacagccgaaaaattgcagtttgtctgtacttctgtttgaactttccacgttgtcctgtttacaagttaacttaagttggggtatccgtcacgggtcttcctgttttgtatttaaataaaaacaacagcagcaggctgtccctgagtagttttgctgccataggttaagtcctcatgtgtacagtgcaggccctgtggcccgcacttcagtaagttatcaactctcaccgctgtgaacctgccaatccgctgtaacaactctgctttaaaacaaaaccaaacaaaactttaaaaaaaaatgtgtgatccagctttctcttgccatcctatgtgcatgccgtaagatcagttggatattaaaccatcaataaagtttcacaagatttga

SEQ ID NO: 1566 - protein, 392 aa, Homo sapiens
MLASQGVLLHPYGVPMIVPAAPYLPGLIQGNQEAAAAPDTMAQPYASAQFAPPQNGIPAEYTAPHPHPAPEYTGQTTVPEHTLNLYPPAQTHSEQSPADTSAQTVSGTATQTDDAAPTDGQPQTQPSENTENKSQPKRLHVSNIPFRFRDPDLRQMFGQFGKILDVEIIFNERGSKGFGFVTFENSADADRAREKLHGTVVEGRKIEVNNATARVMTNKKTVNPYTNGWKLNPVVGAVYSPEFYAGTVLLCQANQEGSSMYSAPSSLVYTSAMPGFPYPAATAAAAYRGAHLRGRGRTVYNTFRAAAPPPPIPAYGGVVYQEPVYGNKLLQGGYAAYRYAQPTPATAAAYSDSYGRVYAADPYHHALAPAPTYGVGAMASIYRGGYNRFAPY

SEQ ID NO: 1567 - DNA, 3315 bp, Homo sapiens
gaccttccattttggtagcttcaactttgcagctgctgtgtctcttcgtcgtctgggaagaaaactttcacattaagagttgctgatgcggattttctttctttcctctcccggcgttgatgagtgcttggctcctgacagaagggatttggctcccagctttgtagttcggaagaagttgggtctatagatttccccctaactctccattgatgtgttgagcttcagagggaataataactctacgtaaagcatgctggcgtctcaaggagttctcctgcatccttatggcgtgcctatgattgtaccggcagctccttaccttcctggactgattcagggtaatcaggaagcagccgctgcccctgacacaatggctcagccttacgcttcggcccagtttgctcccccgcagaacggtatccccgcggaatacacggcccctcatccccaccccgcgccagagtacacaggccagaccacggttcccgagcacacattaaacctgtaccctcccgcccagacgcactccgagcagagcccggcggacacgagcgctcagaccgtctctggcaccgccacacagacagatgacgcagcaccgacggatggccagccccagacacaaccttctgaaaacacggaaaacaagtctcagcccaagcggctgcatgtctccaatatccccttcaggttccgggatccggacctcagacaaatgtttggtcaatttggtaaaatcttagatgttgaaattatttttaatgagcgaggctcaaagggatttggtttcgtaactttcgaaaatagtgccgatgcggacagggcgagggagaaattacacggcaccgtggtagagggccgtaaaatcgaggtaaataatgccacagcacgtgtaatgacaaataaaaagaccgtcaacccttatacaaatggctggaaattgaatccagttgtgggtgcagtctacagtcccgaattctatgcaggcacggtcctgttgtgccaggccaaccaggagggatcttccatgtacagtgcccccagttcacttgtatatacttctgcaatgccaggcttcccgtatccagcagccaccgccgcggccgcctaccgaggggcgcacctgcgaggccgcggtcgcaccgtgtacaacaccttcagggccgcggcgcccccgcccccgatcccggcctacggcggagtagtgtatcaagagcctgtgtatggcaataaattgctgcagggtggttatgctgcataccgctacgcccagcctacccctgccactgccgctgcctacagtgacagaaatcagttcgtcttcgttgcagcagatgaaatttcttgtaacacctctgcagttacggacgagtttatgctgccgacccctaccaccacgcacttgctccagcccccacctacggcgttggtgccatgaatgcttttgcacctttgactgatgccaagactaggagccatgctgatgatgtgggtctcgttctttcttcattgcaggctagtatataccgagggggatacaaccgttttgctccatactaaatgacaaaaccataaaaaccttccaatgtggggagaaaggaagctttccgaggcctgagtattgcaatacatgcagtagtacatcattttagcaactctaaaaaaaaaaaaaatacaaataaaaaggaaaaaaaatgacattttttatcttatacctcagatattttgttctgtgtattttaatattgtgggtctttaatttctgaaggttccgtagtttggttgctggctgtaggagtttttgtggttgatctagacagatgctagataatgaataaaaactggtttagggccatatccagagtgctatattatgtaaatgaattatatatgctgaatattaagctactggggttatcagctgtttgggaagagtgtaagtgactacagtagtcatttttttctgcacctgcattattttattttgtgaaaggggaggttgggaggggcttaggggattggaactggggtttggctgaaagaaaaaaaaaaaaatgtaactgatgaatctaaacgacccactgcaccaacaatcatttatcaatggttctaagttactcattgccagttcaagccaaaggtcatgttgttaagggggtgcttctagtagcacttgtgcatctgagttgaatgaagctgtgcaaacccaccctttaaaccattccacccggcagtattcagcttcttaaccagtcgctatttaggaaaaaaaacccactagttaggccatcaacaagcattctttttatatttcttccagtataataaattattgatatcactgctgacttttatattatgggagggaaaaaataacattaataaaaaggtgataaaaaagcactgtttctatttttttctttttttccaaaaaaagaaagtaataaaaacttaaattctttgtaccagttaaaaaaaatgtataaaatttacatctgtgcagtggagttgttaagttctagaaacagtctatgaagctttagttttagcctagtagaacaactgttagagacagacgtataatttttatggaattacatgataatcatattcggatttatagaagcattttacaagtattgcaatcattgagtagagataatcatggtattttcatcagcttggtactttttgaaacgtgactgcgttgtgtgaacaatctgcaatttttcagtccgtgagatcctgcccttccacctctttcccatacccccaaggattatctcaaaatgatctctttagttctgtctccaaggcccaggacacttgtcagaaggatgcaaaaaaagaaaaaagtacatccaccctcttaatcccaaaagaacaaagtctccccacctttctcggatgcagggccagagtgacacagccgaaaaattgcagtttgtctgtacttctgtttgaactttccacgttgtcctgtttacaagttaacttaagttggggtatccgtcacgggtcttcctgttttgtatttaaataaaaacaacagcagcaggctgtccctgagtagttttgctgccataggttaagtcctcatgtgtacagtgcaggccctgtggcccgcacttcagtaagttatcaactctcaccgctgtgaacctgccaatccgctgtaacaactctgctttaaaacaaaaccaaacaaaactttaaaaaaaaatgtgtgatccagctttctcttgccatcctatgtgcatgccgtaagatcagttggatattaaaccatcaataaagtttcacaagatttga

SEQ ID NO: 1568 - protein, 395 aa, Homo sapiens
MLASQGVLLHPYGVPMIVPAAPYLPGLIQGNQEAAAAPDTMAQPYASAQFAPPQNGIPAEYTAPHPHPAPEYTGQTTVPEHTLNLYPPAQTHSEQSPADTSAQTVSGTATQTDDAAPTDGQPQTQPSENTENKSQPKRLHVSNIPFRFRDPDLRQMFGQFGKILDVEIIFNERGSKGFGFVTFENSADADRAREKLHGTVVEGRKIEVNNATARVMTNKKTVNPYTNGWKLNPVVGAVYSPEFYAGTVLLCQANQEGSSMYSAPSSLVYTSAMPGFPYPAATAAAAYRGAHLRGRGRTVYNTFRAAAPPPPIPAYGGVVYQEPVYGNKLLQGGYAAYRYAQPTPATAAAYSDRNQFVFVAADEISCNTSAVTDEFMLPTPTTTHLLQPPPTALVP

SEQ ID NO: 1569 - DNA, 6156 bp, Homo sapiens
gagatcaaagggcgtcgcccaaagcgggacaggtccagcggttgttctgtgtgaagtcgcgcggcttccacccacgcagtgttctaagtgaaggccagaaactcgctcgccatgtcggctgcagaggcggggggtgttttccacagagccaggggcaggaccctggccgcgtttcccgcagaaaaggaaagcgaatggaaaggcccattctacttcatcctgggcgcagacccacagtttgggctgatcaaggcctggtccactggggactgtgacaatggcggtgacgaatgggaacaggagatccgtctaactgagcaagccgtccaggccatcaacaagctgaaccccaaacccaaattcttcgttctgtgcggcgacctcatccacgccatgccagggaagccgtggcggacggagcagacggaggacctgaagcgagtgcttagggcagtggacagggccatcccactggtccttgtcagcggcaaccatgacattggcaacacccccacggccgagaccgtcgaggagttctgccggacttggggagatgactacttcagcttctgggtcgggggcgtcctgttcctggtcctcaactcccagttctacgagaacccctccaaatgccccagcctgaagcaggctcaggaccagtggctggacgagcagctgagcatcgcgaggcagcggcactgccagcatgccatcgtcttccagcacatcccgctgttcctggagagcatcgacgaggacgacgactactacttcaacctcagcaagtccactcggaagaagttggcagacaagttcatccacgcaggtgtcaaagtcgtgttctcaggccactaccacaggaatgccgggggtacctaccagaacctcgacatggtggtgtcatctgccattggatgccagctgggcagagacccccacgggctccgagtcgtggtggtcaccgccgagaaaattgttcaccgatactacagtctagatgagctgagtgagaaaggaatagaagacgatctcatggatttgatcaagaaaaaatgacgctccttcccgttcccgttcacttttcacttgcactatttttttattttgccagaaacagcagctgcacacaacctcttgctgaaatataaaaatagcccaggcaggtttgtgaatttatgtccttttgcataaatcagagagctggggccctgtcctgaattatattcaaaatagaactgcatttcctttaaaatggagcgaatgatcctggaaatcagtttttaaaatattagactatctctgcatggatgtttgaataaattctcctaatgctgtgtttctcaactccacttttgaattggattgtattctggttagcatatggtcaaagtctgcctatcgacctcaattccaatctgacagccaagtatgatctttgataattccttaaacaaactacacctgattgtattaaattgtggtcacgattcccaaaacgctaggcaaaacaaagttcatctcctttcctttccagcggaacgaacagctgtctgccttgttgtgagagccatgcagacttattttgacaaggagccaagtaggcaccatttactgttcaattctgagacttctgatgataggaacagaatgcagttgatacagctcggagcttaaatttgccttcctgggtgcctagaaaagtcacctttgcacataaattggccatttctgaaaatctcctccaagagactgaaaccaaagctctaaaacgccgcttcttcagtctctggggagcacgttgagttggttcacatccacattctggctgtgtagccactccacagatgggtggtctcttgggatcagaatgcccctccactcatgagactcttcattttgtccactttgacaggaaaagtgggaatgtatgcagagctctcaaaagaaacaaaaaaggccaaaacggtgccttcagccacatcctctgaattggccctgacttggactaaatgcactaatgcaaaatcccttgacaaaagcgcataggttatttcaaaccagcattgttttttatgtaacctgttttaccgcatcttctcagcagcttctgaccactgctcaattttctcctttacagccattgttctggtggacaaataacctaggtactccaaatcctggcaggaaaaatatacagcattatgaaacagcactcagtaatcctaaaatgatttccaaagctggttacacatgacctgcaaagtctattaaattaaaagactttctcattacagagtttagtcaacgtagcaaaaccatgggaaattaaatggaaagataattaaatatgtaaattcataaggaacaaaagacgagaagttaattatacaataggctggtgacaccagagttcattgttatgtgccacaagaaaattaaattttttaaaaaactagaacgctcttcttttagtgttttgctgaaatcctgttttgtatttgtttctttacaacaggtgtaggtataggaggtcaagaaaaggagttcggtaaagggcatagctaataacaaccacacattgggccaggcacagtggcttacgcctgtaatcccagcactttgggaggctgagacgggcagatcacctgagatcaggagtttgagaacagcctggccaacatggtgaaactccatctctactaaaaatacaaaaattagccaggcatgctggtgcacacctgtaatcccagctactcgggaggctgaggcaggagatcgctggaactcaggaggcagaggttgcagtgagccaagatcatgccactgcactccagcctgggcaacagagcaagactctgtctcaaaaaaaaaaaaaaaaaaccacacacacacacattgagacttgagatgtggtgacacttggatcataaacagagggcttcgattccaggatgggggttcctccagggggaaatgaaaaggagctctcactctgttcttacgtatgcacaatgctctgaattgtggcacatgggtttgcagaaggataatggagataattgaaagtaatgaaaatgaaaccaaatctccttccccaaaaacttaaaagaactgattcaaaagtaccccaagaatatgcaaagaaaagggaatcacatcaacagatgattggataaagaacatgtggtatgtatacataatggaatactattcagccactaaaaagaatgaaaccatgtcttttgcagcaacctggatggaactggaggctgttatcttaagtgaaataacttagaagtagaaagtcgaatacttcatgttctcactcataaatgggagctacataaagtgtacccatgaacatagagtgtggaacaaacattggagactcagaagggtgggaggagggtaagggatgagaaagtacctgatgggtacagtgtacacttttctggtgttggttgcaggaaaagcctggacttcaccacttcgcaatatatccgtgtaacaaaactgcacttgtacgccttatatttatacaaatttaattttttaaaagggaagagagaatcatattaatttctcaccactttttaagtaagcaaacagcagtatttcccagaggcaagaggttcagcaagaagtcaggaaatgtttttgtagataagcatctatcattctgatgggccatgactagtgtgttcacttgtaattcctttgcctttaaaaaaagagaatgatatcaaaaaataagtgccttatactgtgaaaaacgataaaaggacttcctgattctaagtgctatggttttgaatgtttattatgtgttttaagtgctttggctcagaaaggtgggggtcacgtggccaaggtcgcctaactcatcttggtggagaaagaacggatgtagatggcccaaggcttgagtccatgctccataacactgtcctgtcttggaaaacgtttctcagaggtgaaaggttgcaccagctcagccagtggcaacacactgagtacggtattcagcaccttggacagcgttagctggaggcccagggatttcctcccagctctgcaaagcctagaccagaccctgattgcaccaggttcagggggcagaagcttgtccaaagagcagatggttccagggggaggatttttactgggggagatttagaaaccgaactgaaccataatgagtcacgggacacagccctgtctgcagcagtaactgtccgcagctctagctgctccatgtctggagttaccaccacagggtgtaggaaaccaccagctgtctcaaggcaaggaatgtcacctaatgctcccctttccaattaatcactttaattggaggaaaaaacaaaaacacaaggacatgttacgggggaaggttttttaaagtgatctcaaattggattgcaaaggctcaagtgactttgggaatggggctggggagatgatcatttactttttacaataaataattttatctcacatctttagtcaagtttctcctaagtttggggagaatggggaaaaaatgtagtaagctttatgggactagcaacagaacgttttatcctattttgtgattttcagtattaagagattattgatcacttgcagagttacaaggcaagcactagtttaaatctgaattagactagggccattgaccttatatacctgtaaaagacactacggtgtatacaactgtagaaacaatatacacatagtagtttaatattacagtctgtattccaatgcagaatcttttgagaaaaggttgccaaaacatcatttgcatttacttgaacccttttttagacagaatcttgctctatcacccaggctggagtgcagtggtgtgatcacagctcactgcagccttgaactcttgggctcaaccaaccttcccacctcagcctcccaaattagctgggactataggctcgtgtcaccacatctaattttttatttttatatttgtggagttgaaggtcttgctctgttacccaggctggtcttgaactcctggccccaagcagtccttccaccttggcctcccaaagtgttgggattacaggcgttggccactgtacccagccttacttgaactcttaatacttattcccaagtggtacctaaaatggttttgtgcagtcacaatattaggtagcaatattatattgagctggaggaaaaagaagatttaggagtaaattgccaaggcaagttctgttaaaagctttctgtaatagacatcagggattttttttattcaggtaacctcaacagttttgattgcacatgtaacatagtacttgacaggtaatactgatttttataacttcataaaatattctcaagccatggaggagctcttatgtattttttaatgagtacacacacacacacacacacacacacacacacacacatatagtaaaagtggaggattcttttcttggaataatgatttctagcatttatctagaaaagattttgctgactaaattttccttttcctccagtggatttttaaacatcagtgcatgcacataaatacagattggatttttcctttaggctttatctatgtaaatgaagtcgattaaatgtgaataatcatgttacccttcattattctgaccattatgtttgagaagtagatttcttcactaaaggggctttgcagcacacttagaatgagtgagccactgtgcctctctagaaactggcttcttgtcatcatttcaacatccactcaaacgctcacccctgaaagtggccttcctgcttgatatggtttggctctgtgtctccacccaaattggtttggctctgtgtccccactgaaatctcatctcgaattgtaatccccataatccccatgtgtcaagggacggacctggtgggaggtaattggatcatggaggcagtttctcccatgctattcttgtgatagtgagttctcatgacactgatggttttgtgtttgatagctccttcacactctttctttcctgttgccatgtaagacatgcctgcttccccttccaccaggattgtaagtttcctgaggcctccccagccatgcggaactgtgagtctattaaatctcttttctttgtaaattaaaaaaaaaaaaaa

SEQ ID NO: 1570 - protein, 314 aa, Homo sapiens
MSAAEAGGVFHRARGRTLAAFPAEKESEWKGPFYFILGADPQFGLIKAWSTGDCDNGGDEWEQEIRLTEQAVQAINKLNPKPKFFVLCGDLIHAMPGKPWRTEQTEDLKRVLRAVDRAIPLVLVSGNHDIGNTPTAETVEEFCRTWGDDYFSFWVGGVLFLVLNSQFYENPSKCPSLKQAQDQWLDEQLSIARQRHCQHAIVFQHIPLFLESIDEDDDYYFNLSKSTRKKLADKFIHAGVKVVFSGHYHRNAGGTYQNLDMVVSSAIGCQLGRDPHGLRVVVVTAEKIVHRYYSLDELSEKGIEDDLMDLIKKK

SEQ ID NO: 1571 - DNA, 3853 bp, Homo sapiens
atgtgcggcccgcggcggctcgcagctcccggcagcagcctcggcagcttcggccgcgcctcgagaggcggccgcagaggctccagcggcggccgagcggccgagcccgggctgggagacaccatgcgccgcgtccttcggctgctcctcggttgcttcctcaccgagctgtgcgcccgcgtgtgccgggcgcaggagcgagcgggacacgggcagctggcgcaactgggcggcgtgttgctgctggcggggggcaaccgctccggggccgcctccggagaggccagcgagggcgctgaggcatcggacgcgcccccgacccgggcgcccacgccggacttctgccggggctacttcgatgtcatgggccagtgggacccgccgttcaactgcagctcgggcgacttcatcttctgctgcgggacttgtggcttccggttctgctgcacgtttaagaagcggcgactgaaccaaagcacctgcaccaactacgacacgccgctctggctcaacaccggcaagccccccgcccgcaaggacgaccccttgcacgaccccaccaaggacaagaccaacctgatcgtctacatcatctgcggggtggtggccgtcatggtgctcgtgggcatcttcaccaagctggggctggagaaagcgcaccggccccaaagggagcacatgtccaggctctatgacaatctgctgtttatggaggcacagatttctttccaagaggacgaacctgcccctggagagtggagtgtcggacttcaaacctggacagtctgagtgcacggatccttggccgctaggctgcactgcgtttgagtgcaaacctgcaggaattccagacttctcagatcacagagaagtacgcgatgccctgcaaacaacagctcatgcatcggggccagttcaagaagctaccgtaagatgaagtctaggaatgctttctatatcggccccggcaggcccagacgtcttggtggaggcgttggtgagaaatgaccttggggacagaagcacatatgtgaagctctctacacttgaagccagtagggaacacatgtcattattttgtccaccttcaaacagaattggaaatccaagtggcaaatggcagataagggtcctgtgtgtttttaaaacatgcttcagaagaactggcaccccttggaaagaaatagcaacaaataatgataaatgcacctcctcctcttgccttttgccttccagtttctctcctgcctctcatctttctatgcatttgtggttatcctaaggctttgaccagcttcccaggctggagaagtccatgtgtgcatgcatctactgttggccacagaaaagtcttaatttatttttctttgcagggtatgttgacttctctttgggcactgagtccttgcattttaaaaatcaacttcattgaagtataatttacacaataaaatgcacacattgtaagtgtgtagtttgatgagcttggacaaatgtctatacctgtgtaatcattactctagaaagctcactcatgcccattgcccttgcatttttgaaaaataattgatgcttcttgtgcaagaagaagtgctcaggaactctattcaagtgtttaaaagtcaacacatagattggacattgggatacctggaggctttgaagcaagataccgggactctgagttctgtttggaaatattggtgtcatatatttgtcattgtaattggaaagaaaagagatgcaccattttcttcttgttctttggataagctaagctcattcccatcttggagctgttgcactggcccttgtgtggctggtccctcctcatcaccagggtcccagctccaatgtcatcttctctgagaagccgtccctgaccaggcttagttgcttcccaccccagcctgacacactccagcccatcacccagtcagtgttatttgcttcatttttacattatggtctaaaattaacttgctagtttactggtttactagtttattatctgtctccttccattatccctctccttccctccttcccttccccttccttccttccttccttccttccttcgagacacagtcgtactctgtcaccccggctggagtgcagtggtgtgatcttgcctcactacaacccctgcctcctgggttttagcgattcttctgcctcagcctcccgagtagctgggactacaggcacccaccatgatgccaggctaatttttgtatttttattggagacagggtttcaccatgttggccaggctggtctcgaactcttgacctcaagtgatccacctgtctcggcctcccaaagtgctgggattacaggcatgagccactgcacctggcccttttattattcatagtaagacacacagggaccacaattgtctcttctactcagtagttggattctgagtgcctagttcagtatttggcaagtaagagttctgcatttgatatcctggtttacctggcacaacaaagtatctccaaattcattcattcattctttcattcattcgataggtatttactgaacatctaacttatgcccaacactgtgctgagagatatgagataaccatgaatagtacaaaagcaatccctgcccttgaagagcaaacagccaaatatcaggagacaggtaacacacaaggaaatgtacaagaaagttgagccagcacttttataagtactggttctagtactagctttcataagaaagtactggttctagtactagctttcagtactctcttgtgaaattttcaatattcagtcatttcaacctcaaaaatggcaacataattatgtttcaacataattgttgttttaaacaaacaattttgtttcaacataattctcctgaactgggtggaaggctatcaagaaaaagcttagcttcttcttcaggtaactgcaagagacagggttctctagagaaacagaacaaatatacaaagagattcattataaggaattggaagtccaaaatctccagagcctctgtacttgtacaagtctgaaggccgacaggcaggagaattctctctttttggggcaaaggtcagtgttttgttctatccaggctttcagatgattggttgaggctcactcacattagaagggcaatctgtcttactgccattagaatgcaacctgttttacttagcttactgatttcaatgttaatctatttcaagagcaccctcacagaaacacccagaataatgtttgatgaaatatctgggcaccctgtgacccagtcaagttgacacatgacactaaccatcacagtacgcttagggtcttgtcactcggagtgtggcctgtgaaccagcagcatttttatcttctgggagcttgggcacgatctcaggccccacctcctgcttattgattcagaatctgcattttaacaagatccccaggtgatctggatgcaccgtaacatctgagaagcactcaaactatgtgccgcaaacaaacgccaaattcttaggcatttgtgtggcttggagcacatagttggttctttctactgtctaattcattacattttttcagcacattcctgtctataaaatgtttttttgtatgcaccccaatatatgcacatttataagcatatgcatgaacccacgaacaatgattaggtacattatgaagcatacgtaaggacagaaatttcaaaccaagcttgagggtgaaataaatattatttgaaaacctgttgctaattgtgatgacttcatactatcattagttactatctcaatgcataatgtacagtgacgggtgaagtttatcattaataaaaaaaatctggattttaa

SEQ ID NO: 1572 - protein, 262 aa, Homo sapiens
MCGPRRLAAPGSSLGSFGRASRGGRRGSSGGRAAEPGLGDTMRRVLRLLLGCFLTELCARVCRAQERAGHGQLAQLGGVLLLAGGNRSGAASGEASEGAEASDAPPTRAPTPDFCRGYFDVMGQWDPPFNCSSGDFIFCCGTCGFRFCCTFKKRRLNQSTCTNYDTPLWLNTGKPPARKDDPLHDPTKDKTNLIVYIICGVVAVMVLVGIFTKLGLEKAHRPQREHMSRLYDNLLFMEAQISFQEDEPAPGEWSVGLQTWTV

SEQ ID NO: 1573 - DNA, 12351 bp, Homo sapiens
atgggagctacagggcgcctcgagctcacactggccgcccctccccatccgggcccagcctttcagcgttcaaaagccagggagacccaaggagaggaggaagggagtgaaatgcagatcgccaaaagtgactccatacatcacatgagccactcccaggggcagccagagctgcctcctctgcctgcttctgctaatgaggaaccgtctggactctatcagactgtcatgtcacacagcttttacccgcccttgatgcaacgcacgtcatggaccttggctgcacccttcaaagaacagcatcaccaccgtggacccagtgattccatcgccaacaactactccttgatggcccaggacctgaagctgaaagatctgctgaaggtctaccaaccggccaccatcagtgtccctagggacaggaccggtcaggggctgccatcatcaggaaatagaagctcatcagagcccatgaggaaaaaaacgaagttttcctccagaaacaaagaggattccactaggatcaagttggccttcaagacgtcaatcttctcacccatgaagaaggaggtaaagacatctttgacgttcccaggaagcagaccaatgagtccagaacagcagctcgatgtcatgttacagcaggagatggaaatggaaagtaaagaaaagaagccatctgaatcggacctggagagatactattactatctgaccaatggaattcgcaaagacatgattgcccctgaggagggtgaagtgatggttcggatttcaaagctgatttctaacacgctgctgacgagtcccttcctggagcccctgatggtggtcctcgtgcaggagaaggagaatgactattactgtagcctcatgaaaagcatcgttgattacatcctcatggacccaatggagagaaaacggctctttattgagagcatcccccgcttgtttcctcaaagagtgatccgggcccctgtgccctggcacagtgtctacaggagcgccaagaagtggaacgaggagcatctgcacacggtgaaccccatgatgctcaggctgaaagaactgtggtttgcagaattcagagacctcaggtttgttcgaacagcagaaatactagcgggaaaattgcctctgcagcctcaggaattttgggatgtgatccagaaacactgcctggaggcacaccagactcttctcaacaagtggatccccacctgcgcccagctttttacctcacggaaggagcactggattcattttgctcccaagagcaactatgactcaagtcgaaacattgaggaatattttgcttctgtggcatcattcatgtcgctgcagcttagggagctggtcattaagtcacttgaggacctcgtttcccttttcatgatacacaaagatgggaatgattttaaggagccctaccaagagatgaagtttttcatacctcagctaatcatgatcaaacttgaagtcagtgaacccattattgtcttcaatccatcttttgatggctgctgggaattaatacgtgactctttcctggaaattattaagaactctaatgggatccccaagctgaaatacataccacttaagttctccttcactgctgctgctgctgatcggcaatgtgtgaaagcagctgagccaggagagcccagcatgcacgcggctgccactgcaatggcagagctgaaaggatataatctgctccttggaactgttaacgcagaagaaaaacttgtttctgattttttgattcaaactttcaaggtatttcagaaaaatcaagttggcccctgcaaatatttaaatgtctacaaaaagtatgttgacttattggataacacggcagagcaaaacatcgctgcgttcctgaaagaaaatcatgacattgatgattttgtgacgaagatcaatgccataaagaaacggagaaatgaaattgcatccatgaacatcaccgtgcctttagccatgttctgccttgatgctacggccctaaatcatgatctctgtgagcgagctcaaaatcttaaagaccatctgattcaattccaagtggatgtaaaccgagacaccaataccagcatttgtaatcagtacagccacatcgcagacaaagtcagtgaggttcctgccaacactaaggagctggtatccctcattgaattcctaaagaaatccagtgctgtcactgtgttcaaactcaggaggcaacttagagatgcaagtgaacggctggagttcctgatggactatgcagacttgccgtaccagattgaagatatctttgacaacagccggaacttgctccttcacaagagggatcaggcagaaatggatctgattaaaagatgctcagaatttgagttgagacttgagggctaccacagagaactggaaagttttaggaagcgcgaagtgatgactacagaagaaatgaagcacaatgttgaaaagcttaatgagctttcaaagaacctaaatcgggcgtttgcagagtttgagttgatcaataaggaggaagagctattggaaaaggagaagagtacttaccctcttctgcaggccatgctgaagaacaaagtaccttatgagcagctgtggtcgacagcctatgagttcagcatcaagtcagaggaatggatgaatggacccctcttcttactgaatgctgagcaaattgcggaggagatagggaatatgtggaggacaacgtataaactgatcaagaccttgtctgatgtgcctgcacccaggcgcttagcagagaatgtgaagatcaagatcgataagttcaagcagtacattcccatcctcagtatttcctgcaacccaggaatgaaagaccgacactggcagcagatcagtgagattgttggctatgagataaagcccaccgaaacgacctgcctctcaaatatgctcgaatttggattcggcaaattcgttgaaaaattggagcccattggtgcagctgccagcaaggaatactctctggagaaaaacttggatagaatgaagttggattgggttaacgtgacgttcagcttcgtgaaatacagggacactgatacaaacatcttgtgtgcaattgatgacattcaaatgctacttgatgatcacgtgataaagacccagaccatgtgtggctccccattcatcaaaccaatagaagcagaatgccggaaatgggaagaaaagctaattcgcatacaagacaatttggatgcctggttgaaatgccaagccacctggctgtacctggaaccaatcttcagttcagaggacatcatagcccagatgccagaagaggggaggaaatttggcattgttgatagttactggaaatcacttatgtcccaagcggtgaaagataacaggattctggtggcagccgaccagccacggatggcagagaagcttcaagaagccaactttctcttggaggacatccagaaagggctgaatgattacttggagaagaagagactattcttccccagattcttcttcctatcaaacgatgagctgctggaaatcttgtccgagacaaaggaccctctccgagtgcagccgcacttgaagaagtgctttgaaggaattgccaagcttgagtttacagacaatctggaaattgtgggcatgatcagctcggaaaaagaaactgttccattcatacagaaaatctacccagctaatgccaagggcatggtggaaaagtggctccagcaggtggagcagatgatgctggccagtatgcgagaagtcattggacttgggattgaagcatatgtcaaggtccctcgaaatcactgggtcttacagtggcctggacaggtggttatctgtgtctcctccatcttttggacccaggaggtgtcccaagccctggcggaaaataccttactggattttctgaaaaagagcaatgatcagattgcgcagattgtccagctggtgcgagggaagctgagcagtggagctcgactcactctcggggccctcacggtcatcgatgtccacgcccgcgacgtggtggccaagttatctgaggacagggtctccgatctgaatgatttccaatggatctcacagctgcgctactactgggtggccaaggatgtgcaggtgcagattatcaccacagaagccttgtatggctatgagtacctgggaaactccccccggctggtgatcacacccctcaccgaccgctgctacaggacactgatgggagctttgaagctgaaccttgggggtgctccagagggtccagctgggactggcaagacagaaaccaccaaagatttggccaaagccttggctaagcagtgtgtggtcttcaactgctccgatggtttggattacaaagctatggggaagttcttcaaggggctggcacaggctggagcatgggcgtgctttgatgagttcaacaggatcgaggtagaagtgctgtctgtggtcgctcagcagatcctcagcatccaacaagccatcattcggaagctaaagacattcatctttgaagggactgagctctctctgaacccaacctgcgctgtgttcatcaccatgaaccccgggtatgctggcagggctgaactgcccgacaatctcaaggccttgttccggacagtggccatgatggtcccagattacgccctcattggagaaatctccctctactccatggggtttctggactccagaagtctcgcccagaagatcgttgcgacctaccgcctgtgctcggaacaactgtcctctcagcatcactatgactacggtatgcgcgctgtcaagtctgtgcttactgccgcaggaaacctgaagctcaagtatccagaggagaatgaaagtgtcctgctgctccgggcattgcttgatgtcaatctggccaagttcttagcgcaagatgtccctctgtttcagggaattatatctgatttatttcctggagttgttcttccaaagccagactatgaagtttttctgaaagtgctgaatgataacatcaaaaagatgaaactccagccagtaccttggtttatagggaaaattatccagatctacgaaatgatgctggtgagacatggctatatgattgtaggagaccccatgggcggcaagacctctgcttataaagtgttggctgcagctctcggcgatttacacgcagccaatcagatggaggagtttgctgtggagtacaagatcatcaaccccaaggctatcacgatggggcagctgtatgggtgctttgaccaagtgagccacgagtggatggatggtgtccttgccaatgctttccgggagcaagcgtcttcactctctgatgatcgcaagtggattatatttgatgggccagtggatgctatttggattgaaaatatgaacactgttctggatgacaataaaaagctgtgtctcatgagtggggaaattatccagatgaactccaagatgagcctgatcttcgagcccgccgacctcgagcaagcctctccagccactgtgagcaggtgtgggatgatctacatggagccccatcaactaggctggaagcccctgaaggattcctacatggacaccctgccctccagtctcaccaaggagcacaaagaattggtcaatgacatgttcatgtggcttgtccagccctgcctggaatttggtcgccttcattgtaaatttgttgtccagacatctcccatccaccttgccttctcaatgatgagactgtactcttctctgcttgatgaaatcagggcagtagaagaggaggaaatggaattaggtgaaggcctgtcaagtcaacagatctttctctggctccaaggactgtttctcttttccttggtgtggaccgtggctggcaccatcaacgcagacagcagaaagaaatttgatgtgtttttccgcaacctgatcatgggcatggatgataaccacccaaggcccaaaagcgtcaaactcaccaaaaacaacatctttccagaaagaggaagcatctatgatttttattttatcaaacaagctagtggacattgggaaacgtggacacagtatatcaccaaagaggaggaaaaagttccagctggtgcaaaggtctcagaactcatcatccccacaatggagacagcccggcagtccttcttcttgaaaacctacttagaccatgagattccaatgctgttcgtgggtcccacaggcactggcaaatcagccatcaccaacaacttccttctccaccttcccaaaaatacgtacctacccaactgcatcaatttctctgccagaacctcagccaatcagacccaggatatcatcatgtccaagctggatcgacgacggaagggccttttcgggcctcccatagggaagaaagcagtggtgtttgtggatgacctcaacatgccagccaaagaggtgtatggggcccagccacccatcgagctcctgaggcagtggattgaccatggttactggtttgacaagaaagacacaaccaggctggacatcgtggacatgctgctcgtgacagccatggggccccccgggggaggaaggaatgacattactggacgattcactcgccatctgaatatcatttccatcaatgcctttgaggatgacattttaaccaagattttcagttcgattgttgactggcacttcgggaaagggtttgatgtgatgtttttaaggtacggaaagatgctggtccaagctactaagacaatttatagagatgcagtggagaacttcttgccaactccctcgaagtcacattacgtctttaacctgcgggacttctcacgagtgattcaaggggtcctgctgtgccctcacacacacctgcaggatgtagaaaaatgtatccggctttggatccatgaggtttatcgggtcttctatgatcgtctgattgacaaggaggacagacaggtctttttcaacatggtgaaggaaaccacctccaattgcttcaagcagaccatagagaaggtgcttatccacttgtcacccactggaaagatagtcgatgataacattcgaagcctcttctttggagattatttcaagccagaaagtgaccaaaaaatctacgatgagatcactgacctgaaacagctgactgtggtcatggagcactatctggaagaattcaacaacatcagcaaggcccccatgtccctggtcatgttcaggtttgccattgagcacatctctaggatctgccgtgtcctgaagcaggacaaaggccacctgctcctggtgggcatagggggcagcgggcggcaaagtgccgccaaactgtccacattcatgaacgcatacgagctataccagattgagatcaccaagaactacgcaggcaatgactggcgagaagatcttaagaagatcatactgcaggtcggtgtggccaccaagagcaccgtgttcctcttcgccgacaaccagatcaaggatgaatcattcgtggaggacatcaacatgcttctgaacacaggtgacgtgcctaacatcttccctgctgacgagaaggctgacatcgtggagaagatgcagactgcagccaggacccaaggagagaaggttgaagtcactcctctttctatgtataacttctttattgagagggtaattaacaaaatctccttttcattagccatgagtccaataggggatgccttcaggaaccgcctgcggatgttcccttcgctgatcaattgctgtacgattgattggttccagtcctggcccacagatgccctagagttggtggctaacaaatttctagaggatgtggagcttgatgacaacattcgggtagaggtcgtgtccatgtgcaaatatttccaagagagcgtcaagaagctgtcactcgattattacaacaaacttcgaagacacaactatgttacccccacctcctaccttgaattgattctaaccttcaagacgctcctgaatagcaagaggcaagaggtggctatgatgaggaaccgctacctgacaggcttgcagaaactcgactttgcagcttctcaggtagcggttatgcaaagagaactgacagctcttcaacctcaactcatcctcacctccgaggaaactgccaagatgatggtgaaaattgaagcggagacgagagaagctgatggaaagaaacttctggtgcaggcagatgaaaaagaagccaatgttgctgctgccattgcccaaggaatcaagaacgaatgtgagggggacctagctgaggcaatgcctgcactcgaggctgcactagctgctctggacaccctgaacccggccgacatctcgctggtgaagtcgatgcagaacccaccaggccctgtcaaactggtcatggagagcatctgcatcatgaaagggatgaagccagagaggaagccagaccccagtggctccggtaagatgatagaagattactggggggtatccaaaaagattcttggggatctgaaattcttggagagtcttaagacatatgacaaagacaacatccccccactgaccatgaagcggatccgggaaaggtttatcaatcacccggaattccagccagctgtcattaaaaatgtatcgtcggcctgcgagggtctgtgcaagtgggtgagggccatggaggtgtacgatcgcgtggccaaggtggtggctcccaaacgggagcgactgagggaggcagaggggaagctggctgcacagatgcagaagctgaaccagaaaagagcagagctgaagctggtggtagatcggctccaggccctgaatgacgactttgaagagatgaacaccaagaaaaaggacttggaggaaaacattgaaatctgctcccaaaagctggtcagggcagagaaactgatcagtggtcttgggggagagaaggacagatggaccgaagctgcccgacagctggggatccgctatactaatctgactggtgacgtgttgctgtcctcaggaactgtggcttacctgggcgcttttacagtggattatcgggtccagtgccaaaatcagtggttggctgaatgtaaggacaaggtcatccctggcttcagtgacttcagtctcagccacacgttaggggatcccataaaaatccgtgcctggcagattgctgggcttcccgttgactccttctccatcgacaatggcatcattgtatccaattccagacgctgggccttaatgattgaccctcacgggcaggccaataaatggattaagaacatggagaaggcgaataaactggctgtcatcaagttctctgatagcaactacatgaggatgctggaaaacgcgctgcagttaggcacccctgtcttgattgaaaacattggagaagagctggatgcttctatcgaacctatcttgctcaaggcaacattcaaacagcaaggagttgagtacatgaggctgggtgaaaacatcattgaatattccagggattttaagttatacatcacaacccgtttgaggaatccacattacctcccagaagttgccgtgaaggtctgtctcctcaacttcatgatcacccccttgggtctccaagatcaactccttggcatcgtggctgcgaaggagaagccagagctggaagagaaaaagaaccagttgattgtggaaagtgccaagaacaagaagcatctcaaggaaattgaagataagatcttggaggttctctccatgtccaagggtaacatcctggaggatgaaaccgccatcaaagttctgtcctcctccaaagtgctatctgaagagatctcagagaaacagaaagttgcttccatgacagaaacgcagattgacgagactcggatgggctacaagccagtggctgtgcattctgccaccatcttcttttgtatctcggacctggccaacatcgagccgatgtaccagtactccctgacttggttcataaatctctacatgcattccttgacccacagcacgaagagcgaggaactgaatctgcgcatcaagtacatcattgaccatttcaccctgagcatctacaacaacgtgtgccgttctctgtttgagaaggacaagctactcttctctctcctcctgaccatcggcatcatgaaacagaagaaggaaattacggaggaggtgtggtacttccttctcactggaggcatcgcactggataacccctaccccaatccagctccccaatggctgtctgagaaggcatgggcagagattgtccgtgcatctgccttacccaaactgcatggcctgatggagcatttggaacagaacctgggtgaatggaagctgatctatgactcggcctggccccatgaggagcaactccctgggtcttggaagttctctcaaggattggagaagatggtgatccttcgatgtttgcggcctgacaaaatggtgccagcggtccgggagttcattgctgaacatatgggaaagctgtatatcgaagcccctacgttcgatctccagggatcctacaatgattccagctgctgtgcgcctttgatttttgtgttgtctccaagtgcagacccaatggcaggcctgctgaagtttgctgatgatcttggtatgggaggtaccagaacacagaccatctcccttggccaaggccaaggccctattgctgccaaaatgatcaacaatgccatcaaagacgggacctgggtggtcttacagaactgccacctggccgcaagctggatgcctaccctggagaagatttgtgaggaggtgattgttcctgagagcaccaatgccagattcagactctggctaaccagctatccatcagagaagtttccagtcagcattctccagaatggaatcaaaatgaccaatgagccccccaaagggctccgggccaacctgttgcgctcctacctcaatgaccccatctcagatcctgtgttcttccaaagctgtgcaaaggcggtgatgtggcaaaagatgttatttggcctttgtttcttccacgccgttgttcaagagagaagaaacttcggccccctagggtggaatattccctatgaattcaacgaatctgacctgaggattagtatgtggcagatccagatgtttctcaatgactacaaggaggtgccctttgatgctctgacctacctgacaggggaatgtaattacggaggcagagtgactgatgacaaagaccggcgtctcctgctgtcacttctgtccatgttctactgtaaggaaattgaggaggactattactccctcgctcctggagacacttactacatccctcctcatggctcctaccagtcctatatcgactatctcaggaatctccccatcacagcccacccagaagtgttcggcctccatgagaacgcagacatcaccaaagacaaccaggaaaccaaccagctgtttgagggggtcctgctgaccctccctagacagtcaggaggaagtggcaagtcccctcaggaagtggttgaggagttggcacaagacattctctccaagcttcccagagactttgacctggaagaggtcatgaagttgtaccccgtggtctatgaagaatccatgaataccgtcctaaggcaggagctcatcagattcaacaggctgaccaaagtggttcggaggagcctcatcaatcttggccgagccatcaaaggacaggtcctgatgtcctcggagctagaggaagtctttaacagcatgcttgtgggtaaagtgccagccatgtgggcagccaagtcttacccatcactgaagcctctggggggctacgtggctgacctgctggcccgcctgaccttcttccaggaatggattgacaaggggccccctgtggtattttggatctctggattctacttcacacagtcttttttgactggcgtctctcaaaattatgcccggaaatataccatccccattgaccacattggatttgagtttgaggtaaccccacaagaaacagtgatggagaataaccccgaagatggggcctacatcaaagggctcttcttagaaggtgcccgttgggacaggaaaacgatgcagattggggaatctctccccaaaatcctctatgacccactgcccatcatttggctgaaacctggggagagcgcaatgtttctgcatcaggacatctatgtgtgtccagtctacaaaacaagtgcccgcagaggaaccctctccaccacaggccactctaccaactatgtcctctccattgagcttccaacagacatgccccagaagcactggataaaccgaggggtggcctcactgtgccagctggataactga

SEQ ID NO: 1574 - protein, 4116 aa, Homo sapiens
MGATGRLELTLAAPPHPGPAFQRSKARETQGEEEGSEMQIAKSDSIHHMSHSQGQPELPPLPASANEEPSGLYQTVMSHSFYPPLMQRTSWTLAAPFKEQHHHRGPSDSIANNYSLMAQDLKLKDLLKVYQPATISVPRDRTGQGLPSSGNRSSSEPMRKKTKFSSRNKEDSTRIKLAFKTSIFSPMKKEVKTSLTFPGSRPMSPEQQLDVMLQQEMEMESKEKKPSESDLERYYYYLTNGIRKDMIAPEEGEVMVRISKLISNTLLTSPFLEPLMVVLVQEKENDYYCSLMKSIVDYILMDPMERKRLFIESIPRLFPQRVIRAPVPWHSVYRSAKKWNEEHLHTVNPMMLRLKELWFAEFRDLRFVRTAEILAGKLPLQPQEFWDVIQKHCLEAHQTLLNKWIPTCAQLFTSRKEHWIHFAPKSNYDSSRNIEEYFASVASFMSLQLRELVIKSLEDLVSLFMIHKDGNDFKEPYQEMKFFIPQLIMIKLEVSEPIIVFNPSFDGCWELIRDSFLEIIKNSNGIPKLKYIPLKFSFTAAAADRQCVKAAEPGEPSMHAAATAMAELKGYNLLLGTVNAEEKLVSDFLIQTFKVFQKNQVGPCKYLNVYKKYVDLLDNTAEQNIAAFLKENHDIDDFVTKINAIKKRRNEIASMNITVPLAMFCLDATALNHDLCERAQNLKDHLIQFQVDVNRDTNTSICNQYSHIADKVSEVPANTKELVSLIEFLKKSSAVTVFKLRRQLRDASERLEFLMDYADLPYQIEDIFDNSRNLLLHKRDQAEMDLIKRCSEFELRLEGYHRELESFRKREVMTTEEMKHNVEKLNELSKNLNRAFAEFELINKEEELLEKEKSTYPLLQAMLKNKVPYEQLWSTAYEFSIKSEEWMNGPLFLLNAEQIAEEIGNMWRTTYKLIKTLSDVPAPRRLAENVKIKIDKFKQYIPILSISCNPGMKDRHWQQISEIVGYEIKPTETTCLSNMLEFGFGKFVEKLEPIGAAASKEYSLEKNLDRMKLDWVNVTFSFVKYRDTDTNILCAIDDIQMLLDDHVIKTQTMCGSPFIKPIEAECRKWEEKLIRIQDNLDAWLKCQATWLYLEPIFSSEDIIAQMPEEGRKFGIVDSYWKSLMSQAVKDNRILVAADQPRMAEKLQEANFLLEDIQKGLNDYLEKKRLFFPRFFFLSNDELLEILSETKDPLRVQPHLKKCFEGIAKLEFTDNLEIVGMISSEKETVPFIQKIYPANAKGMVEKWLQQVEQMMLASMREVIGLGIEAYVKVPRNHWVLQWPGQVVICVSSIFWTQEVSQALAENTLLDFLKKSNDQIAQIVQLVRGKLSSGARLTLGALTVIDVHARDVVAKLSEDRVSDLNDFQWISQLRYYWVAKDVQVQIITTEALYGYEYLGNSPRLVITPLTDRCYRTLMGALKLNLGGAPEGPAGTGKTETTKDLAKALAKQCVVFNCSDGLDYKAMGKFFKGLAQAGAWACFDEFNRIEVEVLSVVAQQILSIQQAIIRKLKTFIFEGTELSLNPTCAVFITMNPGYAGRAELPDNLKALFRTVAMMVPDYALIGEISLYSMGFLDSRSLAQKIVATYRLCSEQLSSQHHYDYGMRAVKSVLTAAGNLKLKYPEENESVLLLRALLDVNLAKFLAQDVPLFQGIISDLFPGVVLPKPDYEVFLKVLNDNIKKMKLQPVPWFIGKIIQIYEMMLVRHGYMIVGDPMGGKTSAYKVLAAALGDLHAANQMEEFAVEYKIINPKAITMGQLYGCFDQVSHEWMDGVLANAFREQASSLSDDRKWIIFDGPVDAIWIENMNTVLDDNKKLCLMSGEIIQMNSKMSLIFEPADLEQASPATVSRCGMIYMEPHQLGWKPLKDSYMDTLPSSLTKEHKELVNDMFMWLVQPCLEFGRLHCKFVVQTSPIHLAFSMMRLYSSLLDEIRAVEEEEMELGEGLSSQQIFLWLQGLFLFSLVWTVAGTINADSRKKFDVFFRNLIMGMDDNHPRPKSVKLTKNNIFPERGSIYDFYFIKQASGHWETWTQYITKEEEKVPAGAKVSELIIPTMETARQSFFLKTYLDHEIPMLFVGPTGTGKSAITNNFLLHLPKNTYLPNCINFSARTSANQTQDIIMSKLDRRRKGLFGPPIGKKAVVFVDDLNMPAKEVYGAQPPIELLRQWIDHGYWFDKKDTTRLDIVDMLLVTAMGPPGGGRNDITGRFTRHLNIISINAFEDDILTKIFSSIVDWHFGKGFDVMFLRYGKMLVQATKTIYRDAVENFLPTPSKSHYVFNLRDFSRVIQGVLLCPHTHLQDVEKCIRLWIHEVYRVFYDRLIDKEDRQVFFNMVKETTSNCFKQTIEKVLIHLSPTGKIVDDNIRSLFFGDYFKPESDQKIYDEITDLKQLTVVMEHYLEEFNNISKAPMSLVMFRFAIEHISRICRVLKQDKGHLLLVGIGGSGRQSAAKLSTFMNAYELYQIEITKNYAGNDWREDLKKIILQVGVATKSTVFLFADNQIKDESFVEDINMLLNTGDVPNIFPADEKADIVEKMQTAARTQGEKVEVTPLSMYNFFIERVINKISFSLAMSPIGDAFRNRLRMFPSLINCCTIDWFQSWPTDALELVANKFLEDVELDDNIRVEVVSMCKYFQESVKKLSLDYYNKLRRHNYVTPTSYLELILTFKTLLNSKRQEVAMMRNRYLTGLQKLDFAASQVAVMQRELTALQPQLILTSEETAKMMVKIEAETREADGKKLLVQADEKEANVAAAIAQGIKNECEGDLAEAMPALEAALAALDTLNPADISLVKSMQNPPGPVKLVMESICIMKGMKPERKPDPSGSGKMIEDYWGVSKKILGDLKFLESLKTYDKDNIPPLTMKRIRERFINHPEFQPAVIKNVSSACEGLCKWVRAMEVYDRVAKVVAPKRERLREAEGKLAAQMQKLNQKRAELKLVVDRLQALNDDFEEMNTKKKDLEENIEICSQKLVRAEKLISGLGGEKDRWTEAARQLGIRYTNLTGDVLLSSGTVAYLGAFTVDYRVQCQNQWLAECKDKVIPGFSDFSLSHTLGDPIKIRAWQIAGLPVDSFSIDNGIIVSNSRRWALMIDPHGQANKWIKNMEKANKLAVIKFSDSNYMRMLENALQLGTPVLIENIGEELDASIEPILLKATFKQQGVEYMRLGENIIEYSRDFKLYITTRLRNPHYLPEVAVKVCLLNFMITPLGLQDQLLGIVAAKEKPELEEKKNQLIVESAKNKKHLKEIEDKILEVLSMSKGNILEDETAIKVLSSSKVLSEEISEKQKVASMTETQIDETRMGYKPVAVHSATIFFCISDLANIEPMYQYSLTWFINLYMHSLTHSTKSEELNLRIKYIIDHFTLSIYNNVCRSLFEKDKLLFSLLLTIGIMKQKKEITEEVWYFLLTGGIALDNPYPNPAPQWLSEKAWAEIVRASALPKLHGLMEHLEQNLGEWKLIYDSAWPHEEQLPGSWKFSQGLEKMVILRCLRPDKMVPAVREFIAEHMGKLYIEAPTFDLQGSYNDSSCCAPLIFVLSPSADPMAGLLKFADDLGMGGTRTQTISLGQGQGPIAAKMINNAIKDGTWVVLQNCHLAASWMPTLEKICEEVIVPESTNARFRLWLTSYPSEKFPVSILQNGIKMTNEPPKGLRANLLRSYLNDPISDPVFFQSCAKAVMWQKMLFGLCFFHAVVQERRNFGPLGWNIPYEFNESDLRISMWQIQMFLNDYKEVPFDALTYLTGECNYGGRVTDDKDRRLLLSLLSMFYCKEIEEDYYSLAPGDTYYIPPHGSYQSYIDYLRNLPITAHPEVFGLHENADITKDNQETNQLFEGVLLTLPRQSGGSGKSPQEVVEELAQDILSKLPRDFDLEEVMKLYPVVYEESMNTVLRQELIRFNRLTKVVRRSLINLGRAIKGQVLMSSELEEVFNSMLVGKVPAMWAAKSYPSLKPLGGYVADLLARLTFFQEWIDKGPPVVFWISGFYFTQSFLTGVSQNYARKYTIPIDHIGFEFEVTPQETVMENNPEDGAYIKGLFLEGARWDRKTMQIGESLPKILYDPLPIIWLKPGESAMFLHQDIYVCPVYKTSARRGTLSTTGHSTNYVLSIELPTDMPQKHWINRGVASLCQLDN

SEQ ID NO: 1575 - DNA, 1811 bp, Homo sapiens
gttcctcctcctgcctctcttcgcttcgcctgcaaacgcggtgggggctgctcggcggtcaggagcaggttaccctccgtctgcatgcccaccatcaaggtatgaggatggtagaagctctcgtcgaaccagatggatgaagaccactaacggcttttgtttcctctggtaacagcaagagacagagcgacatgagagactggaccgcgggctgcactggagaatttactggtaggataattcatccctaaagagattgaagtgagcttcagaatggcaaaagaggagccccagagtatctcaagggacttgcaggaactgcagaagaagctgtctctgctgatagactccttccagaataactcaaaggtggtggcctttatgaagtctccagtgggtcagtacttggacagccatccgtttctggccttcaccttgctggtgttcattgtcatgtcggccgttcctgttggattcttcctgctcatcgtggtgcttaccaccctggctgctctgctgggggtcataatattggaaggattggtcatctctgtgggtggcttctcactgctctgcatcctctgtggtttgggcttcgtatcactcgccatgtcggggatgatgatagcatcttatgtagtggtctccagcctcatcagctgctggttttctcccaggccactgacacagcaaaacaccagttgtgactttctgccagccatgaagtctgcagacttcgaggggctttaccaggaatgagtgactgctcagaggccgggcttcttttcaagtactgctggatcatactcaccccttgggattatggcttagaagaagggggctgggtaggcaagcactccttggctgtgtcctctcgctttttcacttacttgtaggatcccgcagcagccaatttagggattgtgttgttcttgtgttggttcccatgtaaagaagcagcagagaaatgcgatggttcaacagctcgccctgccccaagtatgcagacttgaccttggcggggtcctgggcttctagagtctagcccgttgaccccaaagcctcagggcttatgtccaacggtcccattgggagcaacagtgattgtttatagttttttgttttcagaaatgagggcagctgttaattttttcactcatgtgaaacaaaatgaaaaaaaaaatccaaaacagaacaagcccttctgtggtatttgctttttatcagaaagaacagcaacatttggcctctccaagttggaaaatagagtccaaatgtaactttgtggccaagagtattttcaaaaaagtctaaaggtgtagtttccactgtaactgttgagtactgttaagtactgttaatcttttacatatttgcacttggtactgttgtattgttctaaagagcttgtcctttaagtaatttctttctttttttttttttttttttttgtgacggagtttccctcttgttgcccaggctggagtgcaacggtgcagtctcggctcactgcaacctccaactcccaggttcaagtgagtctcgtgcctcagcctcccaagtagctgggattacaggcacccgccaccgtgcccggctagtttttttttgtattttttttagtacagatggggtttcaccatgttggtcaggctagtctcaaactcctgacctcaggtgctccacctgccttggcctcccaaagtgctgggattacaggcgtgagccactgtgcccagcctaagccatttcttaaaataaaaatgctaaaggactagtaagtaaaaataaaacttcctatgggatttccc

SEQ ID NO: 1576 - protein, 161 aa, Homo sapiens
MAKEEPQSISRDLQELQKKLSLLIDSFQNNSKVVAFMKSPVGQYLDSHPFLAFTLLVFIVMSAVPVGFFLLIVVLTTLAALLGVIILEGLVISVGGFSLLCILCGLGFVSLAMSGMMIASYVVVSSLISCWFSPRPLTQQNTSCDFLPAMKSADFEGLYQE

SEQ ID NO: 1577 - DNA, 1968 bp, Homo sapiens
cgcagggccacagcagctcagccgccggtgccccctcggaaaccatgacccccggcgcgggcccatggagccatggcctatagggtcctgggccgcgcggggccacctcagccgcggagggcgcgcaggctgctcttcgccttcacgctctcgctctcctgcacttacctgtgttacagcttcctgtgctgctgcgacgacctgggtcggagccgcctcctcggcgcgcctcgctgcctccgcggccccagcgcgggcggccagaaacttctccagaagtcccgcccctgtgatccctccgggccgacgcccagcgagcccagcgctcccagcgcgcccgccgccgccgtgcccgcccctcgcctctccggttccaaccactccggctcacccaagctgggtaccaagcggttgccccaagccctcattgtgggcgtgaagaaggggggcacccgggccgtgctggagtttatccgagtacacccggacgtgcgggccttgggcacggaaccccacttctttgacaggaactacggccgcgggctggattggtacaggagcctgatgcccaggaccctcgagagccagatcacgctggagaagacgcccagctactttgtcactcaagaggctcctcgacgcatcttcaacatgtcccgagacaccaagctgatcgtggttgtgcggaaccctgtgacccgtgccatctctgattacacgcagacactctccaagaagcccgacatcccgacctttgagggcctctccttccgcaaccgcaccctgggcctggtggacgtgtcatggaacgccatccgcatcggcatgtacgtgctgcacctggagagctggctgcagtacttcccgctagctcagattcacttcgtcagtggcgagcgactcatcactgacccggccggcgagatggggcgagtccaggacttcctgggcattaagagattcatcacggacaagcacttctatttcaacaagaccaaaggattcccttgcttgaaaaaaacagaatcgagcctcctgcctcgatgcttgggcaaatcaaaagggagaactcatgtacagattgatcctgaagtgatagaccagctccgagaattttatagaccgtataatatcaaattttatgaaaccgttgggcaggacttcaggtgggaataagcccacgaaaggaaagggctctcaagggctcttctgctcatctcttccgtgagatttgctcccagaccctctgatctccctccaacaaaccctggctccagccccctttcccaacttgagttgcatcatcttggaaccaggaagcccagctaaagccaagagaccagagagtccctgccactagttttcatcagtctgttcaagcaaagttgatctgctcctggcacgtccagtaaattccagaatcattctcctttctgcccataaagggccttggagaattgctttaagaagagtgaatgttccaatgatgatagatattataagcgatgatggttctgttgctatgaacacagcagtcggtccctgtcattgtccacccaggagtggccttgttaattccaagtggcatgtatcttccctctgagcttcatttcttcaagatgctctgggtggtgggatgggagaccatcctcagccctcctcagaccttatcaattcattgagagattgcaaagctgaaagcacctccggccactcctgggagacagaccctttggtgatgaaataaaccagtgacttcagagcctatggtctcaactgtgcttgaaaaacactgtctctgaaaacaactttgtgattctccctgctccctgtggacaaaagcacataattctgctgttacgggtactttgctcatacgagctttcatgttcagcatgcaatggaatcatgcttgtccatgtgaaataaatatggctctctcgtgtccttaaaaaaaaaaaaaaaaaa

SEQ ID NO: 1578 - protein, 367 aa, Homo sapiens
MAYRVLGRAGPPQPRRARRLLFAFTLSLSCTYLCYSFLCCCDDLGRSRLLGAPRCLRGPSAGGQKLLQKSRPCDPSGPTPSEPSAPSAPAAAVPAPRLSGSNHSGSPKLGTKRLPQALIVGVKKGGTRAVLEFIRVHPDVRALGTEPHFFDRNYGRGLDWYRSLMPRTLESQITLEKTPSYFVTQEAPRRIFNMSRDTKLIVVVRNPVTRAISDYTQTLSKKPDIPTFEGLSFRNRTLGLVDVSWNAIRIGMYVLHLESWLQYFPLAQIHFVSGERLITDPAGEMGRVQDFLGIKRFITDKHFYFNKTKGFPCLKKTESSLLPRCLGKSKGRTHVQIDPEVIDQLREFYRPYNIKFYETVGQDFRWE

SEQ ID NO: 1579 - DNA, 1390 bp, Homo sapiens
atgggaaaggaaaatactcacatcaacattgtcatcattggacatgtagattcaggcaagtcaacctccactgcccatctgatctacgaatgtggtggcattgacaaaagaaccattgtaaaatttgagaaagaggctgctgagatgggaaagggctccttcaagtatgcctgggacttagatagactgaaagctgagcatgaatgtggtatcaccattgatatctccctgtggaattttgagaccagccagtgctacgtgactatcattgatgcccctggacacagagacttcatcaaaaacatgattacagggacatctcaggctgactgtgctgtcctgattgttgctgctggtgttggtgaatttgaagctggtatttccaagtatgggcagacctgtgagcatgcccgctggcttacacactaggtgtgaaacaactaattgttggtgttcacaaaatggattccaccgagccaccctatggccagaagagatacaaggaaatcgttaaggaagtcagcacttacataaaaaaaattggctacaactctgacacagcagcatttgtgccaatttctggttggaatggtgacaacatgctggagtcaagtgctaatatgccttggttcaagggatggaaagcaacctgtaaggatggcaatgccagtggaaccacactgcttgaggttcttgactgcatcctaccaccaacttgtctaattgacaagcccttgcgcctgcctttccaggatgtctacaaaattggtggtattggtactgttcctgttggccgaatggacactggtgttctcaaacccagcatggaggtcacctttgctcttgtcagtgttacaactgaagtaaattgtgttgaaaagcaccatgaagctttgagtgaagctcttcctgggcacaatgtgggcttcaatgtcaagaacatgtccgtcaaggagattcgtcatagcaacgatgctggtgacagcaaaaagaaaacccacaaatggaagcagctggcttccccgcttaggtgattatcctgaaccacccaggccaaataagtgtggactatgcccctgtactggactgccacacggctcatattgcctgcaagtttgctaagctgaaggaaaagattgatctccattctggtaaaaatctggaagacggccctaaattcttgaaatctggtgatgctgccatcgttgatatggttcctagaaagctcatgtgtattgagagcttctcagactattcacctctgggtcgctttgctattcgtgatatgagacagacagttgctgtgggtgtcatcaaatcagtggacaagaaggctgctgaagctggcaaggtcaccaagtctgcccagaaagctcagaaggctaaatga

SEQ ID NO: 1580 - DNA, 5143 bp, Homo sapiens
ttattctgccccagctgatgtttgagccagcatgtcgcggaggaagcaagcgaagcctcaacatttccaatccgaccccgaagtggcctcgctcccccggcgagatggagacacagaaaagggtcaaccgagtcgccctactaagagcaaggatgcccacgtctgtggccggtgctgtgccgagttctttgaattatcagatcttctgctccacaagaagaactgtactaaaaatcaattagttttaatcgtaaatgaaaatccagcctccccacccgaaaccttctcccccagcccccctcctgataatcctgatgaacaaatgaatgacacagttaacaaaacagatcaagtggactgcagcgacctttcagaacacaacggacttgacagggaagagtccatggaggtggaggccccggttgctaacaaaagcggcagcggcacttccagcggcagccacagcagtaccgccccaagcagcagcagcagcagcagcagcagcagcggcggcggcggcagctcctccacaggtacctcagcgatcacaacctctctacctcaactcggggacctgacaacactgggcaacttctccgtaatcaacagcaacgtcatcatcgagaacctccagagcaccaaggtggcggtggcccagttctcccaggaagcgaggtgcggcggggcctctgggggcaagctggccgtcccagccctcatggaacaactcctagctctgcagcagcagcagatccaccagctgcaattgatcgaacagattcgtcaccaaatattgctgttggcttctcagaatgcagacttgccaacatcttctagtccttctcaaggtactttacgaacatctgccaaccccttgtccacgctaagttcccatttatctcagcagctggcagcagcagctggattggcacagagcctcgccagccaatctgccagcattagtggtgtgaaacagctacccccaatccagctacctcagagcagttctggcaacaccatcattccatccaacagcggctcttctcccaatatgaacatattggcagcggcagttaccaccccgtcctctgaaaaagtggcttcaagtgctggggcctcccatgtcagcaacccagcggtctcatcatcgtcctcaccagcttttgcaataagcagtttattaagtcctgcgtctaatccacttctacctcagcaagcctccgctaactcggttttccccagccctttgcccaacatcggaacaactgcagaggatttaaactccttgtctgccttggcccagcaaagaaaaagcaagccaccaaatgtcactgcctttgaagcgaaaagtacttccgatgaggcattcttcaaacacaagtgcaggttctgcgcgaaggtctttgggagtgacagtgccttgcagatccacttgcgttcccataccggagagaggccattcaagtgcaacatctgcgggaacaggttctccaccaaggggaatctgaaagtccactttcagcgccacaaagagaaataccctcatatccagatgaacccctatcctgtgcctgagcatttggacaatatccccacgagtactggcatcccatatggcatgtccatccctccagagaagccagtcaccagctggctagacaccaaaccagtcctgcctactctgaccacttcagtcggcctgccgttgcccccaaccctcccaagcctcatacccttcatcaagacggaagagccagcccccatccccatcagccattctgccaccagccccccaggctcagtcaaaagtgactccgggggccctgagtcagccacaagaaacctaggtgggctcccagaggaagccgaagggtccactctgccaccctctggtggcaaaagcgaagagagtggcatggtcaccaactcagtcccgacggcgagcagtagcgtcctgagctccccagcggcagactgcggccccgcgggcagtgccaccaccttcaccaaccctttgttgccgctcatgtccgagcagttcaaggccaagtttccttttgggggactcctggactcagctcaggcatcagagacgtccaagcttcagcaactggtagaaaacattgacaagaaggccactgaccccaatgagtgcatcatctgccaccgggttctcagctgccagagcgccttgaaaatgcactacaggacacacactggggagaggccctttaagtgtaagatctgtggccgggctttcaccacgaaagggaatcttaaaacccactacagtgtccatcgtgctatgcccccgctcagagtccagcattcctgccccatctgccagaagaagttcacgaacgctgtggtcctgcagcagcacatccgaatgcatatgggaggccagatccccaacaccccagtccccgacagctactctgagtccatggagtctgacacaggttcctttgatgagaaaaattttgatgacctagacaacttctctgatgaaaacatggaagactgtcctgagggcagcatccctgatacacctaagtctgcagacgcctcccaagacagcttatcctcttcgcctttgcccctcgagatgtcgagcatcgctgctttggaaaatcagatgaagatgatcaatgctggcctggcagagcagctacaggccagcctgaagtcagtggagaatgggtccatcgagggggatgtcctgaccaatgattcatcctcagtgggtggtgacatggaaagccaaagtgctggcagcccagccatctcagagtctacctcttccatgcaggctctgtccccgtccaacagcacgcaggagttccacaagtcacccagcattgaggagaaaccacagagagcggtcccaagcgagtttgccaatggtttgtctcccaccccagtgaatggtggggctttggatttgacatctagtcacgcagagaaaatcatcaaagaagattctttggggatcctcttcccttttagagaccggggtaaatttaaaaacactgcttgtgacatttgtggcaaaacatttgcttgtcagagtgccttggacattcactatagaagtcataccaaagagagaccatttatttgcacagtttgcaatcgtggcttttccacaaagggtaatttgaagcagcacatgttgacacatcagatgcgagatctgccatcccagctctttgagcccagttccaaccttggccccaatcagaactcagcggtgattcccgccaactcgttgtcatctctcatcaagacagaggtcaacggcttcgtgcatgtttctcctcaggacagtaaggacacccccaccagtcacgtcccgtctgggcctctgtcttcctctgccacatccccagttctgctccctgctctgcccaggagaactcccaagcagcactactgcaacacatgtggcaaaaccttctcctcatcgagtgccctgcagattcacgagagaactcacactggagagaaaccctttgcttgcactatttgtggaagagctttcacgactaaaggcaatcttaaggtacacatgggcactcacatgtggaatagcacccctgcacgacggggtcggcggctctctgtggatggccccatgacatttctaggaggcaatcccgtcaagttcccagaaatgttccagaaggatttggcggcaagatcaggaagtggggatccttccagcttctggaatcagtatgcagcagcgctctccaacgggctggcgatgaaggccaacgagatctccgtcattcagaacggtggcatccctccaattcctggaagcctcggcagtgggaacagctcacctgttagtgggctgacgggaaacctggagaggctccagaactcagagcccaatgctcccctggccggcctggagaaaatggcaagcagtgagaacggaaccaacttccgcttcacccgcttcgtggaggacagcaaggagatcgtcacgagttaaagcagctcgggctggagacatagcattcattcctgttcagaatgcgacctatggtggcctcctactccttgccccccaccccgccccgccccttccttctgttccccagatctatgaactacaacattatgaagacattcttttgtaccttgttcaactttagagttctaagaaagcttatttattagcgatataaccttgctttgcaaacagaatgcaagcgttaactttggtcttctgtattttggactaaatactaattgactagagtgctgtaaacttgctgtaacatttatggcaattgcaagttgccctgctaggcagttgtaatctggcattaacttattttctatatccagtttaatatgaatctggtgttgatgcaatgcctcagtgatgcattagatctctaataaagtctgtatatacatgtacactttgatcctgctggaaaattttatcagcaaacacattgtctaatctttcaaaacagatttaaggaaaggactgaaagtacagactgaacagtgtggttctttgaaaggtttggttttttaatttttattctaaaattcaacctttttttttgtcgatttaaccatttccattttgaactgctatttgtattgtgctttttacttgagtcgtcttcaatgttaataagtttctgtacagtaataagcacgcagaattctttagagaaaaagaaaacaagcgttgttttggtagttgaaactgagacgtaacattttgccttgtaggtatattcacgatagaaaatgtgtgctggaatttcacaatgctgctaagtatagcatcttgaacaaccttcagtggagaaaatgtagatgctcttgtatatacaataagaaatatcactttcattcaaatgtacatatgttccttacaagagcaaatgcttcttcttgatcaagagagcaggtatagtgtttgtttattttgtcttaggtatggaagaaaaaaattggactgttacatgcactttcttggaaagttgaaaggaaagggggggtccaatttctttaacatttaatacttactaacaacagagatactgtaattttactcaagtaatcaaatacattttttttgcaacagataaaacaaaatactgtg

SEQ ID NO: 1581 - protein, 1324 aa, Homo sapiens
MSRRKQAKPQHFQSDPEVASLPRRDGDTEKGQPSRPTKSKDAHVCGRCCAEFFELSDLLLHKKNCTKNQLVLIVNENPASPPETFSPSPPPDNPDEQMNDTVNKTDQVDCSDLSEHNGLDREESMEVEAPVANKSGSGTSSGSHSSTAPSSSSSSSSSSGGGGSSSTGTSAITTSLPQLGDLTTLGNFSVINSNVIIENLQSTKVAVAQFSQEARCGGASGGKLAVPALMEQLLALQQQQIHQLQLIEQIRHQILLLASQNADLPTSSSPSQGTLRTSANPLSTLSSHLSQQLAAAAGLAQSLASQSASISGVKQLPPIQLPQSSSGNTIIPSNSGSSPNMNILAAAVTTPSSEKVASSAGASHVSNPAVSSSSSPAFAISSLLSPASNPLLPQQASANSVFPSPLPNIGTTAEDLNSLSALAQQRKSKPPNVTAFEAKSTSDEAFFKHKCRFCAKVFGSDSALQIHLRSHTGERPFKCNICGNRFSTKGNLKVHFQRHKEKYPHIQMNPYPVPEHLDNIPTSTGIPYGMSIPPEKPVTSWLDTKPVLPTLTTSVGLPLPPTLPSLIPFIKTEEPAPIPISHSATSPPGSVKSDSGGPESATRNLGGLPEEAEGSTLPPSGGKSEESGMVTNSVPTASSSVLSSPAADCGPAGSATTFTNPLLPLMSEQFKAKFPFGGLLDSAQASETSKLQQLVENIDKKATDPNECIICHRVLSCQSALKMHYRTHTGERPFKCKICGRAFTTKGNLKTHYSVHRAMPPLRVQHSCPICQKKFTNAVVLQQHIRMHMGGQIPNTPVPDSYSESMESDTGSFDEKNFDDLDNFSDENMEDCPEGSIPDTPKSADASQDSLSSSPLPLEMSSIAALENQMKMINAGLAEQLQASLKSVENGSIEGDVLTNDSSSVGGDMESQSAGSPAISESTSSMQALSPSNSTQEFHKSPSIEEKPQRAVPSEFANGLSPTPVNGGALDLTSSHAEKIIKEDSLGILFPFRDRGKFKNTACDICGKTFACQSALDIHYRSHTKERPFICTVCNRGFSTKGNLKQHMLTHQMRDLPSQLFEPSSNLGPNQNSAVIPANSLSSLIKTEVNGFVHVSPQDSKDTPTSHVPSGPLSSSATSPVLLPALPRRTPKQHYCNTCGKTFSSSSALQIHERTHTGEKPFACTICGRAFTTKGNLKVHMGTHMWNSTPARRGRRLSVDGPMTFLGGNPVKFPEMFQKDLAARSGSGDPSSFWNQYAAALSNGLAMKANEISVIQNGGIPPIPGSLGSGNSSPVSGLTGNLERLQNSEPNAPLAGLEKMASSENGTNFRFTRFVEDSKEIVTS

SEQ ID NO: 1582 - DNA, 304 bp, Homo sapiens
atggcccattacaaagccgccaacttgaagcgtgagcagttccggaggtacttggagaagtcaggggtgctggacacactgaccaaggtgttggtatgaagaaccagagaaacctaacagtgctttggatttcttaaagcatcacttaggaactgctaccccagaaaatccagaaatagagctgctgtgcctagaactggcgaaaacgaaagagaaatataaagctattgtagaaaaaaataaaaaactgaaagcaaagcttgctcagtatgaaccacctcaggaggagaagtatgctgaatag

SEQ ID NO: 1583 - DNA, 519 bp, Homo sapiens
atctcgtatttgaatttgtggcgcttggtgtccgcgagttgccgaatgaagctgagcgtctcagtggaaccagggatctcagggcaatcatcaacagagaagctttctgcaaccaaagtgaagactgaagccttaggctatggcagaagttgggcgcctgaagtacacgtggaaatatgccaactgaacattggactaccacgtcaagggtctcctacccctgggccatggatcaataccagtctgtgacctgttaggaaccggtagcaggaggagtgcgttgccagggtaacggaatgtaagcaggggaacagcaccttgcagatcacaaaggcaaatctctggaaagaaatttcactgagtttctcttttccttaccagtgtaataacaactcgtattttccctgcactatttaatagtctcacataaacattctttcccatttcccttttctgtatctgtttaaacatggacaatagcataaatctgaaactgtcaagctcagtgagctaagcaaa

SEQ ID NO: 1584 - protein, 67 aa, Homo sapiens
MKLSVSVEPGISGQSSTEKLSATKVKTEALGYGRSWAPEVHVEICQLNIGLPRQGSPTPGPWINTSL

SEQ ID NO: 1585 - DNA, 1291 bp, Homo sapiens
atgaacttcaccactcgctccaccttctccaccaactaccggtccctgggctttgtccaggcgcccagctacagtgcccggccagtcagcagcatggccagcgtctatgcaggcaccaggggctctggttcctggatctccatgtcccactccgccagcttctggggcggcatggggtctgggggcctgtccgcggggatggctgggggtcttgcaagaatgggaggcatccagaacaagaaggagaccatgcaaagcctgaagtactgcctgacctcctacctgaacacagtgaggaacctggagatggagaactggaagctagagagcaaaatccgggagcacctggagaagaagggaccccagttcagagactggagccgttacttccagaccatcaaggacctgagggctcagatcttcgcaaatactgtggacaatgcctgcatcgttctgcagattgacagtgcccgtcttgcagctgatgattttagagtcaagtatgagacggagctggccgtgcactagtctgtggagaatgacatccatgggctctgcaaggtcattgatgacaccagtgtcacttggctgcagctggagacagagatcaaggctcgcaaggaagagctgctcttcatgaagaagaaccacggagaggaagtaaaaggcctacaagcccagattgccagctctgggttgaccttggaggtagatccccaaatctcaggacctcgccaagatcatggcagacatctgggcccaatatgacaagctggctcggaagaacagagaggagctggacaagtactggtctcagcagattgaggagagcaccacggtggtcaccacgcagtccgtcaaggttggagctgctgagacgacactcacggagctgagatatacagtccagtccttggagactgacctggactcaatgagaaatctgaaggccagcttggagaacagcctgagggaggtggaggcccgctacaccctgcagatggagcagctcaacgggatcctgctttacctggagtcagagctggcacagacccgggcagaggggtagcgccaggccgaggagtatgaggccctgcagaacatcaaggtcaacctggaggatgagatcgccacctaccgctgcctgctggaagatggcgaggacttcaatcttggtgatgccctggacagcagcaactccatgcaaaccattcaaaagaccaccacctgccggatagtggatggcaaagtggtgtctgagaccaatgaccccaaagttctgaaactttaa

SEQ ID NO: 1586 - DNA, 16064 bp, Homo sapiens
ccgcgcgtccctgtgcgtccccgggtccctgcgggcgggcgggcgcggtcgccgccgagcaacccggcctgcgcccggcacgactgtagatgtcaggctttgcccggggagccgagcggcagcggggctgtgagtttcaaattaaccttccgctttgttgctgtgtaatgtggatccccgaaggccccccgccccgcccgccccccttccccgggcggtgcgcgctgcaaactgcgagttgggcttcatttacataaagcgattccgggcgggcggcggcagaggaggaggcggcggcggcgggcaggccggggacccggacgccagcgccgcgccccgtgggtgaatccccgccgcgtcccggggacctccctccggggacgggccgaccgccagccctgccgccaccatgagctcccctcccctgtctccgggccccctgctcctgaccagagccacctccgagtcctggggccagcgggaggtggggagcatgccgcctggggtgggtgagctcggggctcgggtgccactggaatttcccgttgttgcgcatggcggcgcggcccccggacctgcaagtgccgcctccctccggaggtgcgcggaggcttggtgtgccaggtccgagcctccgtactgggtgcaatgaaagctccacgcaggccttaccatggaaggctgtgactcgcccgtcgtctcggggaaggacaatgggtgcggtatccctcagcaccagcaatggactgaactcaacagcacccacctccctgacaaacccagtagcatggagcagtccacaggcgagagccacgggcccttggacagcctgagggcccccttcaatgagcgcctcgcggagagcaccgcgtcggccgggcccccctccgagcccgccagcaaggaggtcacctgcaacgaatgttcggcctcctttgccagcctccagacctacatggagcaccactgccccagcgcgcgccccccgccacccctgagagaggagagcgccagcgacaccggtgaggagggggacgaggagagtgacgtggagaacctggccggggagatcgtctaccagccggacggctccgcgtacattgtggagagcctgagccagctgacccagggcgggggcgcctgtgggagtggcagtggcagtgggcctctcccctcgcttttcctgaactctctccctggcgcggggggcaagcaaggggacccttcgtgtgctgcacccgtgtacccgcagatcatcaacactttccacatagcctcatccttcgggaaatggtttgagggcccagaccaggctttcccgaatacctcagccctggcggggctcagccccgtcctgcacagcttccgcgtgtttgacgtgcgacacaaaagcaacaaggattacctgaacagcgacggttctgccaaaagctcctgcgtatccaaagatgttcccaacaatgtggacctgtccaaattcgatggctttgtgctctatggcaagaggaagcccatcctgatgtgtttcttgtgcaaactctcctttgggtacgtccgttcgtttgtgacccacgcggtgcatgaccatcgaatgaccctgagcgaagacgagcggaaaattcttagcaataagaacatctccgctatcatccaagggatcggcaaagacaaggaaccccttgtaagttttctggaaccaaaaaacaaaaactttcaacaccctttagtttccacagctaacctcataggccccggacacagtttttatggtaaatttagtggcattcgaatggaaggggaggaagctctcccagcgggctccgccgctggccccgagcagccccaggctggtctcttgacccccagcaccctgttgaaccttggcgggctcaccagctcggtactgaagacccccattacctcagtccccctggggcctctggcttccagtcctaccaaatcctcagagggcaaggactctggggcggcagaaggagagaagcaggaagtgggcgacggggattgcttctctgagaaggtagagccagccgaagaggaggcggaggaggaagaggaggaggaagaggcggaggaggaggaggaagaagaggaggaggaagaagaggaggaggaagacgagggttgcaaaggactctttccaagcgagttggatgaggaactggaggacaggccccatgaggagcctggggccgcagcaggtagtagcagcaaaaaggaccttgctctctcaaaccaaagcatttctaactcccccttaatgcctaacgtgctccagaccctgtcgaggggcacagcttctactagttctaattctgcttcttcctttgttgtctttgatggtgcgaacaggaggaatcgtttaagctttaacagtgagggcgtcagggccaatgtggcagagggcggcaggaggctggacttcgctgacgaaagtgccaataaagacaatgccacagcaccagaaccaaatgaaagcacagagggtgacgatgggggcttcgttccccatcaccagcacgctggctccctctgcgagcttggggttggggagtgcccctcggggagtggcgtggagtgccccaaatgcgacacggtcctgggctcctcccgctcgctgggcggccacatgaccatgatgcattctcgtaactcgtgtaagacactcaagtgccccaagtgcaactggcactataagtaccagcagaccctggaggcacacatgaaggagaagcacccggagccggggggctcctgtgtctactgcaaaagcgggcagccccacccccggctggcacgaggcgagagctacacgtgtggttacaagcctttccgctgcgaggtgtgtaactactccacaactaccaaaggcaacctcagtattcatatgcagtctgacaagcatctcaacaacatgcagaacctgcagaatggagggggggagcaggtcttcagccacactgccggggcggcggcggcggcggtggctgcggcggcggcggcagccaatatcagtagctcctgcggggccccctcgccgaccaaaccaaaaaccaaacccacctggcggtgcgaggtgtgtgattatgagaccaacgtggccaggaacctccgcattcacatgaccagtgagaagcacatgcataacatgatgttactgcaacagaacatgacccagatccaacacaaccgccacctgggcctcggcagcctgccctcacccgccgaggccgagctctaccaatactacctggcccagaacatgaacctgcccaacctgaagatggacagtgctgcctcggacgcccagttcatgatgagcggattccagctggatcccgccgggcccatggccgccatgacgcctgctctagtgggcggtgagatccccctagacatgcggctcgggggcgggcagctggtgtcagaggagctgatgaacctgggcgagagcttcatccagaccaacgacccgtcgctgaagctcttccagtgcgccgtctgcaacaagttcacgacggacaacctggacatgctgggcctgcacatgaacgtggagcgcagcctgtcggaggacgagtggaaggcggtgatgggggactcataccagtgcaagctctgccgctacaacacccagctcaaggccaacttccagctgcactgcaagacagacaagcacgtgcagaagtaccagctggtggcccacatcaaggagggcggcaaggccaacgagtggaggctcaagtgtgtggccatcggcaaccccgtgcacctcaagtgcaacgcctgtgactactacaccaacagcctggagaagctgcggctgcacacggtcaactccaggcacgaggccagcctgaagttgtacaagcacctgcagcagcatgagagtggtgtagaaggtgagagctgctactaccactgcgttctgtgcaactactccaccaaggccaagctcaacctcatccagcatgtgcgctccatgaagcaccagcgaagcgagagcctgcgaaagctgcagcggctgcagaagggccttccagaggaggacgaggacctggggcagatcttcaccatccgcaggtgcccctccacggacccagaagaagccattgaagatgttgaaggacccagtgaaacagctgctgatccagaggagcttgctaaggaccaagagggcggagcatcgtccagccaagcagagaaggagctgacagattctcctgcaacctccaaacgcatctccttcccaggtagctcagagtctcccctctcttcgaagcgaccaaaaacagctgaggagatcaaaccggagcagatgtaccagtgtccctactgcaagtacagtaatgccgatgtcaaccggctccgggtgcatgccatgacgcagcactcggtgcaacccatgcttcgctgccccctgtgccaggacatgctcaacaacaagatccacctccagctgcacctcacccacctccacagcgtggcacctgactgcgtggagaagctcattatgacggtgaccacccctgagatggtgatgccaagcagcatgttcctcccagcagctgttccagatcgagatgggaattccaatttggaagaggcaggaaagcagcctgaaacctcagaggatctgggaaagaacatcttgccatccgcaagcacagagcaaagcggagatttgaaaccatcccctgctgacccaggctctgtgagagaagactcaggcttcatctgctggaagaaggggtgcaaccaggttttcaaaacttctgctgcccttcagacgcattttaatgaagtgcatgccaagaggcctcagctgccggtgtcagatcgccatgtgtacaagtaccgctgtaatcagtgtagcctggccttcaagaccattgaaaagttgcagctccattctcagtaccatgtgatcagagctgccaccatgtgctgtctttgtcagcgcagtttccgaactttccaggctctgaagaagcaccttgagacaagccacctggagctgagtgaggctgacatccaacagctttatggtggcctgctggccaatggggacctcctggcaatgggagaccccactctggcagaggaccataccataattgttgaggaagacaaggaggaagagagtgacttggaagataaacagagcccaacgggcagtgactctgggtcagtacaagaagactcgggctcagagccaaagagagctctgcctttcagaaaaggtcccaattttactatggaaaagttcctagacccttctcgcccttacaagtgtaccgtctgcaaggaatctttcactcaaaagaatatcctgctagtacactacaattctgtctcccacctgcataagttaaagagagcccttcaagaatcagcaaccggtcagccagaacccaccagcagcccagacaacaaaccttttaagtgtaacacttgtaatgtggcctacagccagagttccactctggagatccatatgaggtctgtgttacatcaaaccaaggcccgggcagccaagctggaggctgcaagtggcagcagcaatgggactgggaacagcagcagtatttccttgagctcctccacgccaagtcctgtgagcaccagtggcagtaacacctttaccacctccaatccaagcagtgctggcattgctccaagctctaacttactaagccaagtgcccactgagagtgtagggatgccacccctggggaatcctattggtgccaacattgcttccccttcagagcccaaagaggccaatcggaagaaactggcagatatgattgcatccaggcagcagcaacaacagcagcagcaacagcaacaacaacaacaacaacaacaacaacaagcacaaacgctggcccaggcccaggctcaagttcaagctcacctgcagcaggagctgcagcaacaggctgccctgatccagtctcagctgtttaaccccaccctccttcctcacttccccatgacaactgagaccctgctgcaactacagcagcagcagcacctcctcttccctttctacatccccagtgctgagttccagcttaaccccgaggtgagcttgccagtgaccagtggggcactgacactgactgggacaggcccaggcctgctggaagatctgaaggctcaggttcaggtcccacagcagagccatcagcagatcttgccgcagcagcagcagaaccaactctctatagcccagagtcactctgccctccttcagccaagccagcaccccgaaaagaagaacaaattggtcatcaaagaaaaggaaaaagaaagccagagagagagggacagcgccgaggggggagagggcaacaccggtccgaaggaaacactgccagatgccttgaaggccaaagagaagaaagagttggcaccagggggtggttctgagccttccatgctccctccacgcattgcttcagatgccagagggaacgccaccaaggccctgctggagaactttggctttgagttggtcatccagtataatgagaacaagcagaaggtgcagaaaaagaatgggaagactgaccagggagagaacctggaaaagctcgagtgtgactcctgcggcaagttgttttccaacatcttgattttaaagagtcatcaagagcacgttcatcagaattactttcctttcaaacagctcgagaggtttgccaaacagtacagagaccactacgataaactgtacccactgaggccccagaccccagagccaccaccacctccccctccaccccctccacccccacttccggcagcgccgcctcagccggcgtccacaccagccatccccgcatcagccccacccatcacctcacctacaattgcaccggcccagccatcagtgccgctcacccagctctccatgccgatggagctgcccatcttctcgccgctgatgatgcagacgatgccgctgcagaccttgccggctcagctacccccgcagctgggacctgtggagcctctgcctgcggacctggcccaactctaccagcatcagctcaatccaaccctgctccagcagcagaacaagaggcctcgcaccaggatcacagatgatcagctccgagtcttgcggcaatattttgacattaacaactcccccagtgaagagcaaataaaagagatggcagacaagtccgggttgccccagaaagtgatcaagcactggttcaggaacactctcttcaaagagaggcagcgtaacaaggactccccttacaacttcagtaatcctcctatcaccagcctggaggagctcaagattgactcccggcccccttcgccggaacctccaaagcaggagtactggggaagcaagaggtcttcaagaacaaggtttacggactaccagctgagggtcttacaggacttcttcgatgccaatgcttacccaaaggatgatgaatttgagcaactctctaatttactgaaccttccaacccgagtgatagtggtgtggtttcagaatgcccgacagaaggccaggaagaattatgagaatcagggagagggcaaagatggagagcggcgtgagcttacaaatgatagatacattcgaacaagcaacttgaactaccagtgcaaaaaatgtagcctggtgtttcagcgcatctttgatctcatcaagcaccagaagaagctgtgttacaaggatgaggatgaggaggggcaggacgacagccaaaatgaggattccatggatgccatggaaatcctgacgcctaccagctcatcctgcagtaccccgatgccctcacaggcttacagcgccccagcaccatcagccaataatacagcttcctccgctttcttgcagcttacagcggaggctgaggaactggccaccttcaattcaaaaacagaggcaggcgatgagaaaccaaagctggcggaagctcccagtgcacagccaaaccaaacccaagaaaagcaaggacaaccaaagccagagctgcagcagcaagagcagcccgagcagaagaccaacactccccagcagaagctcccccagctggtgtccctgccttcgttgccacagcctcctccacaagcgccccctccacagtgccccttaccccagtcgagccccagtccttcccagctctcccacctgcccctcaagcccctccacacatcaactcctcaacagctcgcaaacctacctcctcagctaatcccctaccagtgtgaccagtgtaagttggcatttccgtcatttgagcactggcaggagcatcagcagctccacttcctgagcgcgcagaaccagttcatccacccccagtttttggacaggtccctggatatgcctttcatgctctttgatcccagtaacccactcctggccagccagctgctctctggggccatacctcagattccagcaagctcagccacttctccttcaactccaacctccacaatgaacactctcaagaggaagctggaggaaaaggccagtgcaagccctggcgaaaacgacagtgggacaggaggagaagagcctcagagagacaagcgtttgagaacaaccatcacaccggaacaactagaaattctctaccagaagtatctactggattccaatccgactcgaaagatgttggatcacattgcacacgaggtgggcttgaagaaacgtgtggtacaagtctggtttcagaacacccgagctcgggaaaggaaaggacagttccgggctgtaggcccagcgcaggcccacaggagatgccctttttgcagagcgctcttcaaagccaagactgctcttgaggctcatatccggtcccgtcactggcatgaagccaagagagctggctacaacctaactctgtctgcgatgctcttagactgtgatgggggactccagatgaaaggagatatttttgacggaactagcttttcccacctacccccaagcagtagtgatggtcagggtgtccccctctcacctgtgagtaaaaccatggaattgtcacccagaactcttctaagcccttcctccattaaggtggaagggattgaagactttgaaagcccctccatgtcctcagttaatctaaactttgaccaaactaagctggacaacgatgactgttcctctgtcaacacagcaatcacagataccacaactggagacgagggcaacgcagataacgacagtgcaacgggaatagcaactgaaaccaaatcctcttctgcacccaacgaagggttgaccaaagcggccatgatggcaatgtctgagtatgaagatcggttgtcatctggtctggtcagcccggccccgagcttttatagcaaggaatatgacaatgaaggtacagtggactacagtgaaacctcaagccttgcagatccctgctccccgagtcctggtgcgagtggatctgcaggcaaatctggtgacagcggagatcggcctgggcagaaacgttttcgcactcaaatgaccaatctgcagctgaaggtcctcaagtcatgctttaatgactacaggacacccactatgctagaatgtgaggtcctgggcaatgacattggactgccaaagagagtcgttcaggtctggttccagaatgcccgggcaaaagaaaagaagtccaagttaagcatggccaagcattttggtataaaccaaacgagttatgagggacccaaaacagagtgcactttgtgtggcatcaagtacagcgctcggctgtctgtacgtgaccatatcttttcccaacagcatatctccaaagttaaagacaccattggaagccagctggacaaggagaaagaatactttgacccagccaccgtacgtcagttgatggctcaacaagagttggaccggattaaaaaggccaacgaggtccttggactggcagctcagcagcaagggatgtttgacaacacccctcttcaggcccttaaccttcctacagcatatccagcgctccagggcattcctcctgtgttgctcccgggcctcaacagcccctccttgccaggctttactccatccaacacagctttaacgtctcctaagccgaacttgatgggtctgcccagcacaactgttccttcccctggcctccccacttctggattaccaaataaaccgtcctcagcgtcgctgagctccccaaccccagcacaagccacgatggcgatgggccctcagcaacccccccagcagcagcagcagcagcagcaaccacaggtgcagcagcctcccccgccgccagcagcccagccgccacccacaccacagctcccactgcaacagcagcagcaacgcaaggacaaagacagtgagaaagtaaaggagaaggaaaaggcacacaaagggaaaggggaacccctgcctgtccccaagaaggagaaaggagaggcccccacggcaactgcagccacgatctcagccccgctgcccaccatggagtatgcggtagaccctgcacagctgcaggccctgcaggccgcgttgacttcggaccccacagcattgctcacaagccagttccttccttactttgtaccaggcttttctccttattatgctccccagatccctggcgccctgcagagcgggtacctgcagcctatgtatggcatggaaggcctgttcccctacagccctgcactgtcgcaggccctgatggggctgtccccaggctccctactgcagcagtaccagcaataccagcagagtctgcaggaggcaattcagcagcagcagcagcggcaactacagcagcagcagcagcaaaaagtgcagcagcagcagcccaaagcaagccaaaccccagtcccccccggggctccttccccagacaaagaccctgccaaagaatcccccaaaccagaagaacagaaaaacaccccccgtgaggtgtcccccctcctgccgaaactccctgaagagccagaagcagaaagcaaaagtgcggactccctctacgaccccttcattgttccaaaggtgcagtacaagttggtctgccgcaagtgccaggcgggcttcagcgacgaggaggcagcgaggagccacctgaagtccctctgcttcttcggccagtctgtggtgaacctgcaagagatggtgcttcacgtccccaccggcggcggcggcggtggcagtggcggcggcggcggcggtggcggcggcggcggcggcggcggctcgtaccactgcctggcgtgcgagagcgcgctctgtggggaggaagctctgagtcaacatctcgagtcggccttgcacaaacacagaacaatcacgagagcagcaagaaacgccaaagagcaccctagtttattacctcactctgcctgcttccccgatcctagcaccgcatctacctcgcagtctgccgctcactcaaacgacagcccccctcccccgtcggccgccgccccctcctccgcttccccccacgcctccaggaagtcttggccgcaagtggtctcccgggcttcggcagcgaagcccccttcttttcctcctctctcctcatcttcaacggttacctcaagttcatgcagcacctcaggggttcagccctcgatgccaacagacgactattcggaggagtctgacacggatctcagccaaaagtccgacggaccggcgagcccggtggagggtcccaaagaccccagctgccccaaggacagtggtctgaccagtgtaggaacggacaccttcagattgtaagctttgaagatgaacaatacaaacaaatgaatttaaatacaaaaattaataacaaaccaatttcaaaaatagactaactgcaattccaaagcttctaaccaaaaaacaaaaaaaaaaaaaaaaagaaaaaaaagaaaaagcgtgggttgttttcccatatacctatctatgccggtgattttacattcttgtctttttcttttcttttaatattaaaaaaaaaaaaaaagccctaaccctgttacattgtgtccttttgaaggtactattggtctgggaaacagaagtccgcagggcctccctaatgtctttggagcttaaaccccttgtatatttgccccttttcaataaacgccccacgctgatagcacagaggagcccggcatgcactgtatgggaaagcagtccaccttgttacagttttaaatttcttgctatcttagcattcagataccaatggcttgctaaaagaaaaaaagaaatgtaatgtctttttattctcaggtcaatcgctcacactttgttttcagaatcattgttttatatattattgttttttcagtttttttttttttttttgttccagaaaagattttttgttttgttaacttaaaaatgggcagaaagtattcaagaaaaacaatgtgaactgctttagctttctggggatttttaaggatagcttttctgctgaagccaatttcaaggggaaaagttaagcactcccactttcaaaaaaaaaaaaaaataataacccacacacacaaagagtgttgaggacttgtagcttaaaaaaaataagttttaaaaactgactttctgtatttatgatagatatgaccatttttggtgttgagtagattgttgcattggaaatgaactgaagcagtatggtagatttaaaaggaaaaaaaaaaaaaaaccttttgtgtacatttagctttttgtatggtccagctgacagctcctcatttgatgttgtcttgttcattcctagcagatgatagattgcaatccgttgattcgcctaagcttttctccccttgtcccttaattccactttctctttcttgtcccttaattccactttctctttccttctcccacctcccgtcctataatctcccacttaaggtagctgccttcatttcttagagggagctgcagaattattttataaaactaaagaaagaatttcaagggattctaggggtcattaggatcctcacagattatttttggttggggagttgaaactttttaaaggcatataattctagttacctgtgtctgttagctttgtgcatttattttttatttatccttcttttggcttttttttctttgtaccccttcttttcctccttgtttggtaggagcttcaaatattctttttttttctatactaaaggatttgtttccatttgtgtaattggctgtgtacttttcttttctaaaaaaagtttttggttagggatttggtttttggttttgtgtttgttttttctttcctctctcagaaaaaaaaatttcatgctttaaataaaatccaaagacacaccctttcactgctgatgcagaaaaaagggaaagggttcttgttacttgagaatttgtttctgatttaaacaaacaagacttagtttaataaaagaaagagaaaaacaaaagattcccaggttgttatgtgcttcttctgcaagcagagaggcaaatgttaatgacaattccatataccaaaagacacattttttacttcaaagttttgtccttgtgttaggcagtctgagcagcgagtgatccagagcgcagccaacaaagcagcagatagcagtgtacagaaagcaaaaaaggaactgtatgtgaggcacttgtttctgttaatatccatattcctgttaacacacaccctttctcatgtaaaaagaaaaataaataaatggtctgaactttgaaaactttgtgctgctaaaacatagattttggagacaaataaatagatgctttgctgtttcactttcatagctaaacatcaacagaaaccatctccccttgcccccaaagtgtgaaatccttcttcccttcgttttcttccttatgtttcaaaagggaactttgaagactgtgaatacaggttccattggtcacctttcgggcttctttccccagtgctgaagccactcatcgactttgcaaaagactggagcattccaagatctgaaaatggattttttttctttttttcttttttagccgggactattttatttttatgaatttgtttttagtttaatgaaatagtagatcctgaaatgttgtacatatttctaactaggctgatgcacagtgcaaattccttttttaattgttttttttaagtagaaatactaaagaaagaataccatctaactattcataccagtatccagttgtagcataaggtgtcaaaagcaagtacgcaaaacatttactgttttaacaagctatttccttttaacaagaaatcttgtatttcttcctgtgtttgagatgaacatttttaaattttaaagttgtacagttttttgttttccattattttatcttgtttgtaactctatgaaatatatatatatatattttttgccatttaactgttgtatgttactctgtgtctgtaccatatagaaaaaaaattgtttttgtttttggttctctatgtgatatcagttaacaatgtaacactagctttacctgtcaaattctgctaggtcttctctgaaaacgttgtttttaaaaatgatattgcttggtaatagtgcaatttctatccttttccctcccccctcaacttttaagttcttttctttataattttgctgccccctccctgatggtttgggtttttgtttttgtttttgtttttttttttcatggagctactatgccatcctccctctgtgaggcagagtgactgtcagtgttttgttatgccatgccttgagctgtgggtgtttggcgacaataaggtggttgaatagattggctgagcacacttccacccacctagtgttctcagaggggttatgtgattgtttcaacctggagtgggttgcacccttaatgctttcctctgcaactaaaccgcccacatatatgttcattgaaaaaagtaagaataattctcagcactaacccagaagtagcaaagcagtcagtgatggtgaacattagaggtcaaacatgagttagatgtttgtgggctgacagccatcgtggctatgaccagtactatttacaaagcatgaattcactacaatgctcaactgtttgtttagctttatctcacttggggaatttattcctgtctgctgcattgtaggtagctgggtaggatatatttccacttgctttttaaattagttcttcacctccattgacactcgttttttggttttctccctatagtgtgggttggtgctagacaccagtctgacccacagaatgggagttatttcatccatctttcctccatccttccaaaaaccacatatctacacaaggaaaaatttaatacatctaggaattttttttttaattacaagctatttaaagagatgaatgtggccaaagttttacacaattgaaaataaagtaaaacagacggcatgtgtttaaacctgagtttatcaggcatggcaggaagttgcaggagagagaggcagtgacccaagccagtgcacttgatgttcatggacatatattttttttaaataataaattaaaacattttaaatagaagcataaattgagttgtttgttggcgctgagatactgcccactgtgaaacaaagctttgactagttttttgtttgtttactttcttcaggggggaggggggcaagtttgggtaggaaagaaagcataaatgaacgtgaccctgaggtgaagaggtatatgaacagcctttgcaatgtacaaaaagaaaaaaaaacaaaaaacaacaaaaaaaatagagcaagtgaaaccaaaaatgatgttcttggtgtttttctataatgtagtcttgttagcttttttgttactgtaacaatgctgatctcgaactgtaccaaaatacatggagactaacaaacagaaccacatggaactttcaaactgaaaaaaaaatttgtcacaaaaactttgttgtcatagttaagttgattgtagatggtaattgaatatactcctttgaaaatatttcatcaagtatgtttcctgctcattgtgatacattaaaaaaaaaatatgagcaaaa

SEQ ID NO: 1587 - protein, 3703 aa, Homo sapiens
MEGCDSPVVSGKDNGCGIPQHQQWTELNSTHLPDKPSSMEQSTGESHGPLDSLRAPFNERLAESTASAGPPSEPASKEVTCNECSASFASLQTYMEHHCPSARPPPPLREESASDTGEEGDEESDVENLAGEIVYQPDGSAYIVESLSQLTQGGGACGSGSGSGPLPSLFLNSLPGAGGKQGDPSCAAPVYPQIINTFHIASSFGKWFEGPDQAFPNTSALAGLSPVLHSFRVFDVRHKSNKDYLNSDGSAKSSCVSKDVPNNVDLSKFDGFVLYGKRKPILMCFLCKLSFGYVRSFVTHAVHDHRMTLSEDERKILSNKNISAIIQGIGKDKEPLVSFLEPKNKNFQHPLVSTANLIGPGHSFYGKFSGIRMEGEEALPAGSAAGPEQPQAGLLTPSTLLNLGGLTSSVLKTPITSVPLGPLASSPTKSSEGKDSGAAEGEKQEVGDGDCFSEKVEPAEEEAEEEEEEEEAEEEEEEEEEEEEEEEDEGCKGLFPSELDEELEDRPHEEPGAAAGSSSKKDLALSNQSISNSPLMPNVLQTLSRGTASTSSNSASSFVVFDGANRRNRLSFNSEGVRANVAEGGRRLDFADESANKDNATAPEPNESTEGDDGGFVPHHQHAGSLCELGVGECPSGSGVECPKCDTVLGSSRSLGGHMTMMHSRNSCKTLKCPKCNWHYKYQQTLEAHMKEKHPEPGGSCVYCKSGQPHPRLARGESYTCGYKPFRCEVCNYSTTTKGNLSIHMQSDKHLNNMQNLQNGGGEQVFSHTAGAAAAAVAAAAAAANISSSCGAPSPTKPKTKPTWRCEVCDYETNVARNLRIHMTSEKHMHNMMLLQQNMTQIQHNRHLGLGSLPSPAEAELYQYYLAQNMNLPNLKMDSAASDAQFMMSGFQLDPAGPMAAMTPALVGGEIPLDMRLGGGQLVSEELMNLGESFIQTNDPSLKLFQCAVCNKFTTDNLDMLGLHMNVERSLSEDEWKAVMGDSYQCKLCRYNTQLKANFQLHCKTDKHVQKYQLVAHIKEGGKANEWRLKCVAIGNPVHLKCNACDYYTNSLEKLRLHTVNSRHEASLKLYKHLQQHESGVEGESCYYHCVLCNYSTKAKLNLIQHVRSMKHQRSESLRKLQRLQKGLPEEDEDLGQIFTIRRCPSTDPEEAIEDVEGPSETAADPEELAKDQEGGASSSQAEKELTDSPATSKRISFPGSSESPLSSKRPKTAEEIKPEQMYQCPYCKYSNADVNRLRVHAMTQHSVQPMLRCPLCQDMLNNKIHLQLHLTHLHSVAPDCVEKLIMTVTTPEMVMPSSMFLPAAVPDRDGNSNLEEAGKQPETSEDLGKNILPSASTEQSGDLKPSPADPGSVREDSGFICWKKGCNQVFKTSAALQTHFNEVHAKRPQLPVSDRHVYKYRCNQCSLAFKTIEKLQLHSQYHVIRAATMCCLCQRSFRTFQALKKHLETSHLELSEADIQQLYGGLLANGDLLAMGDPTLAEDHTIIVEEDKEEESDLEDKQSPTGSDSGSVQEDSGSEPKRALPFRKGPNFTMEKFLDPSRPYKCTVCKESFTQKNILLVHYNSVSHLHKLKRALQESATGQPEPTSSPDNKPFKCNTCNVAYSQSSTLEIHMRSVLHQTKARAAKLEAASGSSNGTGNSSSISLSSSTPSPVSTSGSNTFTTSNPSSAGIAPSSNLLSQVPTESVGMPPLGNPIGANIASPSEPKEANRKKLADMIASRQQQQQQQQQQQQQQQQQQQAQTLAQAQAQVQAHLQQELQQQAALIQSQLFNPTLLPHFPMTTETLLQLQQQQHLLFPFYIPSAEFQLNPEVSLPVTSGALTLTGTGPGLLEDLKAQVQVPQQSHQQILPQQQQNQLSIAQSHSALLQPSQHPEKKNKLVIKEKEKESQRERDSAEGGEGNTGPKETLPDALKAKEKKELAPGGGSEPSMLPPRIASDARGNATKALLENFGFELVIQYNENKQKVQKKNGKTDQGENLEKLECDSCGKLFSNILILKSHQEHVHQNYFPFKQLERFAKQYRDHYDKLYPLRPQTPEPPPPPPPPPPPPLPAAPPQPASTPAIPASAPPITSPTIAPAQPSVPLTQLSMPMELPIFSPLMMQTMPLQTLPAQLPPQLGPVEPLPADLAQLYQHQLNPTLLQQQNKRPRTRITDDQLRVLRQYFDINNSPSEEQIKEMADKSGLPQKVIKHWFRNTLFKERQRNKDSPYNFSNPPITSLEELKIDSRPPSPEPPKQEYWGSKRSSRTRFTDYQLRVLQDFFDANAYPKDDEFEQLSNLLNLPTRVIVVWFQNARQKARKNYENQGEGKDGERRELTNDRYIRTSNLNYQCKKCSLVFQRIFDLIKHQKKLCYKDEDEEGQDDSQNEDSMDAMEILTPTSSSCSTPMPSQAYSAPAPSANNTASSAFLQLTAEAEELATFNSKTEAGDEKPKLAEAPSAQPNQTQEKQGQPKPELQQQEQPEQKTNTPQQKLPQLVSLPSLPQPPPQAPPPQCPLPQSSPSPSQLSHLPLKPLHTSTPQQLANLPPQLIPYQCDQCKLAFPSFEHWQEHQQLHFLSAQNQFIHPQFLDRSLDMPFMLFDPSNPLLASQLLSGAIPQIPASSATSPSTPTSTMNTLKRKLEEKASASPGENDSGTGGEEPQRDKRLRTTITPEQLEILYQKYLLDSNPTRKMLDHIAHEVGLKKRVVQVWFQNTRARERKGQFRAVGPAQAHRRCPFCRALFKAKTALEAHIRSRHWHEAKRAGYNLTLSAMLLDCDGGLQMKGDIFDGTSFSHLPPSSSDGQGVPLSPVSKTMELSPRTLLSPSSIKVEGIEDFESPSMSSVNLNFDQTKLDNDDCSSVNTAITDTTTGDEGNADNDSATGIATETKSSSAPNEGLTKAAMMAMSEYEDRLSSGLVSPAPSFYSKEYDNEGTVDYSETSSLADPCSPSPGASGSAGKSGDSGDRPGQKRFRTQMTNLQLKVLKSCFNDYRTPTMLECEVLGNDIGLPKRVVQVWFQNARAKEKKSKLSMAKHFGINQTSYEGPKTECTLCGIKYSARLSVRDHIFSQQHISKVKDTIGSQLDKEKEYFDPATVRQLMAQQELDRIKKANEVLGLAAQQQGMFDNTPLQALNLPTAYPALQGIPPVLLPGLNSPSLPGFTPSNTALTSPKPNLMGLPSTTVPSPGLPTSGLPNKPSSASLSSPTPAQATMAMGPQQPPQQQQQQQQPQVQQPPPPPAAQPPPTPQLPLQQQQQRKDKDSEKVKEKEKAHKGKGEPLPVPKKEKGEAPTATAATISAPLPTMEYAVDPAQLQALQAALTSDPTALLTSQFLPYFVPGFSPYYAPQIPGALQSGYLQPMYGMEGLFPYSPALSQALMGLSPGSLLQQYQQYQQSLQEAIQQQQQRQLQQQQQQKVQQQQPKASQTPVPPGAPSPDKDPAKESPKPEEQKNTPREVSPLLPKLPEEPEAESKSADSLYDPFIVPKVQYKLVCRKCQAGFSDEEAARSHLKSLCFFGQSVVNLQEMVLHVPTGGGGGGSGGGGGGGGGGGGGGSYHCLACESALCGEEALSQHLESALHKHRTITRAARNAKEHPSLLPHSACFPDPSTASTSQSAAHSNDSPPPPSAAAPSSASPHASRKSWPQVVSRASAAKPPSFPPLSSSSTVTSSSCSTSGVQPSMPTDDYSEESDTDLSQKSDGPASPVEGPKDPSCPKDSGLTSVGTDTFRL

SEQ ID NO: 1588 - DNA, 1678 bp, Homo sapiens
aagaaggaggccgcgcgagggctgacgaaccggaagaagaggaactgggcctgaaagggtaccggtgaccgctactgctgccggtgtttgcgtgtggcagggagccaggcctggcgagcggggtgtgtcgcgatgccggagctggcagtgcagaaggtggtggtccaccccctggtgctgctcagtgtggtggatcatttcaaccgaatcggcaaggttggaaaccagaagcgtgttgttggtgtgcttttggggtcatggcaaaagaaagtacttgatgtatcgaacagttttgcagttccttttgatgaagatgacaaagacgattctgtatggtttttagaccatgattatttggaaaacatgtatggaatgtttaagaaagtcaatgccagggaaagaatagttggctggtaccacacaggccctaaactacacaagaatgacattgccatcaacgaactcatgaaaagatactgtcctaattccgtattggtcatcattgatgtgaagccgaaggacctagggctgcctacagaagcgtacatttcagtggaagaagtccatgatgatggaactccaacctcgaaaacatttgaacacgtgaccagtgaaattggagcagaggaagctgaggaagttggagttgaacacttgttacgagatatcaaagacacgacggtgggcactctgtcccagcggatcacaaaccaggtccatggtttgaagggactgaactccaagcttctggatatcaggagctacctggaaaaagtcgccacaggcaagctgcccatcaaccaccagatcatctaccagctgcaggacgtcttcaacctgctgccagatgtcagcctgcaggagttcgtcaaggccttttacctgaagaccaatgaccagatggtggtagtgtacttggcctcgctgatccgttccgtggtcgccctgcacaacctcatcaacaacaagattgccaaccgggatgcagagaagaaagaagggcaggagaaagaagagagcaaaaaggataggaaagaggacaaggagaaagataaagataaggaaaagagtgatgtaaagaaagaggagaaaaaggagaaaaagtaaaacatgtattaaatagcttttttaatttgtaaattaaaatcttacaaactaaatcagtgtgctgctagagggttctttttcacttgacatgcttattagaaagctgacccaacaagagctctctgcctccggtcactcttgctgtggtgctacgtggaagtgaatggagactgatctcaaatctgaactgcagctttcgctgctgtgagttggggatatgatagtcagctcaggcttcagattgtatgagaaaaatgaagagaagtcaacaaatattttggtactcttcattcatttatctctaaaaccaggagttgaattttcctcatcttgaaagactcttggggtctgtttctggtattttacaaaattgctaagtggaatgcatgaattgcattatgttctctggtaacacgtagagttcagacccttctgaactctgttgataataccacaccatgttctggacccatagctctggcatcctcaggggttgtgatccagctccatatattgtttaccttcaaagatacaattaaatggcttgatttttaaaaaaaaaaaaaaaaaa

SEQ ID NO: 1589 - protein, 324 aa, Homo sapiens
MPELAVQKVVVHPLVLLSVVDHFNRIGKVGNQKRVVGVLLGSWQKKVLDVSNSFAVPFDEDDKDDSVWFLDHDYLENMYGMFKKVNARERIVGWYHTGPKLHKNDIAINELMKRYCPNSVLVIIDVKPKDLGLPTEAYISVEEVHDDGTPTSKTFEHVTSEIGAEEAEEVGVEHLLRDIKDTTVGTLSQRITNQVHGLKGLNSKLLDIRSYLEKVATGKLPINHQIIYQLQDVFNLLPDVSLQEFVKAFYLKTNDQMVVVYLASLIRSVVALHNLINNKIANRDAEKKEGQEKEESKKDRKEDKEKDKDKEKSDVKKEEKKEKK

SEQ ID NO: 1590 - DNA, 3886 bp, Homo sapiens
tttttttttttttttttgtagagatgggctcactatgttgcccaggctggtcctgaactcctgaggtaggaggatcgcttgagcctgggagacagaggttgcagtgagccgagattatgctactgcactcctgcctgggtgacacagtgagactctgtcttaaacaaaacaaaacaaaaaaaggccaggcgcaggggctcacacctgtaatcctagcactttgggaggccaaggtgggtggatcatttgaggtcaggagtttgagaccagcctgatcagcatggtgaaaccccgtctctactaaaaacagaaaaattagccaggtgtcgtggcttgcacctgtagtcccagctactcaggaggctgagacaggaaaattgcttcaaccagggagatggaggctgcagtgcgcagagtcgcgccactgcctgggtgacacagtgagactccatctcaaaaaagcccagggtgcttggcgccaaaaaagggatctctgaccttgtgttcattatgaccttcaaaagagtgaagtggtgagggcatgagggcagaggaaaagaagggcttaagacaacgaaggaaaagaaggcaccagagtctagtgcctttgccgccaaacctaagcctataaggttggcagcaaaaccaaagcacaaactgatagcaaaggaggtaaagccaggggagaagaaactgaagacgtcaaagacagaaatgaagcacatcatctggtttaaaacaaatgatagagtttttacagttctggaaaatgaccgtataatattctctgctaagaagaataacttctgctaaacaaccataagactgcagctggctctactcagatctgcttattccaacaagaccaaggtgctagttctaacttcgagtagtccctctgtatggctgcagcgttgcgcacagtggactgccggtcacaaggaagactggatgagcgtgggttcacacatttcccacacttgcctcagcaaaagaaccacctgggacacttgtttaaaaatgacagattcccacggtccacctcggcagattctgatcctgccacgccagggagctgtatttttcaacaagtacaccaggtgatcacgcaagtttaagaaattagcacaagttggccgggcgcagtggctcacgcctgtaatcccagcactttgggaggctgaggcgggcgaatcacgaggtcaggagttccagaccagcctggccaacatagtgaaaccccgtctctactaaaaacacaaaaattagccgggcgtggtggcgcacacctgtattcccagctacttgggaggctgaggcaggagaattgcttgaacccaggaggcagaggttgcagtgagccgagatcgcgccactgcactcccgcctgggcgacagagtgagactccgtctcggaaaaaagaaaaaaaaagaaaaaagaaaaaagaaattaacacaagtccctgccactggaaacgcatatccgttgggctggctcctcctccaccaccagcccccatcccggtacatcacgtttacatgcatgcggaaaatgggcttggagattcttgattcaaatccgaggtatcacacatcggcccccaaaggtcaaacattaagaaggaagcttactgccctgtcccagacttttctaggtgacttcttcctccggactctgcagcagtcttactagttctgaaagcacaagcggaccgcacgtctcaacgcgggaaaacagttccatctgcagggatggaggaccgggctagacaagctggagttggctctgcgccgcaggggtgtgcaagcccaagactggggagcccgaggtcaccccggccgccctggcatcggggctgaggtgcaggctcctggaggagcggtgcgcaggcccaggggtagccgaggacacaagccaaggcacgagcggacaaccttacggggacgagtactaccgcccggacgcgacttcgcgagaggccaggcggaacccactggaagcgtgagctagcggggaccacccccgggcgaaaccaaaggagaaagaggggaacccaggggtcccggggcgcttaggcccgcgcggacggggaggccagagttgccccgaagctatctccttacctcaccggcccccacgggctccgcgctcagctacagcccggcgggagcaatgcggcagccacaacagttgccggcggtcgccgcgggccggaaagcggggttcggggatgggaagggggcggggcgaagcgagcaaaaagttccggggaagccgagaccgcgaccttccgcgctttacggcccccgggcacgggtaccgccggcgcgtgacctcagccgcgcccgagcgcgccgtgacgccctcgcggagccccgcccctgccacgtgggcttgtttgggtctcgcgaggcaccgcccccgcggcctctttgccaccctcagaggcgagctgtggaagccttgactcttagggccgttttagaacccgggcctcggaccggcggggtttctgcacgtggaaccggaacatctgagatgatcgcaggccctgtggagtgtggggagcgcgggggttctttcttccctcgaggcccgtgccagggcttactccaaagccagtgggtccccagtcctaagccaagcagtcccgggggaaaacgcttctcatcgccgtgggagcgcggatcttggaagtggctctgggctttcttgggcgaggctctcacagagtagatcggaaatccattctgctggcccgccccacctcggaggacggactaacggacctgagttcccggccctatcttactcttctcagcttctcagcttggctcagctcagaggaagaggaatcactgaagtctcagagaagtctccactcatcccttcctcaccgtcacatcagccttttctttccttctagaagtcatcactgactcaaggatataagtttgatgactgtcttttccactggtgtgacacgatctctgtcgacagaaccttagtcttatgcatagctttattctcagcacccagaacagtgcctggcacctcttccactgaatattatatgcataagggtctcatgctgcagccaccattgcatcttgggccacactatccagttcccgtttgttggattcaatactgtctcaccacacaaaccaatcttgtgttttattaattaaaaaaaattttttttttttttgtagagataggctcactgtgttgcccaggctgggcctgaactcctggcttcaagtgatccttccatctcagcctcccaaagtcctgggattacaggcgtgagccactgtgcctgccccaatcttgtgttttattgctggccacctgtagccaggcactgtgcaggatgatgggatccagcagtgtacaagaaagaggcggtttctgctcttagggagtggcagtcaagttccagggacccctctgtcacaaggccaggccacagcctacatagtttataccccatttactggccagtcaaatcacacaaagacagcccagatgaggtctgccagacagtggactgaaactatgccataggctcctgtgctagataaatacttccatattttagctaggattgaatgcttggggacacctacctgtctaaaaaaagagaaaacggctgaccaatttgagacattctcggggaaggctttcctgatgcccagatgtggcaatttcatgaaaaatatcacaggttttcctcatgaaccatttggttcaagccatttccaggcacatgaatttgggagaaacctggttgtctgcaggagatggtggatgaaatcaagtgaaatacttaatgtgttgatttcattctgtttacgtgcagtaaatagcaaacaaatggta

SEQ ID NO: 1591 - protein, 187 aa, Homo sapiens [sequence omitted]

SEQ ID NO: 1592 - DNA, 1184 bp, Homo sapiens
atgcggctgcgcttttggctcctcatttggctcctgctgggatttatcagccatcagcccacccctgtgtctttcctgaagactatcttctggtctcgaaatggacatgatggatccacggatgtacagcagagagcctggaggtccaaccgcagtagacagaaagggctgaggtccatttgtatgcacacaaagaaaagagtttcttcctttcgaggaaataaaattggcctgaaagacgtcattactctacggaggcatgtggaaacaaaagttagagctaaaatccgtaagaggaaggtgacaacgaaaatcaaccgtcatgacaaaatcaatggaaagaggaagaccgccagaaaacagaaaatgtttcaacgtgcgcaagagttgcggcggcgggcagaggactaccacaaatgcaaaatccccccttctgcaagaaagcctctttgcaactgggtcagaatggcggcagcggagcatcgtcattcttcaggattgccctgctggccctacctcacagctgaagctttaaaaaacaggatgggccgccagccacctcctccaactcaacaacattctataactgataactccctgagcctcaagacacctcccgaatgtctccttcatccccttccaccctcagtggatgataatatcaaggagtgtcctcttgctcctcttccaccctcagtggatgataatctgaaggagtatctcctggtccctcttccaccctctcctcttccaccctcagtggatgataatctgaaggactgtctctttgtccctcttccaccctctcctcttccaccctcagtggatgataatctcaagactcctcccttagctactcaggaggccgaggcggaaaaaccacccaaacccaagaggtggagggtggatgaggtggaacaatcaccgaaacccaagaggcggagggcggatgaggtggaacaatcgcccaagcccaagaggcagagggaggccgaggcacaacaattacccaaacccaagaggcggaggttgagtaagctgagaacacgccattgcactcaagcctgggcaataagaataaatccgtgggtcgaaaaaaagaaaaaaatcaaaaaacaaaacaaaacccacgctccaaaaacaaactaacgaagaataaataaataatataaaaataaaataaa

SEQ ID NO: 1593 - protein, 382 aa, Homo sapiens
MRLRFWLLIWLLLGFISHQPTPVSFLKTIFWSRNGHDGSTDVQQRAWRSNRSRQKGLRSICMHTKKRVSSFRGNKIGLKDVITLRRHVETKVRAKIRKRKVTTKINRHDKINGKRKTARKQKMFQRAQELRRRAEDYHKCKIPPSARKPLCNWVRMAAAEHRHSSGLPCWPYLTAEALKNRMGRQPPPPTQQHSITDNSLSLKTPPECLLHPLPPSVDDNIKECPLAPLPPSVDDNLKEYLLVPLPPSPLPPSVDDNLKDCLFVPLPPSPLPPSVDDNLKTPPLATQEAEAEKPPKPKRWRVDEVEQSPKPKRRRADEVEQSPKPKRQREAEAQQLPKPKRRRLSKLRTRHCTQAWAIRINPWVEKKKKIKKQNKTHAPKTN

SEQ ID NO: 1594 - DNA, 1876 bp, Homo sapiens
ctcttttgtccaccagcccagcctgactcctggagattgtgaatagctccatccagcctgagaaacaagccgggtggctgagccaggctgtgcacggagcacctgacgggcccaacagacccatgctgcatccagagacctcccctggccgggggcatctcctggctgtgctcctggccctccttggcaccacctgggcagaggtgtggccaccccagctgcaggagcaggctccgatggccggagccctgaacaggaaggagagtttcttgctcctctccctgcacaaccgcctgcgcagctgggtccagccccctgcggctgacatgcggaggctggactggagtgacagcctggcccaactggctcaagccagggcagccctctgtggaatcccaaccccgagcctggcatccggcctgtggcgcaccctgcaagtgggctggaacatgcagctgctgcccgcgggcttggcgtcctttgttgaagtggtcagcctatggtttgcagaggggcagcggtacagccacgcggcaggagagtgtgctcgcaacgccacctgcacccactacacgcagctcgtgtgggccacctcaagccagctgggctgtgggcggcacctgtgctctgcaggccagacagcgatagaagcctttgtctgtgcctactcccccggaggcaactgggaggtcaacgggaagacaatcatcccctataagaagggtgcctggtgttcgctctgcacagccagtgtctcaggctgcttcaaagcctgggaccatgcaggggggctctgtgaggtccccaggaatccttgtcgcatgagctgccagaaccatggacgtctcaacatcagcacctgccactgccactgtccccctggctacacgggcagatactgccaagtgaggtgcagcctgcagtgtgtgcacggccggttccgggaggaggagtgctcgtgcgtctgtgacatcggctacgggggagcccagtgtgccaccaaggtgcattttcccttccacacctgtgacctgaggatcgacggagactgcttcatggtgtcttcagaggcagacacctattacagagccaggatgaaatgtcagaggaaaggcggggtgctggcccagatcaagagccagaaagtgcaggacatcctcgccttctatctgggccgcctggagaccaccaacgaggtgactgacagtgacttcgagaccaggaacttctggatcgggctcacctacaagaccgccaaggactccttccgctgggccacaggggagcaccaggccttcaccagttttgcctttgggcagcctgacaaccacgggctggtgtggctgagtgctgccatggggtttggcaactgcgtggagctgcaggcttcagctgccttcaactggaacgaccagcgctgcaaaacccgaaaccgttacatctgccagtttgcccaggagcacatctcccggtggggcccagggtcctgaggcctgaccacatggctccctcgcctgccctgggagcaccggctctgcttacctgtctgcccacctgtctggaacaagggccaggttaagaccacatgcctcatgtccaaagaggtctcagaccttgcacaatgccagaagttgggcagagagaggcagggaggccagtgagggccagggagtgagtgttagaagaagctggggcccttcgcctgcttttgattgggaagatgggcttcaattagatggcgaaggagaggacaccgccagtggtccaaaaaggctgctctcttccacctggcccagaccctgtggggcagcggagcttccctgtggcatgaaccccacggggtattaaattatgaatcagctgaaaaaaaaaaaaa

SEQ ID NO: 1595 - protein, 455 aa, Homo sapiens
MLHPETSPGRGHLLAVLLALLGTTWAEVWPPQLQEQAPMAGALNRKESFLLLSLHNRLRSWVQPPAADMRRLDWSDSLAQLAQARAALCGIPTPSLASGLWRTLQVGWNMQLLPAGLASFVEVVSLWFAEGQRYSHAAGECARNATCTHYTQLVWATSSQLGCGRHLCSAGQTAIEAFVCAYSPGGNWEVNGKTIIPYKKGAWCSLCTASVSGCFKAWDHAGGLCEVPRNPCRMSCQNHGRLNISTCHCHCPPGYTGRYCQVRCSLQCVHGRFREEECSCVCDIGYGGAQCATKVHFPFHTCDLRIDGDCFMVSSEADTYYRARMKCQRKGGVLAQIKSQKVQDILAFYLGRLETTNEVTDSDFETRNFWIGLTYKTAKDSFRWATGEHQAFTSFAFGQPDNHGLVWLSAAMGFGNCVELQASAAFNWNDQRCKTRNRYICQFAQEHISRWGPGS

SEQ ID NO: 1596 - DNA, 3779 bp, Homo sapiens
gcgtcgagctcgccgcggactcaagatggcggcgtgtggacgtgtacggaggatgttccgcttgtcggcggcgctgcatctgctgctgctattcgcggccggggccgagaaactccccggccagggcgtccacagccagggccagggtcccggggccaactttgtgtccttcgtagggcaggccggaggcggcggcccggcgggtcagcagctgccccagctgcctcagtcatcgcagcttcagcagcaacagcagcagcagcaacagcaacagcagcctcagccgccgcagccgcctttcccggcgggtgggcctccggcccggcggggaggagcgggggctggtgggggctggaagctggcggaggaagagtcctgcagggaggacgtgacccgcgtgtgccctaagcacacctggagcaacaacctggcggtgctcgagtgcctgcaggatgtgagggagcctgaaaatgaaatttcttcagactgcaatcatttgttgtggaattataagctgaacctaactacagatcccaaatttgaatctgtggccagagaggtttgcaaatctactataacagagattaaagaatgtgctgatgaaccggttggaaaaggttacatggtttcctgcttggtggatcaccgaggcaacatcactgagtatcagtgtcaccagtacattaccaagatgacggccatcatttttagtgattaccgtttaatctgtggcttcatggatgactgcaaaaatgacatcaacattctgaaatgtggcagtattcggcttggagaaaaggatgcacattcacaaggtgaggtggtatcatgcttggagaaaggcctggtgaaagaagcagaagaaagagaacccaagattcaagtttctgaactctgcaagaaagccattctccgggtggctgagctgtcatcggatgactttcacttagaccggcatttatattttgcttgccgagatgatcgggagcgtttttgtgaaaatacacaagctggtgagggcagagtgtataagtgcctctttaaccataaatttgaagaatccatgagtgaaaagtgtcgagaagcacttacaacccgccaaaagctgattgcccaggattataaagtcagttattcattggccaaatcctgtaaaagtgacttgaagaaataccggtgcaatgtggaaaaccttccgcgatcgcgtgaagccaggctctcctacttgttaatgtgcctggagtcagctgtacacagagggcgacaagtcagcagtgagtgccagggggagatgctggattaccgacgcatgttgatggaagacttttctctgagccctgagatcatcctaagctgtcggggggagattgaacaccattgttccggattacatcgaaaagggcggaccctacactgtctgatgaaagtagttcgaggggagaaggggaaccttggaatgaactgccagcaggcgcttcaaacactgattcaggagactgaccctggtgcagattaccgcattgatcgagctttgaatgaagcttgtgaatctgtaatccagacagcctgcaaacatataagatctggagacccaatgatcttgtcgtgcctgatggaacatttatacacagagaagatggtagaagactgtgaacaccgtctcttagagctgcagtatttcatctcccgggattggaagctggaccctgtcctgtaccgcaagtgccagggagacgcttctcgtctttgccacacccacggttggaatgagaccagtgaatttatgcctcagggagctgtgttctcttgtttatacagacacgcctaccgcactgaggaacagggaaggaggctctcacgggagtgccgagctgaagtccaaaggatcctacaccagcgtgccatggatgtcaagctggatcctgccctccaggataagtgcctgattgatctgggaaaatggtgcagtgagaaaacagagactggacaggagctggagtgccttcaggaccatctggatgacttggtggtggagtgtagagatatagttggcaacctcactgagttagaatcagaggatattcaaatagaagccttgctgatgagagcctgtgagcccataattcagaacttctgccacgatgtggcagataaccagatagactctggggacctgatggagtgtctgatacagaacaaacaccagaaggacatgaacgagaagtgtgccatcggagttacccacttccagctggtgcagatgaaggattttcggttttcttacaagtttaaaatggcctgcaaggaggacgtgttgaagctttgcccaaacataaaaaagaaggtggacgtggtgatctgcctgagcacgaccgtgcgcaatgacactctgcaggaagccaaggagcacagggtgtccctgaagtgccgcaggcagctccgtgtggaggagctggagatgacggaggacatccgcttggagccagatctatacgaagcctgcaagagtgacatcaaaaacttctgttccgctgtgcaatatggcaacgctcagattatcgaatgtctgaaagaaaacaagaagcagctaagcacccgctgccaccaaaaagtatttaagctgcaggagacagagatgatggacccagagctagactacaccctcatgagggtctgcaagcagatgataaagaggttctgtccggaagcagattctaaaaccatgttgcagtgcttgaagcaaaataaaaacagtgaattgatggatcccaaatgcaaacagatgataaccaagcgccagatcacccagaacacagattaccgcttaaaccccatgttaagaaaagcctgtaaagctgacattcctaaattctgtcacggtatcctgactaaggccaaggatgattcagaattagaaggacaagtcatctcttgcctgaagctgagatatgctgaccagcgcctgtcttcagactgtgaagaccagatccgaatcattatccaggagtccgccctggactaccgcctggatcctcagctccagctgcactgctcagacgagatctccagtctatgtgctgaagaagcagcagcccaagagcagacaggtcaggtggaggagtgcctcaaggtcaacctgctcaagatcaaaacagaattgtgtaaaaaggaagtgctaaacatgctgaaggaaagcaaagcagacatctttgttgacccggtacttcatactgcttgtgccctggacattaaacaccactgcgcagccatcacccctggccgcgggcgtcaaatgtcctgtctcatggaagcactggaggataagcgggtgaggttacagcccgagtgcaaaaagcgcctcaatgaccggattgagatgtggagttacgcagcaaaggtggccccagcagatggcttctctgatcttgccatgcaagtaatgacgtctccatctaagaactacattctctctgtgatcagtgggagcatctgtatattgttcctgattggcctgatgtgtggacggatcaccaagcgagtgacacgagagctcaaggacaggctacaatacaggtcagagacaatggcttataaaggtttagtgtggtctcaggatgtgacaggcagtccagcctgacctttctgcacactccagacaaacttcccagacaagctcctttgtgcctctacgtggagagggtgtggaaagttatcacattaaaagatggaggatttaaaaaaaaaaaaaaaaaaaaaaaaaaaagaaaaaaaaaaaaaaa

SEQ ID NO: 1597 - protein, 1203 aa, Homo sapiens
MAACGRVRRMFRLSAALHLLLLFAAGAEKLPGQGVHSQGQGPGANFVSFVGQAGGGGPAGQQLPQLPQSSQLQQQQQQQQQQQQPQPPQPPFPAGGPPARRGGAGAGGGWKLAEEESCREDVTRVCPKHTWSNNLAVLECLQDVREPENEISSDCNHLLWNYKLNLTTDPKFESVAREVCKSTITEIKECADEPVGKGYMVSCLVDHRGNITEYQCHQYITKMTAIIFSDYRLICGFMDDCKNDINILKCGSIRLGEKDAHSQGEVVSCLEKGLVKEAEEREPKIQVSELCKKAILRVAELSSDDFHLDRHLYFACRDDRERFCENTQAGEGRVYKCLFNHKFEESMSEKCREALTTRQKLIAQDYKVSYSLAKSCKSDLKKYRCNVENLPRSREARLSYLLMCLESAVHRGRQVSSECQGEMLDYRRMLMEDFSLSPEIILSCRGEIEHHCSGLHRKGRTLHCLMKVVRGEKGNLGMNCQQALQTLIQETDPGADYRIDRALNEACESVIQTACKHIRSGDPMILSCLMEHLYTEKMVEDCEHRLLELQYFISRDWKLDPVLYRKCQGDASRLCHTHGWNETSEFMPQGAVFSCLYRHAYRTEEQGRRLSRECRAEVQRILHQRAMDVKLDPALQDKCLIDLGKWCSEKTETGQELECLQDHLDDLVVECRDIVGNLTELESEDIQIEALLMRACEPIIQNFCHDVADNQIDSGDLMECLIQNKHQKDMNEKCAIGVTHFQLVQMKDFRFSYKFKMACKEDVLKLCPNIKKKVDVVICLSTTVRNDTLQEAKEHRVSLKCRRQLRVEELEMTEDIRLEPDLYEACKSDIKNFCSAVQYGNAQIIECLKENKKQLSTRCHQKVFKLQETEMMDPELDYTLMRVCKQMIKRFCPEADSKTMLQCLKQNKNSELMDPKCKQMITKRQITQNTDYRLNPMLRKACKADIPKFCHGILTKAKDDSELEGQVISCLKLRYADQRLSSDCEDQIRIIIQESALDYRLDPQLQLHCSDEISSLCAEEAAAQEQTGQVEECLKVNLLKIKTELCKKEVLNMLKESKADIFVDPVLHTACALDIKHHCAAITPGRGRQMSCLMEALEDKRVRLQPECKKRLNDRIEMWSYAAKVAPADGFSDLAMQVMTSPSKNYILSVISGSICILFLIGLMCGRITKRVTRELKDRLQYRSETMAYKGLVWSQDVTGSPA

SEQ ID NO: 1598 - DNA, 4952 bp, Homo sapiens
aagtggcagttggcgtaggtgcattcggagtgcggccgaggtaactaccgagtcttcggcgggctcgcgagcccggccgcggcctgctggtttcagtgatggctcatgaagcaatggaatatgatgttcaggtgcagttaaatcatgccgaacaacagccagctcctgctggcatggccagcagccaagggggaccagccctcctccagcctgttcctgctgatgtggtcagcagccagggggtaccatccatcctccagccagctcctgctgaggtgatcagcagccaagcgacaccacccctgctccagcctgctccgcaactgtctgttgacctgacagaagtggaggtcttgggagaagacactgtggagaacatcaatccaagaacttcagaacaacataggcagggatctgatggtaatcacaccatcccagcatcttcgttgcattcaatgaccaacttcatcagcggactgcagagacttcatggcatgctggaattcctgagaccttcatcttcaaaccacagtgtagggccaatgagaacaagaaggagggtatctgcttcacggagggcaagagccggagggtctcagaggacagacagtgccaggttgagagcaccattggatgcttactttcaggtgagcaggacccagcctgacttgccagctaccacttatgattcagagactaggaatcctgtatctgaagagttgcaggtgtctagtagttctgattctgacagtgacagctctgcagagtatggaggggttgttgaccaggcagaggaatctggagctgtcattttagaagagcaactagcaggtgtctcagcagagcaagaagttacatgtatcgatggaggcaagaccctccccaaacagccatctccccagaagtctgagcctctgctaccttctgcttctatggatgaggaagaaggggacacttgtacaatatgtctggaacagtggaccaatgctggggaccaccggctctcagcattacgctgtgggcatctctttgggtataggtgcatttccacgtggcttaaaggacaagtacgaaaatgtccccagtgcaacaagaaagccaggcacagtgacattgtcgtcctttatgcccgaaccctgagagctttggacactagtgaacaggagcgcatgaaaagttccctactgaaggaacagatgctaaggaaacaggccgagttagaatcagcacagtgccgactccaactgcaggtcctcactgataagtgcactaggcttcaaaggcgtgttcaggacttgcaaaaacttacgtcacatcaaagtcagaatttacagcaacccaggggctcccaagcatgggtcctgagctgctcaccctccagccagggccagcacaagcacaagtaccacttccaaaagaccttcacagtatctcaggcaggaaactgccggatcatggcatactgtgatgctctgagctgcctggtgatatcacagccttctcctcaggcctcttttcttccaggctttggtgttaagatgttgagtactgccaacatgaagagcagtcagtacattccgatgcatggcaaacagatccgtggactggcgtttagcagttacctcagaggcttgctactctctgcttccctagacaacactattaaactgaccagcctggagacaaataccgtggtccagacttataatgctggacgtcctgtctggagctgttgctggtgtcttgatgaggctaactacatctatgctggactggccaatggttcaattctggtatatgacgtgcgaaacacgagcagtcatgtgcaggagttagtagctcagaaagccagatgcccactggtctccctgtcatacatgcccagagctgcctcagctgcatttccatatggtggggtgctggctggaaccttggaggatgcttcattctgggaacagaaaatggacttttctcattggcctcatgtgctgcccttggagccagggggctgcatagactttcagacagagaacagctcccggcactgtcttgtgacctacaggcctgataaaaatcacaccaccatacgaagtgtgctgatggaaatgtcctaccgactggatgacactggaaatccaatctgctcctgccagcctgtacatacattttttggaggacctacttgcaaactattgaccaaaaatgccattttccaaagcccagagaatgatggcaacatcctggtgtgtactggggatgaagcagcaaattctgccctgctgtgggatgctgccagtggctcgttgctccaggacctacagaccgatcagcctgtgttggacatctgcccatttgaggtgaaccgtaacagctacttggctaccttaacagagaagatggtccacatctataagtgggagtgactgtggtctcgaaaccttgaaggcatgctgctggttagatgttgtttgctagcgcctagcagccccaagcaagatccctgtttattgtctgcagtctagaacattgggaatcatggtttgtttgcattagtatgattctaggaccctaggtcactgagacactacagattgtgtatctgttatgtccactaaaagagtaattgatgggtactttatctacattatccatttcttgggtttaaagccttcattaaccattattgtatgttggaaattcttattttctttattttctgtgtgactttctggaccttagagagtgtcctctcatcatctaggatgtgagtgggcatcaagcattttctggggaatatgacatcccatctgagttgtcctgtcacttaagtatccttgaagggactaaccatcgtcttggtactgatttgatgcaacgtagatgtaaaagagtattattcagttgaacacaagagggcactgtagaaccttgtgtccggtttatttctgaccttgaaggctgacaatcttttagtaacttgtctcatctccacacaagtgtgtgatagcacacctgggtgtgctttgtggcaataacacttgtgttccaggtgtgaagtgctgggacattggcaggcccagtgatggaagcagctagtgaacgattccctttgctaatgcctagtgcattaagttcattgctttgcgaaaggtaaggaaagaggccagttgtttgagcggtggggaagattttgttttttctagccagcttaggatctcaggattggttttatccaagctagtgctttgaagaacactatctcttgccaggaaaagatgagtgataggtcaaagcttttacttgagtctcccctagtgtcagagatcaggagaaaagacataagagaatttacaaaagctattcagactgctattgaaaacatgagaagaacttgtctcccattttgagagttcctatctaaataaagccaattcctcagactgaggggctgttcttaagtgttctttatacattccagttatccagttaaagccttccccatgtgaagctgatgtttgattccagtttcctttgatttgcctccctaaccttttctagggctcagtttgtatttctttgccttgcctcagactactttgccaacccacttccacaacagaatatgcttcaagatgtgggcaggtcagtgtcctgttcatgggagaaaatggcttaacagtctgattttctcaaatgattattgaagagttgttatcgtttttattataaaacacttctgacctgtcaattcaagagctgtttctaggatctttctctccggcaaggggttgttgcactagatttccccagagttccaagttctagttgtgccttttaatgaccctttaatattttaggacataattttttccttttttaaatttttttgtagaaatagatgtttcactacgttgtccaggctggtcttggactcctggcctcaagcaatcctcccacctcagcctcctaaagtgccaaaattataggcgtgagccactgcacccggcccctatttgaagacgtcttttgtaaaagctagcttctagaacctgagaaaagctcttttctcagaggagatactccttttgatatgttaatgattaagagtggttgcccaggcctagtttcagtggcagaataggattggaattaaaaagcagaactcatctggcttcagcagattgccaccaagaggatacaggtggtcaggtcctggctggctttgtctttgggcctgggcaggcttaggatttgactttctttgaagtacctgatgctgattgattccactaatagtaggaagcaagagacttaactatgagggacgttatgtgaatcttaagtcttaccagtccttgcattagtacattaaatttggatgttttggaagcaaattcatacgatcgtgagtgatttctccaaagaaaaaaagccttgtccagcctgaccaacatggtgaaaccccatctctactaaaaatacaaaaattaactgggtgcagtggtgcgcatgcctgtagtcccagctacttgggaggctgaggcaggagaattgcttgaaccctgggaggcagaggttgcagtgagtcgagatcgcgccactgcactccagcctcggtgacagagcaagactccatctcaaaaaaaacaaacaaacaaaaaaaaaccctgatgccattcccagtccccgttgtaggacatcacatttataaatccaggctttagtcttctgggctccaccagtctctgccccaccatattcctttgtcactacctctaagtttttttccccacttgaggatttggagttaaacgaactcaaaatgtcttgtcattgtatgtattcttgcccctgctttgaaaacagggccatgggaactctgtttatgccctgttttaatgtttctgttttatgttttactgttaatatgaaaataaagaatttgctatgta

SEQ ID NO: 1599 - protein, 774 aa, Homo sapiens
MAHEAMEYDVQVQLNHAEQQPAPAGMASSQGGPALLQPVPADVVSSQGVPSILQPAPAEVISSQATPPLLQPAPQLSVDLTEVEVLGEDTVENINPRTSEQHRQGSDGNHTIPASSLHSMTNFISGLQRLHGMLEFLRPSSSNHSVGPMRTRRRVSASRRARAGGSQRTDSARLRAPLDAYFQVSRTQPDLPATTYDSETRNPVSEELQVSSSSDSDSDSSAEYGGVVDQAEESGAVILEEQLAGVSAEQEVTCIDGGKTLPKQPSPQKSEPLLPSASMDEEEGDTCTICLEQWTNAGDHRLSALRCGHLFGYRCISTWLKGQVRKCPQCNKKARHSDIVVLYARTLRALDTSEQERMKSSLLKEQMLRKQAELESAQCRLQLQVLTDKCTRLQRRVQDLQKLTSHQSQNLQQPRGSQAWVLSCSPSSQGQHKHKYHFQKTFTVSQAGNCRIMAYCDALSCLVISQPSPQASFLPGFGVKMLSTANMKSSQYIPMHGKQIRGLAFSSYLRGLLLSASLDNTIKLTSLETNTVVQTYNAGRPVWSCCWCLDEANYIYAGLANGSILVYDVRNTSSHVQELVAQKARCPLVSLSYMPRAASAAFPYGGVLAGTLEDASFWEQKMDFSHWPHVLPLEPGGCIDFQTENSSRHCLVTYRPDKNHTTIRSVLMEMSYRLDDTGNPICSCQPVHTFFGGPTCKLLTKNAIFQSPENDGNILVCTGDEAANSALLWDAASGSLLQDLQTDQPVLDICPFEVNRNSYLATLTEKMVHIYKWE

SEQ ID NO: 1600 - DNA, 1714 bp, Homo sapiens
atgggtttcactgatgaacaggacaccattattaaagggcctatgggccttgcccccacgcccagcaacccagatacgcgcgggggttcgggctccttagccccgaccactggcgccgccccgagggcccgaatcccctcaggccgccgggttccaagcccgcgtgcagcccacctcgtggggtgtctcctgaatcccaatccaggaatcaggcgtggggaggtttatcccgaagctagaggcccaaggcctgaggagaagcaacacccctcctcacctgaaaccagcaggccgcggccgggctcgcgagcccgccgaagactcggtagttacctcggccgcactccgaatgcacctacgccaactgccacttccggagccgctcaagctcccgccagagccgccggcaggcatgctcctattggacagaagccctacgctgtggccaatacccactcttcttcttcaatgggtcccccgatagctgaagcagcggtgctctcattggctgggccgccgctcgccgccagcgccaaaagaaaggggcccccggaattctccagctacgtacgaggagcgcgagcccacagccgtctcggctccgagcccgccgccggcaggaaagccacaaagaaaactgataaacccagacaagatgataaagacgatctagatgtaacagaactcactaatgaagatcctttggatcagcttgtgaaatacggagtgaattgtggtcctattgtgggaacaaccaggaagctgtatgagaaatagcttttgaaactgagggagcaaggaacagaatcaagatcgtctccttcagcaacaatttcttcttcagcagaaaatacaaggcagaatggaagtaatgattctgacagatatggtgaaaatgaagaagactctaaattgggctcaagtttgagaagagagaaccgctaaacaggggagtaaagactccagtaaccctcaagcaaagaagagttgagcacaaggagagctattctcaagctggaataactgggactgaatggacaagtggatcttcaaaaggcggacctctgcaggcattattaactagggaatctacaagagggtcaagaagaactccaagcaaaagggtgcacgcttcagaatattttcgtatagatggagcagtaatttcagcgagtactcccatagctgaaactataattgcttcaaacaacgaatccttaattgtcaatagggtgactggaaatttcaagcatgcatttcctattctgccagtcactgaattctcagacatacccagaagaacaccaaagaaaccattgacaagagctgaagtgggagaaaaaaaacacaggaaagaagagtagaaagggatattcttaaggaaatgttcccctatgaagcaactacaccaacaagaattagtgctagttgccgcagaacaatcaaaggagctgcaggccggccattagaactcagtgatttgaggatggaggagtcgttttcatctacatatgttcctaagtatgttcccttggcagacgtcaagtgagaaaatacaaaaaaaagggacgctccattcctgtatggataaaaattttgctgtttgttgttgtggcagtttttttgtgtgtgtttggtctatcaagctatggaaaccaaccatgtaaatcccttctctaatattcttcctgatgactctagaaaacccaactga

SEQ ID NO: 1601 - DNA, 2496 bp, Homo sapiens
agaaagcggctccagggagccagggcaccgtgagcctggtggttggcagctggagccacgtcggagggggaagtgtcgcagcattctctgcaggcatcacagacctgaggcagtggcctccggagggcactggacagaaacagccatccaagtggctgagtggagggaccctgctcaagtgcagctgcagtggccggggtttccctcaggtagggatcggggcgccttgtcgccgccagccacgtgtggcgtccggtacagtcagcagagtgcagggtgcgggcaccaggaaagggggcgcaggggaactcccgcgggcctcgcgtttgcaaacttctcgcctgggcaggaggcggtcgtgggaaagaaggtggaagagcgagctttttggaactgtgcacgggacagattggacgcacacccctcgggaggcgcgaaggcatggaaaatttgaagcatattatcacccttggccaggtcatccacaaacggtgtgaagagatgaaatactgcaagaaacagtgccggcgcctgggccaccgcgtcctcggcctgatcaagcctctggagatgctccaggaccaaggaaagaggagcgtgccctctgagaagttaaccacagccatgaaccgcttcaaggctgccctggaggaggctaatggggagatagaaaagttcagcaatagatccaatatctgcaggtttctaacagcaagccaggacaaaatactcttcaaggacgtgaacaggaagctgagtgatgtctggaaggagctctcgctgttacttcaggttgagcaacgcatgcctgtttcacccataagccaaggagcgtcctgggcacaggaagatcagcaggatgcagacgaagacaggcgagctttccagatgctaagaagagataatgaaaaaatagaagcttcactgagacgattagaaatcaacatgaaagaaatcaaggaaactttgaggcagtatttaccaccaaaatgcatgcaggagatcccgcaagagcaaatcaaggagatcaagaaggagcagctttcaggatccccgtggattctgctaagggaaaatgaagtcagcacactttataaaggagaataccacagagctccagtggccataaaagtattcaaaaaactccaggctggcagcattgcaatagtgaggcagactttcaataaggagatcaaaaccatgaagaaattcgaatctcccaacatcctgcgtatatttgggatttgcattgatgaaacagtgactccgcctcaattctccattgtcatggagtactgtgaactcgggaccctgagggagctgttggatagggaaaaagacctcacacttggcaagcgcatggtcctagtcctgggggcagcccgaggcctataccggctacaccattcagaagcacctgaactccacggaaaaatcagaagctcaaacttcctggtaactcaaggctaccaagtgaagcttgcaggatttgagttgaggaaaacacagacttccatgagtttgggaactacgagagaaaagacagacagagtcaaatctacagcatatctctcacctcaggaactggaagatgtattttatcaatatgatgtaaagtctgaaatatacagctttggaatcgtcctctgggaaatcgccactggagatatcccgtttcaaggctgtaattctgagaagatccgcaagctggtggctgtgaagcggcagcaggagccactgggtgaagactgcccttcagagctgcgggagatcattgatgagtgccgggcccatgatccctctgtgcggccctctgtggatgaaatcttaaagaaactctccaccttttctaagtagtgtatcaaaatctaaaccaaggatccctggacaagaagctgggagaggcacaaactggacatctctctctctcatatccttcggcattgggttatctatgggagcaaggagtggcacgcttctctgttacaaatagaaaacgattccagtcatacaggacacatcccactccaaatgatatttccaaaaacatacctctgacagtaactttgatagatggtttgtcaaatgtatctttctgggtatccacacctcttggcaatgaaatttgcagctcctcccttccataaatgaagtctctttccccaccatttgaatctgggctggcactgtgacttgatttgatcaatagaatgtggaagaagtgactgtatgccagttccaagcctaggtttcaagaggccttataaatgtctgttggaaccttacccagccatgaacatgttgagtgagcatgctggagaatgagagaccacatgaagcagaaacatgctttcctagctgaagtcatactagcccaaccaacatggcagctaacacatgaatgaggccaatcaagaccagaagaaccactcaagcagatcccagcccaaattgcccattcacacaatcaggagctaaataaattactgttgtctt

SEQ ID NO: 1602 - protein, 471 aa, Homo sapiens
MENLKHIITLGQVIHKRCEEMKYCKKQCRRLGHRVLGLIKPLEMLQDQGKRSVPSEKLTTAMNRFKAALEEANGEIEKFSNRSNICRFLTASQDKILFKDVNRKLSDVWKELSLLLQVEQRMPVSPISQGASWAQEDQQDADEDRRAFQMLRRDNEKIEASLRRLEINMKEIKETLRQYLPPKCMQEIPQEQIKEIKKEQLSGSPWILLRENEVSTLYKGEYHRAPVAIKVFKKLQAGSIAIVRQTFNKEIKTMKKFESPNILRIFGICIDETVTPPQFSIVMEYCELGTLRELLDREKDLTLGKRMVLVLGAARGLYRLHHSEAPELHGKIRSSNFLVTQGYQVKLAGFELRKTQTSMSLGTTREKTDRVKSTAYLSPQELEDVFYQYDVKSEIYSFGIVLWEIATGDIPFQGCNSEKIRKLVAVKRQQEPLGEDCPSELREIIDECRAHDPSVRPSVDEILKKLSTFSK

SEQ ID NO: 1603 - DNA, 3842 bp, Homo sapiens
gggaagttggctggctggcgaggcagagcctctcctcaaagcctggctcccacggaaaatatgctcagtgcagccgcgtgcatgaatgaaaacgccgccgggcgcttctagtcggacaaaatgcagccgagaactccgctcgttctgtgcgttctcctgtcccaggtgctgctgctaacatctgcagaagatttggactgcactcctggatttcagcagaaagtgttccatatcaatcagccagctgaattcattgaggaccagtcaattctaaacttgaccttcagtgactgtaagggaaacgacaagctacgctatgaggtctcgagcccatacttcaaggtgaacagcgatggcggcttagttgctctgagaaacataactgcagtgggcaaaactctgttcgtccatgcacggaccccccatgcggaagatatggcagaactcgtgattgtcggggggaaagacatccagggctccttgcaggatatatttaaatttgcaagaacttctcctgtcccaagacaaaagaggtccattgtggtatctcccattttaattccagagaatcagagacagcctttcccaagagatgttggcaaggtagtcgatagtgacaggccagaaaggtccaagttccggctcactggaaagggagtggatcaagagcctaaaggaattttcagaatcaatgagaacacagggagcgtctccgtgacacggaccttggacagagaagtaatcgctgtttatcaactatttgtggagaccactgatgtcaatggcaaaactctcgaggggccggtgcctctggaagtcattgtgattgatcagaatgacaaccgaccgatctttcgggaaggcccctacatcggccacgtcatggaagggtcacccacaggcaccacagtgatgcggatgacagcctttgatgcagatgacccagccaccgataatgccctcctgcggtataatatccgtcagcagacgcctgacaagccatctcccaacatgttctacatcgatcctgagaaaggagacattgtcactgttgtgtcacctgcgctgctggaccgagagactctggaaaatcccaagtatgaactgatcatcgaggctcaagatatggctggactggatgttggattaacaggcacggccacagccacgatcatgatcgatgacaaaaatgatcactcaccaaaattcaccaagaaagagtttcaagccacagtcgaggaaggagctgtgggagttattgtcaatttgacagttgaagataaggatgaccccaccacaggtgcatggagggctgcctacaccatcatcaacggaaaccccgggcagagctttgaaatccacaccaaccctcaaaccaacgaagggatgctttctgttgtcaaaccattggactatgaaatttctgccttccacaccctgctgatcaaagtggaaaatgaagacccactcgtacccgacgtctcctacggccccagctccacagccaccgtccacatcactgtcctggatgtcaacgagggcccagtcttctacccagaccccatgatggtgaccaggcaggaggacctctctgtgggcagcgtgctgctgacagtgaatgccacggaccccgactccctgcagcatcaaaccatcaggtattctgtttacaaggacccagcaggttggctgaatattaaccccatcaatgggactgttgacaccacagctgtgctggaccgtgagtccccatttgtcgacaacagcgtgtacactgctctcttcctggcaattgacagtggcaaccctcccgctacgggcactgggactttgctgataaccctggaggacgtgaatgacaatgccccgttcatttaccccacagtagctgaagtctgtgatgatgccaaaaacctcagtgtagtcattttgggagcatcagataaggatcttcacccgaatacagatcctttcaaatttgaaatccacaaacaagctgttcctgataaagtctggaagatctccaagatcaacaatacacacgccctggtaagccttcttcaaaatctgaacaaagcaaactacaacctgcccatcatggtgacagattcagggaaaccacccatgacgaatatcacagatctcagggtacaagtgtgctcctgcaggaattccaaagtggactgcaacgcggcaggggccctgcgcttcagcctgccctcagtcctgctcctcagcctcttcagcttagcttgtctgtgagaactcctgacgtctgaagcttgactcccaagtttccatagcaacaggaaaaaaaaaaatctatccaaatctgaagattgcggtttacagctatcgaacttcacaactaggcctcaattgttccggttttttattttctttacaatttcacttagtctgtacttcatcattttgacagcatcttcctccctcctttaattaatggaatcttctgaattttccctgaatgtttaaagatcatgacatatgacttgatcttctgggagcaggaacaatgactactttttctggtgtgttaacatgtcgctagccagtgctccaggcacccagctttgtctgtgggttagtattggtgtatgtatgagtatctgtatgtatatatacacggtatttatagagagagactatcctggagaagcctcgttttgatgccattcttccttgcaaggttaagcaaggtgggtggaaactaagacacctgaaccctccagggcctcccgcatcaaggtcagcatgaggacagaccacagagctgtcacttttgctccgaagctacttctccactgtcccgttcagtctgaatgctgccacaaccagccaggcaggtccacagagagggagagcagagaaagaagtcctttctctttattgagttcgaggactacaaccaatttacactgccatctgatgccgtgatcctgagccaaggaggtgaggagcagagcaggcaatttcaccaccaaatgccaagaaaagggctgacattttctttcatgggcaccaacctgcatttgtatgtgtcccgaatccacagtcgtactgattctaatggggacacagatcatggtagagaatctctccctcctcagtaaatgtacaactgcacctgtcatcatggaggtcatacatgcatacaaagaggtgtacaggtaccatcttgtatacacatatatacccacatgtacagacatacatttatgcacattcacgctgtttgtttcatatatacaggcataaaatagagtaaatacaggtagttttaaaagtacccttttgtgtgaattgactaccgttgtttgcaaacccgaaaataaaagacgttcattatgtatgaaaagtaactgatttgtattctgtgagcatgtaaaagcggaaagttagtgcttgttctaagattaccttcttgttgataaaccataaatgaatcatcaaagctcacaccaaatttttctatcaaataaaactagtgacagcttgtggctttttattagagctcgccacgaactagggtaaggtgagtgtcttagcatattttaatgcagttgcttactaaaggttttaaccgcacatgcacacacacacgctttcttatgcaatctatgtttgcacttgtgctttcagttagccttctgtaggaagtagaagtcatatgttgtctttgttgtagtgaaattatacagatagagttccatatattgtatttgtttcaatggtaaatccttttggaacatatagaatgcagagatttttttttccattaaaataaatgggtattggtggttaaaaaaaaaaaaaaaaaa

SEQ ID NO: 1604 - protein, 713 aa, Homo sapiens
MQPRTPLVLCVLLSQVLLLTSAEDLDCTPGFQQKVFHINQPAEFIEDQSILNLTFSDCKGNDKLRYEVSSPYFKVNSDGGLVALRNITAVGKTLFVHARTPHAEDMAELVIVGGKDIQGSLQDIFKFARTSPVPRQKRSIVVSPILIPENQRQPFPRDVGKVVDSDRPERSKFRLTGKGVDQEPKGIFRINENTGSVSVTRTLDREVIAVYQLFVETTDVNGKTLEGPVPLEVIVIDQNDNRPIFREGPYIGHVMEGSPTGTTVMRMTAFDADDPATDNALLRYNIRQQTPDKPSPNMFYIDPEKGDIVTVVSPALLDRETLENPKYELIIEAQDMAGLDVGLTGTATATIMIDDKNDHSPKFTKKEFQATVEEGAVGVIVNLTVEDKDDPTTGAWRAAYTIINGNPGQSFEIHTNPQTNEGMLSVVKPLDYEISAFHTLLIKVENEDPLVPDVSYGPSSTATVHITVLDVNEGPVFYPDPMMVTRQEDLSVGSVLLTVNATDPDSLQHQTIRYSVYKDPAGWLNINPINGTVDTTAVLDRESPFVDNSVYTALFLAIDSGNPPATGTGTLLITLEDVNDNAPFIYPTVAEVCDDAKNLSVVILGASDKDLHPNTDPFKFEIHKQAVPDKVWKISKINNTHALVSLLQNLNKANYNLPIMVTDSGKPPMTNITDLRVQVCSCRNSKVDCNAAGALRFSLPSVLLLSLFSLACL

SEQ ID NO: 1605 - DNA, 3403 bp, Homo sapiens
gggtccggcccaggaggcttgggcgcgcgcagccatcccgggcctcgccggggacctagggacgcaggcaacgcctgcgcccgctcaccatggtcgagggacgcgtctccgagttcctgaagaaactcggcttctcgggcgggggccgccagtaccaggcgctggagaaggacgaagaggaagccttgattgatgaacagagtgagctgaaagccatcgagaaagagaagaaggtgacagccctgccccccaaggaagcgtgcaaatgccagaaagaggatttggccagagcgttttgtgtggacttacacactgggctgtcggagttctcggtgacgcagcgccggctggcccatggctggaatgagtttgttgctgacaacagcgaacctgtgtggaagaaatacctggatcagtttaagaaccccctgatcctgctgctgctgggctctgccctggtgagtgtcctcaccaaggagtatgaggacgccgtcagcatcgccacggcagtgcttgtcgtggtcactgtcgccttcatccaggagtacaggtcggagaaatctctggaagagctgaccaagatggttcctccagaatgtaactgcctaagagaaggaaaactccagcacctgcttgctcgagaactggttcctggtgatgtcgtatctctctcgatcggagaccggatccctgcagacatccgactcactgaggtcacggacctcttggtggatgaatccagtttcaccggggaagccgagccatgtagtaaaacagacagccccttgacaggcggtggggacctcaccaccctcagcaacatcgtcttcatggggaccctggtgcagtatgggaggggccagggggtcgtgattggaacaggggaaagctctcagttcggagaagtgtttaagatgatgcaggctgaagagacacctaaaactcctttgcagaaaagcatggacaggctaggaaagcaactgacactcttctcctttggcataatcggtctcatcatgctcattggctggtcgcaagggaaacaactcctgagtatgttcacgatcggggtcagcctggctgtggcggccattccagagggtctgcccatcgtcgtcatggtgacgctggtcctgggagtgctgcggatggccaagaagcgggtcatcgtgaagaagttacccatcgtggagactttaggttgctgcagcgttctctgttctgacaagacggggactctgactgccaatgaaatgacagtgacccagcttgtaacgtcagatgggcttcgtgccgaggtcagcggagttgggtatgacggtcaagggactgtgtgtcttctaccatccaaggaagtcattaaggaattttccaatgtctcagtgggaaagttagtggaggcgggctgtgttgccaacaatgcggtcatcagaaagaacgccgtgatggggcagcccaccgagggtgcattgatggccctggcgatgaagatggacttaagtgatattaaaaattcatatataagaaaaaaagagattccattcagttcagagcagaagtggatggcggtgaaatgcagtctgaagactgaggatcaggaagacatttacttcatgaaaggggccttggaagaggtgatccgctactgcaccatgtacaacaacgggggcatccccctgccgctgacgccccagcagaggtcattctgcctgcaggaagagaagaggatggggtcgctcggtttgcgggtgctggccctggcttctgggcccgagctggggcggctgacgtttctcggtcttgtgggcatcattgaccccccgagagttggcgtgaaggaagcagtccaggttctctccgagtctggtgtgtctgtgaagatgataacgggggatgccctggagacggccttggccataggaagaaacatcggcctgtgcaacgggaagctgcaagccatgtccggggaggaggtggacagcgtggagaagggcgagctggccgaccgcgtggggaaggtgtccgtgttcttcaggaccagcccaaagcacaagctcaaaatcatcaaggctctgcaggagtcaggggcgatcgtggccatgactggggatggggtgaacgacgcagtggccctgaagtctgcagacattgggatcgccatggggcagacagggacggacgtcagcaaagaggccgccaacatgatcctggtggatgatgacttctcagccatcatgaatgcagtggaggaaggcaagggtattttttacaacatcaaaaactttgtccgattccagctgagcacgagcatctccgccctgagtctcatcactctgtccaccgtgttcaacctgcccagccccctcaacgccatgcagatcctatggatcaacatcatcatggatgggccaccggcgcagagcttgggggtagagcccgttgacaaagacgccttcaggcagccaccacggagtgtgcgggacaccatcctcagcagagccctcatcctgaagatcctcatgtccgcggccatcatcatcagcgggaccctctttatcttctggaaggagatgcctgaagacagagcaagcactccccgcaccacgacgatgacgttcacttgttttgtgtttttcgatctcttcaacgccttgacctgccgctctcagaccaagctgatatttgagatcggctttctcaggaaccacatgttcctctactccgtcctggggtccatcctggggcagctggcggtcatttacatccccccgctgcagagggtcttccagacggagaacctgggagcgcttgatttgctgtttttaactggattggcctcatccgtcttcattttgtcagagctcctcaaactatgtgaaaaatactgttgcagccccaagagagtccagatgcaccctgaagatgtgtagtggaccgcactccgcggcaccttccctaatcatctcgatctggttgtgactgtggcccctgccgtgtctcctcgtcaggggagacttttaggaggccgcagccttccatcaccggatcagtttttcctcttaggaaagctgcaggaacctcgtgggctccagggacccaggcccacatccatccagcgttcccgctggctgtgggacagacagggaggggcctgtacagaaacaccacactgtttattaaatcacaatgatttttattaaccatgtctaactacgtatctgtgccacagcttgcagtgaggcaggccactcgtggcagatacaaggggctcctgagaggcagtgggtaggatggtcacactctgcccattgccctcctggaggccccatttcctcatcataaaatgagggacttttaaataaagtgctatgccgggggataattaaaaaaaaaaaaaaaaaaa

SEQ ID NO: 1606 - protein, 946 aa, Homo sapiens
MVEGRVSEFLKKLGFSGGGRQYQALEKDEEEALIDEQSELKAIEKEKKVTALPPKEACKCQKEDLARAFCVDLHTGLSEFSVTQRRLAHGWNEFVADNSEPVWKKYLDQFKNPLILLLLGSALVSVLTKEYEDAVSIATAVLVVVTVAFIQEYRSEKSLEELTKMVPPECNCLREGKLQHLLARELVPGDVVSLSIGDRIPADIRLTEVTDLLVDESSFTGEAEPCSKTDSPLTGGGDLTTLSNIVFMGTLVQYGRGQGVVIGTGESSQFGEVFKMMQAEETPKTPLQKSMDRLGKQLTLFSFGIIGLIMLIGWSQGKQLLSMFTIGVSLAVAAIPEGLPIVVMVTLVLGVLRMAKKRVIVKKLPIVETLGCCSVLCSDKTGTLTANEMTVTQLVTSDGLRAEVSGVGYDGQGTVCLLPSKEVIKEFSNVSVGKLVEAGCVANNAVIRKNAVMGQPTEGALMALAMKMDLSDIKNSYIRKKEIPFSSEQKWMAVKCSLKTEDQEDIYFMKGALEEVIRYCTMYNNGGIPLPLTPQQRSFCLQEEKRMGSLGLRVLALASGPELGRLTFLGLVGIIDPPRVGVKEAVQVLSESGVSVKMITGDALETALAIGRNIGLCNGKLQAMSGEEVDSVEKGELADRVGKVSVFFRTSPKHKLKIIKALQESGAIVAMTGDGVNDAVALKSADIGIAMGQTGTDVSKEAANMILVDDDFSAIMNAVEEGKGIFYNIKNFVRFQLSTSISALSLITLSTVFNLPSPLNAMQILWINIIMDGPPAQSLGVEPVDKDAFRQPPRSVRDTILSRALILKILMSAAIIISGTLFIFWKEMPEDRASTPRTTTMTFTCFVFFDLFNALTCRSQTKLIFEIGFLRNHMFLYSVLGSILGQLAVIYIPPLQRVFQTENLGALDLLFLTGLASSVFILSELLKLCEKYCCSPKRVQMHPEDV

SEQ ID NO: 1607 - DNA, 2707 bp, Homo sapiens
catctttgagcaagatgggtctctaccgcatccgcgtgtccactggggcctcgctctatgccggttccaacaaccaggtgcagctgtggctggtcggccagcacggggaggcggcgctcgggaagcgactgtggcccgcacggggcaaggagacagaactcaaggtggaagtaccggagtatctggggccgctgctgtttgtgaaactgcgcaaacggcacctccttaaggacgacgcctggttctgcaactggatctctgtgcagggccccggagccggggacgaggtcaggttcccttgttaccgctgggtggagggcaacggcgtcctgagcctgcctgaaggcaccggccgcactgtgggcgaggaccctcagggcctgttccagaaacaccgggaagaagagctggaagagagaaggaagttgtaccggtggggaaactggaaggacgggttaattctgaatatggctggggccaaactatatgacctccctgtggatgagcgatttctggaagacaagagagttgactttgaggtttcgctggccaaggggctggccgacctcgctatcaaagactctctaaatgttctgacttgctggaaggatctagatgacttcaaccggattttctggtgtggtcagagcaagctggctgagcgcgtgcgggactcctggaaggaagatgccttatttgggtaccagtttcttaatggcgccaaccccgtggtgctgaggcgctctgctcaccttcctgctcgcctagtgttccctccaggcatggaggaactgcaggcccagctggagaaggagctggagggaggcacactgttcgaagctgacttctccctgctggatgggatcaaggccaacgtcattctctgtagccagcagcacctggctgcccctctagtcatgctgaaattgcagcctgatgggaaactcttgcccatggtcatccagctccagctgccccgcacaggatccccaccacctccccttttcttgcctacggatcccccaatggcctggcttctggccaaatgctgggtgcgcagctctgacttccagctccatgagctgcagtctcatcttctgaggggacacttgatggctgaggtcattgttgtggccaccatgaggtgcctgccgtcgatacatcctatcttcaagcttataattccccacctgcgatacaccctggaaattaacgtccgggccaggactgggctggtctctgacatgggaattttcgaccagataatgagcactggtgggggaggccacgtgcagctgctcaagcaagctggagccttcctaacctacagctccttctgtccccctgatgacttggccgaccgggggctcctgggagtgaagtcttccttctatgcccaagatgcgctgcggctctgggaaatcatctatcggtatgtggaaggaatcgtgagtctccactataagacagacgtggctgtgaaagacgacccagagctgcagacctggtgtcgagagatcactgaaatcgggctgcaaggggcccaggaccgagggtttcctgtctctttacaggctcgggaccaggtttgccactttgtcaccatgtgtatcttcacctgcaccggccaacacgcctctgtgcacctgggccagctggactggtactcttgggtgcctaatgcaccctgcacgatgcggctgcccccgccaaccaccaaggatgcaacgctggagacagtgatggcgacactgcccaacttccaccaggcttctctccagatgtccatcacttggcagctgggcagacgccagcccgttatggtggctgtgggccagcatgaggaggagtatttttcgggccctgagcctaaggctgtgctgaagaagttcagggaggagctggctgccctggataaggaaattgagatccggaatgcaaagctggacatgccctacgagtacctgcggcccagcgtggtggaaaacagtgtggccatctaagcgtcgccaccctttggttatttcagcccccatcacccaagccacaagctgaccccttcgtggttatagccctgccctcccaagtcccaccctcttcccatgtcccaccctccctagaggggcaccttttcatggtctctgcacccagtgaacacattttactctagaggcatcacctgggaccttactcctctttccttccttcctcctttcctatcttccttcctctctctcttcctctttcttcattcagatctatatggcaaatagccacaattatataaatcatttcaagactagaatagggggatataatacatattactccacaccttttatgaatcaaatatgatttttttgttgttgttaagacagagtctcactttgacacccaggctggagtgcagtggtgccatcaccacggctcactgcagcctcagcgtcctgggctcaaatgatcctcccacctcagcctcctgagtagctgggactacaggctcatgccatcatgcccagctaatatttttttattttcgtggagacggggcctcactatgttgcctaggctggaaataggattttgaacccaaattgagtttaacaataataaaaagttgttttacgctaaagatggaaaagaactaggactgaactattttaaataaaatattggcaaaagaaaaaaaaaaaaaaaaaaaaaaaaa

SEQ ID NO: 1608 - protein, 662 aa, Homo sapiens
MGLYRIRVSTGASLYAGSNNQVQLWLVGQHGEAALGKRLWPARGKETELKVEVPEYLGPLLFVKLRKRHLLKDDAWFCNWISVQGPGAGDEVRFPCYRWVEGNGVLSLPEGTGRTVGEDPQGLFQKHREEELEERRKLYRWGNWKDGLILNMAGAKLYDLPVDERFLEDKRVDFEVSLAKGLADLAIKDSLNVLTCWKDLDDFNRIFWCGQSKLAERVRDSWKEDALFGYQFLNGANPVVLRRSAHLPARLVFPPGMEELQAQLEKELEGGTLFEADFSLLDGIKANVILCSQQHLAAPLVMLKLQPDGKLLPMVIQLQLPRTGSPPPPLFLPTDPPMAWLLAKCWVRSSDFQLHELQSHLLRGHLMAEVIVVATMRCLPSIHPIFKLIIPHLRYTLEINVRARTGLVSDMGIFDQIMSTGGGGHVQLLKQAGAFLTYSSFCPPDDLADRGLLGVKSSFYAQDALRLWEIIYRYVEGIVSLHYKTDVAVKDDPELQTWCREITEIGLQGAQDRGFPVSLQARDQVCHFVTMCIFTCTGQHASVHLGQLDWYSWVPNAPCTMRLPPPTTKDATLETVMATLPNFHQASLQMSITWQLGRRQPVMVAVGQHEEEYFSGPEPKAVLKKFREELAALDKEIEIRNAKLDMPYEYLRPSVVENSVAI

SEQ ID NO: 1609 - DNA, 3688 bp, Homo sapiens
acaggcagcctcatccgccatcactccgggaaccgagcaccccgctgcctcggcgcccaggctgctctctccgcgcatgctccttcccagcttgagcccgcgagtccagcctgccttcactcagtgcgcaagaccgcagccccctccccacgccccctccccagtaggcggccgtcgcggtgtgtttgcgtcatcgcgccacgccaccactggaacccgggggaagatggcggcagccgttctgagtgggccctctgcgggctccgcggctggggttcctggcgggaccgggggtctctcggcagtgagctcgggcccgcggctccgcctgctgctgctggagagtgtttctggtttgctgcaacctcgaacggggtctgccgttgctccggtgcatcccccaaaccgctcggccccacatttgcccgggctcatgtgcctattgcggctgcatgggtcggtgggcggggcccagaacctttcagctcttggggcattggtgagtctcagtaatgcacgtctcagttccatcaaaactcggtttgagggcctgtgtctgctgtccctgctggtaggggagagccccacagagctattccagcagcactgtgtgtcttggcttcggagcattcagcaggtgttacagacccaggacccgcctgccacaatggagctggccgtggctgtcctgagggacctcctccgatatgcagcccagctgcctgcactgttccgggacatctccatgaaccacctccctggccttctcacctccctgctgggcctcaggccagagtgtgagcagtcagcattggaaggaatgaaggcttgtatgacctatttccctcgggcttgtggttctctcaaaggcaagctggcctcattttttctgtctagggtggatgccttgagccctcagctccaacagttggcctgtgagtgttattcccggctgccctctttaggggctggcttttcccaaggcctgaagcacaccgagagctgggagcaggagctacacagtctgctggcctcactgcacaccctgctgggggccctgtacgagggagcagagactgctcctgtgcagaatgaaggccctggggtggagatgctgctgtcctcagaagatggtgatgcccatgtccttctccagcttcggcagaggttttcgggactggcccgctgcctagggctcatgctcagctctgagtttggagctcccgtgtccgtccctgtgcaggaaatcctggatttcatctgccggaccctcagcgtcagtagcaagaatattagcttgcatggagatggtcccctgcggctgctgctgctgccctctatccaccttgaggccttggacctgctgtctgcactcatcctcgcgtgtggaagccggctcttgcgctttgggatcctgatcggccgcctgcttccccaggtcctcaattcctggagcatcggtagagattccctctctccaggccaggagaggccttacagcacggttcggaccaaggtgtatgcgatattagagctgtgggtgcaggtttgtggggcctcggcgggaatgcttcagggaggagcctctggagaggccctgctcacccacctgctcagcgacatctccccgccagctgatgcccttaagctgcgtagcccgcgggggagccctgatgggagtttgcagactgggaagcctagcgcccccaagaagctaaagctggatgtgggggaagctatggccccgccaagccaccggaaaggggatagcaatgccaacagcgacgtgtgtgcggctgcactcagaggcctcagccggaccatcctcatgtgtgggcctctcatcaaggaggagactcacaggagactgcatgacctggtcctccccctggtcatgggtgtacagcagggtgaggtcctaggcagctccccgtacacgagctcccgctgccgccgtgaactctactgcctgctgctggcgctgctgctggccccgtctcctcgctgcccacctcctcttgcctgtgccctgcaagccttctccctcggccagcgagaagatagccttgaggtctcctctttctgctcagaagcactggtgacctgtgctgctctgacccacccccgggttcctcccctgcagcccatgggccccacctgccccacacctgctccagttccccctcctgaggccccatcgcccttcagggccccaccgttccatcctccgggccccatgccctcagtgggctccatgccctcagcaggccccatgccttcagcaggccccatgccctcagcaggccctgtgccctcggcacgccctggacctcccaccacagccaaccacctaggcctttctgtcccaggcctagtgtctgtccctccccggcttcttcctggccctgagaaccaccgggcaggctcaaatgaggaccccatccttgcccctagtgggactcccccacctactatacccccagatgaaacttttggggggagagtgcccagaccagcctttgtccactatgacaaggaggaggcatctgatgtggagatctccttggaaagtgactctgatgacagcgtggtgatcgtgcccgaggggcttccccccctgccacccccaccaccctcaggtgccacaccaccccctatagcccccactgggccaccaacagcctcccctcctgtgccagcgaaggaggagcctgaagaacttcctgcagccccagggcctctcccgccacccccacctccgccgccgcctgttcctggtcctgtgacgctccctccaccccagttggtccctgaagggactcctggtgggggaggacccccagccctggaagaggatttgacagttattaatatcaacagcagtgatgaagaggaggaggaagaggaagaagaggaagaagaagaagaggaagaagaggaagaggaggaagactttgaggaagaggaagaggatgaagaggaatattttgaagaggaagaagaggaggaagaagagtttgaggaagaatttgaggaagaagaaggtgagttagaggaagaagaagaagaggaggatgaggaggaggaagaagaactggaagaggtggaagacctggagtttggcacagcaggaggggaggtagaagaaggtgcacctccacccccaaccctgcctccagctctgcctccccctgagtctcccccaaaggtgcagccagaacccgaacctgaacccgggctgcttttggaagtggaggagccagggacggaggaggagcgtggggctgacacagctcccaccctggcccctgaagcgctcccctcccagggagaggtggagagggaaggggaaagccctgcggcagggccccctccccaggagcttgttgaagaagagccctctgctcccccaaccctgttggaagaggagactgaggatgggagtgacaaggtgcagcccccaccagagacacctgcagaagaagagatggagacagagacagaggccgaagctctccaggaaaaggagcaggatgacacagctgccatgctggccgacttcatcgattgtccccctgatgatgagaagccaccacctcccacagagcctgactcctagccatcttctgcaccccactctttgtttccaataaagttatgtccttagatagcgaaaaaaaaaaaaaaa

SEQ ID NO: 1610 - protein, 1130 aa, Homo sapiens
MAAAVLSGPSAGSAAGVPGGTGGLSAVSSGPRLRLLLLESVSGLLQPRTGSAVAPVHPPNRSAPHLPGLMCLLRLHGSVGGAQNLSALGALVSLSNARLSSIKTRFEGLCLLSLLVGESPTELFQQHCVSWLRSIQQVLQTQDPPATMELAVAVLRDLLRYAAQLPALFRDISMNHLPGLLTSLLGLRPECEQSALEGMKACMTYFPRACGSLKGKLASFFLSRVDALSPQLQQLACECYSRLPSLGAGFSQGLKHTESWEQELHSLLASLHTLLGALYEGAETAPVQNEGPGVEMLLSSEDGDAHVLLQLRQRFSGLARCLGLMLSSEFGAPVSVPVQEILDFICRTLSVSSKNISLHGDGPLRLLLLPSIHLEALDLLSALILACGSRLLRFGILIGRLLPQVLNSWSIGRDSLSPGQERPYSTVRTKVYAILELWVQVCGASAGMLQGGASGEALLTHLLSDISPPADALKLRSPRGSPDGSLQTGKPSAPKKLKLDVGEAMAPPSHRKGDSNANSDVCAAALRGLSRTILMCGPLIKEETHRRLHDLVLPLVMGVQQGEVLGSSPYTSSRCRRELYCLLLALLLAPSPRCPPPLACALQAFSLGQREDSLEVSSFCSEALVTCAALTHPRVPPLQPMGPTCPTPAPVPPPEAPSPFRAPPFHPPGPMPSVGSMPSAGPMPSAGPMPSAGPVPSARPGPPTTANHLGLSVPGLVSVPPRLLPGPENHRAGSNEDPILAPSGTPPPTIPPDETFGGRVPRPAFVHYDKEEASDVEISLESDSDDSVVIVPEGLPPLPPPPPSGATPPPIAPTGPPTASPPVPAKEEPEELPAAPGPLPPPPPPPPPVPGPVTLPPPQLVPEGTPGGGGPPALEEDLTVININSSDEEEEEEEEEEEEEEEEEEEEEDFEEEEEDEEEYFEEEEEEEEEFEEEFEEEEGELEEEEEEEDEEEEEELEEVEDLEFGTAGGEVEEGAPPPPTLPPALPPPESPPKVQPEPEPEPGLLLEVEEPGTEEERGADTAPTLAPEALPSQGEVEREGESPAAGPPPQELVEEEPSAPPTLLEEETEDGSDKVQPPPETPAEEEMETETEAEALQEKEQDDTAAMLADFIDCPPDDEKPPPPTEPDS

SEQ ID NO: 1611 - DNA, 541 bp, Homo sapiens
atgcttgcttcagtgcgcgccgctcacctgctccactcggagcgtgccgccttctgtggccagccctcccgcttcttcactgcagcgtgtcagctcctcctggtgtttgcatttgatcttcgcagggaaggcattgctgctggaggggtaatggatgttaatactgcttcacaagaggtgctgaagaccgctctcatccaccatgacctagcacgtggaattcgcgaagctgccaaagccttagacaaacgccaagcccatctttgtgtgcttgcatccaactatgatgagcctactatgtatgtcaagttggtggaggcctttgtgctgaacaccaaatcaacctaattaaggttgatgacaacaagaaactaggagaatgggtagggctctgtaaaaatcgacagagaggggaaaccccgtaaagtggttggttgcagttgtgtagtagttaaggactatggcaaggagtctcaggccaaggatgacatcgaagagtacttgaaatgcaagaaatgaagaaataaatctttggcgcgcg

SEQ ID NO: 1612 - DNA, 1936 bp, Homo sapiens
ccccgcgtgtctgctaggagagggcgggcagcgccgcggcgcgcgcgatccggctgacgcatctggccccggttccccaagaccagagcggggccgggagggagggggaagaggcgagagcgcggagggcgcgcgtgcgcattggcgcggggaggagcagggatcttggcagcgggcgaggaggctgcgagcgagccgcgaaccgagcgggcggcgggcgcgcgcaccatgggggagaaacccgggaccagggtcttcaagaagtcgagccctaactgcaagctcaccgtgtacttgggcaagcgggacttcgtagatcacctggacaaagtggaccctgtagatggcgtggtgcttgtggaccctgactacctgaaggaccgcaaagtgtttgtgaccctcacctgcgccttccgctatggccgtgaagacctggatgtgctgggcttgtccttccgcaaagacctgttcatcgccacctaccaggccttccccccggtgcccaacccaccccggccccccacccgcctgcaggaccggctgctgaggaagctgggccagcatgcccaccccttcttcttcaccataccccagaatcttccatgctccgtcacactgcagccaggcccagaggatacaggaaaggcctgcggcgtagactttgagattcgagccttctgtgctaaatcactagaagagaaaagccacaaaaggaactctgtgcggctggtgatccgaaaggtgcagttcgccccggagaaacccggcccccagccttcagccgaaaccacacgccacttcctcatgtctgaccggtccctgcacctcgaggcttccctggacaaggagctgtactaccatggggagcccctcaatgtaaatgtccacgtcaccaacaactccaccaagaccgtcaagaagatcaaagtctctgtgagacagtacgccgacatctgcctcttcagcaccgcccagtacaagtgtcctgtggctcaactcgaacaagatgaccaggtatctcccagctccacattctgtaaggtgtacaccataaccccactgctcagcgacaaccgggagaagcggggtctcgccctggatgggaaactcaagcacgaggacaccaacctggcttccagcaccatcgtgaaggagggtgccaacaaggaggtgctgggaatcctggtgtcctacagggtcaaggtgaagctggtggtgtctcgaggcggggatgtctctgtggagctgccttttgttcttatgcaccccaagccccacgaccacatccccctccccagaccccagtcagccgctccggagacagatgtccctgtggacaccaacctcattgaatttgataccaactatgccacagatgatgacattgtgtttgaggactttgcccggcttcggctgaaggggatgaaggatgacgactatgatgatcaactctgctaggaagcggggtgggaagaagggaggggatggggttgggagaggtgagggcaggattaagatccccactgtcaatgggggattgtcccagcccctcttcccttcccctcacctggaagcttcttcaaccaatcccttcacactctctcccccatccccccaagatacacactggaccctctcttgctgaatgtgggcattaattttttgactgcagctctgcttctccagccccgccgtgggtggcaagctgtgttcatacctaaattttctggaaggggacagtgaaaagaggagtgacaggagggaaagggggagacaaaactcctactctcaacctcacaccaacacctcccattatcactctctctgcccccattccttcaagaggagaccctttggggacaaggccgtttctttgtttctgagcataaagaagaaaataaatcttttactaagcatgaaaaaaaaaaaaaaaaaa

SEQ ID NO: 1613 - protein, 409 aa, Homo sapiens
MGEKPGTRVFKKSSPNCKLTVYLGKRDFVDHLDKVDPVDGVVLVDPDYLKDRKVFVTLTCAFRYGREDLDVLGLSFRKDLFIATYQAFPPVPNPPRPPTRLQDRLLRKLGQHAHPFFFTIPQNLPCSVTLQPGPEDTGKACGVDFEIRAFCAKSLEEKSHKRNSVRLVIRKVQFAPEKPGPQPSAETTRHFLMSDRSLHLEASLDKELYYHGEPLNVNVHVTNNSTKTVKKIKVSVRQYADICLFSTAQYKCPVAQLEQDDQVSPSSTFCKVYTITPLLSDNREKRGLALDGKLKHEDTNLASSTIVKEGANKEVLGILVSYRVKVKLVVSRGGDVSVELPFVLMHPKPHDHIPLPRPQSAAPETDVPVDTNLIEFDTNYATDDDIVFEDFARLRLKGMKDDDYDDQLC

SEQ ID NO: 1614 - DNA, 1891 bp, Homo sapiens
ccccgcgtgtctgctaggagagggcgggcagcgccgcggcgcgcgcgatccggctgacgcatctggccccggttccccaagaccagagcggggccgggagggagggggaagaggcgagagcgcggagggcgcgcgtgcgcattggcgcggggaggagcagggatcttggcagcgggcgaggaggctgcgagcgagccgcgaaccgagcgggcggcgggcgcgcgcaccatgggggagaaacccgggaccagggtcttcaagaagtcgagccctaactgcaagctcaccgtgtacttgggcaagcgggacttcgtagatcacctggacaaagtggaccctgtagtgtttgtgaccctcacctgcgccttccgctatggccgtgaagacctggatgtgctgggcttgtccttccgcaaagacctgttcatcgccacctaccaggccttccccccggtgcccaacccaccccggccccccacccgcctgcaggaccggctgctgaggaagctgggccagcatgcccaccccttcttcttcaccataccccagaatcttccatgctccgtcacactgcagccaggcccagaggatacaggaaaggcctgcggcgtagactttgagattcgagccttctgtgctaaatcactagaagagaaaagccacaaaaggaactctgtgcggctggtgatccgaaaggtgcagttcgccccggagaaacccggcccccagccttcagccgaaaccacacgccacttcctcatgtctgaccggtccctgcacctcgaggcttccctggacaaggagctgtactaccatggggagcccctcaatgtaaatgtccacgtcaccaacaactccaccaagaccgtcaagaagatcaaagtctctgtgagacagtacgccgacatctgcctcttcagcaccgcccagtacaagtgtcctgtggctcaactcgaacaagatgaccaggtatctcccagctccacattctgtaaggtgtacaccataaccccactgctcagcgacaaccgggagaagcggggtctcgccctggatgggaaactcaagcacgaggacaccaacctggcttccagcaccatcgtgaaggagggtgccaacaaggaggtgctgggaatcctggtgtcctacagggtcaaggtgaagctggtggtgtctcgaggcggggatgtctctgtggagctgccttttgttcttatgcaccccaagccccacgaccacatccccctccccagaccccagtcagccgctccggagacagatgtccctgtggacaccaacctcattgaatttgataccaactatgccacagatgatgacattgtgtttgaggactttgcccggcttcggctgaaggggatgaaggatgacgactatgatgatcaactctgctaggaagcggggtgggaagaagggaggggatggggttgggagaggtgagggcaggattaagatccccactgtcaatgggggattgtcccagcccctcttcccttcccctcacctggaagcttcttcaaccaatcccttcacactctctcccccatccccccaagatacacactggaccctctcttgctgaatgtgggcattaattttttgactgcagctctgcttctccagccccgccgtgggtggcaagctgtgttcatacctaaattttctggaaggggacagtgaaaagaggagtgacaggagggaaagggggagacaaaactcctactctcaacctcacaccaacacctcccattatcactctctctgcccccattccttcaagaggagaccctttggggacaaggccgtttctttgtttctgagcataaagaagaaaataaatcttttactaagcatgaaaaaaaaaaaaaaaaaa

SEQ ID NO: 1615 - protein, 394 aa, Homo sapiens
MGEKPGTRVFKKSSPNCKLTVYLGKRDFVDHLDKVDPVVFVTLTCAFRYGREDLDVLGLSFRKDLFIATYQAFPPVPNPPRPPTRLQDRLLRKLGQHAHPFFFTIPQNLPCSVTLQPGPEDTGKACGVDFEIRAFCAKSLEEKSHKRNSVRLVIRKVQFAPEKPGPQPSAETTRHFLMSDRSLHLEASLDKELYYHGEPLNVNVHVTNNSTKTVKKIKVSVRQYADICLFSTAQYKCPVAQLEQDDQVSPSSTFCKVYTITPLLSDNREKRGLALDGKLKHEDTNLASSTIVKEGANKEVLGILVSYRVKVKLVVSRGGDVSVELPFVLMHPKPHDHIPLPRPQSAAPETDVPVDTNLIEFDTNYATDDDIVFEDFARLRLKGMKDDDYDDQLC

SEQ ID NO: 1616 - DNA, 860 bp, Homo sapiens
acttccggaacaagcgtcgcgtttctgaggagaaactcttggtgagaattcccagagtgataatggctacctacagcctggcgaacgagagactacgcgctctggaagacattgaacgggaaatcggcgccatccttcagaatgcaggtactgtgatcctagaattgtccaaggaaaaaactaacgagcggctcctagaccggcaggcggcggccttcaccgcttcagtgcaacacgtggaggcggagctgtcagctcagatccgctacctcacccaggtggccacagggcagccccatgagggctccagctactcttcgaggaaggactgtcagatggctctgaagcgagtggactatgcccgcctcaagctcagtgatgtggctcgaacctgtgagcagatgctggagaactaggccagggagatggacccagagctgagagggagaccatcacctgtgccatgggacagaacctgggaacatgtagggtggggagtatgagcaccaacataccctgctggtcaaagtaccctaggacaaaggggcaaatggtgggcatggaaaaactgaagcccgagcctgcccacagctatgccttggcctctccagcagggtgctcctgctctgcactccagaaacaccctgacaggctcagagaggagatggaaactgacatacccaacccacttcctcaaacacttcatgctgctgccccagccttcccgcagacttggcctaatgaaaatacatacttcttcattcggagagacaaaacaagaactagagttttaatgataataaaagcaataataataaaagcaataacaagaaaaaaaaaaaaaaaaaaaaaaaaaaaaa

SEQ ID NO: 1617 - protein, 117 aa, Homo sapiens
MATYSLANERLRALEDIEREIGAILQNAGTVILELSKEKTNERLLDRQAAAFTASVQHVEAELSAQIRYLTQVATGQPHEGSSYSSRKDCQMALKRVDYARLKLSDVARTCEQMLEN

SEQ ID NO: 1618 - DNA, 2344 bp, Homo sapiens
ggtgcgtccgcgggtggctgccccgcaggtgcgcgcggccggggctggcggcgactctctccaccgggccgcccgggaggctcatgcagcgcggctgggtcccgcggcgcccggatcggggaagtgaaagtgcctcggaggaggagggccggtccggcagtgcagccgcctcacaggtcggcggacgggccaggcgggcggcctcctgaaccgaaccgaatcggctcctcgggccgtcgtcctcccgcccctcctcgcccgccgccggagttttctttcggtttcttccaagattcctggccttccctcgacggagccgggcccagtgcgggggcgcagggcgcgggagctccacctcctcggctttccctgcgtccagaggctggcatggcgcgggccgagtactgagcgcacggtcggggcacagcagggccggggggtgcagctggctcgcgcctcctctccggccgccgtctcctccggtccccggcgaaagccattgagacaccagctggacgtcacgcgccggagcatgtctgggagtcagagcgaggtggctccatccccgcagagtccgcggagccccgagatgggacgggacttgcggcccgggtcccgcgtgctcctgctcctgcttctgctcctgctggtgtacctgactcagccaggcaatggcaacgagggcagcgtcactggaagttgttattgtggtaaaagaatttcttccgactccccgccatcggttcagttcatgaatcgtctccggaaacacctgagagcttaccatcggtgtctatactacacgaggttccagctcctttcctggagcgtgtgtgggggcaacaaggacccatgggttcaggaattgatgagctgtcttgatctcaaagaatgtggacatgcttactcggggattgtggcccaccagaagcatttacttcctaccagccccccaatttctcaggcctcagagggggcatcttcagatatccacacccctgcccagatgctcctgtccaccttgcagtccactcagcgccccaccctcccagtaggatcactgtcctcggacaaagagctcactcgtcccaatgaaaccaccattcacactgcgggccacagtctggcagctgggcctgaggctggggagaaccagaagcagccggaaaaaaatgctggtcccacagccaggacatcagccacagtgccagtcctgtgcctcctggccatcatcttcatcctcaccgcagccctttcctatgtgctgtgcaagaggaggagggggcagtcaccgcagtcctctccagatctgccggttcattatatacctgtggcacctgactctaatacctgagccaagaatggaagcttgtgaggagacggactctatgttgcccaggctgttatggaactcctgagtcaagtgatcctcccaccttggcctctgaaggtgcgaggattataggcgtcacctaccacatccagcctacacgtatttgttaatatctaacataggactaaccagccactgccctctcttaggcccctcatttaaaaacggttatactataaaatctgcttttcacactgggtgataataacttggacaaattctatgtgtattttgttttgttttgctttgctttgttttgagacggagtctcgctctgtcatccaggctggagtgcagtggcatgatctcggctcactgcaacccccatctcccaggttcaagcgattctcctgcctcctcctgagtagctgggactacaggtgctcaccaccacacccggctaattttttgtatttttagtagagacggggtttcaccatgttgaccaggctggtctcgaactcctgacctggtgatctgcccacccaggcctcccaaagtgctgggattaaaggtgtgagccaccatgcctggccctatgtgtgttttttaactactaaaaattatttttgtaatgattgagtcttctttatggaaacaactggcctcagcccttgcgcccttactgtgattcctggcttcattttttgctgatggttccccctcgtcccaaatctctctcccagtacaccagttgttcctcccccacctcagccctctcctgcatcctcctgtacccgcaacgaaggcctgggctttcccaccctccctccttagcaggtgccgtgctgggacaccatacgggttggtttcacctcctcagtcccttgcctaccccagtgagagtctgatcttgtttttattgttattgcttttattattattgcttttattatcattaaaactctagttcttgttttgtctctccgaaaaaaaaaaaaaaaaaaaaaa

SEQ ID NO: 1619 - protein, 273 aa, Homo sapiens
MSGSQSEVAPSPQSPRSPEMGRDLRPGSRVLLLLLLLLLVYLTQPGNGNEGSVTGSCYCGKRISSDSPPSVQFMNRLRKHLRAYHRCLYYTRFQLLSWSVCGGNKDPWVQELMSCLDLKECGHAYSGIVAHQKHLLPTSPPISQASEGASSDIHTPAQMLLSTLQSTQRPTLPVGSLSSDKELTRPNETTIHTAGHSLAAGPEAGENQKQPEKNAGPTARTSATVPVLCLLAIIFILTAALSYVLCKRRRGQSPQSSPDLPVHYIPVAPDSNT

SEQ ID NO: 1620 - DNA, 1964 bp, Homo sapiens
tgctgcatgccttcattcctggtgccctctcttgtctcttccccagtcctgctgaagctgctctttagcccaggccccaagactatatggtccctgtggcagcagccaatgttgtttcaggaagcaacagcatttgaaaatatgaccaaagattggaattatttagaaggctctcaaaaggattgctacagagacacaatgctggacagttatgagaacacggtcccacagggatccttcttacagctctccatgatgcctcagagagctggaaatgatccacctggggtttcaaatgcaagtgaaatggaaatggagataagtaacatgagagaaaagtttcttatgagtgtaacaaagttagtagaaagcaaaagttacaacagcaaggtattttccaaagaaaagtactttcaaacaataaaggaagttaaagaagctaaagaaaaagggaagaagtcatcacgtgattatcgccgtgcagcaaaatatgatgtgatctctgtacagggcacagagaaactgatagaggctactcatggagaacgtgatcgaatacggtattatgtacataaggaagagttgtttgatattcttcatgatacacatctcagtattggacatggtgggcggacacgcatgctcaaggagctgcaaggaaaatatgggaatgtcaccaaagaagttattgtcttatatctgactctgtgtaaacagtgccaccagaagaacccagtacccaagagaggccttgcaccaaagcccatgacttttaaggacatagactccacatgccaagttgaaatacttgacatgcagtccagtgccgatggtgagttcaagttcattttatactaccaggatcactcaaccaagtttattattttacggccattaagaaccaaacaggcccatgaggtggtcagtgtcttgttagatattttcacaattcttggtacacccagtgtgttagactctgacagtggcgttgagttcacaaaccaggttgttcatgagctcaatgagttgtggccagacctaaagattgtatctggtaagtaccaccctggccaaagccagggctccctggaaggagcaagccgtgatgtaaagaacatgataagtacctggatgcagagtaaccactcatgtcactgggccaaaggcctccgattcatgcagatggtgaggaatcaggctttcgacgtttccttgcagcaaagtccatttgaggcaatgtttggctataaagccaaatttgggctatattcctcaaacttgccccgggaaactgtggctactttacaaacggaagaagagctagaaattgctgaagaacagctagaaaatagcctttggatcaggcaggaagaaagggctgagattggagcagacagatctgatatggacgatgacatggatcccactcctgaagcttcagaacccagcacctcacaagggacttccggtctcctctgctggtgaacagatggctgctgggtggacagtcacaggtgtctctctgagcatagtcatctgagaactgttgccagaggccccagaggaaaagattgaaggctgcactctcaggtcaagttgtacatggcagtccttgctcaaaaagacaaaagttcaggtctgtgtatttattcttagggctgccataaaaaattaccacaacctggccgggcgcagcgctcatgcccgtaatcccagcactttggtaggccgaggtgggcgggtcacttgagatcaggagttcaagactagcctggccaacatgatgaaaccctgtctctactgaaaatatagaaattggccaggcttggagctgtgtgcctgtaatcccagctaaccaggaggctgaggcaggagaatcacttgaacccgggaggcagaggttgcagtgagccgagaccatgccactgcactccggcctgggtgacaaagcaagactctgtctc

SEQ ID NO: 1621 - protein, 492 aa, Homo sapiens
MPSFLVPSLVSSPVLLKLLFSPGPKTIWSLWQQPMLFQEATAFENMTKDWNYLEGSQKDCYRDTMLDSYENTVPQGSFLQLSMMPQRAGNDPPGVSNASEMEMEISNMREKFLMSVTKLVESKSYNSKVFSKEKYFQTIKEVKEAKEKGKKSSRDYRRAAKYDVISVQGTEKLIEATHGERDRIRYYVHKEELFDILHDTHLSIGHGGRTRMLKELQGKYGNVTKEVIVLYLTLCKQCHQKNPVPKRGLAPKPMTFKDIDSTCQVEILDMQSSADGEFKFILYYQDHSTKFIILRPLRTKQAHEVVSVLLDIFTILGTPSVLDSDSGVEFTNQVVHELNELWPDLKIVSGKYHPGQSQGSLEGASRDVKNMISTWMQSNHSCHWAKGLRFMQMVRNQAFDVSLQQSPFEAMFGYKAKFGLYSSNLPRETVATLQTEEELEIAEEQLENSLWIRQEERAEIGADRSDMDDDMDPTPEASEPSTSQGTSGLLCW

SEQ ID NO: 1622 - DNA, 602 bp, Homo sapiens
ataggtctcgcgagatctttggtaaacttacagaaccggaagcagcgtgtagttctcttcccttttgcggccatcaccgaagcgggagcggccaaaatgaagtttaatccctttgtgacttccgaccgaagcaagaatcgcaaaaggcatttcaatgcaccttcccacattcgaaggaagattatgtcttcccctctttccaaagagctgagacagaagtacaacgtgcgatccatgcccatccgaaaggatgatgaagttcaggttgtacgtggacactataaaggtcagcaaattggcaaagtagtccaggtttacaggaagaaatatgttatctacattgaacgggtgcagcgggaaaaggctaatggcacaactgtccacgtaggcattcaccccagcaaggtggttatcactaggctaaaactggacaaagaccgcaaaaagatcctcgaacggaaagccaaatctcgccaagtaggaaaggaaaagggcaaatacaaggaagaaaccattgagaagatgcaggaataaagtaatcttatatacaagctttgattaaaacttgaaacaaagagcctgaaaaaaaaaaaaaaaaaaaa

SEQ ID NO: 1623 - protein, 145 aa, Homo sapiens [sequence omitted]

SEQ ID NO: 1624 - DNA, 663 bp, Homo sapiens
atgtcagaaggggagagcaaggacagctcgggcagtgagtgccccgtgtgctatgagaagttccgggacctggagggcgccagccggacgctgagctgtggccatgtgttctgccatgactgcctggtcaagtacctgctgtccacccgcgtggatgggcaggtccagaggaccctggtctgccccatctgccgctacgtcacattcctcagcaagaagagctcccgctggccctccatgctggacaagagctcccagacgctggctgtgcccgtgggcctgccctccgtgcccccactggacagcctgggccacacaaaccccctggccgcctcctcccctgcctggaggccacctccaggccaggccaggccgccaggcagcccgggccagagcgcccagctccccctggacctgctgcccagcctgccccgggagtcacagatctttgtcatcagccgccacgggatgcccctgggggagcaggacagcgtgctgccccgccgcagcctggcagagctctcggaggcctccctggcgccccgctccgcccgcgccttctgctgccgatcgcgggccctgctgctcatcacgctcatcgctgtggtggccgtggtggccgccatcctgccctgggtgctgctggtgaggaagcaggcgtga

SEQ ID NO: 1625 - protein, 220 aa, Homo sapiens
MSEGESKDSSGSECPVCYEKFRDLEGASRTLSCGHVFCHDCLVKYLLSTRVDGQVQRTLVCPICRYVTFLSKKSSRWPSMLDKSSQTLAVPVGLPSVPPLDSLGHTNPLAASSPAWRPPPGQARPPGSPGQSAQLPLDLLPSLPRESQIFVISRHGMPLGEQDSVLPRRSLAELSEASLAPRSARAFCCRSRALLLITLIAVVAVVAAILPWVLLVRKQA

SEQ ID NO: 1626 - DNA, 627 bp, Homo sapiens
atgcaaccccgctccaagccaccctcgcaaatgaaggaatttcgaagagggggtaggaggaggcgggctgggcgcgccgctgccacctccgactgggccactccttgcgccgccagcgccccagcccacggtgccacgtcccggcctccgtcaccgccagccctcaccctacccggaacggggcacatcttccggaggccaccggaatcgttcccttgcaggcgcccctggggggccacacatcggaccagggaagggaggggacagttagagcggttggaacagttgcccccaggctggccgccccggaacccggcccggcccgccccggcggagcctcagacacggccccgggccgggaaggctccccaagggcaggcctcggcgccgccggcccagcgcagccccttagggagcggccccgcgctgcaggctcacctccaatgtgtcaaaagcgcatgttcgccgccgctcaaccgacgtctcccctccgccggcccggccaggcccgcccagccgctcggctcagctcccctacgcagccccgagctccactcagcgtacctccgcgcccggctcctccccgacacgtcagggactgcctgggtgtccgaggccattctgtga

SEQ ID NO: 1627 - protein, 208 aa, Homo sapiens [sequence omitted]

SEQ ID NO: 1628 - DNA, 2420 bp, Homo sapiens
agaatggcctcggacacccaggcagtccctgacgtgtcggggaggagccgggcgcggaggtacgctgagtggagctcggggctgcgtaggggagctgagccgagcggctgggcgggcctggccgggccggcggaggggagacgtcggttgagcggcggcgaacatgcgcttttgacacattggaggctttcttgatcatggatggtgaagatataccagatttttcaagtttaaaggaggaaactgcttattggaaggaactttccttgaagtataagcaaagcttccaggaagctcgggatgagctagttgaattccaggaaggaagcagagaattagaagcagagttggaggcacaattagtacaggctgaacaaagaaatagagacttgcaggctgataaccaaagactgaaatatgaagtggaggcattaaaggagaagctagagcatcaatatgcacagagctataagcaggtctcagtgttagaagatgatttaagtcagactcgggccattaaggagcagttgcataagtatgtgagagagctggagcaggccaacgacgacctggagcgagccaaaagggcaacaatagtttcactggaagactttgaacaaaggctaaaccaggccattgaacgaaatgcatttttagaaagtgaacttgatgaaaaggaatctttgttggtctctgtacagaggttaaaggatgaagcaagagatttaaggcaagaactagcagttcgggaaagacaacaggaagtaactagaaagtcggctcctagctctccaactctagactgtgaaaagatggactccgccgtccaagcatcactttctttgccagctacccctgttggcaaaggaacggagaacacttttccttcaccgaaagctataccaaatggttttggtaccagtccactaactccctctgctaggatatcagcactaaacatcgtgggggatctcttacggaaagtaggggctttagaatccaaattagcagcttgcaggaattttgcaaaggaccaagcatcacgaaaatcctatatttcagggaatgttaactgtggggtgctgaatggcaatggcacaaagttctctcgatcagggcatacatctttcttcgacaaagggcaagaaaaagtcatatttcccacgttgttcatggggcagtaaacggctttgaccccgctcctcctcctcctggtctgggctcctcgcgtccatcgtcagcgccgggtatgctgcctctcagtgtgtgagtgcctagcctccaggtgggggctcctgccctcctccaacaacccaggacacccacgcctcacccctcggtgcctgggcccagccccgtgcccctccgtctgcctccgcacggctggcagagggcaggctgcatgcagtggcggctactgggccctgcccagccccggaactctgcgcgatatcaatactggctattttctcttctcgccgtagtgccgttggtttcacatgattgcacttttgtgggtcgcaaggtgatacatacgtgtattacttggtcactggatgcagaagtacccattcatcacacctgccccatagcccccactctgctgtactgataggatttagttgtgttttaggacattgcaaatcttctagaagttctcccccaaatcaggtcaatgtgtgccctcctgagctcccacccaggcatctccagtgctcatgatcatgtgtcccccaactccacccctcacagtttgggcctgtttctggcaaagagtcaggaaggttactgaattagggaacattttctgcaccttctgattttacttaagcagctaccattccatggacttgcctcccagagcagcacaatgcccgtctgagccccacgtggcaggagcctctgggacggggcacacacaggcccagcctctgtgctgtctcctcctccgtgcgcctcagactcggggtgagggaggcgggcagcctctcgccagccttcccgtccttcagttcaacgacatctttggagtgtttttgttttctcttccaagggccgtcccgttgtgttaggaagggtgagtggctggttccagggtgggccggtgccagctccggggtggactgaacagcggcggctgtccctgtgcatcctttgattactctcatgctgcatttactgtttacatttgttttattgtacataggtttgtaaacattattgcctgagatatttgtatataacttgggctttgtagcttttatttattcagaacgcatacggcatgttaatgactctgatggtgtcctcctctgggcagctgtataggatcatcatgtggttacaaaaaatacttccctcaaaaaaattcttttaatgtggaaacaataaatttcacagaaaaaaaggaaaaaaaaaaa

SEQ ID NO: 1629 - protein, 328 aa, Homo sapiens
MDGEDIPDFSSLKEETAYWKELSLKYKQSFQEARDELVEFQEGSRELEAELEAQLVQAEQRNRDLQADNQRLKYEVEALKEKLEHQYAQSYKQVSVLEDDLSQTRAIKEQLHKYVRELEQANDDLERAKRATIVSLEDFEQRLNQAIERNAFLESELDEKESLLVSVQRLKDEARDLRQELAVRERQQEVTRKSAPSSPTLDCEKMDSAVQASLSLPATPVGKGTENTFPSPKAIPNGFGTSPLTPSARISALNIVGDLLRKVGALESKLAACRNFAKDQASRKSYISGNVNCGVLNGNGTKFSRSGHTSFFDKGQEKVIFPTLFMGQ

SEQ ID NO: 1630 - DNA, 2385 bp, Homo sapiens
agaatggcctcggacacccaggcagtccctgacgtgtcggggaggagccgggcgcggaggtacgctgagtggagctcggggctgcgtaggggagctgagccgagcggctgggcgggcctggccgggccggcggaggggagacgtcggttgagcggcggcgaacatgcgcttttgacacattggaggctttcttgatcatggatggtgaagatataccagatttttcaagtttaaaggaggaaactgcttattggaaggaactttccttgaagtataagcaaagcttccaggaagctcgggatgagctagttgaattccaggaaggaagcagagaattagaagcagagttggaggcacaattagtacaggctgaacaaagaaatagagacttgcaggctgataaccaaagactgaaatatgaagtggaggcattaaaggagaagctagagcatcaatatgcacagagctataagcaggtctcagtgttagaagatgatttaagtcagactcgggccattaaggagcagttgcataagtatgtgagagagctggagcaggccaacgacgacctggagcgagccaaaagggcaacaatagtttcactggaagactttgaacaaaggctaaaccaggccattgaacgaaatgcatttttagaaagtgaacttgatgaaaaggaatctttgttggtctctgtacagaggttaaaggatgaagcaagagatttaaggcaagaactagcagttcgggaaagacaacaggaagtaactagaaagtcggctcctagctctccaactctagactgtgaaaagatggactccgccgtccaagcatcactttctttgccagctacccctgttggcaaaggaacggagaacacttttccttcaccgaaagctataccaaatggttttggtaccagtccactaactccctctgctaggatatcagcactaaacatcgtgggggatctcttacggaaagtaggggctttagaatccaaattagcagcttgcaggaattttgcaaaggaccaagcatcacgaaaatcctatatttcagggaatgttaactgtggggtgctgaatggcaatggcacaaagttctctcgatcagggcatacatctttcttcgacaaaggggcagtaaacggctttgaccccgctcctcctcctcctggtctgggctcctcgcgtccatcgtcagcgccgggtatgctgcctctcagtgtgtgagtgcctagcctccaggtgggggctcctgccctcctccaacaacccaggacacccacgcctcacccctcggtgcctgggcccagccccgtgcccctccgtctgcctccgcacggctggcagagggcaggctgcatgcagtggcggctactgggccctgcccagccccggaactctgcgcgatatcaatactggctattttctcttctcgccgtagtgccgttggtttcacatgattgcacttttgtgggtcgcaaggtgatacatacgtgtattacttggtcactggatgcagaagtacccattcatcacacctgccccatagcccccactctgctgtactgataggatttagttgtgttttaggacattgcaaatcttctagaagttctcccccaaatcaggtcaatgtgtgccctcctgagctcccacccaggcatctccagtgctcatgatcatgtgtcccccaactccacccctcacagtttgggcctgtttctggcaaagagtcaggaaggttactgaattagggaacattttctgcaccttctgattttacttaagcagctaccattccatggacttgcctcccagagcagcacaatgcccgtctgagccccacgtggcaggagcctctgggacggggcacacacaggcccagcctctgtgctgtctcctcctccgtgcgcctcagactcggggtgagggaggcgggcagcctctcgccagccttcccgtccttcagttcaacgacatctttggagtgtttttgttttctcttccaagggccgtcccgttgtgttaggaagggtgagtggctggttccagggtgggccggtgccagctccggggtggactgaacagcggcggctgtccctgtgcatcctttgattactctcatgctgcatttactgtttacatttgttttattgtacataggtttgtaaacattattgcctgagatatttgtatataacttgggctttgtagcttttatttattcagaacgcatacggcatgttaatgactctgatggtgtcctcctctgggcagctgtataggatcatcatgtggttacaaaaaatacttccctcaaaaaaattcttttaatgtggaaacaataaatttcacagaaaaaaaggaaaaaaaaaaa

SEQ ID NO: 1631 - protein, 345 aa, Homo sapiens
MDGEDIPDFSSLKEETAYWKELSLKYKQSFQEARDELVEFQEGSRELEAELEAQLVQAEQRNRDLQADNQRLKYEVEALKEKLEHQYAQSYKQVSVLEDDLSQTRAIKEQLHKYVRELEQANDDLERAKRATIVSLEDFEQRLNQAIERNAFLESELDEKESLLVSVQRLKDEARDLRQELAVRERQQEVTRKSAPSSPTLDCEKMDSAVQASLSLPATPVGKGTENTFPSPKAIPNGFGTSPLTPSARISALNIVGDLLRKVGALESKLAACRNFAKDQASRKSYISGNVNCGVLNGNGTKFSRSGHTSFFDKGAVNGFDPAPPPPGLGSSRPSSAPGMLPLSV

SEQ ID NO: 1632 - DNA, 7619 bp, Homo sapiens
actgaggcgctggatctgtggtcgcggctggggacgtgcgcccgcgccaccatcttcggctgaagaggcaattgcttttggatcgttccatttacaatggcgcagagaactggactcgaggatccagagaggtatctctttgtggacagggctgtcatctacaaccctgccactcaagctgattggacagctaaaaagctagtgtggattccatcagaacgccatggttttgaggcagctagtatcaaagaagaacggggagatgaagttatggtggagttggcagagaatggaaagaaagcaatggtcaacaaagatgatattcagaagatgaacccacctaagttttccaaggtggaggatatggcagaattgacatgcttgaatgaagcttccgttttacataatctgaaggatcgctactattcaggactaatctatacttattctggactcttctgtgtagttataaacccttacaagaatcttccaatttactctgagaatattattgaaatgtacagagggaagaagcgtcatgagatgcctccacacatctatgctatatctgaatctgcttacagatgcatgcttcaagatcgtgaggaccagtcaattctttgcacgggtgagtcaggtgctgggaagacagaaaatacaaagaaagttattcagtaccttgcccatgttgcttcttcacataaaggaagaaaggaccataatattcctggggaacttgaacggcagcttttgcaagcaaatccaattctggaatcatttggaaatgcgaagactgtgaaaaatgataactcatctcgttttggcaaatttattcggatcaactttgatgtaactggctatatcgttggggccaacattgaaacataccttctggaaaagtctcgtgctgttcgtcaagcaaaagatgaacgtacttttcatatcttttaccagttgttatctggagcaggagaacacctaaagtctgatttgcttcttgaaggatttaataactacaggtttctctccaatggctatattcctattccgggacagcaagacaaagataatttccaggagaccatggaagcaatgcacataatgggcttctcccatgaagagattctgtcaatgcttaaagtagtatcttcagtgctacagtttggaaatatttctttcaaaaaggagagaaatactgatcaagcttccatgccagaaaatacagttgcgcagaagctctgccatcttcttgggatgaatgtgatggagtttactcgggccatcctgactccccggatcaaggtcggccgagactatgtgcaaaaagcccagaccaaagaacaggcagattttgcagtagaagcattggcaaaagctacctatgagcggctctttcgctggctcgttcatcgcatcaataaagctctggataggaccaaacgtcagggagcatctttcattggaatcctggatattgctggatttgaaatttttgagctgaactcctttgaacaactttgcatcaactacaccaatgagaagctgcagcagctgttcaaccacaccatgtttatcctagaacaagaggaataccagcgcgaaggcatcgagtggaacttcatcgatttcgggctggatctgcagccatgcatcgacctaatagagagacctgcgaaccctcctggtgtactggcccttttggatgaagaatgctggttccctaaagccacagataaaacctttgttgaaaaactggttcaagagcaaggttcccactccaagtttcagaaacctcgacaattaaaagacaaagctgatttttgcattatacattatgcagggaaggtggactataaggcagatgagtggctgatgaagaatatggaccccctgaatgacaacgtggccacccttttgcaccagtcatcagacagatttgtggcagagctttggaaagatgtggaccgtatcgtgggtctggatcaagtcactggtatgactgagacagcttttggctccgcatataaaaccaagaagggcatgtttcgtaccgttgggcaactctacaaagaatctctcaccaagctgatggcaactctccgaaacaccaaccctaactttgttcgttgtatcattccaaatcacgagaagagggctggaaaattggatccacacctagtcctagatcagcttcgctgtaatggtgtcctggaagggatccgaatctgtcgccagggcttccctaaccgaatagttttccaggaattcagacagagatatgagatcctaactccaaatgctattcctaaaggttttatggatggtaaacaggcctgtgaacgaatgatccgggctttagaattggacccaaacttgtacagaattggacagagcaagatatttttcagagctggagttctggcacacttagaggaagaaagagatttaaaaatcaccgatatcattatcttcttccaggccgtttgcagaggttacctggccagaaaggcctttgccaagaagcagcagcaactaagtgccttaaaggtcttgcagcggaactgtgccgcgtacctgaaattacggcactggcagtggtggcgagtcttcacaaaggtgaagccgcttctacaagtgactcgccaggaggaagaacttcaggccaaagatgaagagctgttgaaggtgaaggagaagcagacgaaggtggaaggagagctggaggagatggagcggaagcaccagcagcttttagaagagaagaatatccttgcagaacaactacaagcagagactgagctctttgctgaagcagaagagatgagggcaagacttgctgctaaaaagcaggaattagaagagattctacatgacttggagtctagggttgaagaagaagaagaaagaaaccaaatcctccaaaatgaaaagaaaaaaatgcaagcacatattcaggacctggaagaacagctagacgaggaggaaggggctcggcaaaagctgcagctggaaaaggtgacagcagaggccaagatcaagaagatggaagaggagattctgcttctcgaggaccaaaattccaagttcatcaaagaaaagaaactcatggaagatcgcattgctgagtgttcctctcagctggctgaagaggaagaaaaggcgaaaaacttggccaaaatcaggaataagcaagaagtgatgatctcagatttagaagaacgcttaaagaaggaagaaaagactcgtcaggaactggaaaaggccaaaagaaaactcgacggggagacgaccgacctgcaggaccagatcgcagagctgcaggcgcagattgatgagctcaagctgcagctggccaagaaggaggaggagctgcagggcgcactggccagaggtgatgatgaaacactccataagaacaatgcccttaaagttgtgcgagagctacaagcccaaattgctgaacttcaggaagactttgaatccgagaaggcttcacggaacaaggccgaaaagcagaaaagggacttgagtgaggaactggaagctctgaaaacagagctggaggacacgctggacaccacggcagcccagcaggaactacgtacaaaacgtgaacaagaagtggcagagctgaagaaagctcttgaggaggaaactaagaaccatgaagctcaaatccaggacatgagacaaagacacgcaacagccctggaggagctctcagagcagctggaacaggccaagcggttcaaagcaaatctagagaagaacaagcagggcctggagacagataacaaggagctggcgtgtgaggtgaaggtcctgcagcaggtcaaggctgagtctgagcacaagaggaagaagctcgacgcgcaggtccaggagctccatgccaaggtctctgaaggcgacaggctcagggtggagctggcggagaaagcaagtaagctgcagaatgagctagataatgtctccacccttctggaagaagcagagaagaagggtattaaatttgctaaggatgcagctagtcttgagtctcaactacaggatacacaggagcttcttcaggaggagacacgccagaaactaaacctgagcagtcggatccggcagctggaagaggagaagaacagtcttcaggagcagcaggaggaggaggaggaggccaggaagaacctggagaagcaagtgctggccctgcagtcccagttggctgataccaagaagaaagtagatgacgacctgggaacaattgaaagtctggaagaagccaagaagaagcttctgaaggacgcggaggccctgagccagcgcctggaggagaaggcactggcgtatgacaaactggagaagaccaagaaccgcctgcagcaggagctggacgacctcacggtggacctggaccaccagcgccaggtcgcctccaacttggagaagaagcagaagaagtttgaccagctgttagcagaagagaagagcatctctgctcgctatgccgaagagcgggaccgggccgaagccgaggccagagagaaagaaaccaaagccctgtcactggcccgggccctcgaggaagccctggaggccaaggaggagtttgagaggcagaacaagcagctccgagcagacatggaagacctcatgagctccaaagatgatgtgggaaaaaacgttcacgaacttgaaaaatccaaacgggccctagagcagcaggtggaggaaatgaggacccagctggaggagctggaagacgaactccaggccacggaagatgccaagcttcgtctggaggtcaacatgcaggccatgaaggcgcagttcgagagagacctgcaaaccagggatgagcagaatgaagagaagaagcggctgctgatcaaacaggtgcgggagctcgaggcggagctggaggatgagaggaaacagcgggcgcttgctgtagcttcaaagaaaaagatggagatagacctgaaggacctcgaagcccaaatcgaggctgcgaacaaagctcgggatgaggtgattaagcagctccgcaagctccaggctcagatgaaggattaccaacgtgaattagaagaagctcgtgcatccagagatgagatttttgctcaatccaaagagagtgaaaagaaattgaagagtctggaagcagaaatccttcaattgcaggaggaacttgcctcatctgagcgagcccgccgacacgccgagcaggagagagatgagctggcggacgagatcaccaacagcgcctctggcaagtccgcgctgctggatgagaagcggcgtctggaagctcggatcgcacagctggaggaggagctggaagaggagcagagcaacatggagctgctcaacgaccgcttccgcaagaccactctacaggtggacacactgaacgccgagctagcagccgagcgcagcgccgcccagaagagtgacaatgcacgccagcaactggagcggcagaacaaggagctgaaggccaagctgcaggaactcgagggtgctgtcaagtctaagttcaaggccaccatctcagccctggaggccaagattgggcagctggaggagcagcttgagcaggaagccaaggaacgagcagccgccaacaaattagtccgtcgcactgagaagaagctgaaagaaatcttcatgcaggttgaggatgagcgtcgacacgcggaccagtataaagagcagatggagaaggccaacgctcggatgaagcagcttaaacgccagctggaggaagcagaagaagaagcgacgcgtgccaacgcatctcggcgtaaactccagcgggaactggatgatgccaccgaggccaacgagggcctgagccgcgaggtcagcaccctgaagaaccggctgaggcggggtggccccatcagcttctcttccagccgatctggccggcgccagctgcaccttgaaggagcttccctggagctctccgacgatgacacagaaagtaagaccagtgatgtcaacgagacgcagccaccccagtcagagtaaagttgcaggaagccagaggaggcaatacagtgggacagttaggaatgcacccggggcctcctgcagatttcggaaattggcaagctacgggattccttcctgaaagatcaactgtgtcttaaggctctccagcctatgcatactgtatcctgcttcagacttaggtacaattgctcccctttttatatatagacacacacaggacacatatattaaacagattgtttcatcattgcatctattttccatatagtcatcaagagaccattttataaaacatggtaagaccctttttaaaacaaactccaggcccttggttgcgggtcgctgggttattggggcagcgccgtggtcgtcactcagtcgctctgcatgctctctgtcatacagacaggtaacctagttctgtgttcacgtggcccccgactcctcagccacatcaagtctcctagaccactgtggactctaaactgcacttgtctctctcatttccttcaaataatgatcaatgctatttcagtgagcaaactgtgaaaggggctttggaaagagtaggaggggtgggctggatcggaagcaacacccatttggggttaccatgtccatcccccaaggggggccctgcccctcgagtcgatggtgtcccgcatctactcatgtgaactggccttggcgagggctggtctgtgcatagaagggatagtggccacactgcagctgaggccccaggtggcagccatggatcatgtagacttccagatggtctcccgaaccgcctggctctgccggcgccctcctcacgtcaggagcaagcagccgtggacccctaagccgagctggtggaaggcccctccctgtcgccagccgggccctcatgctgaccttgcaaattcagccgctgctttgagcccaaaatgggaatattggttttgtgtccgaggcttgttccaagtttgtcaatgaggtttatggagcctccagaacagatgccatcttcctgaatgttgacatgccagtgggtgtgactccttcatttttccttctcccttccctttggacagtgttacagtgaacacttagcatcctgtttttggttggtagttaagcaaactgacattacggaaagtgccttagacactacagtactaagacaatgttgaatatatcattcgcctctataacaatttaatgtattcagttttgactgtgcttcatatcatgtacctctctagtcaaagtggtattacagacattcagtgacaatgaatcagtgttaattctaaatccttgatcctctgcaatgtgcttgaaaacacaaaccttttgggttaaaagctttaacatctattaggaagaatttgtcctgtgggtttggaatcttggattttccccctttatgaactgtactggctgttgaccaccagacacctgaccgcaaatatcttttcttgtattcccatatttctagacaatgatttttgtaagacaataaatttattcattatagatatttgcgcctgctctgtttacttgaagaaaaaagcacccgtggagaataaagagacctcaataaacaagaataatcatgtgaa

SEQ ID NO: 1633 - protein, 1976 aa, Homo sapiens
MAQRTGLEDPERYLFVDRAVIYNPATQADWTAKKLVWIPSERHGFEAASIKEERGDEVMVELAENGKKAMVNKDDIQKMNPPKFSKVEDMAELTCLNEASVLHNLKDRYYSGLIYTYSGLFCVVINPYKNLPIYSENIIEMYRGKKRHEMPPHIYAISESAYRCMLQDREDQSILCTGESGAGKTENTKKVIQYLAHVASSHKGRKDHNIPGELERQLLQANPILESFGNAKTVKNDNSSRFGKFIRINFDVTGYIVGANIETYLLEKSRAVRQAKDERTFHIFYQLLSGAGEHLKSDLLLEGFNNYRFLSNGYIPIPGQQDKDNFQETMEAMHIMGFSHEEILSMLKVVSSVLQFGNISFKKERNTDQASMPENTVAQKLCHLLGMNVMEFTRAILTPRIKVGRDYVQKAQTKEQADFAVEALAKATYERLFRWLVHRINKALDRTKRQGASFIGILDIAGFEIFELNSFEQLCINYTNEKLQQLFNHTMFILEQEEYQREGIEWNFIDFGLDLQPCIDLIERPANPPGVLALLDEECWFPKATDKTFVEKLVQEQGSHSKFQKPRQLKDKADFCIIHYAGKVDYKADEWLMKNMDPLNDNVATLLHQSSDRFVAELWKDVDRIVGLDQVTGMTETAFGSAYKTKKGMFRTVGQLYKESLTKLMATLRNTNPNFVRCIIPNHEKRAGKLDPHLVLDQLRCNGVLEGIRICRQGFPNRIVFQEFRQRYEILTPNAIPKGFMDGKQACERMIRALELDPNLYRIGQSKIFFRAGVLAHLEEERDLKITDIIIFFQAVCRGYLARKAFAKKQQQLSALKVLQRNCAAYLKLRHWQWWRVFTKVKPLLQVTRQEEELQAKDEELLKVKEKQTKVEGELEEMERKHQQLLEEKNILAEQLQAETELFAEAEEMRARLAAKKQELEEILHDLESRVEEEEERNQILQNEKKKMQAHIQDLEEQLDEEEGARQKLQLEKVTAEAKIKKMEEEILLLEDQNSKFIKEKKLMEDRIAECSSQLAEEEEKAKNLAKIRNKQEVMISDLEERLKKEEKTRQELEKAKRKLDGETTDLQDQIAELQAQIDELKLQLAKKEEELQGALARGDDETLHKNNALKVVRELQAQIAELQEDFESEKASRNKAEKQKRDLSEELEALKTELEDTLDTTAAQQELRTKREQEVAELKKALEEETKNHEAQIQDMRQRHATALEELSEQLEQAKRFKANLEKNKQGLETDNKELACEVKVLQQVKAESEHKRKKLDAQVQELHAKVSEGDRLRVELAEKASKLQNELDNVSTLLEEAEKKGIKFAKDAASLESQLQDTQELLQEETRQKLNLSSRIRQLEEEKNSLQEQQEEEEEARKNLEKQVLALQSQLADTKKKVDDDLGTIESLEEAKKKLLKDAEALSQRLEEKALAYDKLEKTKNRLQQELDDLTVDLDHQRQVASNLEKKQKKFDQLLAEEKSISARYAEERDRAEAEAREKETKALSLARALEEALEAKEEFERQNKQLRADMEDLMSSKDDVGKNVHELEKSKRALEQQVEEMRTQLEELEDELQATEDAKLRLEVNMQAMKAQFERDLQTRDEQNEEKKRLLIKQVRELEAELEDERKQRALAVASKKKMEIDLKDLEAQIEAANKARDEVIKQLRKLQAQMKDYQRELEEARASRDEIFAQSKESEKKLKSLEAEILQLQEELASSERARRHAEQERDELADEITNSASGKSALLDEKRRLEARIAQLEEELEEEQSNMELLNDRFRKTTLQVDTLNAELAAERSAAQKSDNARQQLERQNKELKAKLQELEGAVKSKFKATISALEAKIGQLEEQLEQEAKERAAANKLVRRTEKKLKEIFMQVEDERRHADQYKEQMEKANARMKQLKRQLEEAEEEATRANASRRKLQRELDDATEANEGLSREVSTLKNRLRRGGPISFSSSRSGRRQLHLEGASLELSDDDTESKTSDVNETQPPQSE

SEQ ID NO: 1634 - DNA, 7773 bp, Homo sapiens
cccgagagctgggcgtgggaacagcgtggggtcagggagacccctgcttgccctggcccagaatatggtgacttaggattcagactgagcatccctgattccccagcgcctccaccctcagggaacctgaatggggggaaaaaatgtccaatatggagaacagctttgacgatgtttcttgcctctctccccagaacctgggatcctcatcgccaagcaaaaagcagagcaaggaaaacaccatcacaataaactgtgtgacgttccctcacccagacacgatgccggaacagcagctgctgaaaccaaccgagtggagctactgcgactacttctgggctgataagaaggacccccaaggcaacggcaccgtggctgggtttgaactactgctccagaaacagctgaagggcaaacaaatgcagaaggaaatgtcagaattcatccgggaaaggataaagattgaagaagactatgcgaagaacttagctaagctctctcagaactccttggcttcacaggaggaaggctccttgggagaggcgtgggcccaggtgaagaagagcctggcggacgaagcagaagttcacctcaagttctctgccaagcttcacagcgaggtggagaagcccctgatgaacttccgtgagaacttcaagaaagacatgaagaagtgcgaccaccacattgccgaccttcgcaagcagctcgccagccgctatgcctcggtggagaaggcccggaaagccctcacagagcggcagagagacctggagatgaagacccagcagctggagatcaagctgagcaacaagacagaggaggacatcaagaaggcgcggagaaagtccacacaggctggagacgacctcatgcgctgtgtggatctctacaaccaggcccagtccaaatggtttgaagagatggtgaccaccacattggagctagagcggctggaggtggagagggtagagatgatccggcagcacctgtgccagtacacgcagctgcggcatgaaacagacatgttcaaccaaagcacagtcgagcccgtggatcagctgcttcgaaaagtggacccggccaaagacagggagctgtgggtcagagagcacaagacgggcaacatccgccctgtggacatggagatctagatgggcctgtgcagcttcggggggtcctgctggggaggggggctgggctcccaccatggggcccatgccgagtggatgccccccaccctctctcctgggccactgaggagaggggagagagctggtgattccagaagggtgacccggacagcctagctgggggctcccccatattcccaggcccagaagacagacccacagccctgcccttgtctctgaggctgaagaccccctgactcccatgctgtgcttgccgctctgaaacaaacagaggctggaactttgtggtccttgccgagttttgtaggggtcactgtcacatgcttgtgccctggaagccccaaggctcttcctccagctggctcccttgtctccagggctttggaggatcagggtagggagggctctgtctctaagccaggtgtcaggatcagaatcatgggtagaaggtgccattcagctcacagccgcacccagaatcctttgcagccctccttctttatttttttcccattgcattctgggagtccacatctggctttctcagccactgttcatcaccaggggttttaggaggaaggcttggctcctgtcttcccagacccaccatgcctggagaggtcaggatggaactacctcattcggcaaattagccccaaattgagcgctgaatcgtgtcccatgagatcaggcgccatctgtaaagtctcctctggaaatgccaatccatccttcccccagctgcttcctcggggaggcccctgcccccaccctgccagcccttcccagtctcattagaggaagctttccaaagttctcagttatcaagacctcatccagctcgtccaaaggcttcagggatggaaacaaaccagctcgtctcagaggccagcaagctggggcctgtccgccacggtgccctgtgcacctttgggctgccctggcccccactctcccgggccgcccaccacaggctcttaatggggccgggtcagtcctacatgtgagatgggttagggcaagtctttgccatcccccagatggctctgtcttcttgtgtatggcagggctgggactgctgtcccttgtacagttttctgtcactggtgggcactggacaggcatagcagactctcttgtggccacactaggttgtcgcctttcaggcagtgtcccgccacctttgcttcccgctccttctggacattccagagccctgcaccaaacccttacttggtgtctgcacctcctttccctctctccatcttccaatccctggaaaagtctggtctgagtgtgacttgggaagctttcagtgctgctgtttggcccagctcattactttctccctttctctaccacagcaaacacattctccaccatgtcagtctaaagagtctaaaggggccgggagaagcatgagcgaggggcagattctagtcgggagcccatgccctggaaatccatctttcttcatctttcccattgaccactttgggtttgacctgcacatctgcagtgagggcagaattcaacaagcacaactcactggtctttcagtcaacgtgctagaaaccgatgacttattaatctctaattttttggcgcctctttcattgaatgagaattgctttcgtatagttcacattagaaaaatgcctaatatactaaagtaaaccaaacgttgtcacttttctcttgttcttgaaacattgcaaccaaaaaggtcagcacaaaggccttcacctacgtgaagacctcctggtaggatctgtccatgggatggagaaccactctgtccagatctggggttgggtcatgacaccagctaccaattttagaatattatttcttggtttctttatgaaaaatgggtgctagtggtaattgctttgtggcttagtaaactactctgtggatgatttccaaacattcaaagccaatagccttgttattaacaagatattttgagtacaatatggctcattgacttttccattacatctgaggattccagagtcctctgttcatccctgggatagagtgagccctcttgcgtcttccagggtagctcaggttggcccagtttgggccagtccatttttggaggtcactctttcccccctcatcccctcacctccttctctttacccccttcacgtacttcctttctttcttccctctgttattcattcatcaagcaggttaaagccattgtgctaagatctaatctgaggacactataatggccctgtcgtcagggaagcccgtgatcgctcgttttcaggggtcttaccggtcagcaaccttggcattgatacataggcactctacagaatttaagttttcagaggtaagtctgttgttctgattaatctgcattcattcagcgaatgctcaagacaagccaggcatgctgagaagcggcgctctagttgtatgtaagatgggcattcctctgctctcctctattctccatgtcgactgagaagagtataataagaacattgtaccctctccacacttaaccctctgggattctttattataatataaaccaccgtcgtgaggcatttacctgttggatggaaggtagacagcaacaagattttaatcacctggtcaccagaccctcacggcccatatccaattcgaatttcagaaatttctctgtttgctttaaataactctttacaaataagggtcgggcacggtggctcacgcctgtaatcccagctctttgggaggccgaggtgggcagatcacgaggtcaggagatcgagaccatcctggctaacatggtgaaaccccgtctctgctaaaaatacaaaaaattagccagatgtggtggtgcacacctgtagtcccaactattcggcaggctgaggcagtagaatcgcttgaacctgggaggcggagattgcagtgaaccaagatcgggccactgcactccagcttgggtgacagagcaagactccatctcaaaaaaattataaataactctttgcaaataggaaagtgaagctcaagggtaaccagtgaggctatgaaattgccagtgaattaagaccagggctagagtcaacagtccagaacccctatccgtatgaacaggggcccgtttctggttgaaatcaaggttaggatgcaactgagaaaataaaagactgcactttggagaggcaagcacgctatccgggttgttgttttgttttatgtcttggtgcttaggtgaggacttagctgggtttattcaaagtgggcgggtctgggctattcttgagaatgtcccttccatttctgagaacaagtcagccccttctacctgcctccacccaggagactgatgcacaagatctgtttgtgaaagcctgatttaaaaagaaaaaaaaaattccttaagccaaatggtgttccaagttggttgctgtgacaacctccaggaagagccacttgttaccctctattctttctagtgctttcagtcagtggcaacacataggccccttggaccgtggggatggcggccctgagattctgtcagtgggaccaccctgggcctcctttctacctccactcagcaccctgttggccaaggagaatttctgcggtgggaggcagtgctctgctagtcaggattgataaacagctgggcacaccgaaacagtgtaccaacgaattcaccaaccaggggtttctttccctaccctttgtgaaaaccaatcaattactagatgagtggatggatgcagaaaaatctgggctgagccaaagtcccttttggaaatacaagccataacattcgaaggacatcagcgaccttggcttgtttaggtgattttacttccagctgcaggtagtcttgacaaggagtgtttaaacagaaggctcaagatgcattccttgtgtaggtcggagagagcacttctaatgttaagtggggtacagatcagctgcccccccacgtagcctggacatcgtcttatccccataatccttgccatccctacaaggcccatcgccaccaccttttcccaggtttattgaggtatgattgacatccagtaaaattcaccctttggaaatatacagctctgtgaattttgacaaatttagtgtcttgtgaccatcaccaagatcaacctgtttttaaccctccaaaaaattcccttctcctgccctctttccctggcaaccctgattgattatctgatcctataattttgccttttctagaatgtcatataaatggagtcacactgatgtcgccttttgagtctggcatctttccctcagcttaatgcttttgagtcattcatgatgtgtgcgtgtggtttgttccttctccttgccgggaagtatttcattgcatgggcgtactactctgcttctttatttttacactgagcctttcgccctggaagttcttggcccagggtcttcaacttgtttgcacgaccacttccagcttgctgcttccttcagttccccaggctcctcctccaaatgccagctgtgcccacaagctgttcttagggctcacactcgccttttggcgcgtggtgggtttttggtagtgcagaaagaatccagggatgggaggggaagggacggatgggtgctcaattgctgctcacgtctgctgcaacctgaagcttgcatctcagccagcagatctgctcccttctgggacccaggcttcagtgtcacacggtccttggctatgtattgggcgttggaggctttgaaaggcgagcagaagcagcatggacaagaaggctggggctggccctggggctcatcatgatgctttcctggatctgttgcttcatctgcaagctgagggtgtttgttctagatgagtgtctcaggccaccggcaactgcatgtacctcctccctttctcatttccaatgatgtaccctgtacacgtgttcatgctgtgtctggctctcatctgcacaatcgtgcatagaattgcctcaagtcctggtgagagagatgccgtggtacttttccatttagattcaaatggagctaaaattaagagttttatgagctgttaagaatgaggtagtttctcctaggaccccccaaagacagtgcaagtaatgaccgtttggatctcattcgtcgatctttgatagtatgttctggagtctactccccaggagccaggacaggcgtgaagatggagtccttgtcgcagctggagccttgcctagctggtgatcacacagcctggcctgtacctgcaccccactggatggtggtacatggtggcagggacaggaccacacccagttaaggccagaccaggctgagtgtgacccctgaggtaaacactccactaagctgtgtcttgttcatgccccctgctcagtgaaaggtgagtcccgagaccagttgggtacctctctatgcgaaccagagacatttctggatccaggccaggtgaagattagggccaggaagcctgagcccccggggcctcaaggtagggagccgaagaggctgccaggactctgctgggttgaaatttgccggggaggactcttgtctccccctcaggagtatttttgttgaggctttcctggaggtgaagaagcaattcccattgcagcaggttagagcgagaatcagacagagggcaaaaaccaattcgcttctccccacgttctaaatgctggggcatggctgtcaggagggcttcctgggaggtgtctctgggggtggggtgaggttggggcgatggcctttggagattgcgtgtggtgttcaggactgttccttggtgtttgagggaaactttagtgggattgcagtggaatgtaaggtcagggcacgtgggtgctctctcggggtggggtgactgggagacctagagggaaagcctgctatgcagggggagagcacaggactggccctgctctgcggcctcctttgtcccataacctgaagttaagtcacatcccctgtcgggacctccgtgcactcatctgtcaagtgggggcgcttcccttccagcatcacctgcagcagacgggctctcgggagtcgtgggttccaggcagctgtgtggacccagggacagacattcaaagggacgccagccatccttagtgacaggggccccaacttagcatcccttcccttccgttaggaaggagatgaccggaagcaaccccttcacagacacgagcacatcggcaaaccctatgaaagtggaattttctaacaaaataaacttgcttgtttgatctgttttctgtaacttttgctaaatactttatacatttttcatgttaaagagccgtgtctcccgccagcactcctcaccccggtatgaatgtgtttcctccacattgtatatccttccaccctctggctgcctagatcagtaaataaaattgatgtaatataatttataagtaacactgttgaaaccctgatcccagtggaggctgtaacccacctgcccccgcaccacccccctgacccctgttaccgcatttgtgtgtattaatgctgaagaattaaatgtttaaagagtttaaattttgaaggcgtttgctatatacagttgtcctgcattattataaagagttttcaggaagtt

SEQ ID NO: 1635 - protein, 336 aa, Homo sapiens
MSNMENSFDDVSCLSPQNLGSSSPSKKQSKENTITINCVTFPHPDTMPEQQLLKPTEWSYCDYFWADKKDPQGNGTVAGFELLLQKQLKGKQMQKEMSEFIRERIKIEEDYAKNLAKLSQNSLASQEEGSLGEAWAQVKKSLADEAEVHLKFSAKLHSEVEKPLMNFRENFKKDMKKCDHHIADLRKQLASRYASVEKARKALTERQRDLEMKTQQLEIKLSNKTEEDIKKARRKSTQAGDDLMRCVDLYNQAQSKWFEEMVTTTLELERLEVERVEMIRQHLCQYTQLRHETDMFNQSTVEPVDQLLRKVDPAKDRELWVREHKTGNIRPVDMEI

SEQ ID NO: 1636 - DNA, 8181 bp, Homo sapiens
agaaacattgcatctggaaagtccagaacaagttgttaatttcccagcaagcactggagcggatttggaaggaactatgcaatgtagtgggttctttgtgaaagaacagcaatgagcaaagccacaggaacctccgctggggtgcccagaacactggccctgggctagcgacttgcctcagccccatttcccggagaggctgccatgaagaggaagccggcggagtcttggtgctgagtctgagggcttcaggcaggacccaagactctcctctgaggtagcagcccccagagaaggttagctgttctctgatgaagcctggaatggtcccccctccgccgggagaagaaagccagacggtcatccttccacctggctggcagagctacctgtcgcctcagggccggcggtactatgtcaacacgaccaccaatgagaccacctgggaacgtcccagcagttctcctgggattccagccagccctggctctcacaggagctctctgcctccaacagtgaatggataccacgcatcagggaccccagcgcaccctccagagactgcccacatgagtgtccgaaaatccaccggtgattcccagaacctgggatcctcatcgccaagcaaaaagcagagcaaggaaaacaccatcacaataaactgtgtgacgttccctcacccagacacgatgccggaacagcagctgctgaaaccaaccgagtggagctactgcgactacttctgggctgataagaaggacccccaaggcaacggcaccgtggctgggtttgaactactgctccagaaacagctgaagggcaaacaaatgcagaaggaaatgtcagaattcatccgggaaaggataaagattgaagaagactatgcgaagaacttagctaagctctctcagaactccttggcttcacaggaggaaggctccttgggagaggcgtgggcccaggtgaagaagagcctggcggacgaagcagaagttcacctcaagttctctgccaagcttcacagcgaggtggagaagcccctgatgaacttccgtgagaacttcaagaaagacatgaagaagtgcgaccaccacattgccgaccttcgcaagcagctcgccagccgctatgcctcggtggagaaggcccggaaagccctcacagagcggcagagagacctggagatgaagacccagcagctggagatcaagctgagcaacaagacagaggaggacatcaagaaggcgcggagaaagtccacacaggctggagacgacctcatgcgctgtgtggatctctacaaccaggcccagtccaaatggtttgaagagatggtgaccaccacattggagctagagcggctggaggtggagagggtagagatgatccggcagcacctgtgccagtacacgcagctgcggcatgaaacagacatgttcaaccaaagcacagtcgagcccgtggatcagctgcttcgaaaagtggacccggccaaagacagggagctgtgggtcagagagcacaagacgggcaacatccgccctgtggacatggagatctagatgggcctgtgcagcttcggggggtcctgctggggaggggggctgggctcccaccatggggcccatgccgagtggatgccccccaccctctctcctgggccactgaggagaggggagagagctggtgattccagaagggtgacccggacagcctagctgggggctcccccatattcccaggcccagaagacagacccacagccctgcccttgtctctgaggctgaagaccccctgactcccatgctgtgcttgccgctctgaaacaaacagaggctggaactttgtggtccttgccgagttttgtaggggtcactgtcacatgcttgtgccctggaagccccaaggctcttcctccagctggctcccttgtctccagggctttggaggatcagggtagggagggctctgtctctaagccaggtgtcaggatcagaatcatgggtagaaggtgccattcagctcacagccgcacccagaatcctttgcagccctccttctttatttttttcccattgcattctgggagtccacatctggctttctcagccactgttcatcaccaggggttttaggaggaaggcttggctcctgtcttcccagacccaccatgcctggagaggtcaggatggaactacctcattcggcaaattagccccaaattgagcgctgaatcgtgtcccatgagatcaggcgccatctgtaaagtctcctctggaaatgccaatccatccttcccccagctgcttcctcggggaggcccctgcccccaccctgccagcccttcccagtctcattagaggaagctttccaaagttctcagttatcaagacctcatccagctcgtccaaaggcttcagggatggaaacaaaccagctcgtctcagaggccagcaagctggggcctgtccgccacggtgccctgtgcacctttgggctgccctggcccccactctcccgggccgcccaccacaggctcttaatggggccgggtcagtcctacatgtgagatgggttagggcaagtctttgccatcccccagatggctctgtcttcttgtgtatggcagggctgggactgctgtcccttgtacagttttctgtcactggtgggcactggacaggcatagcagactctcttgtggccacactaggttgtcgcctttcaggcagtgtcccgccacctttgcttcccgctccttctggacattccagagccctgcaccaaacccttacttggtgtctgcacctcctttccctctctccatcttccaatccctggaaaagtctggtctgagtgtgacttgggaagctttcagtgctgctgtttggcccagctcattactttctccctttctctaccacagcaaacacattctccaccatgtcagtctaaagagtctaaaggggccgggagaagcatgagcgaggggcagattctagtcgggagcccatgccctggaaatccatctttcttcatctttcccattgaccactttgggtttgacctgcacatctgcagtgagggcagaattcaacaagcacaactcactggtctttcagtcaacgtgctagaaaccgatgacttattaatctctaattttttggcgcctctttcattgaatgagaattgctttcgtatagttcacattagaaaaatgcctaatatactaaagtaaaccaaacgttgtcacttttctcttgttcttgaaacattgcaaccaaaaaggtcagcacaaaggccttcacctacgtgaagacctcctggtaggatctgtccatgggatggagaaccactctgtccagatctggggttgggtcatgacaccagctaccaattttagaatattatttcttggtttctttatgaaaaatgggtgctagtggtaattgctttgtggcttagtaaactactctgtggatgatttccaaacattcaaagccaatagccttgttattaacaagatattttgagtacaatatggctcattgacttttccattacatctgaggattccagagtcctctgttcatccctgggatagagtgagccctcttgcgtcttccagggtagctcaggttggcccagtttgggccagtccatttttggaggtcactctttcccccctcatcccctcacctccttctctttacccccttcacgtacttcctttctttcttccctctgttattcattcatcaagcaggttaaagccattgtgctaagatctaatctgaggacactataatggccctgtcgtcagggaagcccgtgatcgctcgttttcaggggtcttaccggtcagcaaccttggcattgatacataggcactctacagaatttaagttttcagaggtaagtctgttgttctgattaatctgcattcattcagcgaatgctcaagacaagccaggcatgctgagaagcggcgctctagttgtatgtaagatgggcattcctctgctctcctctattctccatgtcgactgagaagagtataataagaacattgtaccctctccacacttaaccctctgggattctttattataatataaaccaccgtcgtgaggcatttacctgttggatggaaggtagacagcaacaagattttaatcacctggtcaccagaccctcacggcccatatccaattcgaatttcagaaatttctctgtttgctttaaataactctttacaaataagggtcgggcacggtggctcacgcctgtaatcccagctctttgggaggccgaggtgggcagatcacgaggtcaggagatcgagaccatcctggctaacatggtgaaaccccgtctctgctaaaaatacaaaaaattagccagatgtggtggtgcacacctgtagtcccaactattcggcaggctgaggcagtagaatcgcttgaacctgggaggcggagattgcagtgaaccaagatcgggccactgcactccagcttgggtgacagagcaagactccatctcaaaaaaattataaataactctttgcaaataggaaagtgaagctcaagggtaaccagtgaggctatgaaattgccagtgaattaagaccagggctagagtcaacagtccagaacccctatccgtatgaacaggggcccgtttctggttgaaatcaaggttaggatgcaactgagaaaataaaagactgcactttggagaggcaagcacgctatccgggttgttgttttgttttatgtcttggtgcttaggtgaggacttagctgggtttattcaaagtgggcgggtctgggctattcttgagaatgtcccttccatttctgagaacaagtcagccccttctacctgcctccacccaggagactgatgcacaagatctgtttgtgaaagcctgatttaaaaagaaaaaaaaaattccttaagccaaatggtgttccaagttggttgctgtgacaacctccaggaagagccacttgttaccctctattctttctagtgctttcagtcagtggcaacacataggccccttggaccgtggggatggcggccctgagattctgtcagtgggaccaccctgggcctcctttctacctccactcagcaccctgttggccaaggagaatttctgcggtgggaggcagtgctctgctagtcaggattgataaacagctgggcacaccgaaacagtgtaccaacgaattcaccaaccaggggtttctttccctaccctttgtgaaaaccaatcaattactagatgagtggatggatgcagaaaaatctgggctgagccaaagtcccttttggaaatacaagccataacattcgaaggacatcagcgaccttggcttgtttaggtgattttacttccagctgcaggtagtcttgacaaggagtgtttaaacagaaggctcaagatgcattccttgtgtaggtcggagagagcacttctaatgttaagtggggtacagatcagctgcccccccacgtagcctggacatcgtcttatccccataatccttgccatccctacaaggcccatcgccaccaccttttcccaggtttattgaggtatgattgacatccagtaaaattcaccctttggaaatatacagctctgtgaattttgacaaatttagtgtcttgtgaccatcaccaagatcaacctgtttttaaccctccaaaaaattcccttctcctgccctctttccctggcaaccctgattgattatctgatcctataattttgccttttctagaatgtcatataaatggagtcacactgatgtcgccttttgagtctggcatctttccctcagcttaatgcttttgagtcattcatgatgtgtgcgtgtggtttgttccttctccttgccgggaagtatttcattgcatgggcgtactactctgcttctttatttttacactgagcctttcgccctggaagttcttggcccagggtcttcaacttgtttgcacgaccacttccagcttgctgcttccttcagttccccaggctcctcctccaaatgccagctgtgcccacaagctgttcttagggctcacactcgccttttggcgcgtggtgggtttttggtagtgcagaaagaatccagggatgggaggggaagggacggatgggtgctcaattgctgctcacgtctgctgcaacctgaagcttgcatctcagccagcagatctgctcccttctgggacccaggcttcagtgtcacacggtccttggctatgtattgggcgttggaggctttgaaaggcgagcagaagcagcatggacaagaaggctggggctggccctggggctcatcatgatgctttcctggatctgttgcttcatctgcaagctgagggtgtttgttctagatgagtgtctcaggccaccggcaactgcatgtacctcctccctttctcatttccaatgatgtaccctgtacacgtgttcatgctgtgtctggctctcatctgcacaatcgtgcatagaattgcctcaagtcctggtgagagagatgccgtggtacttttccatttagattcaaatggagctaaaattaagagttttatgagctgttaagaatgaggtagtttctcctaggaccccccaaagacagtgcaagtaatgaccgtttggatctcattcgtcgatctttgatagtatgttctggagtctactccccaggagccaggacaggcgtgaagatggagtccttgtcgcagctggagccttgcctagctggtgatcacacagcctggcctgtacctgcaccccactggatggtggtacatggtggcagggacaggaccacacccagttaaggccagaccaggctgagtgtgacccctgaggtaaacactccactaagctgtgtcttgttcatgccccctgctcagtgaaaggtgagtcccgagaccagttgggtacctctctatgcgaaccagagacatttctggatccaggccaggtgaagattagggccaggaagcctgagcccccggggcctcaaggtagggagccgaagaggctgccaggactctgctgggttgaaatttgccggggaggactcttgtctccccctcaggagtatttttgttgaggctttcctggaggtgaagaagcaattcccattgcagcaggttagagcgagaatcagacagagggcaaaaaccaattcgcttctccccacgttctaaatgctggggcatggctgtcaggagggcttcctgggaggtgtctctgggggtggggtgaggttggggcgatggcctttggagattgcgtgtggtgttcaggactgttccttggtgtttgagggaaactttagtgggattgcagtggaatgtaaggtcagggcacgtgggtgctctctcggggtggggtgactgggagacctagagggaaagcctgctatgcagggggagagcacaggactggccctgctctgcggcctcctttgtcccataacctgaagttaagtcacatcccctgtcgggacctccgtgcactcatctgtcaagtgggggcgcttcccttccagcatcacctgcagcagacgggctctcgggagtcgtgggttccaggcagctgtgtggacccagggacagacattcaaagggacgccagccatccttagtgacaggggccccaacttagcatcccttcccttccgttaggaaggagatgaccggaagcaaccccttcacagacacgagcacatcggcaaaccctatgaaagtggaattttctaacaaaataaacttgcttgtttgatctgttttctgtaacttttgctaaatactttatacatttttcatgttaaagagccgtgtctcccgccagcactcctcaccccggtatgaatgtgtttcctccacattgtatatccttccaccctctggctgcctagatcagtaaataaaattgatgtaatataatttataagtaacactgttgaaaccctgatcccagtggaggctgtaacccacctgcccccgcaccacccccctgacccctgttaccgcatttgtgtgtattaatgctgaagaattaaatgtttaaagagtttaaattttgaaggcgtttgctatatacagttgtcctgcattattataaagagttttcaggaagtt

SEQ ID NO: 1637 - protein, 416 aa, Homo sapiens
MKPGMVPPPPGEESQTVILPPGWQSYLSPQGRRYYVNTTTNETTWERPSSSPGIPASPGSHRSSLPPTVNGYHASGTPAHPPETAHMSVRKSTGDSQNLGSSSPSKKQSKENTITINCVTFPHPDTMPEQQLLKPTEWSYCDYFWADKKDPQGNGTVAGFELLLQKQLKGKQMQKEMSEFIRERIKIEEDYAKNLAKLSQNSLASQEEGSLGEAWAQVKKSLADEAEVHLKFSAKLHSEVEKPLMNFRENFKKDMKKCDHHIADLRKQLASRYASVEKARKALTERQRDLEMKTQQLEIKLSNKTEEDIKKARRKSTQAGDDLMRCVDLYNQAQSKWFEEMVTTTLELERLEVERVEMIRQHLCQYTQLRHETDMFNQSTVEPVDQLLRKVDPAKDRELWVREHKTGNIRPVDMEI

SEQ ID NO: 1638 - DNA, 8211 bp, Homo sapiens
gtcccccgcctgcctgaggacccccgcgcaccccagagacggcgcgcgcccagagcgcgggagcccggagcgccgggcgcctgggaccccgcggagccgctgcccagcccgtggggctcggcgggaatgcaggctgcgctgtgaacccgggcgccaaggccatgtccggcgctcgctgccggaccctgtaccccttctccggggagcggcacggccaggggctgcgcttcgccgcgggcgagctgatcacgctgctgcaggtcccggacggcggctggtgggaaggcgagaaggaggacgggctccgtggctggttcccggcgagctacgtgcagttgctggagaagcctggaatggtcccccctccgccgggagaagaaagccagacggtcatccttccacctggctggcagagctacctgtcgcctcagggccggcggtactatgtcaacacgaccaccaatgagaccacctgggaacgtcccagcagttctcctgggattccagccagccctggctctcacaggagctctctgcctccaacagtgaatggataccacgcatcagggaccccagcgcaccctccagagactgcccacatgagtgtccgaaaatccaccggtgattcccagaacctgggatcctcatcgccaagcaaaaagcagagcaaggaaaacaccatcacaataaactgtgtgacgttccctcacccagacacgatgccggaacagcagctgctgaaaccaaccgagtggagctactgcgactacttctgggctgataagaaggacccccaaggcaacggcaccgtggctgggtttgaactactgctccagaaacagctgaagggcaaacaaatgcagaaggaaatgtcagaattcatccgggaaaggataaagattgaagaagactatgcgaagaacttagctaagctctctcagaactccttggcttcacaggaggaaggctccttgggagaggcgtgggcccaggtgaagaagagcctggcggacgaagcagaagttcacctcaagttctctgccaagcttcacagcgaggtggagaagcccctgatgaacttccgtgagaacttcaagaaagacatgaagaagtgcgaccaccacattgccgaccttcgcaagcagctcgccagccgctatgcctcggtggagaaggcccggaaagccctcacagagcggcagagagacctggagatgaagacccagcagctggagatcaagctgagcaacaagacagaggaggacatcaagaaggcgcggagaaagtccacacaggctggagacgacctcatgcgctgtgtggatctctacaaccaggcccagtccaaatggtttgaagagatggtgaccaccacattggagctagagcggctggaggtggagagggtagagatgatccggcagcacctgtgccagtacacgcagctgcggcatgaaacagacatgttcaaccaaagcacagtcgagcccgtggatcagctgcttcgaaaagtggacccggccaaagacagggagctgtgggtcagagagcacaagacgggcaacatccgccctgtggacatggagatctagatgggcctgtgcagcttcggggggtcctgctggggaggggggctgggctcccaccatggggcccatgccgagtggatgccccccaccctctctcctgggccactgaggagaggggagagagctggtgattccagaagggtgacccggacagcctagctgggggctcccccatattcccaggcccagaagacagacccacagccctgcccttgtctctgaggctgaagaccccctgactcccatgctgtgcttgccgctctgaaacaaacagaggctggaactttgtggtccttgccgagttttgtaggggtcactgtcacatgcttgtgccctggaagccccaaggctcttcctccagctggctcccttgtctccagggctttggaggatcagggtagggagggctctgtctctaagccaggtgtcaggatcagaatcatgggtagaaggtgccattcagctcacagccgcacccagaatcctttgcagccctccttctttatttttttcccattgcattctgggagtccacatctggctttctcagccactgttcatcaccaggggttttaggaggaaggcttggctcctgtcttcccagacccaccatgcctggagaggtcaggatggaactacctcattcggcaaattagccccaaattgagcgctgaatcgtgtcccatgagatcaggcgccatctgtaaagtctcctctggaaatgccaatccatccttcccccagctgcttcctcggggaggcccctgcccccaccctgccagcccttcccagtctcattagaggaagctttccaaagttctcagttatcaagacctcatccagctcgtccaaaggcttcagggatggaaacaaaccagctcgtctcagaggccagcaagctggggcctgtccgccacggtgccctgtgcacctttgggctgccctggcccccactctcccgggccgcccaccacaggctcttaatggggccgggtcagtcctacatgtgagatgggttagggcaagtctttgccatcccccagatggctctgtcttcttgtgtatggcagggctgggactgctgtcccttgtacagttttctgtcactggtgggcactggacaggcatagcagactctcttgtggccacactaggttgtcgcctttcaggcagtgtcccgccacctttgcttcccgctccttctggacattccagagccctgcaccaaacccttacttggtgtctgcacctcctttccctctctccatcttccaatccctggaaaagtctggtctgagtgtgacttgggaagctttcagtgctgctgtttggcccagctcattactttctccctttctctaccacagcaaacacattctccaccatgtcagtctaaagagtctaaaggggccgggagaagcatgagcgaggggcagattctagtcgggagcccatgccctggaaatccatctttcttcatctttcccattgaccactttgggtttgacctgcacatctgcagtgagggcagaattcaacaagcacaactcactggtctttcagtcaacgtgctagaaaccgatgacttattaatctctaattttttggcgcctctttcattgaatgagaattgctttcgtatagttcacattagaaaaatgcctaatatactaaagtaaaccaaacgttgtcacttttctcttgttcttgaaacattgcaaccaaaaaggtcagcacaaaggccttcacctacgtgaagacctcctggtaggatctgtccatgggatggagaaccactctgtccagatctggggttgggtcatgacaccagctaccaattttagaatattatttcttggtttctttatgaaaaatgggtgctagtggtaattgctttgtggcttagtaaactactctgtggatgatttccaaacattcaaagccaatagccttgttattaacaagatattttgagtacaatatggctcattgacttttccattacatctgaggattccagagtcctctgttcatccctgggatagagtgagccctcttgcgtcttccagggtagctcaggttggcccagtttgggccagtccatttttggaggtcactctttcccccctcatcccctcacctccttctctttacccccttcacgtacttcctttctttcttccctctgttattcattcatcaagcaggttaaagccattgtgctaagatctaatctgaggacactataatggccctgtcgtcagggaagcccgtgatcgctcgttttcaggggtcttaccggtcagcaaccttggcattgatacataggcactctacagaatttaagttttcagaggtaagtctgttgttctgattaatctgcattcattcagcgaatgctcaagacaagccaggcatgctgagaagcggcgctctagttgtatgtaagatgggcattcctctgctctcctctattctccatgtcgactgagaagagtataataagaacattgtaccctctccacacttaaccctctgggattctttattataatataaaccaccgtcgtgaggcatttacctgttggatggaaggtagacagcaacaagattttaatcacctggtcaccagaccctcacggcccatatccaattcgaatttcagaaatttctctgtttgctttaaataactctttacaaataagggtcgggcacggtggctcacgcctgtaatcccagctctttgggaggccgaggtgggcagatcacgaggtcaggagatcgagaccatcctggctaacatggtgaaaccccgtctctgctaaaaatacaaaaaattagccagatgtggtggtgcacacctgtagtcccaactattcggcaggctgaggcagtagaatcgcttgaacctgggaggcggagattgcagtgaaccaagatcgggccactgcactccagcttgggtgacagagcaagactccatctcaaaaaaattataaataactctttgcaaataggaaagtgaagctcaagggtaaccagtgaggctatgaaattgccagtgaattaagaccagggctagagtcaacagtccagaacccctatccgtatgaacaggggcccgtttctggttgaaatcaaggttaggatgcaactgagaaaataaaagactgcactttggagaggcaagcacgctatccgggttgttgttttgttttatgtcttggtgcttaggtgaggacttagctgggtttattcaaagtgggcgggtctgggctattcttgagaatgtcccttccatttctgagaacaagtcagccccttctacctgcctccacccaggagactgatgcacaagatctgtttgtgaaagcctgatttaaaaagaaaaaaaaaattccttaagccaaatggtgttccaagttggttgctgtgacaacctccaggaagagccacttgttaccctctattctttctagtgctttcagtcagtggcaacacataggccccttggaccgtggggatggcggccctgagattctgtcagtgggaccaccctgggcctcctttctacctccactcagcaccctgttggccaaggagaatttctgcggtgggaggcagtgctctgctagtcaggattgataaacagctgggcacaccgaaacagtgtaccaacgaattcaccaaccaggggtttctttccctaccctttgtgaaaaccaatcaattactagatgagtggatggatgcagaaaaatctgggctgagccaaagtcccttttggaaatacaagccataacattcgaaggacatcagcgaccttggcttgtttaggtgattttacttccagctgcaggtagtcttgacaaggagtgtttaaacagaaggctcaagatgcattccttgtgtaggtcggagagagcacttctaatgttaagtggggtacagatcagctgcccccccacgtagcctggacatcgtcttatccccataatccttgccatccctacaaggcccatcgccaccaccttttcccaggtttattgaggtatgattgacatccagtaaaattcaccctttggaaatatacagctctgtgaattttgacaaatttagtgtcttgtgaccatcaccaagatcaacctgtttttaaccctccaaaaaattcccttctcctgccctctttccctggcaaccctgattgattatctgatcctataattttgccttttctagaatgtcatataaatggagtcacactgatgtcgccttttgagtctggcatctttccctcagcttaatgcttttgagtcattcatgatgtgtgcgtgtggtttgttccttctccttgccgggaagtatttcattgcatgggcgtactactctgcttctttatttttacactgagcctttcgccctggaagttcttggcccagggtcttcaacttgtttgcacgaccacttccagcttgctgcttccttcagttccccaggctcctcctccaaatgccagctgtgcccacaagctgttcttagggctcacactcgccttttggcgcgtggtgggtttttggtagtgcagaaagaatccagggatgggaggggaagggacggatgggtgctcaattgctgctcacgtctgctgcaacctgaagcttgcatctcagccagcagatctgctcccttctgggacccaggcttcagtgtcacacggtccttggctatgtattgggcgttggaggctttgaaaggcgagcagaagcagcatggacaagaaggctggggctggccctggggctcatcatgatgctttcctggatctgttgcttcatctgcaagctgagggtgtttgttctagatgagtgtctcaggccaccggcaactgcatgtacctcctccctttctcatttccaatgatgtaccctgtacacgtgttcatgctgtgtctggctctcatctgcacaatcgtgcatagaattgcctcaagtcctggtgagagagatgccgtggtacttttccatttagattcaaatggagctaaaattaagagttttatgagctgttaagaatgaggtagtttctcctaggaccccccaaagacagtgcaagtaatgaccgtttggatctcattcgtcgatctttgatagtatgttctggagtctactccccaggagccaggacaggcgtgaagatggagtccttgtcgcagctggagccttgcctagctggtgatcacacagcctggcctgtacctgcaccccactggatggtggtacatggtggcagggacaggaccacacccagttaaggccagaccaggctgagtgtgacccctgaggtaaacactccactaagctgtgtcttgttcatgccccctgctcagtgaaaggtgagtcccgagaccagttgggtacctctctatgcgaaccagagacatttctggatccaggccaggtgaagattagggccaggaagcctgagcccccggggcctcaaggtagggagccgaagaggctgccaggactctgctgggttgaaatttgccggggaggactcttgtctccccctcaggagtatttttgttgaggctttcctggaggtgaagaagcaattcccattgcagcaggttagagcgagaatcagacagagggcaaaaaccaattcgcttctccccacgttctaaatgctggggcatggctgtcaggagggcttcctgggaggtgtctctgggggtggggtgaggttggggcgatggcctttggagattgcgtgtggtgttcaggactgttccttggtgtttgagggaaactttagtgggattgcagtggaatgtaaggtcagggcacgtgggtgctctctcggggtggggtgactgggagacctagagggaaagcctgctatgcagggggagagcacaggactggccctgctctgcggcctcctttgtcccataacctgaagttaagtcacatcccctgtcgggacctccgtgcactcatctgtcaagtgggggcgcttcccttccagcatcacctgcagcagacgggctctcgggagtcgtgggttccaggcagctgtgtggacccagggacagacattcaaagggacgccagccatccttagtgacaggggccccaacttagcatcccttcccttccgttaggaaggagatgaccggaagcaaccccttcacagacacgagcacatcggcaaaccctatgaaagtggaattttctaacaaaataaacttgcttgtttgatctgttttctgtaacttttgctaaatactttatacatttttcatgttaaagagccgtgtctcccgccagcactcctcaccccggtatgaatgtgtttcctccacattgtatatccttccaccctctggctgcctagatcagtaaataaaattgatgtaatataatttataagtaacactgttgaaaccctgatcccagtggaggctgtaacccacctgcccccgcaccacccccctgacccctgttaccgcatttgtgtgtattaatgctgaagaattaaatgtttaaagagtttaaattttgaaggcgtttgctatatacagttgtcctgcattattataaagagttttcaggaagtt

SEQ ID NO: 1639 - protein, 476 aa, Homo sapiens
MSGARCRTLYPFSGERHGQGLRFAAGELITLLQVPDGGWWEGEKEDGLRGWFPASYVQLLEKPGMVPPPPGEESQTVILPPGWQSYLSPQGRRYYVNTTTNETTWERPSSSPGIPASPGSHRSSLPPTVNGYHASGTPAHPPETAHMSVRKSTGDSQNLGSSSPSKKQSKENTITINCVTFPHPDTMPEQQLLKPTEWSYCDYFWADKKDPQGNGTVAGFELLLQKQLKGKQMQKEMSEFIRERIKIEEDYAKNLAKLSQNSLASQEEGSLGEAWAQVKKSLADEAEVHLKFSAKLHSEVEKPLMNFRENFKKDMKKCDHHIADLRKQLASRYASVEKARKALTERQRDLEMKTQQLEIKLSNKTEEDIKKARRKSTQAGDDLMRCVDLYNQAQSKWFEEMVTTTLELERLEVERVEMIRQHLCQYTQLRHETDMFNQSTVEPVDQLLRKVDPAKDRELWVREHKTGNIRPVDMEI

SEQ ID NO: 1640 - DNA, 906 bp, Homo sapiens
atggtagcaactgaactcacagaagctgcggcagcagcaagcggtcttgcagcaggtggtctggcagcagctgggatggcagcagatctcttggcagaggtcttaaccacacctctggtgacagcagaaggagctgcagcaggagctgaccatggtgtcagaaggtggaggttctgggtgtgggttttcagtggcataaggagcccacccttcacccctgacaccatgacccactgctgttccccttgctgtcagcctacatgctgcaggaccacctgctgcaggacaacctgctggaagcccaccactgtgaccacctgcagcagcacaccctgttgccagccctcctgctgtgtgcccagctgctgccagccttgctgccacccaacttgctgtcaaaacacctgctgcaggaccacctgctgccagcccacttgtgtggccagctgctgccagccttcctgctgcagcacaccctgctgccagcccacctgctgtgggtccagctgctgtggccaaaccagctgtgggaccacctgctgccagcctacctgctgccagcccacctgctgcaggaacacctcttgccagcccacctgctgtgggtccagctgctgccagccttgctgccacccaacatgctgtcaaaccatttgtagatccacctgctgccaaccatcctgtgtgaccagatgctgcagcacaccctgttgccagccaacctgtgaccacctgctacaggaccacctgttgccgccccagctgttgctgcagtccttgctgtgtctccagctgctgccagccttcctgctgctaatccacttgctgcagacccaccacccaccagagacatatttcctgaaacattttgtcaaagttcctattccaccaagaaacattcgctaa

SEQ ID NO: 1641 - protein, 301 aa, Homo sapiens
MVATELTEAAAAASGLAAGGLAAAGMAADLLAEVLTTPLVTAEGAAAGADHGVRRWRFWVWVFSGIRSPPFTPDTMTHCCSPCCQPTCCRTTCCRTTCWKPTTVTTCSSTPCCQPSCCVPSCCQPCCHPTCCQNTCCRTTCCQPTCVASCCQPSCCSTPCCQPTCCGSSCCGQTSCGTTCCQPTCCQPTCCRNTSCQPTCCGSSCCQPCCHPTCCQTICRSTCCQPSCVTRCCSTPCCQPTCDHLLQDHLLPPQLLLQSLLCLQLLPAFLLLIHLLQTHHPPETYFLKHFVKVPIPPRNIR

SEQ ID NO: 1642 - DNA, 1042 bp, Homo sapiens
tgacaccatgacccactgttgctccccttgctgtcagcctacctgctgcaggaccacctgctgcaggaccacctgctggaagcccaccactgtgaccacctgcagcagcacaccctgctgccagcccgcctgctgtgtgtccagctgctgccagccttgctgccgcccaacttgctgtcaaaacacctgctgtaggaccacctgctgccagcccacctgtgtgaccagctgctgccagccttcctgctgcagcacaccctgctgccagcccacctgctgtgggtccagctgctgtggccaaaccagctgtgggtccagctgtggccagagcagctcctgtgcacctgtgtactgcagaagaacctgctactaccccacgactgtctgcctgcctggttgcctaaaccagagctgtggctccaactgctgccagccctgctgccgcccagcctgctgtgagaccacctgctgcaggaccacttgcttccagcccacctgtgtgtccagctgctgccagccttcttgctgctgatcacgttccaagagaaccaccatcctcacacaacaaatttctgctcaactgactcatcttttgggggactaatttaatttgctgctgacagccaccatgctctcacccaaatttttatgaattctctacatgtttaaaatcttggaaatctgcttgagggagggcagaatacttcatcctgattctctttttccttacaccttgtggatcatgtgccagcttcatctgttctcaagtttgagtcatggtctcagctttgactctaaagtcaagagcttcattccctgcttctaaggaatttaggtttctgcaactgatcgatgatctttgcaatcttttttttgttttcaatatcctcctcatcgttcttgtatccttctttcttcttttcatgataaatttgtgttgtgtccctggtagcagaaatccttacctatatgtttctgaataaattctgaaccatcctcatctcaaaaaaaaaaaaaaaaaaaaaaaaaaaaaaaaaaaaaa

SEQ ID NO: 1643 - protein, 174 aa, Homo sapiens
MTHCCSPCCQPTCCRTTCCRTTCWKPTTVTTCSSTPCCQPACCVSSCCQPCCRPTCCQNTCCRTTCCQPTCVTSCCQPSCCSTPCCQPTCCGSSCCGQTSCGSSCGQSSSCAPVYCRRTCYYPTTVCLPGCLNQSCGSNCCQPCCRPACCETTCCRTTCFQPTCVSSCCQPSCC

SEQ ID NO: 1644 - DNA, 1020 bp, Homo sapiens
tcacctcttaacagaagcccaccctccatccctgacaccatgacccactgttgctccccttgctgtcagcctacctgctgcaggaccacctgctggcagcccaccactgtgaccacctgcagcagcacaccctgctgtcagccctcctgctgtgtttccagctgctgccagccttgctgccacccaacttgctgtcaaaacacctgctgtaggaccacctgctgccagcccatctgtgtgaccagctgctgccagccttcctgctgtagcacaccctgctgccagcccacatgctgtgggtccagctgtggtcagagcagctcctgtgcacctgtgtactgcagaagaacctgctaccaccccacaagtgtttgtctgcctggttgcctaaaccagagctgtggctccaactgctgccagccctgctgccgcccagcctgctgtgagaccacctgctgcaggaccacttgtttccagcccacctgtgtgtacagctgctgccagccttcttgctgctaatcaactcccaagagaactaccatcctcacacaacaaccttcagctcaactgacttgtcttttgagggactaatttactttgctgctgacagccaccatgctctcacccaaatttttatgaattctctacatgtttaaaatcttgggaatctgcttgagggagggcagaatacttcatcctcattccctctttccttacaccttgtggatcatgtgccagcttcgtctgttcttaatttggagtcatgatctcagctttgtctcaaaaatcaagagcttcattctttgcttctaaggaatttaggtttctgcaactgatcaatcatctttgcaattatattttcattttaaatatccttctcatggttcttgtatccttctttcttcttttcacgataactttgggttatgtctctggtagcagagattcttacctatatgtttctgaataaactctgaaccatcttcatctcaaaaaaaaaaaaaaaaaaaaaaaaaaaaa

SEQ ID NO: 1645 - protein, 159 aa, Homo sapiens
MTHCCSPCCQPTCCRTTCWQPTTVTTCSSTPCCQPSCCVSSCCQPCCHPTCCQNTCCRTTCCQPICVTSCCQPSCCSTPCCQPTCCGSSCGQSSSCAPVYCRRTCYHPTSVCLPGCLNQSCGSNCCQPCCRPACCETTCCRTTCFQPTCVYSCCQPSCC

SEQ ID NO: 1646 - DNA, 990 bp, Homo sapiens
tctgaacagaagcccaccctctacccctgacaccatgacccactgttgctccccttgctgtcagcctacatgctgcaggaccacctgctgcaggaccacctgctggaagcccaccactgtgaccacctgcagcagcacaccctgctgccagccctcctgctgtgtttccagctgctgccagccttgctgccgcccaacttgctgtcaaaacacctgctgccagcccacctgtgtgaccagctgctgccagccttcctgctgcagcacaccctgctgccagcccacctgctgtgggtccagctgtgaccagagcagctcctgtgcacctgtgtactgcagaagaacctgctactaccccacaactgtctgcctgcctggttgcctaaaccagagctgtggctccaactgctgccagccctgctgccgcccagcctgctgtgagaccacttgcttccagcccacctgtgtgtccagctgctgtcagcctttttgctgctgatcaagtcccaagagaaccaccatcctcacacaacaactttctgctcaactgacttatcttttgggggactaatttaatttgctgctgacagccaccatgctctcacccaaatttttatgaattctctacctgtttaaaatcttgggaatctacttgagggagggcagaatacttcatcctgattctctttttccttacactttgtggatcatgtgccagcttcgtgtgttctcaattttgagtcatggtctcagctttgactcaaaagtcaagagcttcattctctgcttctaaggaatttaggtttctgcaactgatcaataatctttgcaatcatatttttgttttcaatatcctcctcatggttcttgtatccttctttcttcttttcataactttgggttatgtttctgctaccagcagagattcttagctatatgtttctgaataaactctgaaccatcctcaaaaaaaaaaaaaaaaaaaaaaaa

SEQ ID NO: 1647 - protein, 154 aa, Homo sapiens
MTHCCSPCCQPTCCRTTCCRTTCWKPTTVTTCSSTPCCQPSCCVSSCCQPCCRPTCCQNTCCQPTCVTSCCQPSCCSTPCCQPTCCGSSCDQSSSCAPVYCRRTCYYPTTVCLPGCLNQSCGSNCCQPCCRPACCETTCFQPTCVSSCCQPFCC

SEQ ID NO: 1648 - DNA, 510 bp, Homo sapiens
atgacccactgttgctccccttgctgtcagcctacctgctgcaggaccacctgctggaagcccaccactgtgaccacctgcagcagcacaccctgctgccagccctcctgctgtgtgtccagctgctgccagccttgctgccacccaacttgctgtcaaaacacctgctgcaggaccacctgctgccagcccacctgtgtgaccagctgctgccagccttcctgctgcagcacaccctgctgccagcccatctgctgtgggtccagctgctgtggccaaaccagctgtgggtccagctgctgccagcccagctcctgtgcacccatctactgcaggagaacctgctaccaccccacgagtgtctacctgcctggttgcctaaaccagagctgtggctccagctgctgccagccgtgctgccgcccagcctgctgtgagactacctgctgcaggaccacttgcttccagcccacctgtgtgaccagctgctgtcagcctgcttgctgctga

SEQ ID NO: 1649 - protein, 169 aa, Homo sapiens
MTHCCSPCCQPTCCRTTCWKPTTVTTCSSTPCCQPSCCVSSCCQPCCHPTCCQNTCCRTTCCQPTCVTSCCQPSCCSTPCCQPICCGSSCCGQTSCGSSCCQPSSCAPIYCRRTCYHPTSVYLPGCLNQSCGSSCCQPCCRPACCETTCCRTTCFQPTCVTSCCQPACC

SEQ ID NO: 1650 - DNA, 815 bp, Homo sapiens
gaactccggctgcgttaccgacctgcgagctgacgggcccggaccatggggtgctgcccgggggactgcttcacctgctgcacccaggagcaaaactgctgtgaagagtgctgctgtcagccgggctgctgtggctgctgcggctcctgctgtggctgtgggggctctggctgcgggggctctggctgcgggggcagctgctgcggatcgtcttgctgtggatctggctgcggaggctgtggaggctgcggaggctgcgggggtggctgctgtggatccagttgctgtgggtccagttgctgcggctccgggtgctgtgggcctgtgtgctgccagcccacacctatatgcgacacaaaatgaagacctttccctccaccactgatgcagtcccaccgaaagcctccatctgctccagggggacagcccctcgtgtccagaaccttccatacccccaagacagtgtcttgtctttctgtgatttgtagaggagggcttgttctccaacaccttctctggtatttcaaggcaccgagaacaagagccatactctgatgaaacattaaaactcggtcacaactaagtgatcccaagctcaagggtgaatccccaatactttacttattcacatgaagttcaatgtcttgtactataagacatcctcttcttcaaggtgtctttgggactgatcctccgccctggctttctgcagctttgagatgcaaaaaaggtccatcttctttgtgagcctcttaataaatttgagcatgctggcataaaaaaaaaaaaaaaaaaaaaaaaaaaaaaaaaaaaaa

SEQ ID NO: 1651 - protein, 105 aa, Homo sapiens
MGCCPGDCFTCCTQEQNCCEECCCQPGCCGCCGSCCGCGGSGCGGSGCGGSCCGSSCCGSGCGGCGGCGGCGGGCCGSSCCGSSCCGSGCCGPVCCQPTPICDTK

SEQ ID NO: 1652 - DNA, 1252 bp, Homo sapiens
ggactctgtcttcagctggacactccctccctgcaccatgtcttacagttgtggcctgcccagcctgagctgccgcaccagctgctcctcccggccctgtgtgccccccagctgccacggctgcaccctgcccggggcctgcaacatccccgccaatgtgagcaactgcaactggttctgtgagggctccttcaatggcagtgagaaggagaccatgcagttcctgaacgaccgcctggccagctacctggagaaggtgcgtcagctggagcgggacaacgcggagctggagaacctcatccgggagcggtcacagcagcaggagcccttggtgtgtgccagctaccagtcctacttcaagaccattgaggagctccagcagaagatcctgtgcagcaagtctgagaatgccaggcttgtggtgcagatcgacaatgccaagctggcctcagatgacttcaggaccaaatatgagaccgagctgtccctgcggcagctggtggagtcggacatcaatggcctgcgcaggatcctggatgagctgaccctgtgcaggtctgacctggaggcccaggtggagtccctgaaggaggagctgctgtgcctcaagcagaaccatgagcaggaggttaacaccctgcgctgccagcttggagaccgcctcaacgtggaggtggacgctgctcccactgtggacctgaaccaggtcctgaatgagaccaggagtcagtatgaggccctggtggaaaccaaccgcagggaagtggagcaatggttcgccacgcagaccgaggagctgaacaagcaggtggtatccagctcggagcagctgcagtcctaccaggcggagatcatcgagctgagacgcacggtcaatgccctggagatcgagctgcaggcccagcacaacctgcgagactctctggaaaacacgctgacagagagcgaggcccgctacagctcccagctgtcccaggtgcagagactgatcaccaacgtggagtcccagctggcggagatccgcagtgacctggagcggcagaaccaggagtatcaggtgctgctggacgtgcgggcgcggctggagtgtgagatcaacacgtaccggagcctgctggagagcgaggactgcaagctcccctccaacccctgcgccacaaccaatgcatgtgacaagtccactgggccctgtatctctaatccctgtggcctacgtgctcggtgtgggccttgcaacacatttgggtactag

SEQ ID NO: 1653 - protein, 404 aa, Homo sapiens
MSYSCGLPSLSCRTSCSSRPCVPPSCHGCTLPGACNIPANVSNCNWFCEGSFNGSEKETMQFLNDRLASYLEKVRQLERDNAELENLIRERSQQQEPLVCASYQSYFKTIEELQQKILCSKSENARLVVQIDNAKLASDDFRTKYETELSLRQLVESDINGLRRILDELTLCRSDLEAQVESLKEELLCLKQNHEQEVNTLRCQLGDRLNVEVDAAPTVDLNQVLNETRSQYEALVETNRREVEQWFATQTEELNKQVVSSSEQLQSYQAEIIELRRTVNALEIELQAQHNLRDSLENTLTESEARYSSQLSQVQRLITNVESQLAEIRSDLERQNQEYQVLLDVRARLECEINTYRSLLESEDCKLPSNPCATTNACDKSTGPCISNPCGLRARCGPCNTFGY

SEQ ID NO: 1654 - DNA, 1621 bp, Homo sapiens
caggttttgaaactgacttccagagctccactgcctccctgcaccatgccctacaacttctgcctgcccagcctgagctgccgcaccagctgctcctcccggccctgtgtgccccccagctgccacggctacaccctgcccggggcctgcaacatccctgccaatgtgagcaactgcaactggttctgcgagggctccttcaatggcagcgagaaggagactatgcagttcctgaacgaccgcctggccagctacctggagaaggtgcgtcagctggagcgggacaacgcggagctggagaacctcatccgggagcggtctcagcagcaggagcccttgctgtgccccagctaccagtcctacttcaagaccattgaggagctccagcagaagatcctgtgcagcaagtctgagaatgccaggctggtggtgcagatcgacaatgccaagctggctgcagatgacttcagaaccaagtaccagacggagcagtccctgcggcagctggtggagtccgacatcaacagcctgcgcaggattctggatgagctgaccctgtgcaggtctgacctggaggcccagatggagtccctgaaggaggagctgctgtccctcaagcagaaccatgagcaggaagtcaacaccttgcgctgccagcttggagaccgcctcaacgtggaggtggacgctgctcccgctgtggacctgaaccaggtcctgaacgagaccaggaatcagtatgaggccctggtggaaaccaaccgcagggaagtggagcaatggttcgccacgcagaccgaggagctgaacaagcaggtggtatccagctcggagcagctgcagtcctaccaggcggagatcatcgagctgagacgcacagtcaatgccctggagatcgagctgcaggcccagcacaacctgcgatactctctggaaaacacgctgacagagagcgaggcccgctacagctcccagctgtcccaggtgcagagcctgatcaccaacgtggagtcccagctggcggagatccgcagtgacctggagcggcagaaccaggagtatcaggtgctgctggacgtgcgggcgcggctggagtgtgagatcaacacataccggagcctgctggagagcgaggactgcaagctgccctccaacccctgcgccaccaccaatgcatgtgaaaagcccattggatcctgtgtcaccaatccttgtggtcctcgttcccgctgtgggccttgcaacacctttgggtactagataccctggggccagcagaagtatagcatgaagacagaactaccatcggtgggccagttctgcctctctgacaaccatcagccaccggaccccaccccgaggcatcaccacaaatcatggtctggaaggagaacaaatgcccagcgtttgggtctgactctgagcctagggctacttgatcctcctcaccccaggtccctctcctgtagtcagtctgagttctgatggtcagaggttggagctgtgacagtggcatacgaggtgttttgttctctctgctgcttctacctttattgcagttccccaaatcgcctaataaactttcctcttgcaaagcagacaaaaaaaaaaaaaaaaaaaa

SEQ ID NO: 1655 - protein, 404 aa, Homo sapiens
MPYNFCLPSLSCRTSCSSRPCVPPSCHGYTLPGACNIPANVSNCNWFCEGSFNGSEKETMQFLNDRLASYLEKVRQLERDNAELENLIRERSQQQEPLLCPSYQSYFKTIEELQQKILCSKSENARLVVQIDNAKLAADDFRTKYQTEQSLRQLVESDINSLRRILDELTLCRSDLEAQMESLKEELLSLKQNHEQEVNTLRCQLGDRLNVEVDAAPAVDLNQVLNETRNQYEALVETNRREVEQWFATQTEELNKQVVSSSEQLQSYQAEIIELRRTVNALEIELQAQHNLRYSLENTLTESEARYSSQLSQVQSLITNVESQLAEIRSDLERQNQEYQVLLDVRARLECEINTYRSLLESEDCKLPSNPCATTNACEKPIGSCVTNPCGPRSRCGPCNTFGY

SEQ ID NO: 1656 - DNA, 1713 bp, Homo sapiens
ggaaaggaaactatgctgtatgccaagcccccacccacaattaatggtataaaaggactgcagaggaaggagagactcaaacctgcccacatccacctccagcagcttacctgcttttccattacctgttccagcaccatgtcttacagttgttgcctgcccagcctgggctgccgcaccagctgctcctcccggccctgcgtgccccccagctgccacggctacaccctgcctggggcctgcaacatccccgccaatgtgagcaactgcaactggttctgtgagggctccttcaatggcagcgagaaggagactatgcagttcctgaacgaccgcctggccagctacctggagaaggtgcgtcagctggagcgggacaacgcggagctggagaaactcatccaggagcggtcccagcagcaggagcccttgctgtgccccagctaccagtcctacttcaagaccattgaggagctccagcagaagattctgtgtgccaaggctgagaatgccaggctggtggtgaacattgacaatgccaagctggcctctgacgacttcagaagcaagtaccagacggagcagtccctgaggctgttggtggagtcggacatcaacagcatacgcaggatcctggatgagctgaccctctgcaagtctgacctggagtcccaggtggagtccctgagggaggagctgatctgcttgaagaagaaccatgaggaggaggttaacaccctgcgctcccagcttggagaccgcctcaacgtggaggtggacactgcccccactgtggacctgaaccaggtcctgaacgagaccaggagtcagtatgaggctctggtggaaattaaccgcagggaagtggagcaatggttcgccacgcagaccgaggagctgaacaagcaggtggtatccagctcagagcagctgcagtcctgccaggcggagatcatcgagctgagacgcacagtcaacgccctggagatcgagctgcaggcccagcacaacctgcgagactctctggaaaacacgctgacggagagcgaggcccactacagctcccagctgtcccaggtgcagagcctgatcaccaacgtggagtctcagctggcagagatccgctgtgacctggagcggcagaaccaggagtaccaggtgctgctggacgtgcgtgcccggctggagtgtgagatcaacacgtaccggagcctcctggagagtgaggactgcaagctcccctgcaacccatgcgccaccaccaatgctagtggcaactcctgtggaccctgtggcacctctcaaaagggttgctgtaattgaaaagcttgtatcctctttgaagacatctacaaagccatttagatcaaccacaggaaggatcctcaagtcctgacttttctggagctcagctgacatcaagaaacctcatcttgcctctatgttatttctagaatgctgaaaagctttcctgacccaagcaaagacacacatcatcaacttccaatgtctggacaactccttcctgttgagggtcgagcctgtttgtttctaaagatgttcagctccctgtaatctgagctccagttactacttaaggtgtttcctgaacgtactactgcatttcctgttttccttttttctttggcattctctggaatgcaaggaggagacttcatttacttcccaataaacttcatttctctggcataa

SEQ ID NO: 1657 - protein, 436 aa, Homo sapiens
MLYAKPPPTINGIKGLQRKERLKPAHIHLQQLTCFSITCSSTMSYSCCLPSLGCRTSCSSRPCVPPSCHGYTLPGACNIPANVSNCNWFCEGSFNGSEKETMQFLNDRLASYLEKVRQLERDNAELEKLIQERSQQQEPLLCPSYQSYFKTIEELQQKILCAKAENARLVVNIDNAKLASDDFRSKYQTEQSLRLLVESDINSIRRILDELTLCKSDLESQVESLREELICLKKNHEEEVNTLRSQLGDRLNVEVDTAPTVDLNQVLNETRSQYEALVEINRREVEQWFATQTEELNKQVVSSSEQLQSCQAEIIELRRTVNALEIELQAQHNLRDSLENTLTESEAHYSSQLSQVQSLITNVESQLAEIRCDLERQNQEYQVLLDVRARLECEINTYRSLLESEDCKLPCNPCATTNASGNSCGPCGTSQKGCCN

SEQ ID NO: 1658 - DNA, 1616 bp, Homo sapiens
gagaatttagactctgtcttcagccaggcactccctccctccctcccagcactatgccctacaacttctgcctgcccagcctgagctgccgcaccagctgctcctcccggccctgcgtgccccccagctgccacagctgcaccctgcccggggcctgcaacatccccgccaatgtgagcaactgcaactggttctgcgagggctccttcaatggtagcgagaaggagactatgcagttcctgaacgaccgcctggccagctacctggagaaagtgcgtcagctggagcgggacaacgcggagctggagaacctcatccgggagcggtctcagcagcaggagcccttgctgtgccccagttaccagtcctattttaagaccattgaggagctccagcagaagatcctgtgtaccaagtctgagaatgccaggcttgtggtgcagatcgacaacgccaagctggctgcggatgatttcagaaccaagtaccagaccgagctgtccctgcggcagctggtggagtcggacatcaacggtctgcgcaggatcctggatgagctgaccctgtgcaagtccgacctggaggcccaggtggagtccctgaaggaggagctgctctgcctcaagagcaaccatgagcaggaggtcaataccctgcgctgccagcttggagaccgcctcaatgtggaggtggatgctgctcccactgtggacctgaatcgggtgctgaacgagaccaggagtcagtatgaggccctggtggaaaccaaccgcagggaagtggagcaatggttcaccacgcagaccgaggagctgaacaagcaggtggtatccagctcagagcagctgcagtcctaccaggcggagatcatcgagctgagacgcacagtcaacgccctggagatcgagctgcaggcccagcacaacctgcgagactctctggaaaacacgctgacagagagtgaggcccgctacagctcccagctgtcccaggtgcagagcctgatcaccaacgtggagtcccagctggcggagatccgcagtgacctggagcggcagaaccaggagtaccaggtgctgctggatgtgcgtgcccggctggagtgtgagatcaacacataccggagcctgctggagagcgaggactgcaatctgcccagcaatccctgtgccacgaccaacgcgtgcagcaagcccatcggaccctgtctctccaatccctgtacctcttgtgtccctcctgccccctgcacaccctgtgccccacgcccccgctgtgggccctgcaattccttcgtgcgctagaacctagggaatgccagaggagcaaggatgcagggcccaggactccagagctgtgacctggctctggttcaacaaaaggggcctgaaaacatcatttgcatggctggagttgcccgcgtaaggcagccaagaaactcacccaaagcctgtagcctccccaactactccagactgtcctgctcaccctttccttcctgggggtctgttccttcctatgctcacccagagaactctctgatgtgccagtgggcctcccttttaacctcctaataaatatcatttccttggcaaaaaaaaaaaaaaaaaaaaaaa

SEQ ID NO: 1659 - protein, 416 aa, Homo sapiens [sequence omitted]

SEQ ID NO: 1660 - DNA, 1718 bp, Homo sapiens
gccttcccagctgatctgaagctcctgtgcagcctcagccctacaccatgacctccttctacagcacctcctcatgccctctgggttgcaccatggctcctggagcaagaaatgtctttgtctctcctatcgatgttgggtgccagcctgtggcagaggccaatgctgcctccatgtgcctcttggccaacgtggcacacgccaacagagtccgtgtggggtcgactcccctgggccgccccagcctctgtctgcccccaaccagtcacactgcttgtcccttgccagggacctgtcacattcccggcaacatcggaatctgtggggcctacggcaaaaacaccctgaatggccatgagaaggagaccatgaagttcctgaatgaccgcctggccaactacctggagaaggtgcgccagctggagcaggagaatgcagagctggagaccacactcctcgagaggagcaagtgccacgagtccaccgtgtgccccgactaccagtcctacttccgtacaatcgaggagctccagcagaagatcctgtgcagcaaggctgagaatgccaggctgattgtacaaattgacaacgcgaagctggctgctgatgactttaggatcaagctggagagtgagcgctcccttcaccagctggtggaggcggacaagtgcgggacgcagaagctcctggatgacgcgaccctggccaaggccgacctggaggcccagcaggagtccctgaaggaggagcagctctccctcaagagcaaccacgagcaggaagtaaagattctgaggagtcagctgggggagaagttccggatcgagctggacattgagcccaccattgacctgaacagggtgttgggggagatgcgggctcagtacgaggccatggtggagaccaaccaccaggatgtggaacagtggttccaagcccagtctgaaggcatcagcctgcaggccatgtcctgctccgaggagctgcagtgctgccagtcggagatcctggagctgagatgcacggtgaatgccctggaggtggagcgccaagcccagcacaccttgaaggactgtctgcagaactccctgtgtgaagcggaggaccgctacggcacagagctggcccagatgcagagcctcattagcaacttggaagagcagttgtctgagatccgggccgacctggagcggcagaaccaggagtaccaggtgctgctggacgtgaaggcccggttggagaacgagattgccacataccggaaccttctggagagcgaggactgcaaactcccctgcaatccctgttccacgcctgcctcctgtacttcttgtccaagctgtggccctgtcaccggtgggtctccctctggccatggagccagcatggggagatgattctgaaggcccgagttaggagattgaggctggttgcactggggtcaggagtgccctcaccttgcccagtcttccttcaagactagactcactgaggcattttccctaaatcaaccggtagcagatacttccaaggagtggctccctgcctatgcctctaagctgtattttttgttgttgctaaaatgttgtaattatcttccatgaaagcaattatttttcctggtgtctcttcttggtacttttagttctattccagtgtttcagaatctccaaaaatgtaactgggttccctgcattaaatggtcaataaacctcctt

SEQ ID NO: 1661 - protein, 449 aa, Homo sapiens
MTSFYSTSSCPLGCTMAPGARNVFVSPIDVGCQPVAEANAASMCLLANVAHANRVRVGSTPLGRPSLCLPPTSHTACPLPGTCHIPGNIGICGAYGKNTLNGHEKETMKFLNDRLANYLEKVRQLEQENAELETTLLERSKCHESTVCPDYQSYFRTIEELQQKILCSKAENARLIVQIDNAKLAADDFRIKLESERSLHQLVEADKCGTQKLLDDATLAKADLEAQQESLKEEQLSLKSNHEQEVKILRSQLGEKFRIELDIEPTIDLNRVLGEMRAQYEAMVETNHQDVEQWFQAQSEGISLQAMSCSEELQCCQSEILELRCTVNALEVERQAQHTLKDCLQNSLCEAEDRYGTELAQMQSLISNLEEQLSEIRADLERQNQEYQVLLDVKARLENEIATYRNLLESEDCKLPCNPCSTPASCTSCPSCGPVTGGSPSGHGASMGR

SEQ ID NO: 1662 - DNA, 2837 bp, Homo sapiens
tagtcctcctgctacaccactgaccaacaggaaagtttgtgtctccagagtggacacatccataaagaggccaaacccagtcaaggtctaagcatctgatggctataactttgcttctttgaaagataataaaaagcttctgacctcccatcaacagccaacctgatttcaaagagccaagaggcctcagattcgtcaacattcctttaacgagctgagaaacttttcatggtaaactcagcagctgagtaacaggatgatggcaccacaacaggtagataatcaaggcaggaggtcaaagcattggagccaacacccgcccaggatggggtataaaagggctgggaggagaggaggcttcagtctcagtggttcagctttcccagctgatctgaagctcctgtgcagcctcagcccaacaccatgacctcttcctacagcagctcctcatgccctctgggttgcaccatggctcctggagcaagaaatgtctctgtctctcccatcgacattgggtgccagcctggggcagaggccaacattgcccccatgtgccttttggccaacgtggcacatgccaaccgagtccgtgtggggtccactcccctgggccgccccagcctctgtctgccgcctacctgccacactgcttgtcccttgccagggacctgccacattcctggcaacattggaatctgtggggcctatggtgaaaacaccctgaatggccatgagaaggagaccatgcagttcctgaatgaccgcctggccaactacctggagaaggtgcgccagctggagcaggagaatgcggagctggaggccacactcctcgagaggagcaagtgccacgagtccaccgtgtgccccgactaccagtcttacttccacaccatcgaggagctccaacagaagatcctgtgcagcaaggccgagaatgccaggctgattgtacaaattgacaatgccaagctggctgccgatgactttaggatcaagctggagagtgagcgctccctgcgccagctggtggaggcagacaagtgtgggacacagaagctcctggatgatgcgaccctggccaaggccgacctggaggcccagcaggagtccctgaaggaggagcagctctccctcaagagcaaccacgagcaggaagtaaagattctgaggagtcagctgggggagaagctccggattgagctggacattgagcccaccattgacctgaacagggtgctgggggagatgcgggctcagtatgaggccatgttggagaccaaccgccaggatgtggaacagtggttccaagcccagtctgaaggcatcagcctgcaggacatgtcctgctccgaggagctgcagtgctgccagtcggagatcctggagctgagatgcacggtgaatgccctggaggtggagcgccaagcccagcacaccttgaaggactgtctgcagaactccctgtgtgaagccgaggaccgcttcggcacggagctggcccagatgcagagcctcatcagcaacgtggaggagcagctgtctgagatccgggccgacctggagcggcaaaaccaggagtaccaggtgctgctggacgtgaagacccggctggagaatgagattgccacgtaccggaaccttctggaaagcgaggactgcaaactcccctgcaatccgtgctccacgtctccctcctgcgtgactgccccctgtgctcctcgcccaagctgtggcccctgcaccacctgtgggcccacctgtggagccagcaccaccggaagccgattctgaattcctgtggacccacaggggctggctaaggcgagggatacccaaagagagatgcttgttatacctttagaaaatctggcttctaactttctgtatgtataggcctgtccaaaggctatgagataccagggacagtggaatcttgatggaaatccttcctttcctgctcttggttttcccaggtgagctctatgccctcagtggctggattgcagccacccatggtggctcagaatatctggattggagaggcataaggttgaaaagcattttggagtaggaacacggcatgatttaaaattgcacttgcacttcaagaacaccaactttaacttgaaatttttatagtttatgacaaaggaagtgaagaacagacttcactgtctgagatttcccacatttcttgggttgtttctaacattggcagcctggattatggccctagggagagggaaatagaatcagaattgtacctgaccctgtcttttctaattcccttctcctatcctcctgcctccctatcttggaaactgattaagtggaaactttccttgtatcaaatcctgagttttctctacttcagggtttctagctttgacaaaggaccaggcttgccttttctgtggcaacacagcctcttacatatggcttccatagcttcttgctatgtgaaaggaactttcagattaagaaatttctctcttttttctctataaattctgactctccagacttgtctggctataacccctgtccctgtctaattctcccagtctaaaatctaaacaatgacttcatttttttctagtactttctcctgaagtattgaaacctattgattcaatgggtagagatttgctaagtatgatgtgcttccacctcttctcttcatactctctaccttccttaccatgattcagccacactggcctttctgttccttggacatgcctggagacctgtccctgctcttccttctctctggggtgctcttccccctccttataaatgttcaggtcagcggaaatgttccttcctctgag

SEQ ID NO: 1663 - protein, 456 aa, Homo sapiens
MTSSYSSSSCPLGCTMAPGARNVSVSPIDIGCQPGAEANIAPMCLLANVAHANRVRVGSTPLGRPSLCLPPTCHTACPLPGTCHIPGNIGICGAYGENTLNGHEKETMQFLNDRLANYLEKVRQLEQENAELEATLLERSKCHESTVCPDYQSYFHTIEELQQKILCSKAENARLIVQIDNAKLAADDFRIKLESERSLRQLVEADKCGTQKLLDDATLAKADLEAQQESLKEEQLSLKSNHEQEVKILRSQLGEKLRIELDIEPTIDLNRVLGEMRAQYEAMLETNRQDVEQWFQAQSEGISLQDMSCSEELQCCQSEILELRCTVNALEVERQAQHTLKDCLQNSLCEAEDRFGTELAQMQSLISNVEEQLSEIRADLERQNQEYQVLLDVKTRLENEIATYRNLLESEDCKLPCNPCSTSPSCVTAPCAPRPSCGPCTTCGPTCGASTTGSRF

SEQ ID NO: 1664 - DNA, 2005 bp, Homo sapiens
ggcggcatggggtctgtagacatccaggtagctgtggctgaggagaaagggcctctccaacatgacatcctcctgctgtgtcaccaacaacttgcaagcctctctcaagagctgcccccggcctgcctcggtctgttccagcggcgtgaactgccggcctgagctgtgcctgggctatgtctgccagcccatggcatgcctgccttcggtctgcctgcccaccaccttccggccagccagctgcctctccaaaacctatctatccagttcctgccaggcagccagtggcatctccggctccatgggccccggcagctggtacagcgaaggggccttcaatggcaatgagaaggaaaccatgcagttccttaacgaccgcctggccagctacctgacgagggtgcggcagctggagcaggagaatgcggagctggagagcaggatccaagaggcctctcactcccaggtgctcaccatgactcctgactaccagtctcatttcaggaccattgaggagctccagcagaagattctgtgtaccaaggcagagaatgccaggatggttgtgaacattgataatgccaaactggctgccgatgacttcagggccaagtacgaggcagagctggccatgcggcagctggtggaggccgacatcaatggcctgcgcaggatcctggatgatctcactctgtgcaaggctgacctggaggcccaggttgagtccctgaaggaggagctgatgtgcctcaaaaagaaccatgaggaggaagtcggttcccttcgatgccagcttggggaccgccttaacatcgaggtggacgctgcacccccggtggacctgaccagggtgctggaggagatgcggtgtcagtacgaggccatggtggaggccaaccgcagggacgtggaggaatggttcaatatgcagatggaggagcttaaccaacaggtggccacaagctctgagcagcttcagaactaccagtcagacatcattgacctgagacgcacggtcaacacgctggagatcgagctgcaggcccagcacagcctgagggactccctggaaaacacgctgacggagagtgaggcccgctacagctcccagctggcccagatgcagtgcatgatcaccaacgttgaggcccagctggctgagatccgggctgacctggagcggcagaaccaggagtaccaggtgctgctggacgtccgggcccggctggagggcgagatcaacacgtaccggagcctgctggagaacgaggactgcaagctgccctgtaacccatgctccactccttcctgcaccacctgtgtgccctccccatgcgtgccccgcaccgtctgtgtgccacgcactgttggcatgccttgctcaccctgcccccagggccgctactgaagtccctttgtgccagtggatcctggagggcctggggctgggcagcctggtattcagtggccaccagaagagcagggccagccccggtcagcaaggaagaccctgagcaggaccgtggatcacctgcaacaagctctgatactccaggggatacttaagccctcatcacttcaaaactgcctcttttttccatgggtgaactgttctctttggtgatgtttctggttgtctgtgctgcctcaaagagcgtgtgttcttagttaactggcaaatagagctgtactcagtggccttgcaaacatgtctgtctctgtttgtcacttacgctgctgcatccacaagccaatcctactcaattgggcttaagaggaacgtgggcaaattctgtatttatttttatgctccttctgcttccatagaggcttgagaggtgttcactaaaagggcccgcatgccataaaccagttaaaactaatcaattactctagagccaagtaataaaagaataaagagaggagggagataattatgccagaaacctaggccaaattactgtaattgagaatcatatcataataaacccacccctaaatctca

SEQ ID NO: 1665 - protein, 448 aa, Homo sapiens
MTSSCCVTNNLQASLKSCPRPASVCSSGVNCRPELCLGYVCQPMACLPSVCLPTTFRPASCLSKTYLSSSCQAASGISGSMGPGSWYSEGAFNGNEKETMQFLNDRLASYLTRVRQLEQENAELESRIQEASHSQVLTMTPDYQSHFRTIEELQQKILCTKAENARMVVNIDNAKLAADDFRAKYEAELAMRQLVEADINGLRRILDDLTLCKADLEAQVESLKEELMCLKKNHEEEVGSLRCQLGDRLNIEVDAAPPVDLTRVLEEMRCQYEAMVEANRRDVEEWFNMQMEELNQQVATSSEQLQNYQSDIIDLRRTVNTLEIELQAQHSLRDSLENTLTESEARYSSQLAQMQCMITNVEAQLAEIRADLERQNQEYQVLLDVRARLEGEINTYRSLLENEDCKLPCNPCSTPSCTTCVPSPCVPRTVCVPRTVGMPCSPCPQGRY

SEQ ID NO: 1666 - DNA, 1688 bp, Homo sapiens
ctggcctcagagacctatcaattgcatctgagttgcaggggccatggcttccaaatgcctcaaggccggcttctcttctgggtctctcaagagcccaggaggggccagtgggggctccactcgtgtgtccgcaatgtactccagcagctcttgcaagcttccaagtctctcccctgtggccagaagtttctctgcctgctcagtgggtctgggcagaagcagctacagggccaccagctgcctccctgctctctgcctccctgctggaggcttcgctaccagctacagtgggggtgggggctggtttggggagggcatcctcactggcaatgagaaggagaccatgcaatccctgaacgaccgcctggccggctacctggagaaggtgcgtcagctggagcaggagaacgccagcctggagagccgcatccgtgagtggtgtgagcagcaggtcccctacatgtgccctgactaccagtcctacttccggaccatcgaggagctccagaagaagactctatgcagcaaggctgagaatgccaggctggtggtggagattgacaatgccaaattggctgcagatgacttcaggaccaagtatgagacggaggtgtccctgcggcagctggtggagtcagacatcaacggcctgcgcaggatcctggatgacctgaccctgtgcaagtctgacctggaggcccaggtggagtccctgaaggaggagctgctctgcctgaagaagaaccatgaggaggaagtgaactcactgcgctgccaacttggtgaccgcctcaatgttgaggtggacgctgccccacctgttgacctgaaccgagttctggaggagatgaggtgccagtatgaaaccctggtggagaataaccgccgggatgctgaagactggttggacacccagagtgaggagctgaaccagcaggtggtgtccagctcagagcagttgcagtcctgccaggcagagatcatcgagctgagacgcacggtcaacgccctggagattgagctgcaggctcagcacagcatgagagatgctttggaatccaccctggcagagacggaggcccgctatagctcccagctggcccagatgcagtgcatgatcaccaacgtggaggcccagctggccgagatccgggctgacctggagcggcagaaccaggagtaccaggtgctgctggacgtccgggcccggctggagtgtgagatcaacacgtaccggggcctgctggagagtgaggacagcaagctcccctgtaacccatgtgcacctgactactcaccctccaagtcatgccttccctgtcttcctgcggcctcctgcggtcctagtgcagcccgcacaaactgcagcccccgccccatttgtgtgccctgcccagggggtcggttctgagagcggggtctggctgaaaaggctttctgcaaatacatgccctaaagtttctcagagcctgtcacaaaggccggctgcccccaaaggtctcaactcctcatcatttcaatgggtgccagggtctctgttctcaggctgcctcctgggtcaggttttccttctaggtgctgttccggtggattctgaaatgcagtagagggcttttgttggcagaacaataaagtgcatttgctcaggcccctgatgcctaacttgcaccaaaaaaaaaaaaaaaaaa

SEQ ID NO: 1667 - protein, 455 aa, Homo sapiens
MASKCLKAGFSSGSLKSPGGASGGSTRVSAMYSSSSCKLPSLSPVARSFSACSVGLGRSSYRATSCLPALCLPAGGFATSYSGGGGWFGEGILTGNEKETMQSLNDRLAGYLEKVRQLEQENASLESRIREWCEQQVPYMCPDYQSYFRTIEELQKKTLCSKAENARLVVEIDNAKLAADDFRTKYETEVSLRQLVESDINGLRRILDDLTLCKSDLEAQVESLKEELLCLKKNHEEEVNSLRCQLGDRLNVEVDAAPPVDLNRVLEEMRCQYETLVENNRRDAEDWLDTQSEELNQQVVSSSEQLQSCQAEIIELRRTVNALEIELQAQHSMRDALESTLAETEARYSSQLAQMQCMITNVEAQLAEIRADLERQNQEYQVLLDVRARLECEINTYRGLLESEDSKLPCNPCAPDYSPSKSCLPCLPAASCGPSAARTNCSPRPICVPCPGGRF

SEQ ID NO: 1668 - DNA, 1688 bp, Homo sapiens
atggccacccagacctgcacccctaccttctccactgggtctatcaagggcctctgtggcacagcaggcggcatctctcgggtgtcctccatccgttctgtgggctcctgcagggtccccagtctcgccggtgctgcagggtacatctcttctgctaggtcgggcctctctggccttgggagctgcttgcctggctcctacctgtcttctgagtgccacacctctggctttgtggggagcgggggctggttctgcgagggctccttcaacggcagcgagaaggagactatgcagttcctgaacgaccgcctggccaactacctggagaaggtgcgtcagctggagcgggagaacgcggagctggagagccgcatccaggagtggtacgagtttcagatcccatacatctgcccagactaccagtcctacttcaagaccatcgaagatttccagcagaagatcctgctgactaagtctgagaatgccaggctggtcctgcagattgataatgccaagctggctgctgacgacttccggaccaagtatgagacagagctgtctctgcggcagctagtggaggccgacatcaacggcctgcgtaggatcctggatgagctgaccctgtgcaaggctgacctggaggctcaggtggagtccctgaaggaggagctgatgtgcctcaagaagaatcacgaggaggaagtcagtgtactccgttgccaacttggggaccgactgaatgtggaggtggacgctgctcccccagtggatctcaacaagatcctggaggatatgagatgccagtacgaggccctggtggagaataaccgcagagatgtggaggcctggttcaacacccagactgaggagctgaaccagcaggtggtgtccagctcggagcagctgcagtgctgccagacggagatcatcgagctgagacgtacggtcaacgcgctagagattgagctgcaggctcagcacagcatgcggaattccttggaatccaccctggccgaaaccgaggcccgctacagctcccagctggcccagatgcagtgcctgatcagcaacgtggaggcccagctgtctgagatccgctgcgacctggagcggcagaaccaggagtaccaggtgttactggacgtcaaggcccggctggagggcgagatcgctacctaccgccacctgctggagggagaggactgcaagcttcctccccaaccttgtgccacggcatgcaagcctgttattagagttccttctgtccccccggtgccctgtgtcccctctgtgccctgcaccccggctccccaggttggcactcagatccgcaccatcaccgaggagatcagagatgggaaagtcatctcctccagggagcacgtgcagtcccgcccgctgtgacagcccacttggtccaccagggcagggccctgaccacaggaaggaggacacccctgtggctcctggaggcttaacgaccctgcccttctctagaggggtccccctacgcttagcaggtttttctaccaaaacactccccgtattgtgtttccggacttaactgtgcttttacgccatgcaaaaccaggtttcctggaaatttacccaataaagtgtgttctcctggcatagcaaactcaaaaaaaaaaaaaaaaaaaaaaaaaaaaaaaaaaaaaaaaaaaaaa

SEQ ID NO: 1669 - protein, 467 aa, Homo sapiens
MATQTCTPTFSTGSIKGLCGTAGGISRVSSIRSVGSCRVPSLAGAAGYISSARSGLSGLGSCLPGSYLSSECHTSGFVGSGGWFCEGSFNGSEKETMQFLNDRLANYLEKVRQLERENAELESRIQEWYEFQIPYICPDYQSYFKTIEDFQQKILLTKSENARLVLQIDNAKLAADDFRTKYETELSLRQLVEADINGLRRILDELTLCKADLEAQVESLKEELMCLKKNHEEEVSVLRCQLGDRLNVEVDAAPPVDLNKILEDMRCQYEALVENNRRDVEAWFNTQTEELNQQVVSSSEQLQCCQTEIIELRRTVNALEIELQAQHSMRNSLESTLAETEARYSSQLAQMQCLISNVEAQLSEIRCDLERQNQEYQVLLDVKARLEGEIATYRHLLEGEDCKLPPQPCATACKPVIRVPSVPPVPCVPSVPCTPAPQVGTQIRTITEEIRDGKVISSREHVQSRPL

SEQ ID NO: 1670 - DNA, 1693 bp, Homo sapiens
cacagtcctcggcccaggccaagcaagcttctatctgcacctgctctcaatcctgctctcaccatgagcctccgcctgcagagctcctctgccagctatggaggtggtttcgggggtggctcttgccagctgggaggaggccgtggtgtctctacctgttcaactcggtttgtgtctgggggatcagctgggggctatggaggcggcgtgagctgtggttttggtggaggggctggtagtggctttggaggtggctatggaggtggccttggaggtggctatggaggtggccttggaggtggctttggtgggggttttgctggtggctttgttgactttggtgcttgtgatggcggcctcctcactggcaatgagaagatcaccatgcagaacctcaacgaccgcctggcttcctacctggagaaggtgcgcgccctggaggaggccaacgctgacctggaggtgaagatccgtgactggcacctgaagcagagcccagctagccctgagcgggactacagcccctactacaagaccattgaagagctccgggacaagatcctgaccgccaccattgaaaacaaccgggtcatcctggagattgacaatgccaggctggctgcggacgacttcaggctcaagtatgagaatgagctggccctgcgccagagcgtggaggccgacatcaacggcctgcgccgggtgctggatgagctcactctgtctaagactgacctggagatgcagatcgagagcctgaatgaagagctagcctacatgaagaagaaccatgaagaggagatgaaggaatttagcaaccaggtggtcggccaggtcaacgtggagatggatgccaccccaggcattgacctgacccgcgtgctggcagagatgagggagcagtacgaggccatggcagagaggaaccgccgggatgctgaggaatggttccacgccaagagtgcagagctgaacaaggaggtgtctaccaacactgccatgattcagaccagcaagacagagatcacggagctcaggcgcacgctccaaggcctggagattgagctgcagtcccagctgagcatgaaagcggggctggagaacacggtggcagagacggagtgccgctatgccctgcagctgcagcagatccagggactcatcagcagcatcgaggcccagctgagcgagctccgcagtgagatggagtgccagaaccaagagtacaagatgctgctggacatcaagacacgtctggagcaggagatcgccacctaccgcagcctgctcgagggccaggacgccaagaagcgtcagcccccgtagcacctctgttaccacgacttctagtgcctctgttaccaccacctctaatgcctctggtcgccgcacttctgatgtccgtaggccttaaatctgcctggcgtcccctccctctgtcttcagcacccagaggaggagagagccggcagttccctgcaggagagaggaggggctgctggacccaaggctcagtccctctgctctcaggaccccctgtcctgactctctcctgatggtgggccctctgtgctcttctcttccggtcggatctctctcctctctgacctggatacgctttggtttctcaacttctctaccccaaagaaaagattattcaataaagtttcctgcctttctgcaaacataaaaa

SEQ ID NO: 1671 - protein, 420 aa, Homo sapiens
MSLRLQSSSASYGGGFGGGSCQLGGGRGVSTCSTRFVSGGSAGGYGGGVSCGFGGGAGSGFGGGYGGGLGGGYGGGLGGGFGGGFAGGFVDFGACDGGLLTGNEKITMQNLNDRLASYLEKVRALEEANADLEVKIRDWHLKQSPASPERDYSPYYKTIEELRDKILTATIENNRVILEIDNARLAADDFRLKYENELALRQSVEADINGLRRVLDELTLSKTDLEMQIESLNEELAYMKKNHEEEMKEFSNQVVGQVNVEMDATPGIDLTRVLAEMREQYEAMAERNRRDAEEWFHAKSAELNKEVSTNTAMIQTSKTEITELRRTLQGLEIELQSQLSMKAGLENTVAETECRYALQLQQIQGLISSIEAQLSELRSEMECQNQEYKMLLDIKTRLEQEIATYRSLLEGQDAKKRQPP

SEQ ID NO: 1672 - DNA, 1719 bp, Homo sapiens
cacagtcctcggcccaggccaagcaagcttctatctgcacctgctctcaatcctgctctcaccatgagcctccgcctgcagagctcctctgccagctatggaggtggtttcgggggtggctcttgccagctgggaggaggccgtggtgtctctacctgttcaactcggtttgtgtctgggggatcagctgggggctatggaggcggcgtgagctgtggttttggtggaggggctggtagtggctttggaggtggctatggaggtggccttggaggtggctatggaggtggccttggaggtggctttggtgggggttttgctggtggctttgttgactttggtgcttgtgatggcggcctcctcactggcaatgagaagatcaccatgcagaacctcaacgaccgcctggcttcctacctggagaaggtgcgcgccctggaggaggccaacgctgacctggaggtgaagatccgtgactggcacctgaagcagagcccagctagccctgagcgggactacagcccctactacaagaccattgaagagctccgggacaagatcctgaccgccaccattgaaaacaaccgggtcatcctggagattgacaatgccaggctggctgcggacgacttcaggctcaagtatgagaatgagctggccctgcgccagagcgtggaggccgacatcaacggcctgcgccgggtgctggatgagctcactctgtctaagactgacctggagatgcagatcgagagcctgaatgaagagctagcctacatgaagaagaaccatgaagaggagatgaaggaatttagcaaccaggtggtcggccaggtcaacgtggagatggatgccaccccaggcattgacctgacccgcgtgctggcagagatgagggagcagtacgaggccatggcagagaggaaccgccgggatgctgaggaatggttccacgccaagagtgcagagctgaacaaggaggtgtctaccaacactgccatgattcagaccagcaagacagagatcacggagctcaggcgcacgctccaaggcctggagattgagctgcagtcccagctgagcatgaaagcggggctggagaacacggtggcagagacggagtgccgctatgccctgcagctgcagcagatccagggactcatcagcagcatcgaggcccagctgagcgagctccgcagtgagatggagtgccagaaccaagagtacaagatgctgctggacatcaagacacgtctggagcaggagatcgccacctaccgcagcctgctcgagggccaggacgccaagatgattggtttcccttcctcagcaggaagcgtcagcccccgtagcacctctgttaccacgacttctagtgcctctgttaccaccacctctaatgcctctggtcgccgcacttctgatgtccgtaggccttaaatctgcctggcgtcccctccctctgtcttcagcacccagaggaggagagagccggcagttccctgcaggagagaggaggggctgctggacccaaggctcagtccctctgctctcaggaccccctgtcctgactctctcctgatggtgggccctctgtgctcttctcttccggtcggatctctctcctctctgacctggatacgctttggtttctcaacttctctaccccaaagaaaagattattcaataaagtttcctgcctttctgcaaacataaaaa

SEQ ID NO: 1673 - protein, 458 aa, Homo sapiens
MSLRLQSSSASYGGGFGGGSCQLGGGRGVSTCSTRFVSGGSAGGYGGGVSCGFGGGAGSGFGGGYGGGLGGGYGGGLGGGFGGGFAGGFVDFGACDGGLLTGNEKITMQNLNDRLASYLEKVRALEEANADLEVKIRDWHLKQSPASPERDYSPYYKTIEELRDKILTATIENNRVILEIDNARLAADDFRLKYENELALRQSVEADINGLRRVLDELTLSKTDLEMQIESLNEELAYMKKNHEEEMKEFSNQVVGQVNVEMDATPGIDLTRVLAEMREQYEAMAERNRRDAEEWFHAKSAELNKEVSTNTAMIQTSKTEITELRRTLQGLEIELQSQLSMKAGLENTVAETECRYALQLQQIQGLISSIEAQLSELRSEMECQNQEYKMLLDIKTRLEQEIATYRSLLEGQDAKMIGFPSSAGSVSPRSTSVTTTSSASVTTTSNASGRRTSDVRRP

SEQ ID NO: 1674 - DNA, 1709 bp, Homo sapiens
ggtacctcctgccagcatctcttgggtttgctgagaactcacgggctccagctacctggccatgaccaccacatttctgcaaacttcttcctccacctttgggggtggctcaacccgagggggttccctcctggctgggggaggtggctttggtggggggagtctctctgggggaggtggaagccgaagtatctcagcttcttctgctaggtttgtctcttcagggtcaggaggaggatatgggggtggcatgagggtctgtggctttggtggaggggctggtagtgttttcggtggaggctttggagggggcgttggtgggggttttggtggtggctttggtggtggcgatggtggtctcctctctggcaatgagaaaattaccatgcagaacctcaatgaccgcctggcctcctacctggacaaggtacgtgccctggaggaggccaatgctgacctggaggtgaagatccatgactggtaccagaagcagaccccaaccagcccagaatgcgactacagccaatacttcaagaccattgaagagctccgggacaagatcatggccaccaccatcgacaactcccgggtcatcctggagatcgacaatgccaggctggctgcggacgacttcaggctcaagtatgagaatgagctggccctgcgccagggcgttgaggctgacatcaacggcttgcgccgagtcctggatgagctgaccctggccaggactgacctggagatgcagatcgagggcctgaatgaggagctagcctacctgaagaagaaccacgaagaggagatgaaggagttcagcagccagctggccggccaggtcaatgtggagatggacgcagcaccgggtgtggacctgacccgtgtgctggcagagatgagggagcagtacgaggccatggcggagaagaaccgccgggatgtcgaggcctggttcttcagcaagactgaggagctgaacaaagaggtggcctccaacacagaaatgatccagaccagcaagacggagatcacagacctgagacgcacgatgcaggagctggagatcgagctgcagtcccagctcagcatgaaagctgggctggagaactcactggccgagacagagtgccgctatgccacgcagctgcagcagatccaggggctcattggtggcctggaggcccagctgagtgagctccgatgcgagatggaggctcagaaccaggagtacaagatgctgcttgacataaagacacggctggagcaggagatcgctacttaccgcagcctgctcgagggccaggatgccaagatggctggcattggcatcagggaagcctcttcaggaggtggtggtagcagcagcaatttccacatcaatgtagaagagtcagtggatggacaggtggtttcttcccacaagagagaaatctaagtgtctattgcaggagaaacgtcccttgccactccccactctcatcaggccaagtggaggactggccagagggcctgcacatgcaaactccagtccctgccttcagagagctgaaaagggtccctcggtcttttatttcagggctttgcatgcgctctattccccctctgcctctccccaccttctttggagcaaggagatgcagctgtattgtgtaacaagctcatttgtacagtgtctgttcatgtaataaagaattacttttccttttgcaaat

SEQ ID NO: 1675 - protein, 456 aa, Homo sapiens
MTTTFLQTSSSTFGGGSTRGGSLLAGGGGFGGGSLSGGGGSRSISASSARFVSSGSGGGYGGGMRVCGFGGGAGSVFGGGFGGGVGGGFGGGFGGGDGGLLSGNEKITMQNLNDRLASYLDKVRALEEANADLEVKIHDWYQKQTPTSPECDYSQYFKTIEELRDKIMATTIDNSRVILEIDNARLAADDFRLKYENELALRQGVEADINGLRRVLDELTLARTDLEMQIEGLNEELAYLKKNHEEEMKEFSSQLAGQVNVEMDAAPGVDLTRVLAEMREQYEAMAEKNRRDVEAWFFSKTEELNKEVASNTEMIQTSKTEITDLRRTMQELEIELQSQLSMKAGLENSLAETECRYATQLQQIQGLIGGLEAQLSELRCEMEAQNQEYKMLLDIKTRLEQEIATYRSLLEGQDAKMAGIGIREASSGGGGSSSNFHINVEESVDGQVVSSHKREI

SEQ ID NO: 1676 - DNA, 3105 bp, Homo sapiens
ggggaggaggccgcgcggggtggggtctggcggtacgcgctggctgcgtcgacgtgctgacgccatgacgccccggctggtgtgtgtcggtgtgtatgtgtgtgtgtgagtgtgcgcgctccgagtgtgtgtgtatttgtgtatcggcggtcccgcaggtcccggatgttgcggacagtatgaggcaagcgcagggggacggggaccagcagctgtcgccgccgctctcagatcgagtcttgctctgtcacccaggctggagtgcagtggcgcgatctcagctcactgccacctttgcctcctgggttcaagcgattcttctgcctcagcctcccgagtagctgggattacaggctctgggaaccacccttctactttctgtctctaggaatttcactactctagggtgaagagggaacagaaatctttgccccctgactttggaaatctcgtttaaccttcaaactggcgatgtcaagggttccaagtcctccacctccggcagaaatgtcgagtggccccgtagctgagagttggtgctacacacagatcaaggtagtgaaattctcctacatgtggaccatcaataactttagcttttgccgggaggaaatgggtgaagtcattaaaagttctacattttcatcaggagcaaatgataaactgaaatggtgtttgcgagtaaaccccaaagggttagatgaagaaagcaaagattacctgtcactttacctgttactggtcagctgtccaaagagtgaagttcgggcaaaattcaaattctccatcctgaatgccaagggagaagaaaccaaagctatggagagtcaacgggcatataggtttgtgcaaggcaaagactggggattcaagaaattcatccgtagagattttcttttggatgaggccaacgggcttctccctgatgacaagcttaccctcttctgcgaggtgagtgttgtgcaagattctgtcaacatttctggccagaataccatgaacatggtaaaggttcctgagtgccggctggcagatgagttaggaggactgtgggagaattcccggttcacagactgctgcttgtgtgttgccggccaggaattccaggctcacaaggctatcttagcagctcgttctccggtttttagtgccatgtttgaacatgaaatggaggagagcaaaaagaatcgagttgaaatcaatgatgtggagcctgaagtttttaaggaaatgatgtgcttcatttacacggggaaggctccaaacctcgacaaaatggctgatgatttgctggcagctgctgacaagtatgccctggagcgcttaaaggtcatgtgtgaggatgccctctgcagtaacctgtccgtggagaacgctgcagaaattctcatcctggccgacctccacagtgcagatcagttgaaaactcaggcagtggatttcatcaactatcatgcttcggatgtcttggagacctctgggtggaagtcaatggtggtgtcacatccccacttggtggctgaggcataccgctctctggcttcagcacagtgcccttttctgggacccccacgcaaacgcctgaagcaatcctaagatcctgcttgttgtaagactccgtttaatttccagaagcagcagccactgttgctgccactgaccaccaggtagacagcgcaatctgtggagcttttactctgttgtgaggggaagagactgcattgtggccccagacttttaaaacagcactaaataacttgggggaaacggggggagggaaaatgaaatgaaaaccctgttgctgcgtcactgtgttccctttggcctggctgagtttgatactgtggggattcagtttaggcgctggcccgaggatatcccagcggtggtacttcggagacacctgtctgcatctgactgagcagaacaaatcgtcaggtgcctggagcaaaaaggaaaaaaaaaaaagaaaggacattgagttttaacagaagggaaaaggaaagaagaaaagatttttgcagaatttctcaaaaatcagtttgtggattccagtagtatttatattgagagaaacaaattttagtccttctaactgtgctaaaacttggatatttgtgaaaactccttaccaccatacaagcatcagaagagctctcttgttgttagcacttattgtttgcaagaacagaatacatccttttatccttttatgaaaaatgacaagtgaaggcaaaaggggaaggttatttgatctggaagatgagtgttctgatgtggtggcttttgcaaaaatctttattggtgttgaaaactggaaaaaataactcatccagaattcatattgtcttgacaagaactatggttctctgtttttagatattgtggaaaatgtttttgggcatttttctctgattttatttcttctcccccacccctttttctaaaaaacaaacaaaaaaaaaaacacacaaaacaaaaacagaacaaaagaagagagaaggaaattttatcaattaaaaatgctgtgtgataaaatcccagcccagattgctcagctgtttgtacctgacttgccgcctgcataggagccagttctgttccttctgactagcccctcttcctccaggggagaacttccaaatgttaatttttttttttttgaaaatataaataattactattttgtactgtgtggtatctctggtcttttgtttcactcacctgccttgtctcttgggtctgagtcccttgcttaagggattttgaagtcctagttttcagcttgcagagattatgtctgaaatgcctaatgagtcgcagggatttgttgagactccgtaatctcaagttctctttgtgagctatcagcatctgccagtctcttgtcctccctgagtatctcacagtccatatcctgatgagggatcaggcccctacctctgccaaggcaagtaatggtagtgggcttttaaactgccccccgtatgttttaagacctaatccccacctcccttcttctaactaaatataaaaagatccaggggacataaatgtggagattaaataaagggaaattattgtctctaaaaaaaaaaaaaaaaa

SEQ ID NO: 1677 - protein, 374 aa, Homo sapiens
MSRVPSPPPPAEMSSGPVAESWCYTQIKVVKFSYMWTINNFSFCREEMGEVIKSSTFSSGANDKLKWCLRVNPKGLDEESKDYLSLYLLLVSCPKSEVRAKFKFSILNAKGEETKAMESQRAYRFVQGKDWGFKKFIRRDFLLDEANGLLPDDKLTLFCEVSVVQDSVNISGQNTMNMVKVPECRLADELGGLWENSRFTDCCLCVAGQEFQAHKAILAARSPVFSAMFEHEMEESKKNRVEINDVEPEVFKEMMCFIYTGKAPNLDKMADDLLAAADKYALERLKVMCEDALCSNLSVENAAEILILADLHSADQLKTQAVDFINYHASDVLETSGWKSMVVSHPHLVAEAYRSLASAQCPFLGPPRKRLKQS

SEQ ID NO: 1678 - DNA, 2983 bp, Homo sapiens
ggggaggaggccgcgcggggtggggtctggcggtacgcgctggctgcgtcgacgtgctgacgccatgacgccccggctggtgtgtgtcggtgtgtatgtgtgtgtgtgagtgtgcgcgctccgagtgtgtgtgtatttgtgtatcggcggtcccgcaggtcccggatgttgcggacagtatgaggcaagcgcagggggacggggaccagcagctgtcgccgccgctctcaggctctgggaaccacccttctactttctgtctctaggaatttcactactctagggtgaagagggaacagaaatctttgccccctgactttggaaatctcgtttaaccttcaaactggcgatgtcaagggttccaagtcctccacctccggcagaaatgtcgagtggccccgtagctgagagttggtgctacacacagatcaaggtagtgaaattctcctacatgtggaccatcaataactttagcttttgccgggaggaaatgggtgaagtcattaaaagttctacattttcatcaggagcaaatgataaactgaaatggtgtttgcgagtaaaccccaaagggttagatgaagaaagcaaagattacctgtcactttacctgttactggtcagctgtccaaagagtgaagttcgggcaaaattcaaattctccatcctgaatgccaagggagaagaaaccaaagctatggagagtcaacgggcatataggtttgtgcaaggcaaagactggggattcaagaaattcatccgtagagattttcttttggatgaggccaacgggcttctccctgatgacaagcttaccctcttctgcgaggtgagtgttgtgcaagattctgtcaacatttctggccagaataccatgaacatggtaaaggttcctgagtgccggctggcagatgagttaggaggactgtgggagaattcccggttcacagactgctgcttgtgtgttgccggccaggaattccaggctcacaaggctatcttagcagctcgttctccggtttttagtgccatgtttgaacatgaaatggaggagagcaaaaagaatcgagttgaaatcaatgatgtggagcctgaagtttttaaggaaatgatgtgcttcatttacacggggaaggctccaaacctcgacaaaatggctgatgatttgctggcagctgctgacaagtatgccctggagcgcttaaaggtcatgtgtgaggatgccctctgcagtaacctgtccgtggagaacgctgcagaaattctcatcctggccgacctccacagtgcagatcagttgaaaactcaggcagtggatttcatcaactatcatgcttcggatgtcttggagacctctgggtggaagtcaatggtggtgtcacatccccacttggtggctgaggcataccgctctctggcttcagcacagtgcccttttctgggacccccacgcaaacgcctgaagcaatcctaagatcctgcttgttgtaagactccgtttaatttccagaagcagcagccactgttgctgccactgaccaccaggtagacagcgcaatctgtggagcttttactctgttgtgaggggaagagactgcattgtggccccagacttttaaaacagcactaaataacttgggggaaacggggggagggaaaatgaaatgaaaaccctgttgctgcgtcactgtgttccctttggcctggctgagtttgatactgtggggattcagtttaggcgctggcccgaggatatcccagcggtggtacttcggagacacctgtctgcatctgactgagcagaacaaatcgtcaggtgcctggagcaaaaaggaaaaaaaaaaaagaaaggacattgagttttaacagaagggaaaaggaaagaagaaaagatttttgcagaatttctcaaaaatcagtttgtggattccagtagtatttatattgagagaaacaaattttagtccttctaactgtgctaaaacttggatatttgtgaaaactccttaccaccatacaagcatcagaagagctctcttgttgttagcacttattgtttgcaagaacagaatacatccttttatccttttatgaaaaatgacaagtgaaggcaaaaggggaaggttatttgatctggaagatgagtgttctgatgtggtggcttttgcaaaaatctttattggtgttgaaaactggaaaaaataactcatccagaattcatattgtcttgacaagaactatggttctctgtttttagatattgtggaaaatgtttttgggcatttttctctgattttatttcttctcccccacccctttttctaaaaaacaaacaaaaaaaaaaacacacaaaacaaaaacagaacaaaagaagagagaaggaaattttatcaattaaaaatgctgtgtgataaaatcccagcccagattgctcagctgtttgtacctgacttgccgcctgcataggagccagttctgttccttctgactagcccctcttcctccaggggagaacttccaaatgttaatttttttttttttgaaaatataaataattactattttgtactgtgtggtatctctggtcttttgtttcactcacctgccttgtctcttgggtctgagtcccttgcttaagggattttgaagtcctagttttcagcttgcagagattatgtctgaaatgcctaatgagtcgcagggatttgttgagactccgtaatctcaagttctctttgtgagctatcagcatctgccagtctcttgtcctccctgagtatctcacagtccatatcctgatgagggatcaggcccctacctctgccaaggcaagtaatggtagtgggcttttaaactgccccccgtatgttttaagacctaatccccacctcccttcttctaactaaatataaaaagatccaggggacataaatgtggagattaaataaagggaaattattgtctctaaaaaaaaaaaaaaaaa

SEQ ID NO: 1679 - protein, 374 aa, Homo sapiens; identical to SEQ ID NO: 1677

SEQ ID NO: 1680 - DNA, 2931 bp, Homo sapiens
ggggaggaggccgcgcggggtggggtctggcggtacgcgctggctgcgtcgacgtgctgacgccatgacgccccggctggtgtgtgtcggtgtgtatgtgtgtgtgtgagtgtgcgcgctccgagtgtgtgtgtatttgtgtatcggcggtcccgcaggtcccggatgttgcggacagtatgaggcaagcgcagggggacggggaccagcagctgtcgccgccgctctcagggtgaagagggaacagaaatctttgccccctgactttggaaatctcgtttaaccttcaaactggcgatgtcaagggttccaagtcctccacctccggcagaaatgtcgagtggccccgtagctgagagttggtgctacacacagatcaaggtagtgaaattctcctacatgtggaccatcaataactttagcttttgccgggaggaaatgggtgaagtcattaaaagttctacattttcatcaggagcaaatgataaactgaaatggtgtttgcgagtaaaccccaaagggttagatgaagaaagcaaagattacctgtcactttacctgttactggtcagctgtccaaagagtgaagttcgggcaaaattcaaattctccatcctgaatgccaagggagaagaaaccaaagctatggagagtcaacgggcatataggtttgtgcaaggcaaagactggggattcaagaaattcatccgtagagattttcttttggatgaggccaacgggcttctccctgatgacaagcttaccctcttctgcgaggtgagtgttgtgcaagattctgtcaacatttctggccagaataccatgaacatggtaaaggttcctgagtgccggctggcagatgagttaggaggactgtgggagaattcccggttcacagactgctgcttgtgtgttgccggccaggaattccaggctcacaaggctatcttagcagctcgttctccggtttttagtgccatgtttgaacatgaaatggaggagagcaaaaagaatcgagttgaaatcaatgatgtggagcctgaagtttttaaggaaatgatgtgcttcatttacacggggaaggctccaaacctcgacaaaatggctgatgatttgctggcagctgctgacaagtatgccctggagcgcttaaaggtcatgtgtgaggatgccctctgcagtaacctgtccgtggagaacgctgcagaaattctcatcctggccgacctccacagtgcagatcagttgaaaactcaggcagtggatttcatcaactatcatgcttcggatgtcttggagacctctgggtggaagtcaatggtggtgtcacatccccacttggtggctgaggcataccgctctctggcttcagcacagtgcccttttctgggacccccacgcaaacgcctgaagcaatcctaagatcctgcttgttgtaagactccgtttaatttccagaagcagcagccactgttgctgccactgaccaccaggtagacagcgcaatctgtggagcttttactctgttgtgaggggaagagactgcattgtggccccagacttttaaaacagcactaaataacttgggggaaacggggggagggaaaatgaaatgaaaaccctgttgctgcgtcactgtgttccctttggcctggctgagtttgatactgtggggattcagtttaggcgctggcccgaggatatcccagcggtggtacttcggagacacctgtctgcatctgactgagcagaacaaatcgtcaggtgcctggagcaaaaaggaaaaaaaaaaaagaaaggacattgagttttaacagaagggaaaaggaaagaagaaaagatttttgcagaatttctcaaaaatcagtttgtggattccagtagtatttatattgagagaaacaaattttagtccttctaactgtgctaaaacttggatatttgtgaaaactccttaccaccatacaagcatcagaagagctctcttgttgttagcacttattgtttgcaagaacagaatacatccttttatccttttatgaaaaatgacaagtgaaggcaaaaggggaaggttatttgatctggaagatgagtgttctgatgtggtggcttttgcaaaaatctttattggtgttgaaaactggaaaaaataactcatccagaattcatattgtcttgacaagaactatggttctctgtttttagatattgtggaaaatgtttttgggcatttttctctgattttatttcttctcccccacccctttttctaaaaaacaaacaaaaaaaaaaacacacaaaacaaaaacagaacaaaagaagagagaaggaaattttatcaattaaaaatgctgtgtgataaaatcccagcccagattgctcagctgtttgtacctgacttgccgcctgcataggagccagttctgttccttctgactagcccctcttcctccaggggagaacttccaaatgttaatttttttttttttgaaaatataaataattactattttgtactgtgtggtatctctggtcttttgtttcactcacctgccttgtctcttgggtctgagtcccttgcttaagggattttgaagtcctagttttcagcttgcagagattatgtctgaaatgcctaatgagtcgcagggatttgttgagactccgtaatctcaagttctctttgtgagctatcagcatctgccagtctcttgtcctccctgagtatctcacagtccatatcctgatgagggatcaggcccctacctctgccaaggcaagtaatggtagtgggcttttaaactgccccccgtatgttttaagacctaatccccacctcccttcttctaactaaatataaaaagatccaggggacataaatgtggagattaaataaagggaaattattgtctctaaaaaaaaaaaaaaaaa

SEQ ID NO: 1681 - protein, 374 aa, Homo sapiens; identical to SEQ ID NO: 1677

SEQ ID NO: 1682 - DNA, 2982 bp, Homo sapiens
ggggaggaggccgcgcggggtggggtctggcggtacgcgctggctgcgtcgacgtgctgacgccatgacgccccggctggtgtgtgtcggtgtgtatgtgtgtgtgtgagtgtgcgcgctccgagtgtgtgtgtatttgtgtatcggcggtcccgcaggtcccggatgttgcggacagtatgaggcaagcgcagggggacggggaccagcagctgtcgccgccgctctcagagatttcctgttagacaagacaaattagagttttcctactgacttaacttgggtgaagagggaacagaaatctttgccccctgactttggaaatctcgtttaaccttcaaactggcgatgtcaagggttccaagtcctccacctccggcagaaatgtcgagtggccccgtagctgagagttggtgctacacacagatcaaggtagtgaaattctcctacatgtggaccatcaataactttagcttttgccgggaggaaatgggtgaagtcattaaaagttctacattttcatcaggagcaaatgataaactgaaatggtgtttgcgagtaaaccccaaagggttagatgaagaaagcaaagattacctgtcactttacctgttactggtcagctgtccaaagagtgaagttcgggcaaaattcaaattctccatcctgaatgccaagggagaagaaaccaaagctatggagagtcaacgggcatataggtttgtgcaaggcaaagactggggattcaagaaattcatccgtagagattttcttttggatgaggccaacgggcttctccctgatgacaagcttaccctcttctgcgaggtgagtgttgtgcaagattctgtcaacatttctggccagaataccatgaacatggtaaaggttcctgagtgccggctggcagatgagttaggaggactgtgggagaattcccggttcacagactgctgcttgtgtgttgccggccaggaattccaggctcacaaggctatcttagcagctcgttctccggtttttagtgccatgtttgaacatgaaatggaggagagcaaaaagaatcgagttgaaatcaatgatgtggagcctgaagtttttaaggaaatgatgtgcttcatttacacggggaaggctccaaacctcgacaaaatggctgatgatttgctggcagctgctgacaagtatgccctggagcgcttaaaggtcatgtgtgaggatgccctctgcagtaacctgtccgtggagaacgctgcagaaattctcatcctggccgacctccacagtgcagatcagttgaaaactcaggcagtggatttcatcaactatcatgcttcggatgtcttggagacctctgggtggaagtcaatggtggtgtcacatccccacttggtggctgaggcataccgctctctggcttcagcacagtgcccttttctgggacccccacgcaaacgcctgaagcaatcctaagatcctgcttgttgtaagactccgtttaatttccagaagcagcagccactgttgctgccactgaccaccaggtagacagcgcaatctgtggagcttttactctgttgtgaggggaagagactgcattgtggccccagacttttaaaacagcactaaataacttgggggaaacggggggagggaaaatgaaatgaaaaccctgttgctgcgtcactgtgttccctttggcctggctgagtttgatactgtggggattcagtttaggcgctggcccgaggatatcccagcggtggtacttcggagacacctgtctgcatctgactgagcagaacaaatcgtcaggtgcctggagcaaaaaggaaaaaaaaaaaagaaaggacattgagttttaacagaagggaaaaggaaagaagaaaagatttttgcagaatttctcaaaaatcagtttgtggattccagtagtatttatattgagagaaacaaattttagtccttctaactgtgctaaaacttggatatttgtgaaaactccttaccaccatacaagcatcagaagagctctcttgttgttagcacttattgtttgcaagaacagaatacatccttttatccttttatgaaaaatgacaagtgaaggcaaaaggggaaggttatttgatctggaagatgagtgttctgatgtggtggcttttgcaaaaatctttattggtgttgaaaactggaaaaaataactcatccagaattcatattgtcttgacaagaactatggttctctgtttttagatattgtggaaaatgtttttgggcatttttctctgattttatttcttctcccccacccctttttctaaaaaacaaacaaaaaaaaaaacacacaaaacaaaaacagaacaaaagaagagagaaggaaattttatcaattaaaaatgctgtgtgataaaatcccagcccagattgctcagctgtttgtacctgacttgccgcctgcataggagccagttctgttccttctgactagcccctcttcctccaggggagaacttccaaatgttaatttttttttttttgaaaatataaataattactattttgtactgtgtggtatctctggtcttttgtttcactcacctgccttgtctcttgggtctgagtcccttgcttaagggattttgaagtcctagttttcagcttgcagagattatgtctgaaatgcctaatgagtcgcagggatttgttgagactccgtaatctcaagttctctttgtgagctatcagcatctgccagtctcttgtcctccctgagtatctcacagtccatatcctgatgagggatcaggcccctacctctgccaaggcaagtaatggtagtgggcttttaaactgccccccgtatgttttaagacctaatccccacctcccttcttctaactaaatataaaaagatccaggggacataaatgtggagattaaataaagggaaattattgtctctaaaaaaaaaaaaaaaaa

SEQ ID NO: 1683 - protein, 374 aa, Homo sapiens; identical to SEQ ID NO: 1677

SEQ ID NO: 1684 - DNA, 3034 bp, Homo sapiens
ggggaggaggccgcgcggggtggggtctggcggtacgcgctggctgcgtcgacgtgctgacgccatgacgccccggctggtgtgtgtcggtgtgtatgtgtgtgtgtgagtgtgcgcgctccgagtgtgtgtgtatttgtgtatcggcggtcccgcaggtcccggatgttgcggacagtatgaggcaagcgcagggggacggggaccagcagctgtcgccgccgctctcaggctctgggaaccacccttctactttctgtctctaggaatttcactactctagagatttcctgttagacaagacaaattagagttttcctactgacttaacttgggtgaagagggaacagaaatctttgccccctgactttggaaatctcgtttaaccttcaaactggcgatgtcaagggttccaagtcctccacctccggcagaaatgtcgagtggccccgtagctgagagttggtgctacacacagatcaaggtagtgaaattctcctacatgtggaccatcaataactttagcttttgccgggaggaaatgggtgaagtcattaaaagttctacattttcatcaggagcaaatgataaactgaaatggtgtttgcgagtaaaccccaaagggttagatgaagaaagcaaagattacctgtcactttacctgttactggtcagctgtccaaagagtgaagttcgggcaaaattcaaattctccatcctgaatgccaagggagaagaaaccaaagctatggagagtcaacgggcatataggtttgtgcaaggcaaagactggggattcaagaaattcatccgtagagattttcttttggatgaggccaacgggcttctccctgatgacaagcttaccctcttctgcgaggtgagtgttgtgcaagattctgtcaacatttctggccagaataccatgaacatggtaaaggttcctgagtgccggctggcagatgagttaggaggactgtgggagaattcccggttcacagactgctgcttgtgtgttgccggccaggaattccaggctcacaaggctatcttagcagctcgttctccggtttttagtgccatgtttgaacatgaaatggaggagagcaaaaagaatcgagttgaaatcaatgatgtggagcctgaagtttttaaggaaatgatgtgcttcatttacacggggaaggctccaaacctcgacaaaatggctgatgatttgctggcagctgctgacaagtatgccctggagcgcttaaaggtcatgtgtgaggatgccctctgcagtaacctgtccgtggagaacgctgcagaaattctcatcctggccgacctccacagtgcagatcagttgaaaactcaggcagtggatttcatcaactatcatgcttcggatgtcttggagacctctgggtggaagtcaatggtggtgtcacatccccacttggtggctgaggcataccgctctctggcttcagcacagtgcccttttctgggacccccacgcaaacgcctgaagcaatcctaagatcctgcttgttgtaagactccgtttaatttccagaagcagcagccactgttgctgccactgaccaccaggtagacagcgcaatctgtggagcttttactctgttgtgaggggaagagactgcattgtggccccagacttttaaaacagcactaaataacttgggggaaacggggggagggaaaatgaaatgaaaaccctgttgctgcgtcactgtgttccctttggcctggctgagtttgatactgtggggattcagtttaggcgctggcccgaggatatcccagcggtggtacttcggagacacctgtctgcatctgactgagcagaacaaatcgtcaggtgcctggagcaaaaaggaaaaaaaaaaaagaaaggacattgagttttaacagaagggaaaaggaaagaagaaaagatttttgcagaatttctcaaaaatcagtttgtggattccagtagtatttatattgagagaaacaaattttagtccttctaactgtgctaaaacttggatatttgtgaaaactccttaccaccatacaagcatcagaagagctctcttgttgttagcacttattgtttgcaagaacagaatacatccttttatccttttatgaaaaatgacaagtgaaggcaaaaggggaaggttatttgatctggaagatgagtgttctgatgtggtggcttttgcaaaaatctttattggtgttgaaaactggaaaaaataactcatccagaattcatattgtcttgacaagaactatggttctctgtttttagatattgtggaaaatgtttttgggcatttttctctgattttatttcttctcccccacccctttttctaaaaaacaaacaaaaaaaaaaacacacaaaacaaaaacagaacaaaagaagagagaaggaaattttatcaattaaaaatgctgtgtgataaaatcccagcccagattgctcagctgtttgtacctgacttgccgcctgcataggagccagttctgttccttctgactagcccctcttcctccaggggagaacttccaaatgttaatttttttttttttgaaaatataaataattactattttgtactgtgtggtatctctggtcttttgtttcactcacctgccttgtctcttgggtctgagtcccttgcttaagggattttgaagtcctagttttcagcttgcagagattatgtctgaaatgcctaatgagtcgcagggatttgttgagactccgtaatctcaagttctctttgtgagctatcagcatctgccagtctcttgtcctccctgagtatctcacagtccatatcctgatgagggatcaggcccctacctctgccaaggcaagtaatggtagtgggcttttaaactgccccccgtatgttttaagacctaatccccacctcccttcttctaactaaatataaaaagatccaggggacataaatgtggagattaaataaagggaaattattgtctctaaaaaaaaaaaaaaaaa

SEQ ID NO: 1685 - protein, 374 aa, Homo sapiens; identical to SEQ ID NO: 1677

SEQ ID NO: 1686 - DNA, 3053 bp, Homo sapiens
ggggaggaggccgcgcggggtggggtctggcggtacgcgctggctgcgtcgacgtgctgacgccatgacgccccggctggtgtgtgtcggtgtgtatgtgtgtgtgtgagtgtgcgcgctccgagtgtgtgtgtatttgtgtatcggcggtcccgcaggtcccggatgttgcggacagtatgaggcaagcgcagggggacggggaccagcagctgtcgccgccgctctcagatcgagtcttgctctgtcacccaggctggagtgcagtggcgcgatctcagctcactgccacctttgcctcctgggttcaagcgattcttctgcctcagcctcccgagtagctgggattacagggtgaagagggaacagaaatctttgccccctgactttggaaatctcgtttaaccttcaaactggcgatgtcaagggttccaagtcctccacctccggcagaaatgtcgagtggccccgtagctgagagttggtgctacacacagatcaaggtagtgaaattctcctacatgtggaccatcaataactttagcttttgccgggaggaaatgggtgaagtcattaaaagttctacattttcatcaggagcaaatgataaactgaaatggtgtttgcgagtaaaccccaaagggttagatgaagaaagcaaagattacctgtcactttacctgttactggtcagctgtccaaagagtgaagttcgggcaaaattcaaattctccatcctgaatgccaagggagaagaaaccaaagctatggagagtcaacgggcatataggtttgtgcaaggcaaagactggggattcaagaaattcatccgtagagattttcttttggatgaggccaacgggcttctccctgatgacaagcttaccctcttctgcgaggtgagtgttgtgcaagattctgtcaacatttctggccagaataccatgaacatggtaaaggttcctgagtgccggctggcagatgagttaggaggactgtgggagaattcccggttcacagactgctgcttgtgtgttgccggccaggaattccaggctcacaaggctatcttagcagctcgttctccggtttttagtgccatgtttgaacatgaaatggaggagagcaaaaagaatcgagttgaaatcaatgatgtggagcctgaagtttttaaggaaatgatgtgcttcatttacacggggaaggctccaaacctcgacaaaatggctgatgatttgctggcagctgctgacaagtatgccctggagcgcttaaaggtcatgtgtgaggatgccctctgcagtaacctgtccgtggagaacgctgcagaaattctcatcctggccgacctccacagtgcagatcagttgaaaactcaggcagtggatttcatcaactatcatgcttcggatgtcttggagacctctgggtggaagtcaatggtggtgtcacatccccacttggtggctgaggcataccgctctctggcttcagcacagtgcccttttctgggacccccacgcaaacgcctgaagcaatcctaagatcctgcttgttgtaagactccgtttaatttccagaagcagcagccactgttgctgccactgaccaccaggtagacagcgcaatctgtggagcttttactctgttgtgaggggaagagactgcattgtggccccagacttttaaaacagcactaaataacttgggggaaacggggggagggaaaatgaaatgaaaaccctgttgctgcgtcactgtgttccctttggcctggctgagtttgatactgtggggattcagtttaggcgctggcccgaggatatcccagcggtggtacttcggagacacctgtctgcatctgactgagcagaacaaatcgtcaggtgcctggagcaaaaaggaaaaaaaaaaaagaaaggacattgagttttaacagaagggaaaaggaaagaagaaaagatttttgcagaatttctcaaaaatcagtttgtggattccagtagtatttatattgagagaaacaaattttagtccttctaactgtgctaaaacttggatatttgtgaaaactccttaccaccatacaagcatcagaagagctctcttgttgttagcacttattgtttgcaagaacagaatacatccttttatccttttatgaaaaatgacaagtgaaggcaaaaggggaaggttatttgatctggaagatgagtgttctgatgtggtggcttttgcaaaaatctttattggtgttgaaaactggaaaaaataactcatccagaattcatattgtcttgacaagaactatggttctctgtttttagatattgtggaaaatgtttttgggcatttttctctgattttatttcttctcccccacccctttttctaaaaaacaaacaaaaaaaaaaacacacaaaacaaaaacagaacaaaagaagagagaaggaaattttatcaattaaaaatgctgtgtgataaaatcccagcccagattgctcagctgtttgtacctgacttgccgcctgcataggagccagttctgttccttctgactagcccctcttcctccaggggagaacttccaaatgttaatttttttttttttgaaaatataaataattactattttgtactgtgtggtatctctggtcttttgtttcactcacctgccttgtctcttgggtctgagtcccttgcttaagggattttgaagtcctagttttcagcttgcagagattatgtctgaaatgcctaatgagtcgcagggatttgttgagactccgtaatctcaagttctctttgtgagctatcagcatctgccagtctcttgtcctccctgagtatctcacagtccatatcctgatgagggatcaggcccctacctctgccaaggcaagtaatggtagtgggcttttaaactgccccccgtatgttttaagacctaatccccacctcccttcttctaactaaatataaaaagatccaggggacataaatgtggagattaaataaagggaaattattgtctctaaaaaaaaaaaaaaaaa

SEQ ID NO: 1687 - protein, 374 aa, Homo sapiens; identical to SEQ ID NO: 1677

SEQ ID NO: 1688 - DNA, 1186 bp, Homo sapiens
gatgtccggctggagctgtcgcctccgccgccgctgctgccggtgccggttgtgagcgggtctccagtcggctcctctgggcgtctcatggcctctagcagctccctggtgcccgaccggctgcgcctgccgctctgcttcctgggtgtctttgtctgctatttttactatgggatcctgcaggaaaagataacaagaggaaagtatggggaaggagccaagcaggagacgttcacctttgccttaactttggtcttcattcaatgtgtgatcaatgctgtgtttgccaagatcttgatccagttttttgacactgccagggtggatcgtacccggagctggctctatgctgcctgttctatctcctatctgggtgccatggtctccagcaattcagcactacagtttgtcaactacccaactcaggtccttggtaaatcctgcaagccaatcccagtcatgctccttggggtgaccctcttgaagaagaagtacccgttggccaagtacctgtgtgtgctgttaattgtggctggagtggcccttttcatgtacaaacccaagaaagttgttgggatagaagaacacacagtcggctatggagagctactcttgctattatcgctgaccctggatggactgactggtgtttcccaggaccacatgcgggctcattaccaaacaggctccaaccacatgatgctgaacatcaacctttggtcgacattgctgctgggaatgggaatcctgttcactggggagctctgggagttcttgagctttgctgaaaggtaccctgccatcatctataacatcctgctctttgggctgaccagtgccctgggtcagagcttcatctttatgacggttgtgtattttggtcccctgacctgctccatcatcactacaactcgaaagttcttcacaattttggcctctgtgatcctcttcgccaatcccatcagccccatgcagtgggtgggcactgtgcttgtgttcctgggtcttggtcttgatgccaagtttgggaaaggagctaagaagacatcccactaggaagagagagactacctccacatcaagaatatttaagttattatctcaaacagtgacatctcttgggaaaatggacttaataggaatatgggactgagttccagtcttttttaataaaataaaatcaagc

SEQ ID NO: 1689 - protein, 322 aa, Homo sapiens
MASSSSLVPDRLRLPLCFLGVFVCYFYYGILQEKITRGKYGEGAKQETFTFALTLVFIQCVINAVFAKILIQFFDTARVDRTRSWLYAACSISYLGAMVSSNSALQFVNYPTQVLGKSCKPIPVMLLGVTLLKKKYPLAKYLCVLLIVAGVALFMYKPKKVVGIEEHTVGYGELLLLLSLTLDGLTGVSQDHMRAHYQTGSNHMMLNINLWSTLLLGMGILFTGELWEFLSFAERYPAIIYNILLFGLTSALGQSFIFMTVVYFGPLTCSIITTTRKFFTILASVILFANPISPMQWVGTVLVFLGLGLDAKFGKGAKKTSH

SEQ ID NO: 1690 - DNA, 2398 bp, Homo sapiens
ccacgcgtccggcagcggcctcgggggttggggggctgtgtgagtctcgcagtggggctgaggcaggcagccgggagagccatggcgggggccgcagcgggcggcagaggcggaggtgcctgggggccggggcgcggaggggccggggggctccggcggggctgctctcccccagcccccgccggctccccccgggctgggctgcagccgctcagggccacgatccccttccagctgcagcagccgcaccagcgccgggacgggggtggccgtgcagccagcgtcccatgctcggtggccccagaaaagtcagtgtgtaggcctcagccacttcaggtccggcgtacattctccctggacaccatcctcagctcctaccttctgggccagtggccacgagatgctgatggggccttcacctgctgcaccaatgacaaggccacccagacgcccctgtcctggcaagagctagaaggtgagcgtgccagttcctgtgcacacaagcgctcagcatcctggggcagcacagaccaccgaaaagagatttccaagttgaagcaacaactgcagaggacgaagctgagccgcagtgggaaagagaaggagcgaggttcaccactcctaggggaccacgcagtgcggggagcactgagggcgtcccctcccagcttcccctcagggtcccctgtcttgcgactcagcccctgcctgcacaggagcctggaagggctcaaccaagagctggaggaggtatttgtgaaggagcagggagaagaggagctgctgaggatccttgatatccctgatgggcaccgggccccagctcctccccagagtggcagctgtgatcatcccctcctcctcctggagcctggcaaccttgccagctctccttccatgtccttggcatctccccagccttgtggcctggccagtcatgaggaacatcggggtgccgccgaggagctggcatccacccccaacgacaaagcctcctctccaggacacccagcctttcttgaagatggcagcccatctccagtccttgcctttgctgcctcccctcgacctaatcatagctacatcttcaaacgggagcccccagaaggctgtgagaaagtgcgtgtgtttgaagaagccacgtctccaggtcctgacctggccttcctgacttcctgtcctgacaagaacaaagtccatttcaacccgactggctcagccttctgccccgtcaacctgatgaagcccctcttccccggcatgggcttcatcttccgtaactgcccctcaaacccgggatctccccttcccccggccagccccaggccaccacctcggaaggatccggaagcctccaaggcctccccactgccattcgagccatggcagcgcaccccaccatcagaagagcctgtgcttttccagagctccctgatggtctgagggtcccacccctgccccactttaccatagagaccagtgccttggtggcaggtccctccccaggtcccctgagatggggtatggaggggcccttccctctcggccttcgagcactttctttcacttactgtgtcaaagccctgggtcctctttttgatgggcaccggcccctctgaacgtgatgggacctgccttctccactagtagctgggcagctcacaattcacacctgtgtacctgccacatccctcacttggtggaaaacacccagaaggtcttgagtcccccacccctgggtgtcagtccaaatgactgtataggaggcccttatttttgtcacagagcaagctggccatgaacgaaggagagaagacgccacagatttccttccctctcctccaggagaccataagatagatcccccatcctctcagccctattcccatgcctccctctcattggaggagctgaccaaagcagccctaacgggccataacacttgaccaattcagctgctggcagagggaggaaacaagtgttttcccaagtggcattttcatctcgctttcaccctgactaaagattgtcttaagtagcagcccagcccgcccagccccaggtgggtagtggggaggagagctggcattcctccaggtggcaaatggcgactctatactctccgcccgccccagggctggatggattagaaaaatgcctatttttcttgtatcgatgtagagactctattttctcccaaagacactatttttgcagctgtttgaagtttgtatattttccgtactgcagagcttacacaaaattgaagaatgttaatgttcgagttttcttatcttgtgtttagaggttgttttttgcagatcttggtgttaatagaccaaataaataaataaatattcccagcagcttgaaaaaaaaaaaaaaaaaaaaaaaaaaa

SEQ ID NO: 1691 - protein, 453 aa, Homo sapiens
MAGAAAGGRGGGAWGPGRGGAGGLRRGCSPPAPAGSPRAGLQPLRATIPFQLQQPHQRRDGGGRAASVPCSVAPEKSVCRPQPLQVRRTFSLDTILSSYLLGQWPRDADGAFTCCTNDKATQTPLSWQELEGERASSCAHKRSASWGSTDHRKEISKLKQQLQRTKLSRSGKEKERGSPLLGDHAVRGALRASPPSFPSGSPVLRLSPCLHRSLEGLNQELEEVFVKEQGEEELLRILDIPDGHRAPAPPQSGSCDHPLLLLEPGNLASSPSMSLASPQPCGLASHEEHRGAAEELASTPNDKASSPGHPAFLEDGSPSPVLAFAASPRPNHSYIFKREPPEGCEKVRVFEEATSPGPDLAFLTSCPDKNKVHFNPTGSAFCPVNLMKPLFPGMGFIFRNCPSNPGSPLPPASPRPPPRKDPEASKASPLPFEPWQRTPPSEEPVLFQSSLMV

SEQ ID NO: 1692 - DNA, 3600 bp, Homo sapiens
gaggcactagggatcgtccgcaggattgggactgatacagaggccgccacggagcccgccggagccaccgttcctgctgctgccgccgctgcccgaatcggaaccgtcgggccgcagccgccggcaatgccgcgaaggaagaggaatgcaggcagtagttcagatggaaccgaagattccgatttttctacagatctcgagcacacagacagttcagaaagtgatggcacatcccgacgatctgctcgagtcacccgctcctcagccaggctaagccagagttctcaagattccagtcctgttcgaaatctgcagtcttttggcactgaggagcctgcttactctaccagaagagtgacccgtagtcagcagcagcctaccccagtgacaccgaaaaaataccctcttcggcagactcgttcatctggttcagaaactgagcaagtggttgatttttcagatagagaaactaaaaatacagctgatcatgatgagtcaccgcctcgaactccaactggaaatgcgccttcttctgagtctgacatagacatctccagccccaatgtatctcacgatgagagcattgccaaggacatgtccctgaaggactcaggcagtgatctctctcatcgccccaagcgccgtcgcttccatgaaagctacaacttcaatatgaagtgtcctacaccaggctgtaactctctaggacaccttacaggaaaacatgagagacatttctccatctcaggatgcccactgtatcataacctctcagctgacgaatgcaaggtgagagcacagagccgggataagcagatagaagaaaggatgctgtctcacaggcaagatgacaacaacaggcatgcaaccaggcaccaggcaccaacggagaggcagcttcgatataaggaaaaagtggctgaactcaggaagaaaagaaattctggactgagcaaagaacagaaagagaaatatatggaacacagacagacctatgggaacacacgggaacctcttttagaaaacctgacaagcgagtatgacttggatcttttccgaagagcacaagcccgggcttcagaggatttggagaagttaaggctgcaaggccaaatcacagagggaagcaacatgattaaaacaattgcttttggccgctatgagcttgatacctggtaccattctccatatcctgaagaatatgcacggctgggacgtctctatatgtgtgaattctgtttaaaatatatgaagagccaaacgatactccgccggcacatggccaaatgtgtgtggaaacacccacctggtgatgagatatatcgcaaaggttcaatctctgtgtttgaagtggatggcaagaaaaacaagatctactgccaaaacctgtgcctgttggccaaactttttctggaccacaagacattatattatgatgtggagcccttcctgttctatgttatgacagaggcggacaacactggctgtcacctgattggatatttttctaaggaaaagaattcattcctcaactacaacgtctcctgtatccttactatgcctcagtacatgagacagggctatggcaagatgcttattgatttcagttatttgctttccaaagtcgaagaaaaagttggctccccagaacgtccactctcagatctggggcttataagctatcgcagttactggaaagaagtacttctccgctacctgcataattttcaaggcaaagagatttctatcaaagaaatcagtcaggagacggctgtgaatcctgtggacattgtcagcactctgcaagcccttcagatgctcaaatactggaagggaaaacacctagttttaaagagacaggacctgattgatgagtggatagccaaagaggccaaaaggtccaactccaataaaaccatggatcccagctgcttaaaatggacccctcccaagggcacttaaagtgacctgtcattccgagccagcgaaccccagcagtaggaatccgtaccctagggatctgtctgtcatttctctgttgctcttgtgattggcaagtacagtatcctttgggaaggccatccccctcaggactgtcctggctccgacctttgtgtacactgcagacgctggttctgaggaactgttgtttcggcctcagtgaggttgcctggatgggatctgtattagacttgagtgcaggtctctcagcactgacccaaggagttctgttatggtactgtacctgtccagtcactggttctctcctcatgtcctctcgccccatgaggttgtgttgtgtcttctaagcgtggtactagtgcttgccacctggtcaccagacctccaaatatggctgccaccaccaggacctttccagttactccttatatgtgtgttctatggaggggcagggaaaaggtggcacttgtgagtgtgtgtggattggcagggggtccattcactttgggttccatcttgctttaaatttcttcattttgattaagagacctctttttgatctgtattgggctaaccagagccaaatacttttgaagagtttcccagggactagtcatggtaatagcatataattgatctgaatgagatggagagaagaatgaaggggtggtggttctgggtttgatttgagttcacctgtgggcagtgggcagtgggcagtgtcttggtgaaagggaacggatactactttttgcctcaccgtaaagtactcactagtaaatatttccttctctctttactcccactttttacgtttgcaggtgccaaagtaatgtccacttttccctttcatgctgcatattaactggttaattatactgcagaaaccttttcacctccactagtctgatacagtacatctgtacttccatataccttgcactgattttgtctgagtgccctgggagaagtagaaaatgattgaaagtgacttccgtatctcagcccatgactcagcaaggcagaatggccacccctgccaaagtttgcttctcttttcaacagtgcctcaccctccctctaggattaaagtgcttctgcccttccacgaactcctcctccatttcctttttgggatttgtcaccatccttctattctctggtcttctatttttggtgttgttcaagtgaaggaagagatgttccctctaatttctctctagcccattataacctgctatcttggggcaacttttgatgtatgacatgtcacccttcccaacttggtctcctccaacatgctgtcttcatgtggagccctcaccacaatccctgactccggtcatttgtgcccttctcttgtcatctctgtacactacttatattcactgtgggttgggggagctaattttaagcatgttcagtggcagctcccctccagtttcagtgtcactgttaaaatttatcaaaaagcaacttcactaggggttttcttaagggataaaggccttttacagaagctaaacccttccccacatgtggtagaatgtgctcttctatatctactcctcaataaagcatgttctctgctcaaaaaaaaaaaaaaaaaaaaaaaaaaaaaaaaaaaaaaaaaaaaaa

SEQ ID NO: 1693 - protein, 611 aa, Homo sapiens
MPRRKRNAGSSSDGTEDSDFSTDLEHTDSSESDGTSRRSARVTRSSARLSQSSQDSSPVRNLQSFGTEEPAYSTRRVTRSQQQPTPVTPKKYPLRQTRSSGSETEQVVDFSDRETKNTADHDESPPRTPTGNAPSSESDIDISSPNVSHDESIAKDMSLKDSGSDLSHRPKRRRFHESYNFNMKCPTPGCNSLGHLTGKHERHFSISGCPLYHNLSADECKVRAQSRDKQIEERMLSHRQDDNNRHATRHQAPTERQLRYKEKVAELRKKRNSGLSKEQKEKYMEHRQTYGNTREPLLENLTSEYDLDLFRRAQARASEDLEKLRLQGQITEGSNMIKTIAFGRYELDTWYHSPYPEEYARLGRLYMCEFCLKYMKSQTILRRHMAKCVWKHPPGDEIYRKGSISVFEVDGKKNKIYCQNLCLLAKLFLDHKTLYYDVEPFLFYVMTEADNTGCHLIGYFSKEKNSFLNYNVSCILTMPQYMRQGYGKMLIDFSYLLSKVEEKVGSPERPLSDLGLISYRSYWKEVLLRYLHNFQGKEISIKEISQETAVNPVDIVSTLQALQMLKYWKGKHLVLKRQDLIDEWIAKEAKRSNSNKTMDPSCLKWTPPKGT

SEQ ID NO: 1694 - DNA, 675 bp, Homo sapiens
atgctgccttgcctcgccctgcttctcctgatggagctgtccgtgtgcactgtggcaggtgatggtggagaggaacagacactcagcactgaagcagagacctgggtaattgtggccttggaggaaggcgctggccccagcattcagctccagctgcaggaggtgaagacgggcaaggcaagccagttctttgggctgatggggaagcgagtgggaggaagacctctgatccagccaaggagaaaaaaagcatatcagctggaacacacgttccagggcctcctgggcaagagaagcctgttcacagaaggcagagaggatgaggcccaaggttcagagtaaaagcccccaccacagacttcccagaggacacggtgccgcttcttcctacctggatgtcacagctgacaagccggcaggccaactctcttctctgtgtctcctgtcctcatcgctggcacttcacacaaggcccacactgaacccactgggcttcttcctggactctcagtgtcaagcagcagtcctgcataaatgcacagcttcgccgtagcaagctgcactgactctgccctccctcacactcagagttggcatctcactgcacagcagtgaggagactcgcacactctgtatcctgtgcctagcacacagtaggcactcaataaatgagtg

SEQ ID NO: 1695 - protein, 113 aa, Homo sapiens
MLPCLALLLLMELSVCTVAGDGGEEQTLSTEAETWVIVALEEGAGPSIQLQLQEVKTGKASQFFGLMGKRVGGRPLIQPRRKKAYQLEHTFQGLLGKRSLFTEGREDEAQGSE

SEQ ID NO: 1696 - DNA, 905 bp, Homo sapiens
cttgagctggagtcacccagcctggccaagaactggaaaagtctctttggggatttggacccatttctgaaaagctcatgaaaaccactttgccttggactcctgcccccagccggagccctccatatccatttaacccaaatccccaactccagggatgactacaggttgggggagccccgagagcaagggaggtgaggaaactgatgtccagaaagaagcaggcatcagtggagacactcctagccctgctgccctctcctcactgcacacacttccaggttcagacaaaccggaaaggaaacccaccatgcaggactgtccatgtgatggctcttcccgtggctccatttctaagcgcctccgaggacctcatcgtggcccaggaccgcaagccaaggccaccccagtgtccttaccatcctgggaatgggaggagtcaggcccagccttgtcctgtctgcccccctggaagccttccctgagcactggcctcttatttacccgtctttgtctctggcttgttggtatctgtcccttgtctgattagggaacgcctgaggtcaggatctttgcctccccaatcagattgtcaggcaggagtgggggtagtgcagatgctgggtcatttctacatgtgagaccaaatagtggtcctgtttaagttgatccccttgaaagaaaattctggaaaagctcctcagatgcacagatacacagaatcagaccttgggcaaagtgtgtagttgtgcttttgaagctgtgcaaccttggacaaactacttgacttctctgtgcctcagtttccttatttgtgaaatgaggggtagtcatgataccttccccatgaggttgatgggaggattgagttaatatttataaagcatttcagacagtgccagaga

SEQ ID NO: 1697 - protein, 130 aa, Homo sapiens
MTTGWGSPESKGGEETDVQKEAGISGDTPSPAALSSLHTLPGSDKPERKPTMQDCPCDGSSRGSISKRLRGPHRGPGPQAKATPVSLPSWEWEESGPALSCLPPWKPSLSTGLLFTRLCLWLVGICPLSD

SEQ ID NO: 1698 - DNA, 4259 bp, Homo sapiens
cggctgtgattggcgcggcgggatcactggctccgcgagcctggcccgggggagtcggctggagccggctgcgctttgataaggtcctggcaactcagtaacagcccgagagccgggaaataaaaataacccctcagagcgatggatttcggggccgcccggcggccgaggcgcccgccgaaggccctgctgtaaaagagaggaggttcagatgagcccctgctgacttgagagagacagagagaccacgccgattgctgagaggaactggaagaagaaaaattcccagactcagtgggaagagctccctcaccatgagtagcgctatgttggtgacttgcctcccggaccccagcagcagcttccgtgaggatgccccgcggcccccagtgccaggggaagaaggggagaccccaccgtgtcagccaggggtgggcaagggccaggtcaccaaacccatgtctgtctcttccaacaccaggcggaacgaagatgggttgggggagccggaggggcgggcatctccggattcccctctgacccggtggaccaagtccttacactccttattgggcgatcaagacggtgcttacctgttccgaactttcctggagagggagaaatgcgtggataccttagacttctggtttgcctgcaatggattcaggcagatgaacctgaaggataccaaaactttacgagtagccaaagcgatctacaaaaggtacattgagaacaacagcattgtctccaagcagctgaagcctgccaccaagacctacataagagatggcatcaagaagcagcagattgattccatcatgtttgaccaggcgcagaccgagatccagtcggtgatggaggaaaatgcctaccagatgtttttgacttctgatatatacctcgaatatgtgaggagtgggggagaaaacacagcttacatgagtaatgggggactcgggagcctaaaggtcgtgtgtggctatctccccaccttgaatgaagaagaggagtggacttgtgccgacttcaagtgcaaactttcgccaaccgtggttggcttgtccagcaaaactctgagggccacggcgagtgtgaggtccacggaaactgttgacagtggatacaggtccttcaagaggagcgatcctgttaatccttatcacataggttctggctatgtctttgcaccagccaccagcgccaacgacagtgagatatccagtgatgcgctgacggatgattccatgtccatgacggacagcagtgtagatggaattcctccttatcgtgtgggcagtaagaaacagctccagagagaaatgcatcgcagtgtgaaggccaatggccaagtgtctctacctcatttcccgagaacccaccgcctgcccaaggagatgacccccgtggaacccgccacctttgcagctgagctgatctcgaggctggaaaagctgaagctggagttggagagccgccacagcctggaggagcgcctgcagcagatccgagaggatgaagagagagagggctccgagctcacactcaattcgcgggagggggcgcccacgcagcaccccctctccctactgccctccggcagctacgaggaagacccgcagacgatactggacgatcacctgtccagggtcctcaagacccctggctgccagtctccgggcgtaggccgctatagccctcgctcccgctccccggaccaccaccaccaccaccattcgcagtaccactccctgctcccgcccggtggcaagctgcctcccgcggccgcctcgccgggcgcctgccccctcctcgggggcaaaggctttgtgaccaagcagacgacgaagcatgtccaccaccactacatccaccaccatgccgtccccaagaccaaggaggagatcgaggcggaggccacgcagcgggtgcactgcttctgccctgggggcagcgagtattacagctactcgaaatgcaaaagccactccaaggctccggaaaccatgcccagcgagcagtttggcggcagcagaggcagtaccttgcccaaacgcaatgggaaaggcacggagccgggcctggccctgcccgccagggaaggaggggcccccggcggagctggggccctgcagcttccccgggaggaaggagacaggtcgcaggatgtctggcagtggatgctggagagtgagcggcagagcaagcccaagccccatagtgcccaaagcacaaaaaaggcctaccccttggagtctgcccgctcgtctccaggcgaacgagccagccggcaccatctgtgggggggcaacagcgggcacccccgcaccaccccccgtgcccacctgttcacccaggaccctgcgatgcctcccctgaccccacccaacacgctggctcagctggaggaggcctgtcgcaggctagctgaggtgtcgaagcccccaaagcagcggtgctgtgtggccagtcagcagagggacaggaatcattcggccactgttcagacgggagccacacccttctccaatccaagcctggctccagaagatcacaaagagccaaagaaactggcaggtgtccacgcgctccaggccagtgagttggttgtcacttactttttctgtggggaagaaattccataccggaggatgctgaaggctcagagcttgaccctgggccactttaaagagcagctcagcaaaaagggaaattataggtattacttcaaaaaagcaagcgatgagtttgcctgtggagcggtgtttgaggagatctgggaggatgagacggtgctcccgatgtatgaaggccggattctgggcaaagtggagcggatcgattgagccctggggtctggctttggtgaactgttggagcccgaagctcttgtgaactgtcttggctgtgagcaactgcgacaaaacattttgaaggaaaattaaaccaatgaagaagacaaagtctaaggaagaatcggccagtgggccttcgggagggcggggggaggttgattttcatgattcatgagctgggtactgactgagataagaaaagcctgaactatttattaaaaacatgaccactcttggctattgaagatgctgcctgtatttgagagactgccatacataatatatgacttcctagggatctgaaatccataaactaagagaaactgtgtatagcttacctgaacaggaatccttactgatatttatagaacagttgatttcccccatccccagtttatggatatgctgctttaaacttggaagggggagacaggaagttttaattgttctgactaaacttaggagttgagctaggagtgcgttcatggtttcttcactaacagaggaattatgctttgcactacgtccctccaagtgaagacagactgttttagacagactttttaaaatggtgccctaccattgacacatgcagaaattggtgcgttttgtttttttttttcctatgctgctctgttttgtcttaaaggtcttgagggttgaccatgttgcgtcatcatcaacattttgggggttgtgttggatgggatgatctgttgcagagggagaggcagggaaccctgctccttcgggccccaggttgatcctgtgactgaggctccccctcatgtagcctccccaggcccagggccctgaggcctgctagaatcactgccgctgtgctttcgtggaaatgacagttccttgttttttttgtttctgtttttgttttacattagtcattggaccacagccattcaggaactaccccctgccccacaaagaaatgaacagttgtagggagacccagcagcacctttcctccacacaccttcattttgatgttcgggtttttgtgttaagttaatctgtacattctgtttgccattgttacttgtactatacatctgtatatagtgtacggcaaaagagtattaatccactatctctagtgcttgactttaaatcagtacagtacctgtacctgcacggtcacccgctccgtgtgtcgccctatattgagggctcaagctttcccttgttttttgaaaggggtttatgtataaatatattttatgcctttttattacaagtcttgtactcaatgacttttgtcatgacattttgttctacttatactgtaaattatgcattataaagagttcatttaaggaaaattacttggtacaataattattgtaattaagagatgtagcctttattaaaattttatatttttcaaaa

SEQ ID NO: 1699 - protein, 843 aa, Homo sapiens
MSSAMLVTCLPDPSSSFREDAPRPPVPGEEGETPPCQPGVGKGQVTKPMSVSSNTRRNEDGLGEPEGRASPDSPLTRWTKSLHSLLGDQDGAYLFRTFLEREKCVDTLDFWFACNGFRQMNLKDTKTLRVAKAIYKRYIENNSIVSKQLKPATKTYIRDGIKKQQIDSIMFDQAQTEIQSVMEENAYQMFLTSDIYLEYVRSGGENTAYMSNGGLGSLKVVCGYLPTLNEEEEWTCADFKCKLSPTVVGLSSKTLRATASVRSTETVDSGYRSFKRSDPVNPYHIGSGYVFAPATSANDSEISSDALTDDSMSMTDSSVDGIPPYRVGSKKQLQREMHRSVKANGQVSLPHFPRTHRLPKEMTPVEPATFAAELISRLEKLKLELESRHSLEERLQQIREDEEREGSELTLNSREGAPTQHPLSLLPSGSYEEDPQTILDDHLSRVLKTPGCQSPGVGRYSPRSRSPDHHHHHHSQYHSLLPPGGKLPPAAASPGACPLLGGKGFVTKQTTKHVHHHYIHHHAVPKTKEEIEAEATQRVHCFCPGGSEYYSYSKCKSHSKAPETMPSEQFGGSRGSTLPKRNGKGTEPGLALPAREGGAPGGAGALQLPREEGDRSQDVWQWMLESERQSKPKPHSAQSTKKAYPLESARSSPGERASRHHLWGGNSGHPRTTPRAHLFTQDPAMPPLTPPNTLAQLEEACRRLAEVSKPPKQRCCVASQQRDRNHSATVQTGATPFSNPSLAPEDHKEPKKLAGVHALQASELVVTYFFCGEEIPYRRMLKAQSLTLGHFKEQLSKKGNYRYYFKKASDEFACGAVFEEIWEDETVLPMYEGRILGKVERID

SEQ ID NO: 1700 - DNA, 5736 bp, Homo sapiens
ataacctccactctgaaagcagtcttcacagaaacttttcacagaagtcaaatagttaaagcaaattctagatacatggtagagaccaggagaaaatatgaataactttcttctaaacaaggagctcagtggataaaccatacctctagattccttgcttccattttcccagaaacaagatgaggaagagaaagatcagtgtgtgtcaacaaacttgggccttattatgcaagaactttcttaaaaaatggagaatgaaaagagagtccttaatggaatggctgaattcattgctcctactactttgtttgtatatatatcctcatagtcatcaagtaaatgatttttcttcactgcttaccatggacctgggacgggtagatacatttaatgaatccagattttctgttgtatacacacctgtcaccaacacgacccaacagataatgaataaagtagcctctactcccttcctggcaggtaaagaggtcttgggactgccagatgaggaaagtattaaagaattcacagcaaattatcctgaagaaatagtaagagtcacctttactaatacatactcatatcatttgaagttcttgctaggacatggaatgccagcaaagaaggagcacaaggaccatacagctcattgttatgaaacaaatgaagatgtttactgtgaagtttcagtattttggaaggaaggttttgtggctcttcaagctgccattaatgctgctattatagaaatcacaacaaatcactcagtgatggaggagctgatgtcagttactggaaaaaatatgaagatgcattccttcattggtcaatcaggagttataactgatttgtaccttttttcctgcattatttcattttcctcattcatttactatgcatctgttaatgtcacaagagagaggaaaaggatgaaggccttgatgacaatgatgggtcttcgggattcagcgttctggctctcctggggtttgctctatgctggtttcatcttcattatggcccttttcttggcacttgttataagatctacccagtttatcattttgtctggcttcatggtagtcttcagcctctttctcctgtatggattatctttggtagctttggctttcttaatgagcatcttggtaaagaaatctttcctcaccggcctggtcgtgttcctcctcactgtcttttgggggtgtctggggttcacatcactgtacagacaccttcctgcatccttggagtggattttaagcttgcttagtccctttgccttcatgcttggaatggcccagcttttacacttggactatgatttgaattctaatgcatttcctcatccatcggacggctcaaatctcattgtagcaacaaatttcatgttggcatttgacacttgcctctatctggcattggcgatttactttgaaaaaattttgccaaatgaatatggacatcgacgtccacctttgtttttcctgaagtcctcattttggtctcaaacacaaaagactgatcacgtggcccttgaagatgaaatggatgccgatccttcatttcatgactcttttgaacaagcgcctccagaattccaagggaaagaagccatcagaatcagaaatgttacaaaagaatataaaggaaagcctgataaaatagaagccttgaaagatctggtatttgacatttacgaaggccaaatcactgcaatacttggtcacagtggagctggaaagtcaacactgctaaacattcttagtgggttgtctgttcccaccaaaggttcagtcaccatctataacaataagctttcagaaatggctgacctagaaaatctcagcaagctgaccggagtttgtccacaatccaatgtgcaatttgacttcctcactgtaagagaaaacctcagactctttgctaaaataaaagggattctgccacaagaagtggataaagagattttcctgttggatgaaccaactgctggattggatcccttttcaagacaccaagtatggaaccttctgaaagaacgcaaaacagaccgcgtgatcctcttcagtacccagttcatggatgaggccgacatcctggcggacaggaaagtatttctctcccaagggaagctaaagtgcgcgggctcttctttgtttctaaagaagaaatgggggattggatatcacttaagcttgcagttaaatgaaatatgtgttgaggaaaacataacatcacttgttaaacagcacatccctgatgccaaattatcagccaaaagcgaaggaaaacttatttatacattacccttagaaagaacaaataaatttccagaactttacaaggatcttgatagctatcctgacctaggaattgagaattatggtgtttccatgacaactttgaatgaagtattcctgaagctagaaggaaaatctacaattaatgaatcggacattgctattttgggagaagtacaagcggaaaaagctgacgacactgaaaggcttgttgagatggaacaagtcctctcttcacttaacaagatgagaaagacaataggtggtgtggctctctggcgacagcaaatctgcgcaattgcaagggttcgcttgttaaagttaaagcatgaaagaaaagctcttttagcactgctattaattctaatggctggattttgccctcttcttgtggagtataccatggtgaaaatatatcaaaacagttacacctgggaactttctcctcatttgtatttccttgctcctggacaacaaccacatgaccctctcactcaactactgatcatcaataaaacaggggcaagcattgatgactttatacagtctgtggagcaccagaacatagctttagaagtggatgcatttggaactagaaatggcacagatgacccatcttataatggagccatcacagtgtgttgtaatgaaaagaattacagcttttcgttagcatgcaatgccaaaagattgaattgcttcccagttcttatggacattgttagtaatgggctacttggaatggttaaaccatcagtacatatccgaactgaaagaagtacatttttggagaatggacaggacaatccaatcggattcctggcatatatcatgttctggctggttttaacatcgagttgcccaccttacattgccatgagcagcatcgatgattataagaacagagctcggtcccagctacggatttccggactctccccttctgcttactggtttgggcaggcgctggtggatgtttccctgtacttcttggtcttcgtttttatatatttaatgagctacatttcaaacttcgaagacatgctacttacaataattcatattattcaaatcccatgtgctgttggttattccttttccctcatcttcatgacatacgtgatttccttcatctttcgcaaggggagaaaaaatagtggcatttggtcattttgtttctatgttgtcactgtattctctgtggctggatttgcgttcagtatcttcgaaagtgatattccatttatcttcacttttttaataccacctgccacaatgattggctgtttgttcttatcttctcatcttctcttttcttctctcttttctgaagaacgaatggatgtacagccatttctggtattcctaattcctttccttcattttatcatttttctttttactcttcgatgtctggaatggaagtttggaaagaaatcaatgagaaaggatcctttctttagaatttctccaagaagtagtgatgtgtgtcaaaatccagaagaaccagaaggagaggatgaagatgttcagatggaaagagtgagaacagcaaatgccttgaattctactaattttgatgagaagccagtcatcattgccagctgtctacgcaaggagtatgcagggaagaggaaaggctgtttttccaagaggaagaataagatagccacgagaaatgtctccttctgtgttagaaaaggtgaagttttaggattattaggacacaatggagctggtaaaagcacatccattaaggtgataactggagacacaaaaccaactgctggacaagtgctactgaaagggagcggtggaggggatgccctggagttcctggggtactgccctcaggagaacgcgctgtggcccaacctgacagtgaggcagcacctggaggtgtacgccgccgtgaaagggctgaggaaaggggatgctgaggttgccatcacacggttagtggatgcgctcaagctgcaggaccagctgaagtctcccgtgaagaccttgtcagagggaataaagagaaagctgtgctttgtcctgagcatactggggaacccgtcagtggtgcttctggatgagccgtcgaccgggatggaccccgaggggcagcagcaaatgtggcaggccatccgggccacctttagaaacacggaaaggggtgccctcctaaccacccactacatggcagaggctgaggccgtgtgtgaccgagtggccatcatggtatctgggaggttgagatgtatcggttccatccaacacctgaaaagcaaatttggcaaagattacctgctggagatgaaggtgaagaacctggcacaagtggagcccctccatgcagagatcctgaggcttttcccccaggctgctcggcaggaaaggtactcctctctgatggtttataagttgccagtggaagatgtgcaacctttagcccaagctttcttcaaattagagaaggttaaacagagctttgacctagaggagtacagcctctcacagtctaccctggagcaggttttcctggagctctccaaggagcaggagctgggtgattttgaggaggattttgatccctcagtgaagtggaagctcctcccccaggaagagccttaaaaccccaaattctgtgttcctgtttaaacccgtggttttttttaaatacatttatttttatagcagcaatgttctatttttagaaactatattataagtacagaaatggttctccgtgtggtgggaggaggaggttcgggtgctgggtaagtgccatgtcagtgtggacagaggcatttgactaagccaacctcctctcacagcctctgtatctctgcaggccatactggttccattgttctgtataatactgaataaataaatttacttttacatgatcgtataagtttctagataagataaacaaattttgtttaaatttttttaataaaaatcttaaaacactttttttctaacctagactgagaaattcatgtttacttttctaggtgtatgatactttgtaaagttgatactttcctaagaatttaacatgtcatatttttgaaatagatttaagtgtgcttcttattgctaaaaatactaaatgtcatgggtcatagtatctgatatcaatatcgttgataacatatccacaggtaacaccatgatgtaggcataaatggaaaacaaaaaccctactatttcaaatatattgtacttttttatttctgtaagccaactgtgtgccattttcactggacttttaaatctagactttagtgatgtctacattgtaaatgatcttttgtggatatttgtcacttggtttcagaaagttcacaaatgtagcaacagctcacatgactgagtaggtagaaaatgtgaaataaatctcatatatatagttttgaaaaaaaaaaaaaaaaaa

SEQ ID NO: 1701 - protein, 1581 aa, Homo sapiens
MRKRKISVCQQTWALLCKNFLKKWRMKRESLMEWLNSLLLLLCLYIYPHSHQVNDFSSLLTMDLGRVDTFNESRFSVVYTPVTNTTQQIMNKVASTPFLAGKEVLGLPDEESIKEFTANYPEEIVRVTFTNTYSYHLKFLLGHGMPAKKEHKDHTAHCYETNEDVYCEVSVFWKEGFVALQAAINAAIIEITTNHSVMEELMSVTGKNMKMHSFIGQSGVITDLYLFSCIISFSSFIYYASVNVTRERKRMKALMTMMGLRDSAFWLSWGLLYAGFIFIMALFLALVIRSTQFIILSGFMVVFSLFLLYGLSLVALAFLMSILVKKSFLTGLVVFLLTVFWGCLGFTSLYRHLPASLEWILSLLSPFAFMLGMAQLLHLDYDLNSNAFPHPSDGSNLIVATNFMLAFDTCLYLALAIYFEKILPNEYGHRRPPLFFLKSSFWSQTQKTDHVALEDEMDADPSFHDSFEQAPPEFQGKEAIRIRNVTKEYKGKPDKIEALKDLVFDIYEGQITAILGHSGAGKSTLLNILSGLSVPTKGSVTIYNNKLSEMADLENLSKLTGVCPQSNVQFDFLTVRENLRLFAKIKGILPQEVDKEIFLLDEPTAGLDPFSRHQVWNLLKERKTDRVILFSTQFMDEADILADRKVFLSQGKLKCAGSSLFLKKKWGIGYHLSLQLNEICVEENITSLVKQHIPDAKLSAKSEGKLIYTLPLERTNKFPELYKDLDSYPDLGIENYGVSMTTLNEVFLKLEGKSTINESDIAILGEVQAEKADDTERLVEMEQVLSSLNKMRKTIGGVALWRQQICAIARVRLLKLKHERKALLALLLILMAGFCPLLVEYTMVKIYQNSYTWELSPHLYFLAPGQQPHDPLTQLLIINKTGASIDDFIQSVEHQNIALEVDAFGTRNGTDDPSYNGAITVCCNEKNYSFSLACNAKRLNCFPVLMDIVSNGLLGMVKPSVHIRTERSTFLENGQDNPIGFLAYIMFWLVLTSSCPPYIAMSSIDDYKNRARSQLRISGLSPSAYWFGQALVDVSLYFLVFVFIYLMSYISNFEDMLLTIIHIIQIPCAVGYSFSLIFMTYVISFIFRKGRKNSGIWSFCFYVVTVFSVAGFAFSIFESDIPFIFTFLIPPATMIGCLFLSSHLLFSSLFSEERMDVQPFLVFLIPFLHFIIFLFTLRCLEWKFGKKSMRKDPFFRISPRSSDVCQNPEEPEGEDEDVQMERVRTANALNSTNFDEKPVIIASCLRKEYAGKRKGCFSKRKNKIATRNVSFCVRKGEVLGLLGHNGAGKSTSIKVITGDTKPTAGQVLLKGSGGGDALEFLGYCPQENALWPNLTVRQHLEVYAAVKGLRKGDAEVAITRLVDALKLQDQLKSPVKTLSEGIKRKLCFVLSILGNPSVVLLDEPSTGMDPEGQQQMWQAIRATFRNTERGALLTTHYMAEAEAVCDRVAIMVSGRLRCIGSIQHLKSKFGKDYLLEMKVKNLAQVEPLHAEILRLFPQAARQERYSSLMVYKLPVEDVQPLAQAFFKLEKVKQSFDLEEYSLSQSTLEQVFLELSKEQELGDFEEDFDPSVKWKLLPQEEP

SEQ ID NO: 1702 - DNA, 567 bp, Homo sapiens
atgtcagttgagtctttacctttgcctcgtgcctggccttcagaccctgtgagcccgctccgggacagggttacggccaatccagcagagattctggcaaagcatcccgggaatgagagtgagaaaggcccaaagcagtcaaggcccaaagacaaccctcgaccccatctctccaaatgtcagccctcaagatctcaggctctctggacctcaatctccatgccacttcaaaggccccaaatttcagccccagcagctccagctcatagccctaggtcttcagagatcactccaatattaggtgaagatccccaaagccccaaggaaaccctaaatctcatcctgaggacaccgatcccaccaaagccccgaggaaaccccaaatttcatctcgaggacaccagtcccaccgttaggaaccgggacctcaacccacagcacccggattccgagaacagaggcttcggggccaaatgggctgaatccagtacctcactcccacgcccccgggtggacagcaaccctcctccaccgcgtcccctcgtgggttttaggtcctatatttga

SEQ ID NO: 1703 - protein, 188 aa, Homo sapiens
MSVESLPLPRAWPSDPVSPLRDRVTANPAEILAKHPGNESEKGPKQSRPKDNPRPHLSKCQPSRSQALWTSISMPLQRPQISAPAAPAHSPRSSEITPILGEDPQSPKETLNLILRTPIPPKPRGNPKFHLEDTSPTVRNRDLNPQHPDSENRGFGAKWAESSTSLPRPRVDSNPPPPRPLVGFRSYI

SEQ ID NO: 1704 - DNA, 6310 bp, Homo sapiens
attcacaatgaatgtgaaattaaaagcatgatgtagtagtgacccaaaaggaatgtgaattctcctccagaacatgcagagacccatggatgaactgtgtttctagatttttcctccagctttcctgagagaaacaggtcaaaatgagcaagagacgcatgagcgtgggtcagcaaacatgggctcttctctgcaagaactgtctcaaaaaatggagaatgaaaagacagaccttgttggaatggctcttttcatttcttctggtactgtttctgtacctatttttctccaatttacatcaagttcatgacactcctcaaatgtcttcaatggatctgggacgtgtagatagttttaatgatactaattatgttattgcatttgcacctgaatccaaaactacccaagagataatgaacaaagtggcttcagccccattcctaaaaggaagaacaatcatggggtggcctgatgaaaaaagcatggatgaattggatttgaactattcaatagacgcagtgagagtcatctttactgataccttctcctaccatttgaagttttcttggggacatagaatccccatgatgaaagagcacagagaccattcagctcactgtcaagcagtgaatgaaaaaatgaagtgtgaaggttcagagttctgggagaaaggctttgtagcttttcaagctgccattaatgctgctatcatagaaatcgcaacaaatcattcagtgatggaacagctgatgtcagttactggtgtacatatgaagatattaccttttgttgcccaaggaggagttgcaactgattttttcattttcttttgcattatttctttttctacatttatatactatgtatcagtcaatgttacacaagaaagacaatacattacgtcattgatgacaatgatgggactccgagagtcagcattctggctttcctggggtttgatgtatgctggcttcatccttatcatggccactttaatggctcttattgtaaaatctgcacaaattgtcgtcctgactggttttgtgatggtcttcaccctctttctcctctatggcctgtctttgataactttagctttcctgatgagtgtgttgataaagaaacctttccttacgggcttggttgtgtttctccttattgtcttttgggggatcctgggattcccagcattgtatacacgtcttcctgcatttttggaatggactttgtgtcttcttagcccctttgccttcactgttgggatggcccagcttatacatttggactatgatgtgaattctaatgcccacttggattcttcacaaaatccatacctcataatagctactcttttcatgttggtttttgacacccttctgtatttggtattgacattatattttgacaaaattttgcccgctgaatatggacatcgatgttctcccttgtttttcctgaaatcctgtttttggtttcaacacggaagggctaatcatgtggtccttgagaatgaaacagattctgatcctacacctaatgactgttttgaaccagtgtctccagaattctgtgggaaagaagccatcagaatcaaaaatcttaaaaaagaatatgcagggaagtgtgagagagtagaagctttgaaaggtgtggtgtttgacatatatgaaggccagatcactgccctccttggtcacagtggagctggaaaaactaccctgttaaacatacttagtgggttgtcagttccaacatcaggttcagtcactgtctataatcacacactttcaagaatggctgatatagaaaatatcagcaagttcactggattttgtccacaatccaatgtgcaatttggatttctcactgtgaaagaaaacctcaggctgtttgctaaaataaaagggattttgccacatgaagtggagaaagaggtacaacgagttgtacaggaattagaaatggaaaatattcaagacatccttgctcaaaacttaagtggtggacaaaataggaaactaacttttgggattgccattttaggagatcctcaagttttgctattggatgaaccgactgctggattggatcctctttcaaggcaccgaatatggaatctcctgaaagaggggaaatcagacagagtaattctcttcagcacccagtttatagatgaggctgacattctggcggacaggaaggtgttcatatccaatgggaagctgaagtgtgcaggctcttctctgttccttaagaagaaatggggcataggctaccatttaagtttgcatctgaatgaaaggtgtgatccagagagtataacatcactggttaagcagcacatctctgatgccaaattgacagcacaaagtgaagaaaaacttgtatatattttgcctttggaaaggacaaacaaatttccagaactttacagggatcttgatagatgttctaaccaaggcattgaggattatggtgtttccataacaactttgaatgaggtgtttctgaaattagaaggaaaatcaactattgatgaatcagatattggaatttggggacaattacaaactgatggggcaaaagatataggaagccttgttgagctggaacaagttttgtcttccttccacgaaacaaggaaaacaatcagtggcgtggcgctctggaggcagcaggtctgtgcaatagcaaaagttcgcttcctaaagttaaagaaagaaagaaaaagcctgtggactatattattgctttttggtattagctttatccctcaacttttggaacatctattctacgagtcatatcagaaaagttacccgtgggaactgtctccaaatacatacttcctctcaccaggacaacaaccacaggatcctctgacccatttactggtcatcaataagacagggtcaaccattgataactttttacattcactgaggcgacagaacatagctatagaagtggatgcctttggaactagaaatggcacagatgacccatcttacaatggtgctatcattgtgtcaggtgatgaaaaggatcacagattttcaatagcatgtaatacaaaacggctgaattgctttcctgtcctcctggatgtcattagcaatggactacttggaatttttaattcgtcagaacacattcagactgacagaagcacattttttgaagagcatatggattatgagtatgggtaccgaagtaacaccttcttctggataccgatggcagcctctttcactccatacattgcaatgagcagcattggtgactacaaaaaaaaagctcattcccagctacggatttcaggcctctacccttctgcatactggtttggccaagcactggtggatgtttccctgtactttttgatcctcctgctaatgcaaataatggattatatttttagcccagaggagattatatttataattcaaaacctgttaattcaaatcctgtgtagtattggctatgtctcatctcttgttttcttgacatatgtgatttcattcatttttcgcaatgggagaaaaaatagtggcatttggtcatttttcttcttaattgtggtcatcttctcgatagttgctactgatctaaatgaatatggatttctagggctattttttggcaccatgttaatacctcccttcacattgattggctctctattcattttttctgagatttctcctgattccatggattacttaggagcttcagaatctgaaattgtatacctggcactgctaataccttaccttcattttctcatttttcttttcattctgcgatgcctagaaatgaactgcaggaagaaactaatgagaaaggatcctgtgttcagaatttctccaagaagcaacgctatttttccaaacccagaagagcctgaaggagaggaggaagatatccagatggaaagaatgagaacagtgaatgctatggctgtgcgagactttgatgagacacccgtcatcattgccagctgtctacggaaggaatatgcaggcaaaaagaaaaattgcttttctaaaaggaagaaaaaaattgccacaagaaatgtctctttttgtgttaaaaaaggtgaagttataggactgttaggacacaatggagctggtaaaagtacaactattaagatgataactggagacacaaaaccaactgcaggacaggtgattttgaaagggagcggtggaggggaacccctgggcttcctggggtactgccctcaggagaatgcgctgtggcccaacctgacagtgaggcagcacctggaggtgtacgctgccgtgaaaggtctcaggaaaggggacgcaatgatcgccatcacacggttagtggatgcgctcaagctgcaggaccagctgaaggctcccgtgaagaccttgtcagagggaataaagcgaaagctgtgctttgtgctgagcatcctggggaacccgtcagtggtgcttctggatgagccgtcgaccgggatggaccccgaggggcagcagcaaatgtggcaggtgattcgggccacctttagaaacacggagaggggcgccctcctgaccacccactacatggcagaggctgaggcggtgtgtgaccgagtggccatcatggtgtcaggaaggctgagatgtattggttccatccaacacctgaaaagcaaatttggcaaagactacctgctggagatgaagctgaagaacctggcacaaatggagcccctccatgcagagatcctgaggcttttcccccaggctgctcagcaggaaaggttctcctccctgatggtctataagttgcctgttgaggatgtgcgacctttatcacaggctttcttcaaattagagatagttaaacagagtttcgacctggaggagtacagcctctcacagtctaccctggagcaggttttcctggagctctccaaggagcaggagctgggtgatcttgaagaggactttgatccctcggtgaagtggaaactcctcctgcaggaagagccttaaagctccaaataccctatatctttctttaatcctgtgactcttttaaagataatattttatagccttaatatgccttatatcagaggtggtacaaaatgcatttgaaactcatgcaataattatcctcagtagtatttcttacagtgagacaacaggcgatgtcagtgagggcgatcatagggcataagcctaagccataccatgcagcctttgtgccagcaaccaaatcccatgtttcctactgtgttaagtttaaaaatgcatttattatagaattgtctacatttctgaggatgtcatggagaatgcttaattttctttctctgaacttcaaaatattaaatattttcttatttatttttttgattaaagtataaattaagacaccctattgacttccgggtaaggggagtcaattgattacccagcagcacagtatttgctttttataattccctttttaaatacttgttcttaattcactggttttccttttctgtcatttttcagagtttagattgtgagtccatgttttgtctgttgtgcctataaaggaaatttgaaatctgtatcattctactataaagacacatgcacacgtatgtttattgcagcactgtttacaatagcaaagacttggaaccaaccaaaatacccacaaatgatagaccggataaagaaaacgtgacacatatacaccatggaatactatgcagccatagaaaaggatgagttcatattcttcacagggacatggatgaagctggaaaccatcatcctcagcaaactaacacaggaacagaaaaccaaacaccgcatgttctcactcataagtgggaattgaacaatgagaatacatggacacagggaggggaacaccacaccctggggcctgttggggggatgggggctaggggagggatagcattaggagaaatacctgatgtagatgatgggttgatgggtgcagcaaagtaccatggcacatgtatacctgtgtaacaaacctgcacattcagcacatgtatcccagaacttaaagtataataaaaataaataaataatttcagtaagaacctgatcaagttgaacatgtatatatatgttatacacaagtttgaaacatatttctgtttttatatgttttcttatgatgcaagggcatactcttatgcaaataattaaaacttcataggtcttaatttcccatatctctatatattattatgacctatccaactggtaaccctatgaacaccttaaaataaacttgtatactcttaaaaaaaaaa

SEQ ID NO: 1705 - protein, 1624 aa, Homo sapiens
MSKRRMSVGQQTWALLCKNCLKKWRMKRQTLLEWLFSFLLVLFLYLFFSNLHQVHDTPQMSSMDLGRVDSFNDTNYVIAFAPESKTTQEIMNKVASAPFLKGRTIMGWPDEKSMDELDLNYSIDAVRVIFTDTFSYHLKFSWGHRIPMMKEHRDHSAHCQAVNEKMKCEGSEFWEKGFVAFQAAINAAIIEIATNHSVMEQLMSVTGVHMKILPFVAQGGVATDFFIFFCIISFSTFIYYVSVNVTQERQYITSLMTMMGLRESAFWLSWGLMYAGFILIMATLMALIVKSAQIVVLTGFVMVFTLFLLYGLSLITLAFLMSVLIKKPFLTGLVVFLLIVFWGILGFPALYTRLPAFLEWTLCLLSPFAFTVGMAQLIHLDYDVNSNAHLDSSQNPYLIIATLFMLVFDTLLYLVLTLYFDKILPAEYGHRCSPLFFLKSCFWFQHGRANHVVLENETDSDPTPNDCFEPVSPEFCGKEAIRIKNLKKEYAGKCERVEALKGVVFDIYEGQITALLGHSGAGKTTLLNILSGLSVPTSGSVTVYNHTLSRMADIENISKFTGFCPQSNVQFGFLTVKENLRLFAKIKGILPHEVEKEVQRVVQELEMENIQDILAQNLSGGQNRKLTFGIAILGDPQVLLLDEPTAGLDPLSRHRIWNLLKEGKSDRVILFSTQFIDEADILADRKVFISNGKLKCAGSSLFLKKKWGIGYHLSLHLNERCDPESITSLVKQHISDAKLTAQSEEKLVYILPLERTNKFPELYRDLDRCSNQGIEDYGVSITTLNEVFLKLEGKSTIDESDIGIWGQLQTDGAKDIGSLVELEQVLSSFHETRKTISGVALWRQQVCAIAKVRFLKLKKERKSLWTILLLFGISFIPQLLEHLFYESYQKSYPWELSPNTYFLSPGQQPQDPLTHLLVINKTGSTIDNFLHSLRRQNIAIEVDAFGTRNGTDDPSYNGAIIVSGDEKDHRFSIACNTKRLNCFPVLLDVISNGLLGIFNSSEHIQTDRSTFFEEHMDYEYGYRSNTFFWIPMAASFTPYIAMSSIGDYKKKAHSQLRISGLYPSAYWFGQALVDVSLYFLILLLMQIMDYIFSPEEIIFIIQNLLIQILCSIGYVSSLVFLTYVISFIFRNGRKNSGIWSFFFLIVVIFSIVATDLNEYGFLGLFFGTMLIPPFTLIGSLFIFSEISPDSMDYLGASESEIVYLALLIPYLHFLIFLFILRCLEMNCRKKLMRKDPVFRISPRSNAIFPNPEEPEGEEEDIQMERMRTVNAMAVRDFDETPVIIASCLRKEYAGKKKNCFSKRKKKIATRNVSFCVKKGEVIGLLGHNGAGKSTTIKMITGDTKPTAGQVILKGSGGGEPLGFLGYCPQENALWPNLTVRQHLEVYAAVKGLRKGDAMIAITRLVDALKLQDQLKAPVKTLSEGIKRKLCFVLSILGNPSVVLLDEPSTGMDPEGQQQMWQVIRATFRNTERGALLTTHYMAEAEAVCDRVAIMVSGRLRCIGSIQHLKSKFGKDYLLEMKLKNLAQMEPLHAEILRLFPQAAQQERFSSLMVYKLPVEDVRPLSQAFFKLEIVKQSFDLEEYSLSQSTLEQVFLELSKEQELGDLEEDFDPSVKWKLLLQEEP

SEQ ID NO: 1706 - DNA, 2800 bp, Homo sapiens
gaagtgactgcgggagtggagccggcgagagagtggcagcgggggctgatggaagtgcagtgggggctggagagggcaccctactgtatccagcatgctccaaggccacagctctgtgttccaggccttgctggggaccttcttcacctgggggatgacagcagctggggcagctctcgtgttcgtattctctagtggacagaggcggatcttagatggaagtcttggctttgctgcaggggtcatgttggcagcttcctattggtctcttctggccccagcagttgagatggccacgtcctctgggggcttcggtgcctttgccttcttccctgtggctgttggcttcacccttggagcggcttttgtctacttggctgacctcctgatgcctcacttgggtgcagcagaagacccccagacggccctggcactgaacttcggctctacgttgatgaagaagaagtctgatcctgagggtcccgcgctgctcttccctgagagtgaactttccatccggatagacaagagtgagaatggtgaggcatatcagagaaagaaggcggcagccactggccttccagagggtcctgctgtccctgtgccttctcgagggaatctggcacagcccggcggcagcagctggaggaggatcgcactgctcatcttggccatcactatacacaacgttccagagggtctcgctgttggagttggatttggggctatagaaaagacggcatctgctacctttgagagtgccaggaatttggccattggaatcgggatccagaatttccccgagggcctggctgtcagccttcccttgcgaggggcaggcttctccacctggagagctttctggtatgggcagctgagcggcatggtggagcccctggccggggtctttggtgcctttgccgtggtgctggctgagcccatcctgccctacgctctggcctttgctgccggtgccatggtctacgtggtcatggacgacatcatccccgaagcccagatcagtggtaatgggaaactggcatcctgggcctccatcctgggatttgtagtgatgatgtcactggacgttggcctgggctagggctgagacgcttcggaccccgggaaaggccatacgaagaaacagcagtggttggcttctatgggacaacaagcttctttcttcacattaaaacttttttccttcctctcttcttcatctcattatcctgattgactctgattataatagaaccatttttactttgctttgagggagatttttgatttaatggggaattttaaggtgtcatggaaatacagattctttgttttggccactgaatggactctctcttcagtgggattatcaaggaacttcagatcagggaaatctccacttcgggaccttctatctgcctcccaactcctcaaggtcacctatagaagcgagctaccaaaagacgtctcctaagcattttggtggcctagtgactcagggcagagtggccagcacacctctcatccgcccctcctgctccatcactgctgagcctctccccatctagaatgttggaactggagcatcataaagatagcaagctaccttccaaggccgagccagcccagagaggagcatgtcttcctttacctccccctaaggagatactacatgggagggggacacagaaaaagggaaggaaattggctagtctggctttttttttttttttttttaaaggcaaagattgacattattgaaggaaaggggatgaggacaactgtgaactcacagtgagccctgtggaaagaagagacagacagagtgtgggtttgttcggaggcctctgctgtcaatggattccaggagcaaggccatttgtcgcgctttccaaatttcttaggcatttattttgataagtttatagccatcatgtttctaagagacttggagacaccagcaaactgctagaactcaaactcttcaattactcaaagaaggagccatttcagttaactcaagtgaatgaaagagttttggaatctgctgtgggtccttccctgttgaccatttggtaacttataatctgacaaaaactcttgagctgcaacaggccttgccagagggctcaggatgggaaaggaagaaggggataggaaaagaagaggtaattttacatttcccctttaaagtaaattttagccaactcatcattctgaaatgtccctataaagaatgagtcgaactagaccagaagccagcctactccttcttacatagcttctccaacaggggtagcaatgacctgtccacttcaaacacagataaggcctgccatcctcattggttaaaggcacacgtgagactttcagtgggctctgctgagaaggaaggcagcccaggagtcaggtatgcaggcattgcattgtcagtgtctgctctcagagtttacacattcaattgcttccaagggtgaatctcctgctctgtgaatgctatcagaccccaaaggccaaccttgggctgggtctatgtacgttcttccgaagcactgatgatcaaaattgaagacacattcagaggtttgattggttgagattaactggtgtggtggttggtgtatgtatgttttatttttatgtctttgtatgtagttctacataatgcaaattgtgctttctgatggacaagacctcataactgtgattaatatcaataaaaaggggatgttgtggaaaaaaaaaaaaaaaaaaaaaaaaaaaaaaaaaaaaaaaaaaaaaaaaaaaaaaaaaaaaaaaa

SEQ ID NO: 1707 - protein, 335 aa, Homo sapiens
MLQGHSSVFQALLGTFFTWGMTAAGAALVFVFSSGQRRILDGSLGFAAGVMLAASYWSLLAPAVEMATSSGGFGAFAFFPVAVGFTLGAAFVYLADLLMPHLGAAEDPQTALALNFGSTLMKKKSDPEGPALLFPESELSIRIDKSENGEAYQRKKAAATGLPEGPAVPVPSRGNLAQPGGSSWRRIALLILAITIHNVPEGLAVGVGFGAIEKTASATFESARNLAIGIGIQNFPEGLAVSLPLRGAGFSTWRAFWYGQLSGMVEPLAGVFGAFAVVLAEPILPYALAFAAGAMVYVVMDDIIPEAQISGNGKLASWASILGFVVMMSLDVGLG

SEQ ID NO: 1708 - DNA, 201 bp, Homo sapiens
atgatgctgctgttctaccctggctgcagggatgggctgatcgtggaggagggacagcgctgccgctgccactccctcgcctgcaacacgtgcctctgtgtgcacttcacccacaagcttcagacccactctgcagatgagccgaagaccaccttctaccagtgctgcaggactcagtgtggacaccactggagggattag

SEQ ID NO: 1709 - protein, 66 aa, Homo sapiens
MMLLFYPGCRDGLIVEEGQRCRCHSLACNTCLCVHFTHKLQTHSADEPKTTFYQCCRTQCGHHWRD

SEQ ID NO: 1710 - DNA, 2996 bp, Homo sapiens
cgcagccacccatgcgcgcgcgctcgcaagaccaccagcgcccagagccccagtctgaggcttggcgccgggggtctgcgggcgaggggagctctctacgtgcgaggggctagcgggagccggcacaagagggtcgaggagccaggaaccccaaacgtccggcgccaggcgctagccaagctgctgcgcgccccggcgcccagctggctcggggacagccgctgggtgtcggagaccggagctagcggattgcagcggaaaagcaaagatgtcacactggatccttggcctccagggtccattaaggtgagaataagatctctgggctggctggaactagcctaagactgaaaagcagccatggacatggcggatgagccactcaatggaagccacacatggctatccattccatttgacctcaatggctctgtggtgtcaaccaacacctcaaaccagacagagccgtactatgacctgacaagcaatgcagtcctcacattcatctattttgtggtctgcatcattgggttgtgtggcaacacacttgtcatttatgtcatcctccgctatgccaagatgaagaccatcaccaacatttacatcctcaacctggccatcgcagatgagctcttcatgctgggtctgcctttcttggctatgcaggtggctctggtccactggccctttggcaaggccatttgccgggtggtcatgactgtggatggcatcaatcagttcaccagcatcttctgcctgacagtcatgagcatcgaccgatacctggctgtggtccaccccatcaagtcggccaagtggaggagaccccggacggccaagatgatcaccatggctgtgtggggagtctctctgctggtcatcttgcccatcatgatatatgctgggctccggagcaaccagtgggggagaagcagctgcaccatcaactggccaggtgaatctggggcttggtacacagggttcatcatctacactttcattctggggttcctggtacccctcaccatcatctgtctttgctacctgttcattatcatcaaggtgaagtcctctggaatccgagtgggctcctctaagaggaagaagtctgagaagaaggtcacccgaatggtgtccatcgtggtggctgtcttcatcttctgctggcttcccttctacatattcaacgtttcttccgtctccatggccatcagccccaccccagcccttaaaggcatgtttgactttgtggtggtcctcacctatgctaacagctgtgccaaccctatcctatatgccttcttgtctgacaacttcaagaagagcttccagaatgtcctctgcttggtcaaggtgagcggcacagatgatggggagcggagtgacagtaagcaggacaaatcccggctgaatgagaccacggagacccagaggaccctcctcaatggagacctccaaaccagtatctgaactgcttggggggtgggaaagaaccaagccatgctctgtctactggcaatgggctccctacccacactggcttcctgcctcccacccctcacacctggcttctagaatagaggattgctcagcatgagtccaattcagagaacggtgtttgagtcagcttgtctgattgaatgataatgtgctaaattgattacctcccccttaaagcgaacactgaaatgcaggtagacaattcaaagtctggagaagagggatcatgcctggatatgatctttagaaacaacaaaaatagaaaaaaataagtatctgtgtgtttgtgtattgaaaactcaatatgtaatcttgtgtttttatatgtatacttgtatattcctatttattctctgtataggcattacctacgttcctgtgtttacatacacaagtagcaaattcgagtatgcatagtgtagatggacatttgccacaacacactgcccgcagaaatggacttaccgtgaagccaataaagttcaagcttcagggatctctcttgcacgggccttgccaaggcccaggagggacttgggcagtatgttcatgtggtcatatgtttttgtaaaaaattgtgaaagtaagatatgtttgtattgtttttcttaaagaggaacctcgtataagcttcaagcctcacaaaccttctagcctctgcccttggggatttgcttcattaatttcaggcaagtgaggtcaatgtaagaagggaaagggagaagatatttgaagaaccagaatgtaaattcatgtgtttccacttctcagatatagtcagagaattattcatttgcccaaaaggacttaagtggttgtggtcatccatcattgtatttatcaagacaaagccaactttgttataagattgcatttttttcttttcaaattgctttagtttttcttagggagctatgagggggaaaaatcactaacatgaaaggcaaaaaatggactatgattcctgtggggaaacaatttcattctctccatcgtgaaaataagtgaataagagtgaagcaaaattacacctttatgagaaaccataaaattgtttttatttttcaggccagacatagcttcctaatgaaagaaaatggaaatgtaattcgacgactcctcaaaggggactttagaggacttcatacaaagctgggcattaagaaaaccacaatgcatggccgggcgtggtggcttacacctgtaatcccagcactttgggaggccgaggtgggtggatcacccgaggtcaggagttcgagaccagcctggccaacatggtgaaaccccatcactactaaaaatatgtaaattagtcgggcgtggtgtcacgtgcctgtaatcctagctgctcgggaggctgaggcaggagaatcacttgaacttgggaggtggaggttgcagtaagctgagattgtgccactgcactctagcctgagcaacaagagcaaaactcagtctcaaaaaaaaaaaaaaaaaaaaaaaaaaaaaaaaaa

SEQ ID NO: 1711 - protein, 369 aa, Homo sapiens
MDMADEPLNGSHTWLSIPFDLNGSVVSTNTSNQTEPYYDLTSNAVLTFIYFVVCIIGLCGNTLVIYVILRYAKMKTITNIYILNLAIADELFMLGLPFLAMQVALVHWPFGKAICRVVMTVDGINQFTSIFCLTVMSIDRYLAVVHPIKSAKWRRPRTAKMITMAVWGVSLLVILPIMIYAGLRSNQWGRSSCTINWPGESGAWYTGFIIYTFILGFLVPLTIICLCYLFIIIKVKSSGIRVGSSKRKKSEKKVTRMVSIVVAVFIFCWLPFYIFNVSSVSMAISPTPALKGMFDFVVVLTYANSCANPILYAFLSDNFKKSFQNVLCLVKVSGTDDGERSDSKQDKSRLNETTETQRTLLNGDLQTSI

SEQ ID NO: 1712 - DNA, 3035 bp, Homo sapiens
ggcgtaggtagatcgccgggggctgacgagtgcaccatggccaccgcggcaacctcacccgcgctgaagcggctggatctgcgcgaccctgcggctcttttcgagacgcatggagcggaggagatccgcgggctggagcgccaggttcgggccgagatcgagcacaagaaggaggagctgcggcagatggtgggcgaacggtaccgcgacctgatcgaggcggccgacaccatcggccagatgcgccgctgcgccgtggggctagtggacgccgtgaaggccaccgaccagtactgcgcccgcctccgccaggccggctcggccgcgccccggccaccgcgggcccagcagccacagcagccatcccaggagaagttctacagcatggctgcccagatcaagctactcttagaaattccggagaagatctggagctcgatggaagcctctcagtgtctccacgccacacagctctacctgctctgctgccacctccacagcctgctccagctggattcttctagttcccgatacagtcccgtcctctcccggtttcctatactcatccggcaggtggcagccgccagccacttccggtcaactattctgcatgaaagcaagatgttgctcaaatgccaaggtgtgtctgaccaagctgtggccgaggccctgtgctctataatgctcttagaagagagttctcctcgccaagccctcacagacttcctgctggccagaaaggcaactattcagaaacttctcaaccagccacaccatggtgctggtatcaaggctcagatttgctcattagtggagttgctggccaccactctgaagcaagctcatgcccttttctacactttgccagaaggactgctgccagatccagccctgccatgtggcttgctcttctctactctggagaccatcacaggccagcatcctgccggaaagggcactggtgtcctgcaggaagagatgaaactctgcagctggtttaaacacctgccagcatccatcgtcgagttccagccaacactccgaacccttgcacatcccatcagtcaggaatacctgaaagacacgctgcagaaatggatccacatgtgtaatgaagacattaaaaatgggatcaccaacctgctcatgtacgtgaagagcatgaagggtctcgcgggaatccgggacgccatgtgggagttacttaccaatgagtccaccaatcacagctgggatgtgctatgtcggcggcttctggagaagccgctcttgttctgggaagatatgatgcagcaactgttccttgaccgattacagactctgacaaaagaaggctttgactccatctccagtagctccaaggagctcttggtttcagctttgcaggaacttgaaagcagcaccagcaactccccttcaaataagcacatccactttgagtacaacatgtcgctcttcctctggtctgagagtcctaatgacctgccttccgatgcggcctgggtcagcgtggcaaaccggggtcagtttgccagtagcggcctctccatgaaagcacaagccatcagcccttgtgtacagaacttctgttctgccctggattctaagctgaaggttaaactagatgacctcctggcttacctcccctctgatgactcatcactgcccaaggacgtttctcccacacaggccaagagttctgcctttgacagatacgcagatgcggggaccgtgcaggagatgctgcggactcagtccgtggcatgcatcaagcacatcgtggactgcatccgggcagagctacagagcattgaagagggtgtgcaagggcaacaggatgccctcaacagtgccaagctgcactcagttcttttcatggccagactctgccagtccctgggagagctgtgcccccatctgaagcagtgcatcctgggaaaatcagagagctcagagaaaccagcaagggagtttagggctctgagaaaacagggaaaggtgaaaactcaggaaatcattcctacacaggccaagtggcaagaggttaaagaagtactcctccagcagagcgtgatgggctaccaggtctggagcagtgcagttgtgaaagttttgattcatggattcacccagtcattacttctagatgatgctggctcagttctggccacagccaccagctgggatgagctagaaattcaggaggaggcagagtctggcagcagtgtcacatccaagatccgactccctgcacagccgtcctggtatgtacagtccttcctgtttagtttatgccaggaaattaatcgggttggaggccatgccttgccaaaggtgacattacaggagatgctgaaaagctgtatggttcaagtagtagctgcctatgagaaactctccgaagaaaaacagattaagaaagaaggtgcatttccagtcacccagaaccgggcgctgcagctgctttatgatctgcgttacctcaacattgttctgacagccaagggtgacgaggtgaagagtggccggagcaagccagactccagaattgagaaagtgactgaccacctggaagccctcattgatccatttgacctggacgttttcacgccacacctcaacagcaaccttcatcgcctggtgcagcgaacttctgttctgtttggattggtgactggtacagagaatcagctcgccccccggagcagtacgttcaactcccaagaaccccataacatcctgccactggcatccagtcagatcaggtttggacttctcccactgagcatgacaagcactcgaaaggctaaatcaaccagaaacatcgaaacaaaagctcaggttgtccccccggcacgctccacagctggtgacccgacagttcctggctccttgttcagacagcttgtcagtgaagaagacaacacgtctgcaccttcattattcaaacttggctggctctctagtatgactaagtaacatggcaacacatctgtctctccctaaataaatactaccacattatttcttctaaa

SEQ ID NO: 1713 - protein, 980 aa, Homo sapiens
MATAATSPALKRLDLRDPAALFETHGAEEIRGLERQVRAEIEHKKEELRQMVGERYRDLIEAADTIGQMRRCAVGLVDAVKATDQYCARLRQAGSAAPRPPRAQQPQQPSQEKFYSMAAQIKLLLEIPEKIWSSMEASQCLHATQLYLLCCHLHSLLQLDSSSSRYSPVLSRFPILIRQVAAASHFRSTILHESKMLLKCQGVSDQAVAEALCSIMLLEESSPRQALTDFLLARKATIQKLLNQPHHGAGIKAQICSLVELLATTLKQAHALFYTLPEGLLPDPALPCGLLFSTLETITGQHPAGKGTGVLQEEMKLCSWFKHLPASIVEFQPTLRTLAHPISQEYLKDTLQKWIHMCNEDIKNGITNLLMYVKSMKGLAGIRDAMWELLTNESTNHSWDVLCRRLLEKPLLFWEDMMQQLFLDRLQTLTKEGFDSISSSSKELLVSALQELESSTSNSPSNKHIHFEYNMSLFLWSESPNDLPSDAAWVSVANRGQFASSGLSMKAQAISPCVQNFCSALDSKLKVKLDDLLAYLPSDDSSLPKDVSPTQAKSSAFDRYADAGTVQEMLRTQSVACIKHIVDCIRAELQSIEEGVQGQQDALNSAKLHSVLFMARLCQSLGELCPHLKQCILGKSESSEKPAREFRALRKQGKVKTQEIIPTQAKWQEVKEVLLQQSVMGYQVWSSAVVKVLIHGFTQSLLLDDAGSVLATATSWDELEIQEEAESGSSVTSKIRLPAQPSWYVQSFLFSLCQEINRVGGHALPKVTLQEMLKSCMVQVVAAYEKLSEEKQIKKEGAFPVTQNRALQLLYDLRYLNIVLTAKGDEVKSGRSKPDSRIEKVTDHLEALIDPFDLDVFTPHLNSNLHRLVQRTSVLFGLVTGTENQLAPRSSTFNSQEPHNILPLASSQIRFGLLPLSMTSTRKAKSTRNIETKAQVVPPARSTAGDPTVPGSLFRQLVSEEDNTSAPSLFKLGWLSSMTK

SEQ ID NO: 1714 - DNA, 4678 bp, Homo sapiens
atttggaagatgcttccagtcaagtctcaatctcagtcggtcactggtccatgtatatttcatggacatctaccctgtgctgggcactgggcagacaacagtctactggacccagtctcactctcaaggggactgtagtccaagagagaggcaggtagattatcagatgaagaaactgaggctcaaagagccacagcgggacggaggaggtggacccggctctgatgcaggtggctggttcgatggcagactcccctgtgccgagactcccagaccaaatccggaggtcctggagtagagtgggtgggtccgccagggcatggccaggctgcctgtctctggagactcccccaaggaagtttcttgaccttgaggatgataacgcagggcaggctcttgagggctgtgcagggactccctggagagccctgggaaaagcaggtccccgcctgcctgggcctctgcctctgctgcaggggccagcacaggtgtcaggtccccacacatttcatgtccaggccattttcccactctagggccaaggctgggcacttcccagtcagtggcacagctggtactgtggggtctctcgctctgcaaaggttggtttcaatcccaagtgtcactgctggaaacactggccaccccgggacatgtggtcttgccagtccttctgcagggctctgtttcttaggtcccaatcatctgcagggagcactagtccgagatcttccaagatgctgggcaggaacaagcctgctatgctcattcccaaaggactccacatctagataaatgaaggcctggaaggctctttggctctacactagcaaaacagcttacgtcaccctgcctaaagagacagtcaggaaatccccttgttcctgggcgaggagaagctggcccacacggagtgacggcattgagcagatactacccttggctcgctcatggatggggcggggcctgctgaccttgacagcaatcaggggagggggttcggagggaagtggttagctggtgaaggtgagggaaaggactggagttaggacagggtgcagcgaccacatcctgtgacgaggaggcatctgtgacctgtgtgatctgccaggcaggcagcacaagtcattgtactgctactatgcccgctactgagacaggaacaaagagaggctgtttctgcctcttggtgctctccattggacatgtctgctgggcagtgctggcttttaccataggtatttttctgctcttccttccctcctcctctccctctctcttttccagggcactcacacacacacacttgcacacatgtgcacagttgcacacacatgcattgaacacatgtgcacatatatgcgtttgcatccacttgcacacccacacacctgtgcactagcacccatttgcacgcatgtccacacacttgcacacatgtgcatttgcagaaatgcacccttgcacttgtgtgacacacctgcacacttgcatacacccatttgcatacaggcacagacacactcgcatacatttgcacacacagccacaaacttgcacaagcagcacttgtacactgacacatatccgtttgtgcctatacagtgcacacttacacatttgcacacagctgtgcttgctcacacatttgcacacacccacctacacacttgcacacatactacacacttgagcgtgcagcacacatacctatgtgcatacatgcacatttgcacatgcacacagcagtggcacacacttctctatcattctccctagtcactgttctcccctgtgattcccacccctctgaccgcccctgctcacttgctgccccctccactggaaggggcctggcctggtgccctgtctctgtctgtctccaccgtgcagggaggtttcacaaggactggctgatgtctcgcctcgagctggcctggccgcagctgctgctgagcggaagtctctgaggggcgaggctgagaggaaaccacactctcactggggttcccgcagctctggcctctggggaggggtgtggagatgtgtgggcgtgagatggctttgagggagggacagcatgaagcttttcgctgggtctgtcttttcagtctccaggacaaaactaggccactgtgccccaggagaagggaaaacccacgtccccccaggctgggcccaccggcaaatcgggctcccaggcccttctcagcccatgcttctgtctctgccttgtcaggcttattctttgaggctttgaagcagcctttggtgggcaaacggcatctcagggaaccctggcctgtctcctccagagcttgtgccttggccctgggcaggggccaccatgggctgttgatgtaaatggcatccccagagttgtgcagtgtgggggcaaccctgaggtatcagcccagccccctgtctgcagcttttgctacccagcccagctccagctctgtctttgtcactgggggtggtgggggaggctggagctcagggacggggcactcctggcagattctccctgccccaggtggaaggggaggggggaagtacccatcctccatcctcctatcctgccagcggggtgggcgctactatgctggggagggtctggctgaataatgatgctgagctcgggacaccagccttctccgtgcacctactgtgtgccaagtaccatcccaagagcattatgggtggtaacttatacaatgactcagagaggcaccgctataatcacccccagtttctgtctggttccagtcctggccacacagctaataagcagcaaatggatttgatctgattttatctgaacccaggcaggctggcccagagcccactgtctaatcattgggccgtccagcctgtcaagactccaggctcgctggcgtcgtacccctctgtcatttcccagggaaacaagctctagcagcacctgccctgtgggtactttggccctgcctccctgcctccctgcctccctgcctccctgcctctcatgataggagccaaagaatggtctcctttgcaggaaaggagctcgacgggggtcttctcttgcaggctctgtcttgcatgtgggtcctgagctttctcattgagtaaggggagggggcagctggttcagtccagcgcagagtggatggaggccggttgaggctttcttgaaaccctaagcccagctgggatcctcggggaaggatccttcgctgggatctgactggctcttccagaggtcagtggggcatgtggctggagcccaagtaggagggaggaagaaatggtggtctgagtcctggggtgaccaggccctgaacctgccctgctgggaccccattccctgactctaggccccctttccccaccacacaggacaccaggctcttgccttaagacaggaaaggaaatgccttatggtgaacaattctccaggtccctattgtggctccaacagatgccagagggacatggcaggtgaccctggtctcctacgaccctgactttacttgctgtcatgaggccaatctcttaccttgacccacctcctgcctctgctttcagaagggcagaagagcgggcctcctctagcttcccagccgcctcccgcctcctgccgcccggcagcgctgggccccccagcagcgaggttcaggaggggaagaacctctcgcaggtgaacaaattgctgcacatcagacacattcttttcaagcctcattttctctccttttcatgctaactttcccactattaaagagcatttttaaaaagaagatgaaaaaaggcagagagaaaagaaggatgaaagtgtgagcgggtatccggaagtccttttcaattgcctgctgctgtgcagggtctgaactaagagcaagaaattggaggatgctggaggggcgaggtttcgtttcagtcctgcctattgggccaagtctggggcggggaaggagaggtgatggaggtgggcctggctgggccctgcggccctggaggctgcccctctgcctgccacccagcccctggcctgtgcctggcacaggaagcccgtcaataatttcttgttgaatgaatgaaagaaaagaaatcagtggatggagaagggctggattcttttgtggggaccttccacgccaccttctctgtggggctctagggctgagaaagaaaggacagatttggcaaaggtcaggcaggggctgggaaagcattaggtggaccaggcatgctacagcaaggccacgcctgcactgttgtcccactggtgacacccatgggtgcagccatggcgggtgggcgcagtttcacatgggattgggggtgagcctgggttgggtgggcgacccccaccccttccctacccctctccccaccagcaggtactactgggtctgcgtgaagataaaagctcaggaacatgccaggaaggtgtgaccatgatgatacctctgagatgaacccaagaagaaacagcagagtattacaaaggggaacaggactcagggtggacttcaagtatcattaaacataatcaaatatttaaaaagttattattgactgggtgcagtggctcacggctttaatcccagcacttagagaggccaaggtaggaagattgctttagcctaggagtttgagaccagcatgggcaacatagtgagaccccatctct

SEQ ID NO: 1715 - protein, 154 aa, Homo sapiens
MCTVAHTCIEHMCTYMRLHPLAHPHTCALAPICTHVHTLAHMCICRNAPLHLCDTPAHLHTPICIQAQTHSHTFAHTATNLHKQHLYTDTYPFVPIQCTLTHLHTAVLAHTFAHTHLHTCTHTTHLSVQHTYLCAYMHICTCTQQWHTLLYHSP

SEQ ID NO: 1716 - DNA, 4192 bp, Homo sapiens
gactggcggcgggcgccgcggtcgggctggctgccgggcagcatggaggagctgagcagcgtgggcgagcaggtcttcgccgccgagtgcatcctgagcaagcggctccgcaagggcaagctggagtacctggtcaagtggcgcggctggtcctccaaacataacagctgggagccggaggagaacatcctggacccgaggctgctcctggccttccagaagaaggaacatgagaaggaggtgcagaaccggaagagaggcaagaggccgagaggccggccaaggaagctcactgccatgtcctcctgcagccggcgctccaagctcaaggaacccgatgctccctccaaatccaagtccagcagttcctcctcttcctccacgtcatcctcctcttcctcagatgaagaggatgacagtgacttagatgctaagaggggtccccggggccgcgagacccacccagtgccgcagaagaaggcccagatcctggtggccaaacccgagctgaaggatcccatccggaagaagcggggacgaaagcccctgcccccagagcaaaaggcaacccgaagacccgtgagcctggccaaggtgctgaagaccgcccggaaggatctgggggccccggccagcaagctgccccctccactcagcgcccccgttgcaggcctggcagctctgaaggcccacgccaaggaggcctgtggcggccccagtgccatggccaccccagagaacctggccagcctaatgaagggcatggccagtagccccggccggggtggcatcagctggcagagctccatcgtgcactacatgaaccggatgacccagagccaggcccaggctgccagcaggttggcgctgaaggcccaggccaccaacaagtgcggcctcgggctggacctgaaggtgaggacgcagaaaggggagctgggaatgagccctccaggaagcaaaatcccgaaggcccccagcggtggggctgtggagcagaaagtggggaacacagggggccccccgcacacccatggtgccagcagggtgcctgctgggtgcccaggcccccagccagcacccacccaggagctgagcctccaggtcttggacttgcagagtgtcaagaatggcatgcccggggtgggtctccttgcccgccacgccaccgccaccaagggtgtcccggccaccaacccagcccctgggaagggcactgggagtggcctcattggggccagcggggccaccatgcccaccgacacaagcaaaagtgagaagctggcttccagagcagtggcgccacccacccctgccagcaagagggactgtgtcaagggcagtgctacccccagtgggcaggagagccgcacagcccccggagaagcccgcaaggcggccacactgccagagatgagcgcaggtgaggagagtagcagctcggactccgaccccgactccgcctcgccgcccagcactggacagaacccgtcagtgtccgttcagaccagccaggactggaagcccacccgcagcctcatcgagcacgtatttgtcaccgacgtcactgccaacctcatcaccgtcacagtgaaggagtctcccaccagcgtgggcttcttcaacctgaggcattactgaagccccggcgccaccagctgcgcggtcttactccccttccctgcctatggtgtcgcttggctaagtgactcccagcccaagccccctcaagagtctgggtcgggggaggaggagtgggtggcctccttgatgggcaggcttggaagggacttctcccgcaccccactctgtcccaggacatagggcagggggcctcactgccttgttggtctccaccttgttcctacctctgcaggcctctttgctctcccctcttgcctcaggaaacccggtggcacctgtggctccaggtgactgtcttgaacagagcgggcttcttcatggctgcgttgttgctgagtttgaactgctcctccctggcctgcgtgactgaatcacagctttggtccctgtcttgcaggggctgaggtgtcaggaggggacttctggcccaccttgccttcagccctggagtgggcagagagtattgtggggaggcatggccagtgggactagtgttccctccatctggccacagcttttgggagatggggtgggcaggggtggtcctggctggcattgcctgagccggcagtgatgaagtggggagcttgcccttgacaggtgggggctggctggggccttaatgtgaaaagacagtggcaggcagctggagtagagcgagcccagcagccctaaaaggctgccttcatggccatctagccccagttcagggcagcatccatagcccacaagccagcgtgggtggggcgggggtggtcccacagctgggttccacctgaagagcctccgtgcctcggagcaggagaggcaggctatggctgccaccctccctcctgcctgtgtcccagtgagaactgacctgagtccccttccaaacccagacccacctcctgccccaggcccactgaagcatgttccatttctaaaaagcccagagttcagtgtgtcccaaggaaaacccaaagtggaggtgctcaggtccaggggagtccagtgggcaggacccttggcaggcaagcccctcccttcactcccaggacctaccttctgctagtaaaggactggcttcattctaattatggcccacagactgccccggagacctggaggacagcagtgctggcacttgggtgtccatgggcccgtctgccggctctgcctgtgctgcaagtgttggccgtgggtccagccaacaactccctacgtcctgtgtggggccctgcccaagtggatgaggcattccttgaggagtatcattttccctgacaatccccatcacctttaggggttccctgcttggctcctttccagctgaaaaactagacctgtgccattggggaagctggacaaagtctagggggcccgcctggtagagggtcccgggaagctggatctgtcagcctcggccctgaggcccctgttaactcaagactgtgagctgcctctaggtggtcacgtctgggagctagcttgtatggcttctgaccagtatcaggatttctgttctgagagcagcgtgggcagcaaggcagggcagcccagaggtggcagcggcaggcaatctggtcactaggtctttgtgatgccaaaaataaaagagggtggggtgggtgctttctgttcctctgattggatggagtccgccagcaggcatggggctacattccagtgcctgactatagggaggcactcctgattccatggagcagcccggactttgagaatgggctctggtttgcggggggcaggcgtaccagactgcaagaccccccagtacctcaccgtgccaaataggaagaggtggccttggtgtagccaaatggatctttttaacagtgtgcctttggggagggacccatgtccatggcttcgttgagggccatccatatgccagctgggggccagcccacagtggccatattggctgcagcaggaatggtgcccacctcggcgaattgaagggctaagagtcccagatagctaggccagagctggaagcagacagtaaggggaagagctgctcccacaggagagggagagattccagctcactgcgcagcctgggaggaggcgtggatcctggcacgctgagcctcaggcaccagcctccctgtgctcgacagcaaagtcttgactccttcctgctgagcactgtgctaccttcactgctccaaagccagactaacagctctccaagcccttggggtgactcggcttccaggagctgttggagaaatgaggatgtctgtccctgtctgcctgggcaggccagattcctccccagcagccgggtctctccagaccctgattcggtgcctttctgtttaccagctacttcaatcccaaagtttgaatctgcagataccttactcccagccactttgccttcttactgtgttgtgtgtttttcctggtgcttcaagagcgtgtgcagggcaagtgccgtcactgggaactgcaccagatgctcagacttggttgtcttatgtttaccaataaataaaagtagactttttctatttttatttgctgctaaaaaaaaaaaaaa

SEQ ID NO: 1717 - protein, 532 aa, Homo sapiens
MEELSSVGEQVFAAECILSKRLRKGKLEYLVKWRGWSSKHNSWEPEENILDPRLLLAFQKKEHEKEVQNRKRGKRPRGRPRKLTAMSSCSRRSKLKEPDAPSKSKSSSSSSSSTSSSSSSDEEDDSDLDAKRGPRGRETHPVPQKKAQILVAKPELKDPIRKKRGRKPLPPEQKATRRPVSLAKVLKTARKDLGAPASKLPPPLSAPVAGLAALKAHAKEACGGPSAMATPENLASLMKGMASSPGRGGISWQSSIVHYMNRMTQSQAQAASRLALKAQATNKCGLGLDLKVRTQKGELGMSPPGSKIPKAPSGGAVEQKVGNTGGPPHTHGASRVPAGCPGPQPAPTQELSLQVLDLQSVKNGMPGVGLLARHATATKGVPATNPAPGKGTGSGLIGASGATMPTDTSKSEKLASRAVAPPTPASKRDCVKGSATPSGQESRTAPGEARKAATLPEMSAGEESSSSDSDPDSASPPSTGQNPSVSVQTSQDWKPTRSLIEHVFVTDVTANLITVTVKESPTSVGFFNLRHY

SEQ ID NO: 1718 - DNA, 1061 bp, Homo sapiens
gactggcggcgggcgccgcggtcgggctggctgccgggcagcatggaggagctgagcagcgtgggcgagcaggtcttcgccgccgagtgcatcctgagcaagcggctccgcaagggcaagctggagtacctggtcaagtggcgcggctggtcctccaaacataacagctgggagccggaggagaacatcctggacccgaggctgctcctggccttccagaagaaggaacatgagaaggaggtgcagaaccggaagagaggcaagaggccgagaggccggccaaggaagctcactgccatgtcctcctgcagccggcgctccaagctcaaggtgggtggctgcgctgggtatgctgaccccacctcccagcacccccttggcgtagggggcaggcagagggagggtttggggccctcaggaagggggtggcacttctgccaacagtctgtccctctactcggaaaacaggagccccctttcttcctgtctctcagcttctgctgccaggggccccagccggctgagagttcctccccgcccctcccaggggcttcctgcttcagcctgtcctgcacgcctctctgctgggtggcagggtcaaactgctgcagacaagcactcttccctcccagggggtccttgggggacggaaaggaacaggaagcatgcgtacagtaggtgctcataggattgccggctggatgtgactcaaaagcctaagatttgggggctactccgggcccacctgcgggtgcaccttaaatcgaggtggccacgaaaggcagggctgactgaatagccagggggtgccaggaggggccttggaggagggcagaggcagtgtgggctgatgatgtgctttggccttctcgggactgtcctgtcacccctcctcgctacagtgatgggctcaccccgccacaggtatgcatgcgcccctggggtccgtggtagggcccctccctcccctgaggacaggtgaggcaggacaggatgggggaggagggcctggcctcagtcccgggtgtggctttgattccctcctccgggcactgtccctg

SEQ ID NO: 1719 - protein, 211 aa, Homo sapiens
MEELSSVGEQVFAAECILSKRLRKGKLEYLVKWRGWSSKHNSWEPEENILDPRLLLAFQKKEHEKEVQNRKRGKRPRGRPRKLTAMSSCSRRSKLKVGGCAGYADPTSQHPLGVGGRQREGLGPSGRGWHFCQQSVPLLGKQEPPFFLSLSFCCQGPQPAESSSPPLPGASCFSLSCTPLCWVAGSNCCRQALFPPRGSLGDGKEQEACVQ

SEQ ID NO: 1720 - DNA, 1542 bp, Homo sapiens
ctgacgtcagcgggagagtattatggtctgtcgtgcgctggctgctgcttttctgctcctggaagcggcctaggggggaagcggcgagtcaacatggagctttcagcggtgggggagcgggtgttcgcggccgaagccctcctgaagcggcgcatacggaaaggacgcatggaatacctcgtgaaatggaagggatggtcgcagaagtacagcacatgggaaccggaggaaaacatcctggatgctcgcttgctcgcagcctttgaggaaagggaaagagagatggagctctatggccccaaaaagcgtggacccaagcccaaaaccttcctcctcaaagcgcaggccaaggcaaaggccaaaacttacgagtttcgaagtgactcagccaggggcatccggatcccctaccctggccgctcgccccaggacctggcctccacttcccgggcccgggagggccttcgaaacatgggtttgtccccgccagcgagcagcaccagcaccagcagcacctgccgcgcagaggcccctcgggaccgggaccgagaccgggatagggaccgggagcgggatcgagaaagggagagggagcgagagagggagcgggaacgtgagagggaacgagagcggggtaccagcagagtggatgacaagcccagctcaccgggggacagctcgaagaagcgaggccccaagccccggaaggagctcccggacccctcacagaggcccttaggcgaacccagcgccggcctcggagagtacctcaagggcaggaagctggacgacaccccttccggggcaggaaagtttccagccggccacagtgtgatccagctggcccgaagacaggactcggacctggtgcagtgtggtgtgaccagccctagctcagctgaggccacgggcaaactggctgtggacaccttcccggccagggtgataaagcacagggctgccttcctggaggccaaaggccagggtgccctagatcccaatggcacccgggtccgacatggctcaggcccccccagctctggggggggcctgtaccgggacatgggggcccaggggggaaggccctccctcatcgccaggatccctgtggccagaatcctgggggacccggaggaagagtcctggagcccctccctgactaacctggagaaggtggtggtcacggacgtgacctcaaactttttgaccgtcaccattaaggaaagtaacacggaccaaggcttttttaaagagaaaagatgaatgctgggtgggtgtgtccaggaggagagcaggggagagagtgagcgtgagcttggcatagtgatttttatttctgggtgggatgtggccttttggctggtcccgtccctgatgtcacccccaccccaccagcccctttcatccctccttcctccccctcagtttttgttggaaagattatctctagagttatattttctattagatgtaaatatgttatttaagaaaaatatctaaatatatatatttcaactcgaaaaaaaaaaaaaaaaactcgag

SEQ ID NO: 1721 - protein, 389 aa, Homo sapiens
MELSAVGERVFAAEALLKRRIRKGRMEYLVKWKGWSQKYSTWEPEENILDARLLAAFEEREREMELYGPKKRGPKPKTFLLKAQAKAKAKTYEFRSDSARGIRIPYPGRSPQDLASTSRAREGLRNMGLSPPASSTSTSSTCRAEAPRDRDRDRDRDRERDRERERERERERERERERERGTSRVDDKPSSPGDSSKKRGPKPRKELPDPSQRPLGEPSAGLGEYLKGRKLDDTPSGAGKFPAGHSVIQLARRQDSDLVQCGVTSPSSAEATGKLAVDTFPARVIKHRAAFLEAKGQGALDPNGTRVRHGSGPPSSGGGLYRDMGAQGGRPSLIARIPVARILGDPEEESWSPSLTNLEKVVVTDVTSNFLTVTIKESNTDQGFFKEKR

SEQ ID NO: 1722 - DNA, 498 bp, Homo sapiens
atggccaaagtcctctcggagctggggcctgggccagtggaagagctacccaagtcagcctacatgcaccagctcttgggcctcaacctcctcttcctgctgtcccaggattaggtggctgagttccacatggagttggagtggctgcctgccacggacacacagaccaatgcctacatcaagcgccctgtgtccctggagccatacctgatggagggcggctacaacaaggtgttcctggccaagggtaacatccctgccaagagctacaccttcatccacatcctgcttgacactatcagggatgagatggctgggtgcattgagaaggcctatgagaaaatccttttcaccaaggccacctggatcctcttcctcaacacacccaaacagatgatggacaacaccaagaagtgagggtgggtcctgggccccaacaactactacagttttgccagccagcagcagaagctggaagacaccaccattccaagttga

SEQ ID NO: 1723 - DNA, 717 bp, Homo sapiens
atgacgtcctccagggccttgggctccgaggaaccgaagactggtgcgctcgccgggccccgcgcactagctctggggttcgcagaggcgccgcgcccggcttccgcggcagctccaacacagcgcgcaggcggtcgatcccgccaagggcaggcggcccgcacccgcgcccctgcccacggggctaggcggcgctcccggcctacgcccggctgccaagaagagaaaggcgctcacctgagtcaccgaagccttcctttggggcccctcccggagcttgttcgcagcccgcaggcacaaccttccttggagaaaaaaagtagcgcaagggcagagagaggtagggctgctcacaggtccctccgcaggggctctttccttcgaattctccggggtccagtctcgggctcggcggcgggaaagagctcctggaggctggaaggggccgccagacccgggctcctcccgcagctgcggtggcggcacctccaagttgccacctgcagcgcgcttcgggcgcctgtgacagcccgcgccgctcagccctcgcgggcccgccctccccgtccgctcgttggctgcgcccggtgcccgggcggtccccgcgctctgccccgccctgagcccgcctcccagccgcgcgctcgcaaagtatgggtctccttacaggcctcctccctgggctttatagccagcgggctctgcaagcagggatag

SEQ ID NO: 1724 - protein, 238 aa, Homo sapiens
MTSSRALGSEEPKTGALAGPRALALGFAEAPRPASAAAPTQRAGGRSRQGQAARTRAPAHGARRRSRPTPGCQEEKGAHLSHRSLPLGPLPELVRSPQAQPSLEKKSSARAERGRAAHRSLRRGSFLRILRGPVSGSAAGKSSWRLEGAARPGLLPQLRWRHLQVATCSALRAPVTARAAQPSRARPPRPLVGCARCPGGPRALPRPEPASQPRARKVWVSLQASSLGFIASGLCKQG

SEQ ID NO: 1725 - DNA, 9530 bp, Homo sapiens
cggggccagggcagcgcggactcgcgtcccgtggagcgttccaggcgggcgcgcggctttctccccagacccaccgagtggcggcggaggcgagatgcgcgggggcgtgctcctggtcttgctgctgtgtgtcgccgcgcagtgccggcagagaggcctgtttcctgccattctcaatcttgccagcaatgctcacatcagcaccaatgccacctgtggcgagaaggggccggagatgttctgcaaacttgtggagcatgtgccaggtcggcccgtccgaaacccacagtgccggatctgtgatggcaacagcgcaaaccccagagaacgccatccaatatcacatgccatagatggcaccaataactggtggcaaagtcccagcattcagaatgggagagaatatcactgggtcacaatcactctggacttaagacaggtctttcaagttgcatatgtcatcattaaagctgccaatgcccctcgacctggaaactggattttggagcgttctctggatggcaccacgttcagcccctggcagtattatgcagtcagcgactcagagtgtttgtctcgttacaatataactccaagacgagggccacccacctacagggctgatgatgaagtgatctgcacctcctattattccagattggtgccacttgagcatggagagattcatacatcactcatcaatggcagaccaagcgctgacgatctttcacccaagttgttggaattcacttctgcacgatatattcgccttcgcttgcaacgcattagaacgctcaatgcagatctcatgacccttagccaccgggaacctaaagaactggatcctattgttaccagacgctattattattcaataaaggacatttctgttggaggcatgtgtatctgctatggccatgctagtagctgcccatgggatgaaactacaaagaaactgcagtgtcaatgtgagcataatacttgcggggagagctgtaacaggtgctgtcctgggtaccatcagcagccctggaggccgggaaccgtgtcctccggcaatacatgtgaagcatgtaattgtcacaataaagccaaagactgttactatgatgaaagtgttgcaaagcagaagaaaagtttgaatactgctggacagttcagaggaggaggggtttgcataaattgcttgcagaacaccatgggaatcaactgtgaaacctgtattgatggatattatagaccacacaaagtgtctccttatgaggatgagccttgccgcccctgtaattgtgaccctgtggggtccctcagttctgtctgtattaaggatgacctccattctgacttacacaatgggaagcagccaggtcagtgcccatgtaaggaaggttatacaggagaaaaatgtgatcgctgccaacttggctataaggattacccgacctgtgtctcctgtgggtgcaacccagtgggcagtgccagtgatgagccctgcacagggccctgtgtttgtaaggaaaacgttgaggggaaggcctgtgatcgctgcaagccaggattctataacttgaaggaaaaaaacccccggggctgctccgagtgcttctgctttggcgtttctgatgtctgcagcagcctctcttggcctgttggtcaggtaaacagtatgtccgggtggctggtcaccgacttgatcagtcccaggaagatcccgtctcagcaagatgcactaggcgggcgccatcaggtcagcatcaacaacaccgcggtcatgcagagactggctcccaagtactactgggcagcccccgaggcctaccttggaaataagctgactgcgtttggcggattcctgaaatacacggtgtcctacgatattccggtagagacggtagacagtaacctcatgtcgcatgctgacgtcatcattaagggaaacggactcactttaagcacacaggctgagggtctgtcattgcagccttatgaagagtacctaaacgtggttagacttgtgcctgaaaacttccaagattttcacagcaaaaggcagattgatcgtgaccagctgatgactgtccttgccaatgtgacacatcttttgatcagagccaactacaattctgcaaaaatggctctttacaggttggagtccgtctctctggacatagccagctctaatgccatcgacctggtggtggccgctgatgtggagcactgtgaatgtccgcaaggctacacagggacctcctgtgagtcgtgcctctctggctattaccgcgtggatggaatactctttggaggaatttgtcaaccctgtgaatgccacggccatgcagctgagtgtaatgttcacggcgtttgcattgcgtgtgcgcacaacaccaccggcgtccactgtgagcagtgcttgcccggcttctacggggagccttcccgagggacacctggggactgccagccctgcgcctgccctctcaccatagcctccaacaatttcagccccacctgccacctcaatgatggagatgaagtggtctgtgactggtgtgccccgggctactcaggagcttggtgtgagagatgtgcagatggttactatggaaacccaacagtgcctggcgaatcttgtgttccctgtgactgcagcggcaacgtggacccctcggaggctggtcactgtgactcagtcaccggggagtgcctgaagtgcctggggaacacagatggcgcccactgtgaaaggtgtgctgacgggttctatggggacgctgtgacagccaagaactgccgcgcctgtgaatgccatgtgaaaggctcccattctgccgtgtgccatcttgagaccgggctctgtgactgcaaaccaaacgtgactggacagcagtgtgaccagtgcttgcatggctattatgggctggactcaggccatggctgccggccctgcaactgcagcgtggcaggctccgtgtcagatggctgcacggatgaaggccagtgtcactgtgtcccaggtgtggcagggaaaaggtgtgacaggtgtgcccatggcttctacgcctaccaggatggtagctgtacaccctgtgactgcccacacactcagaatacctgcgacccagaaactggagagtgtgtctgcccccctcacacacagggtgtgaagtgtgaagaatgtgaggatgggcactggggctacgatgcggaggtggggtgccaggcctgcaattgcagtctcgtggggtcgactcatcatcggtgcgatgtggtcaccggccattgccagtgcaagtcaaaatttggtggccgggcctgcgatcagtgttccttgggttacagagactttcccgactgtgttccctgtgactgtgacctgagggggacgtcgggggacgcctgcaacctggagcagggtctctgcggctgtgtggaggaaaccggggcctgcccttgcaaggaaaatgtctttggtcctcagtgcaacgaatgtcgagagggcaccttcgctctccgcgcagacaaccccctgggctgcagcccgtgcttctgctccgggctgtcccacctctgctcagagctggaggactacgtgaggaccccagtaacgctgggctccgatcagcctcttctgcgtgtggtttctcagagtaacttgaggggcacgaccgagggggtttactaccaggcccccgacttcctgctggatgccgccaccgtccggcagcacatccgtgcagagccgttttactggcggctgccgcagcagttccaaggagaccagctcatggcctatggtggcaaactgaagtacagcgtggccttctattctttggatggcgtcggcacctccaattttgagcctcaagttctcatcaaaggtggtcggatcagaaagcaagtcatttacatggatgcaccagccccagagaatggagtgagacaggaacaagaagtagcaatgagagagaatttttggaaatattttaactctgtttctgaaaaacctgtcacgcgagaggattttatgtctgtcctcagcgatattgagtacatcctcatcaaggcatcgtatggtcaaggattacagcagagcagaatctcagacatttcaatggaggttggcagaaaggctgaaaagctgcacccagaagaagaggttgcatctcttttagagaattgtgtctgtcctcctggcactgtgggattctcatgtcaggactgcgcccctgggtaccacagagggaagctcccagcagggagtgacaggggaccacgccctctggttgctccttgtgttccctgcagttgcaacaaccacagtgacacctgtgaccccaacaccgggaagtgtctgaactgtggcgataacacagcaggtgaccattgtgatgtgtgtacttctggctactacgggaaggtgactggctcagcaagtgactgtgctctgtgtgcctgtcctcacagccctcctgccagttttagtcccacttgtgtcttggaaggggaccacgatttccgttgtgacgcctgtctcctgggctatgaaggaaaacactgtgaaaggtgctcctcaagctattatgggaaccctcaaacaccaggtggcagttgccagaagtgtgactgcaacccgcacggctctgtccacggtgactgtgaccgcacatctgggcagtgcgtttgcaggctgggggcctcggggctccggtgcgatgagtgtgaaccgaggcacattctgatggaaacagattgtgtttcctgtgatgatgagtgtgtaggtgtgctgctgaatgacttggatgagattggtgatgccgttctttctctgaacctcactggcattatccctgtcccatatggaattttgtcaaacctggaaaatacaactaaatatctccaggaatctttattaaaagaaaatatgcaaaaggacctgggaaaaattaagcttgaaggtgttgcagaagaaacggacaacctgcaaaagaagctcactaggatgttagcgagtacccaaaaggtgaatagggcaactgagagaatcttcaaggagagtcaagacctggccatagccattgagaggctgcagatgagcatcacagaaattatggaaaagacaactttaaatcagactttggatgaagatttcctactacccaattctactcttcagaacatgcaacagaatggtacatctttgctagaaatcatgcagataagagacttcacacagttgcaccaaaatgccacccttgaactcaaggctgctgaagatttattgtcacaaattcaggaaaattaccagaagccgctggaagaattggaggtattgaaagaagcagcaagccacgtcctttcaaagcacaacaatgaactaaaggcggctgaggcgctcgtgagggaagctgaggcaaagatgcaggaaagcaaccacctgctgctcatggtcaatgctaatctgagagaattcagtgataaaaagctgcatgttcaagaagaacaaaatctgacctcagagctcattgtccaaggaagaggattgatagatgctgctgctgcacaaacagatgctgtacaagatgctctagagcacttagaggatcaccaggataagctacttttatggtctgccaaaatcaggcaccacatagatgacctggtcatgcacatgtcccaaaggaacgcagtcgacctggtctacagagctgaggaccatgccgctgagttccagagactagcagatgttctgtacagtggccttgaaaacatcagaaatgtgtccctgaatgccaccagtgcagcctatgtccattacaacatccagagcctgattgaagaatcggaggaactggccagagatgctcacaggactgtgactgagacgagcctgctctcagaatcccttgtttctaacgggaaagcggccgtgcagcgcagctccagatttctaaaagaaggcaacaacctcagcaggaagcttccaggtattgcattggaactgagtgaattgagaaataagacaaacagatttcaagagaatgctgttgaaattaccaggcaaaccaatgaatcactcttgatacttagagcaattcctaaaggtataagagacaagggagccaaaaccaaagagctggccacgtctgcaagccagagcgcggtgagcacgctgagggacgtggcggggctgagccaggagctgctgaacacatctgccagcctgtccagggtcaacaccacattacgagagacacaccagcttctgcaggactccaccatggccactctgttggctggaagaaaagtcaaagacgtggaaattcaagccaaccttttgtttgatcggttgaagcctttgaagatgttagaggagaatctgagcagaaacctatcagaaattaaactgttgatcagccaggcccgcaaacaagcagcttctattaaagtcgccgtgtctgcagacagagattgcatccgggcctaccagcctcagatttcctctaccaactacaataccttaacactaaatgttaagacacaggaacccgataatcttctcttctacctcggtagcagcaccgcttctgatttccttgcagtggagatgcggcgagggagagtggccttcctgtgggacctgggctccgggtccacacgcttggagtttccagactttcccattgatgacaacagatggcacagtatccatgtagccagatttggaaacattggttcactgagtgtaaaggaaatgagctcaaatcaaaagtcaccaacaaaaacaagtaaatcccctgggacagctaatgttctggatgtaaacaattcaacactcatgtttgttggaggtcttggaggacaaatcaagaaatctcctgctgtgaaggttactcattttaaaggctgcttgggggaggccttcctgaatggaaaatccataggcctatggaactatattgaaagggaaggcaagtgccgtgggtgcttcggaagctcccagaatgaagacccttccttccattttgacgggagtgggtactctgtcgtggagaagtcacttccggctaccgtgacccagataatcatgctttttaataccttttcacctaatggacttcttctctacctgggttcatacggcacaaaagactttttatccatcgagctgtttcgtggcagagtgaaggttatgactgacctgggttcaggacccattacccttttgacagacagacgttataacaatggaacctggtacaaaattgccttccagcgaaaccggaagcaaggagtgctagcagttatcgatgcctataacaccagtaataaagaaaccaagcagggcgagactccgggagcatcttctgacctcaaccgcctagacaaggacccgatttatgtgggtggattaccaaggtcaagagttgtaaggagaggtgtcaccaccaaaagctttgtgggctgcatcaagaacctggaaatatccagatcaacctttgacttactcagaaattcctatggagtgagaaaaggctgtttactggagcccatccggagtgttagcttcctgaaaggcggctacattgaattgccacccaaatctttgtcaccagaatcagaatggctggtaacatttgccaccacgaacagcagtggcatcatcctggctgccctcggcggggatgtggagaagcggggtgatcgtgaggaagcacacgtgcccttcttttccgtcatgctgatcggaggcaacattgaggtacatgtcaatcctggggatgggacaggcctgagaaaagctctcctgcacgctcccacgggtacctgcagtgatggacaagcgcattccatctccttggtcaggaatcggagaattatcactgtccaattggatgagaacaatcctgtggaaatgaagttgggcacattagtagaaagcaggacgataaatgtgtccaatctgtacgtcgggggaattccagagggagaggggacgtcactgctcacaatgagaagatcgttccatggctgtatcaaaaacctgatcttcaatttggaacttttggatttcaacagtgcagttggccatgagcaagtcgacctggacacctgctggctgtcagaaaggcctaagctggctcccgatgcagaggacagcaagctcttgccagagccccgggcttttccagaacagtgtgtggtggatgcagctctggagtacgttcccggcgctcaccagtttggtctcacacaaaacagccatttcatcttgccttttaatcagtcggctgtcagaaagaagctctcggttgagctaagcatccgcacgttcgcctccagcggcctgatttactacatggctcatcagaaccaagcagactacgctgtgctccagctgcacgggggccgcctccacttcatgtttgaccttggcaaaggcagaacaaaggtctctcaccctgcactgctcagtgatggcaagtggcacacggtcaagacagactatgttaaaagaaaaggcttcataactgtcgacggccgagagtctcccatggtgactgtggtgggagatggaaccatgctggatgtggagggtttgttctacctaggaggcctgccctcccagtaccaggccaggaaaattggaaatatcacccacagcatccctgcctgcattggggatgtgacggttaacagcaaacagctggacaaggacagcccggtgtctgccttcacggtgaacaggtgctacgcagtggcccaggaaggaacatactttgacggaagcggatatgcagctcttgtcaaagagggctacaaagtccagtcagatgtgaacatcacactggagtttcgaacctcctcgcagaatggcgtcctcctggggatcagcactgccaaagtggatgccattggactagagcttgtggacggcaaggtcttgttccatgtcaacaatggtgctggcaggataacagctgcatatgagcccaaaaccgccactgtgctctgtgatggaaaatggcacactcttcaagctaacaaaagcaaacaccgtatcactctgattgttgacgggaacgcagttggcgctgaaagtccacacacccagtctacctcagtggacaccaacaatcccatttatgttggtggctatcctgctggtgtgaagcaaaaatgcctgcgcagccagacctcgttccgcgggtgtttgaggaagctagctctgattaagagcccgcaggtgcagtcctttgacttcagcagagcgttcgaactgcacggagttttccttcattcctgtcctgggaccgagtcctgaacttcaagcagaatcctcagttggaatcattgctaatattttgaggagaagtgtatgtgtgaattaagaatctcttcagttcatatttcatttccaactcaggttaagtgtttctggggagagatgttgtgtttacgttacactaaaaccacatgtgcaacaaatacctccattaaatggtctaaaatgtaaaaaaaaaaaaaaaaaa

SEQ ID NO: 1726 - protein, 3075 aa, Homo sapiens
MRGGVLLVLLLCVAAQCRQRGLFPAILNLASNAHISTNATCGEKGPEMFCKLVEHVPGRPVRNPQCRICDGNSANPRERHPISHAIDGTNNWWQSPSIQNGREYHWVTITLDLRQVFQVAYVIIKAANAPRPGNWILERSLDGTTFSPWQYYAVSDSECLSRYNITPRRGPPTYRADDEVICTSYYSRLVPLEHGEIHTSLINGRPSADDLSPKLLEFTSARYIRLRLQRIRTLNADLMTLSHREPKELDPIVTRRYYYSIKDISVGGMCICYGHASSCPWDETTKKLQCQCEHNTCGESCNRCCPGYHQQPWRPGTVSSGNTCEACNCHNKAKDCYYDESVAKQKKSLNTAGQFRGGGVCINCLQNTMGINCETCIDGYYRPHKVSPYEDEPCRPCNCDPVGSLSSVCIKDDLHSDLHNGKQPGQCPCKEGYTGEKCDRCQLGYKDYPTCVSCGCNPVGSASDEPCTGPCVCKENVEGKACDRCKPGFYNLKEKNPRGCSECFCFGVSDVCSSLSWPVGQVNSMSGWLVTDLISPRKIPSQQDALGGRHQVSINNTAVMQRLAPKYYWAAPEAYLGNKLTAFGGFLKYTVSYDIPVETVDSNLMSHADVIIKGNGLTLSTQAEGLSLQPYEEYLNVVRLVPENFQDFHSKRQIDRDQLMTVLANVTHLLIRANYNSAKMALYRLESVSLDIASSNAIDLVVAADVEHCECPQGYTGTSCESCLSGYYRVDGILFGGICQPCECHGHAAECNVHGVCIACAHNTTGVHCEQCLPGFYGEPSRGTPGDCQPCACPLTIASNNFSPTCHLNDGDEVVCDWCAPGYSGAWCERCADGYYGNPTVPGESCVPCDCSGNVDPSEAGHCDSVTGECLKCLGNTDGAHCERCADGFYGDAVTAKNCRACECHVKGSHSAVCHLETGLCDCKPNVTGQQCDQCLHGYYGLDSGHGCRPCNCSVAGSVSDGCTDEGQCHCVPGVAGKRCDRCAHGFYAYQDGSCTPCDCPHTQNTCDPETGECVCPPHTQGVKCEECEDGHWGYDAEVGCQACNCSLVGSTHHRCDVVTGHCQCKSKFGGRACDQCSLGYRDFPDCVPCDCDLRGTSGDACNLEQGLCGCVEETGACPCKENVFGPQCNECREGTFALRADNPLGCSPCFCSGLSHLCSELEDYVRTPVTLGSDQPLLRVVSQSNLRGTTEGVYYQAPDFLLDAATVRQHIRAEPFYWRLPQQFQGDQLMAYGGKLKYSVAFYSLDGVGTSNFEPQVLIKGGRIRKQVIYMDAPAPENGVRQEQEVAMRENFWKYFNSVSEKPVTREDFMSVLSDIEYILIKASYGQGLQQSRISDISMEVGRKAEKLHPEEEVASLLENCVCPPGTVGFSCQDCAPGYHRGKLPAGSDRGPRPLVAPCVPCSCNNHSDTCDPNTGKCLNCGDNTAGDHCDVCTSGYYGKVTGSASDCALCACPHSPPASFSPTCVLEGDHDFRCDACLLGYEGKHCERCSSSYYGNPQTPGGSCQKCDCNPHGSVHGDCDRTSGQCVCRLGASGLRCDECEPRHILMETDCVSCDDECVGVLLNDLDEIGDAVLSLNLTGIIPVPYGILSNLENTTKYLQESLLKENMQKDLGKIKLEGVAEETDNLQKKLTRMLASTQKVNRATERIFKESQDLAIAIERLQMSITEIMEKTTLNQTLDEDFLLPNSTLQNMQQNGTSLLEIMQIRDFTQLHQNATLELKAAEDLLSQIQENYQKPLEELEVLKEAASHVLSKHNNELKAAEALVREAEAKMQESNHLLLMVNANLREFSDKKLHVQEEQNLTSELIVQGRGLIDAAAAQTDAVQDALEHLEDHQDKLLLWSAKIRHHIDDLVMHMSQRNAVDLVYRAEDHAAEFQRLADVLYSGLENIRNVSLNATSAAYVHYNIQSLIEESEELARDAHRTVTETSLLSESLVSNGKAAVQRSSRFLKEGNNLSRKLPGIALELSELRNKTNRFQENAVEITRQTNESLLILRAIPKGIRDKGAKTKELATSASQSAVSTLRDVAGLSQELLNTSASLSRVNTTLRETHQLLQDSTMATLLAGRKVKDVEIQANLLFDRLKPLKMLEENLSRNLSEIKLLISQARKQAASIKVAVSADRDCIRAYQPQISSTNYNTLTLNVKTQEPDNLLFYLGSSTASDFLAVEMRRGRVAFLWDLGSGSTRLEFPDFPIDDNRWHSIHVARFGNIGSLSVKEMSSNQKSPTKTSKSPGTANVLDVNNSTLMFVGGLGGQIKKSPAVKVTHFKGCLGEAFLNGKSIGLWNYIEREGKCRGCFGSSQNEDPSFHFDGSGYSVVEKSLPATVTQIIMLFNTFSPNGLLLYLGSYGTKDFLSIELFRGRVKVMTDLGSGPITLLTDRRYNNGTWYKIAFQRNRKQGVLAVIDAYNTSNKETKQGETPGASSDLNRLDKDPIYVGGLPRSRVVRRGVTTKSFVGCIKNLEISRSTFDLLRNSYGVRKGCLLEPIRSVSFLKGGYIELPPKSLSPESEWLVTFATTNSSGIILAALGGDVEKRGDREEAHVPFFSVMLIGGNIEVHVNPGDGTGLRKALLHAPTGTCSDGQAHSISLVRNRRIITVQLDENNPVEMKLGTLVESRTINVSNLYVGGIPEGEGTSLLTMRRSFHGCIKNLIFNLELLDFNSAVGHEQVDLDTCWLSERPKLAPDAEDSKLLPEPRAFPEQCVVDAALEYVPGAHQFGLTQNSHFILPFNQSAVRKKLSVELSIRTFASSGLIYYMAHQNQADYAVLQLHGGRLHFMFDLGKGRTKVSHPALLSDGKWHTVKTDYVKRKGFITVDGRESPMVTVVGDGTMLDVEGLFYLGGLPSQYQARKIGNITHSIPACIGDVTVNSKQLDKDSPVSAFTVNRCYAVAQEGTYFDGSGYAALVKEGYKVQSDVNITLEFRTSSQNGVLLGISTAKVDAIGLELVDGKVLFHVNNGAGRITAAYEPKTATVLCDGKWHTLQANKSKHRITLIVDGNAVGAESPHTQSTSVDTNNPIYVGGYPAGVKQKCLRSQTSFRGCLRKLALIKSPQVQSFDFSRAFELHGVFLHSCPGTES

SEQ ID NO: 1727 - DNA, 923 bp, Homo sapiens
atgatggattcagaagctcatgaaaagaggccaccaatgctaacttcttcaaaacaagatatatcacctcatattataaatgttggtgaaatgaagcatgacttgtgtggctgctgtgcagccttcaacacgtagaaatcacatttcccattcagaaggtcctctttcaacaacagctgtatggcatcaaaacccgggatgcaatacttcagttgagaagggatggattttgaaacttgtatcctggaatccttccctaattgatgcaaaagacaattacacttgcacttatgtttggtctgtatgaggatttatcctaccttctccacaagcatgtcagtgctccagagtttgcaacccgtgtcgtggtggcagtgcttgcaaggacagcagaagcaattttcactccactgcaaagagttcagacattgcttcaagaccacaagcatcatgacaaatttaccagcacttatcaggctttcaaggcactgaaatgccatagaattggagagcgttatcgaggcttgctgcccattcttttccagaatggactcaacaatgtcttgtttttcggccttcgaggtcccattaaggagcatctgcctacctcaacgactcacagtgctcatttggtcaatgattttctctgtggaggtcagttgggtgccatgctgggattcttgttttttctaattaatgttgtgaaaactagcatacagtctcagcctagtggggaatttcagtctttccccaaggttttccaaaaaatctggctggaacgggacagaaaactgataaatcttttcagaggtgcccatctgaattaccaccggtcccttatctcttggggcataatcagtgcaacttatgagttcctgttaaagttatatggcaaaaaacatcagttaagtgccatttattaa

SEQ ID NO: 1728 - DNA, 5585 bp, Homo sapiens
agtcagtcggggagcaagagccccgcgcgcagccggcgcgggctcggtcatcggcgcgccgccgcccggggctgggcttggggctgcctgtggagaggcggcgggcggaacgcgcgcggccacggccacggccaccgccacggccacggccggcagctcgggtcccgggtcccgggcaggggaaggggagaggcggcgagctcagcaaccggaaccgagggaagattttggctccgcgggctcgccctccgctccctctgccagcggcgccagacgccgagtggggccagggacaggggaggaggacccaggaccctgtgcccgcgcccctggagccgctggagttcggacttctgcaactgttggcactttgggggcttggcttagcgctctgctgtttacccgtctctcctcgctgcctcggaaccaaagctcccggccccctccgccctcgcgcgcccacccaccgccgccggggagcggcccggcccgcactcagcaccatgaggggacttgggacttgcctggcgactttggccggacttttgctaactgcggcgggcgagacgttctcaggtggctgcctctttgatgagccgtatagcacatgtggatatagtcaatctgaaggtgatgacttcaattgggagcaagtgaacaccttgactaaaccgacttctgatccatggatgccatcaggttctttcatgctggtgaatgcctctgggagacctgaggggcagagagcccacctgctcttaccccaacttaaagaaaatgacacccactgcatcgattttcactattttgtgtccagcaagagtaattctcctccggggttactcaatgtctacgtgaaggtcaataacgggccactggggaatcctatctggaatatatctggagacccaacacgtacatggaacagggcagaactggccattagtactttctggcctaacttttatcaggtgatttttgaagtgataacttctggacatcaaggctatctcgctatcgatgaggtgaaggtgttaggacatccatgtaccaggactcctcacttcctgcggattcagaatgtggaagttaatgctggccagtttgctaccttccagtgcagtgccatcggcaggaccgtggcaggagacaggctctggttacagggcattgatgtgcgagatgctcctctgaaggaaatcaaggtgaccagctcccgacgcttcattgcttcatttaatgttgtgaataccaccaaacgagatgctggaaagtaccgctgcatgattcgcactgaaggaggtgttggaatatcaaactatgcagagttggtagttaaagaaccacccgttcctattgccccacctcagctcgcctctgtaggagccacctacctgtggatacagctcaacgccaactccatcaatggggatgggcccattgtggcccgagaggtggagtactgcacggccagtgggagctggaatgaccggcagccagtcgattccacgagctataaaattggacaccttgacccagatacagaatatgagattagtgtgctcctgaccaggccaggggagggtggcactggctctcctggtccagctctcaggacaagaacaaagtgtgctgatcccatgcgaggcccaagaaaactagaagtagtggaggtcaaatctcggcaaatcactatccgctgggagccatttggatataatgtaactcgttgccacagttataatctcactgtccactactgttaccaagttggaggacaagaacaagtgcgagaagaagtaagctgggatacagaaaactcacaccctcaacacacgatcactaacctgtcaccatacaccaatgtcagtgtgaaactgatcctcatgaacccagagggccggaaggaaagccaagaactcatagtgcagacagatgaagacctcccaggtgctgttcccactgaatccatacaaggaagtacctttgaagagaagatatttcttcagtggagagaaccaactcaaacatatggtgtaatcactttatatgagatcacctacaaagcagtcagttcctttgacccagaaatagatttatccaatcagagtggaagagtttcaaagctgggaaatgaaacccattttctgttttttggactgtatccggggaccacatactcctttaccatccgagctagcacagctaagggttttgggcctccagcaacaaaccagttcaccaccaaaatatcagcaccctctatgccagcttatgaacttgagacacctttgaatcaaactgacaataccgtgacagtcatgctgaaacctgcccacagcagaggagcacctgtcagtgtctatcaaatagttgttgaggaagaacgtcctcgaagaactaaaaagacgacagaaatcttaaagtgctacccagtgccaattcacttccagaatgcttctctgctgaactcacagtactactttgctgcagaatttcctgcagacagcctccaagctgcgcagccttttacaattggtgataataagacatataatggatactggaacactccccttctcccctataaaagctacagaatttatttccaagctgctagtagagccaatggggaaaccaaaatagactgtgtccaagtggccacaaaaggagctgccactccgaaaccagtcccagaacccgagaaacagacagaccatacagttaaaattgctggagtcatcgcgggcatcttgctgttcgtgattatatttcttggagttgtgttggtaatgaagaaaaggaaactggccaagaagcggaaagagaccatgagcagcacccgacaggagatgactgtgatggtgaactcaatggacaagagctatgctgagcagggcacaaactgcgacgaggctttctcattcatggacacgcacaatctgaatgggagatctgtgtcttcaccatcgtccttcacaatgaaaacaaatacactgagcacatcggtgcctaattcctattacccagatgaaacccacacaatggccagcgataccagcagcctggtgcagtcccatacttacaagaagcgagagccggccgacgtgccctatcagactgggcagctccaccccgccatccgggtggcagacctccttcagcacatcacacagatgaagtgtgcggagggctacggcttcaaggaggaatacgagagcttctttgaagggcagtctgcaccatgggactcggctaagaaagatgagaacagaatgaagaacagatacgggaatatcattgcatacgatcattcccgagtgaggctgcagacaatagaaggagacacaaactcagactatatcaatggcaattatatcgatggttatcatcgacccaatcattacattgctacccaagggccaatgcaggaaaccatctatgacttctggaggatggtgtggcacgaaaacactgcaagtatcatcatggtgaccaatcttgtggaagtgggaagggtcaaatgctgcaaatactggccagatgacacagagatatataaagacattaaagttaccctaatagaaacagaactactggcagaatatgtgataagaacatttgctgttgaaaagagaggtgtgcatgaaatccgagagatcagacagtttcacttcactggctggccggatcatggggtcccctaccatgccaccggcctgctgggattcgtgcggcaagtcaagtccaagagcccgcccagtgcaggcccactggtggtgcactgcagtgctggtgcagggaggactggctgtttcatcgtcattgatatcatgttggacatggccgaaagggaaggggtcgtagacatctacaactgcgtcagggagctgcggtcacggagggtgaacatggtgcaaacagaggagcagtatgtgtttatccacgatgcgatcctggaagcctgtctttgtggggacacctctgtgcctgcttcccaagttaggtctctgtattatgacatgaacaaactggatccacagacaaactcaagccagattaaagaggaattccggacgctaaacatggtgacaccaacgctgcgagtagaggactgcagcatcgcactgttgccccggaaccatgagaaaaaccggtgcatggacatcctgcccccagaccgctgcctgcccttcctcatcaccatcgatggggagagcagcaactacatcaatgctgccctcatggacagctataaacagccttcagcttttatagtcacccagcatcctttgccaaacacagtgaaagacttttggagactggtcctggattatcactgcacatccgtagttatgctaaatgatgtggatcctgcccagttgtgtccacagtactggccagaaaacggagtacacagacacggccccatccaggtggaatttgtctctgctgacctggaagaggacatcatcagcaggatattccgcatttacaatgccgccagaccccaagatggatatcggatggtgcagcaattccagttcctgggctggccgatgtacagggacacaccagtgtctaagcgctccttcttgaagctcattcgccaggtggacaagtggcaagaggagtacaatggcggggaaggccgcacggttgtgcactgcttgaacgggggaggccgcagtgggacgttctgcgccatcagcatcgtatgtgagatgctccggcaccagagaaccgtggatgtctttcacgctgtgaagacactgaggaacaacaagcccaacatggtcgacctcctggatcagtacaagttctgctacgaggtggccctggaatacttgaattctggctgatggtgtaaacagctctgcaaacaatccctttcataccacaaagccaagacgttccatggtatttgtgcaaaagagatgaagacttctcaatatgcttattttgctttgcataattggctctttttaagagcccaagaaagtgtttctaaaattgcttgcactgcccaatcccagtaatgctgctgcctgacagaaacacacacacagccacagttgccaaatcccgtactccttgccaccggcttcctagagcagcgtagacagctggtaaactgaagagcacaactatattcttatgaaggaatttgtacctttggggtattattttgtggcccgtgaccctcgttattgttacagctgagtgtatgtttttgttctgtggagaatgctatctggcattatggtaatatattattttaggtaatatttgtactttaacatgttgcataatatatgcttatgtagctttccaggactaacagataaatgtgtaatgaacaaagatatgttgtatgagtcgtcgtttctgtcagatttgtattgtttccaagggaaaagcttgggggaggactcagttcacaaaatgcaaaactcaacgatcagattcacggacccagagcttttccatgtgtttatattgtaaatatttttgatttcatcaaattatttattcattaaaagaaatttttgtgaagcacaaaaaaaaaaaaaaaaaaaaaaaaa

SEQ ID NO: 1729 - protein, 1452 aa, Homo sapiens
MRGLGTCLATLAGLLLTAAGETFSGGCLFDEPYSTCGYSQSEGDDFNWEQVNTLTKPTSDPWMPSGSFMLVNASGRPEGQRAHLLLPQLKENDTHCIDFHYFVSSKSNSPPGLLNVYVKVNNGPLGNPIWNISGDPTRTWNRAELAISTFWPNFYQVIFEVITSGHQGYLAIDEVKVLGHPCTRTPHFLRIQNVEVNAGQFATFQCSAIGRTVAGDRLWLQGIDVRDAPLKEIKVTSSRRFIASFNVVNTTKRDAGKYRCMIRTEGGVGISNYAELVVKEPPVPIAPPQLASVGATYLWIQLNANSINGDGPIVAREVEYCTASGSWNDRQPVDSTSYKIGHLDPDTEYEISVLLTRPGEGGTGSPGPALRTRTKCADPMRGPRKLEVVEVKSRQITIRWEPFGYNVTRCHSYNLTVHYCYQVGGQEQVREEVSWDTENSHPQHTITNLSPYTNVSVKLILMNPEGRKESQELIVQTDEDLPGAVPTESIQGSTFEEKIFLQWREPTQTYGVITLYEITYKAVSSFDPEIDLSNQSGRVSKLGNETHFLFFGLYPGTTYSFTIRASTAKGFGPPATNQFTTKISAPSMPAYELETPLNQTDNTVTVMLKPAHSRGAPVSVYQIVVEEERPRRTKKTTEILKCYPVPIHFQNASLLNSQYYFAAEFPADSLQAAQPFTIGDNKTYNGYWNTPLLPYKSYRIYFQAASRANGETKIDCVQVATKGAATPKPVPEPEKQTDHTVKIAGVIAGILLFVIIFLGVVLVMKKRKLAKKRKETMSSTRQEMTVMVNSMDKSYAEQGTNCDEAFSFMDTHNLNGRSVSSPSSFTMKTNTLSTSVPNSYYPDETHTMASDTSSLVQSHTYKKREPADVPYQTGQLHPAIRVADLLQHITQMKCAEGYGFKEEYESFFEGQSAPWDSAKKDENRMKNRYGNIIAYDHSRVRLQTIEGDTNSDYINGNYIDGYHRPNHYIATQGPMQETIYDFWRMVWHENTASIIMVTNLVEVGRVKCCKYWPDDTEIYKDIKVTLIETELLAEYVIRTFAVEKRGVHEIREIRQFHFTGWPDHGVPYHATGLLGFVRQVKSKSPPSAGPLVVHCSAGAGRTGCFIVIDIMLDMAEREGVVDIYNCVRELRSRRVNMVQTEEQYVFIHDAILEACLCGDTSVPASQVRSLYYDMNKLDPQTNSSQIKEEFRTLNMVTPTLRVEDCSIALLPRNHEKNRCMDILPPDRCLPFLITIDGESSNYINAALMDSYKQPSAFIVTQHPLPNTVKDFWRLVLDYHCTSVVMLNDVDPAQLCPQYWPENGVHRHGPIQVEFVSADLEEDIISRIFRIYNAARPQDGYRMVQQFQFLGWPMYRDTPVSKRSFLKLIRQVDKWQEEYNGGEGRTVVHCLNGGGRSGTFCAISIVCEMLRHQRTVDVFHAVKTLRNNKPNMVDLLDQYKFCYEVALEYLNSG

SEQ ID NO: 1730 - DNA, 6092 bp, Homo sapiens
gagtgttttcagaagtgggaatagcaggcgaggtcttgaggcctgaagaagcaaagcgtcgcttagtcaatgctgagatgcgtcttgtggaacagaatttttgggacatttgcaggatgagttagatgaactccgtgctgagatggaagagatgagagacagttatttagaggaagatgtttaccagctgcaggaacttcggcgagaactggaccgcgctaataaaaactgccgaatcctgcagtaccgtcttcggaaagccgagcagaaaagcctgaaagtggctgagacgggtcaggtggatggtgagcttattcgaagcctggagcaggacttgaaggtagccaaagatgtatctgtcagattgcaccacgaacttaagacggtggaggaaaagcgcgctaaagctgaggatgaaaacgaaactctccgacagcagatgattgaagtggaaatatccaaacaggccctccagaatgagctggagagactgaaagagagttccctaaaaagaagaagcactcgggaaatgtacaaggagaagaaaacctttaaccaggatgacagtgccgatttgaggtgccagctccagtttgccaaagaggaagccttcctgatgcgcaaaaagatggccaagctaggaagggagaaggacgagctggagcaggagctccagaagtacaagtccctctatggggatgtggacagtcccctgcccacgggggaagcaggcgggccccccagcacccgggaggccgagctgaagctgcggctaaagctggtggaggaggaagccaacatcttgggccggaagatcgtggagctggaggtggagaaccgtggcctcaaggcagagatggaggacatgcggggccagcaggagcgggagggcccgggtcgggaccacgcacccagcattcctacctcacccttcggtgactccctggagtcctccactgagctccgccgccacctgcagtttgtagaagaggaagcggagttgctccggaggtccatctccgagatcgaagaccacaaccggcaactgacccacgagctcagcaagtttaagtttgagcctccccgggagccgggctggctaggagagggtgcaagtcctggtgccgggggtggggcccccctgcaggaggagctgaagtcagccaggctgcagatcagcgagctcagcggcaaggtgctcaaactgcagcacgagaaccacgcgctgctgtccaacatccagcgctgcgacctggcagcccacctggggctgcgtgcccccagtccccgggacagcgatgccgagagtgatgcgggcaagaaggagagtgatggggaggagagccgcctgccccagcccaagcgggaagggcctgttggcggggagagtgactcggaggaaatgtttgagaagacgtcgggcttcgggagcgggaagccatcggaggccagcgagccatgccccacggagctcctgaaggcccgggaggactctgagtacctagtgaccctaaaacacgaggcccagcggctagagcggacggtggagcgcctcatcacggacaccgacagcttcctccatgatgcggggctgcggggtggtgcgcccttaccggggcctggcctccagggcgaagaggagcagggtgagggggaccagcaggagccccagctgctggggaccatcaacgccaagatgaaggctttcaagaaagagctgcaggccttcctggagcaggtgaaccgcattggggatggcctatcccccttgccccacctcacagagtcctctagcttcctctccactgtgacttccgtgtcccgggactcccccatcgggaacctggggaaggagctgggcccagacttgcagtccagactgaaagagcagctggagtggcagctcgggccggcccgaggggacgagcgggagagcctgcgcctccgagccgcgcgggagctgcaccgccgcgcagacggggacaccgggagccacgggctgggaggccagacctgcttcagcctggagctcaggggcccccccgttttacctgagcagagtgtatccatagaggagctacagggtcagctcgtgcaggcggccagactgcatcaagaggagacagagacatttacaaacaagatccataagatggaggaggagcacctctatgccttgaggtggaaagaactggaaatgcacagcctggctttgcaaaacaccctccatgagcgaacctggagtgatgagaagaatctgatgcagcaggagctccggtccttgaagcagaacattttcctcttctacgtcaaactcaggtggctgctgaaacactggcggcaagggaagcagatggaggaggaaggagaggagttcactgagggtgaacatccagagaccctctccaggctcggggagcttggagtccaggggggtcaccaggcggatggcccagaccacgacagtgaccgaggctgtggctttccagtgggggagcactccccacactcccgggtgcagattggagatcacagcttgcggctgcagaccgcggacaggggacagccccacaaacaggtggtggaaaaccagcagctgttcagcgccttcaaggccttgctggaggacttccgtgcggagctgcgggaggatgagcgtgcccgactacggctgcagcagcaatatgccagcgacaaggcggcctgggacgtggagtgggccgtgctcaagtgccgtctggaacagctggaagagaagactgagaacaagttgggagaactaggctcctccgctgagagcaagggggccttgaagaaggagagagaggtgcaccagaagctcctggcagacagtcacagcctggtcatggacctgcgctggcagatccatcacagcgagaagaactggaaccgggagaaggtggaacttctcgaccgcctggacagagatcggcaggagtgggagcggcagaagaaggaattcttgtggaggatagagcagttgcagaaagagaacagtccccggagaggtggcagtttcctctgtgatcaaaaagacggcaacgttcgcccctttccccaccagggaagcctccgcatgccccgtccagtggccatgtggccttgtgcagatgctgactccatcccgtttgaagaccggccgctgtccaagctgaaggagtcggacaggtgctcggccagtgagaatctctacctggatgccttgtccctggatgacgagccagaagagccaccagcccacaggcccgagagggagttcaggaaccgcctccctgaggaagaagaaaatcacaaaggaaatcttcaaagggcggtgtccgtgtcctccatgtctgagttccagcgtctaatggacatctcccccttcctgcctgagaagggcctgccgtccaccagcagcaaggaggatgtcaccccacccctgtctccagacgacctcaagtacatcgaggagttcaacaagagctgggactacacacccaacaggggccacaatggtggggggccggacctttgggccgacaggaccgaggtggggcgggcagggcacgaggacagcacagagcctttccccgactcctcctggtacctaaccacaagtgtcaccatgaccacggacaccatgaccagcccagagcactgccagaagcagccactgcggagccacgtcctcaccgagcagtcggggttgcgcgtgttacacagcccgcctgccgtgcgcagggtcgacagcatcacggcggcaggtggtgagggtccctttcccacaagcagagccagagggagcccgggagacaccaagggaggccctccagaacccatgctcagcaggtggccttgcacctcccccaggcactcccgggactatgtggagggggcacggcgcccccttgatagtcccctctgtacctccctggggtttgcctccccactgcacagcctggagatgtccaagaacttgagtgatgacatgaaggaggtggccttctctgtcaggaatgccatctgctccggccctggcgagctgcaagtcaaggacatggcctgccagaccaatgggtcccggacgatggggacccagactgttcagaccatcagtgtgggcttgcagactgaagccctgcgtggcagcggtgtcaccagcagcccccacaagtgtctcactccaaaggctgggggcggtgctacacccgtgtcgtctccttcccggagccttaggagcagacaggtggcccctgccatcgagaaggtgcaggccaagtttgaacgcacatgctgctcccccaagtatggttctcccaagctgcagaggaagcccctccccaaagccgaccagccaaataacaggacgtcaccagggatggcccagaaagggtacagtgagtcagcctgggcccgctccaccaccacaagggagagccccgtgcacaccaccattaatgatggcctctccagcctcttcaacatcattgaccacagccccgtggtgcaggaccccttccagaaggggctgcgggccggcagtcggtctcgctcagcagagccccgaccagagctgggcccaggccaggaaacaggcaccaattcccgaggaaggtcgcctagccccattggggtggggtcagagatgtgcagggaggaagggggagagggcacgccagtgaagcaggacttatctgctccccctggctacacgctcactgagaacgtggcccggatcctcaacaagaagctgctggaacatgccttaaaggaggagaggaggcaggctgcccacgggcccccgggtctccacagtgacagccactcgctgggggacacagccgagccagggcccatggagaaccaaactgtcttgctaactgccccctggggactctagccctgcccgcctcacgctgaactaccttgttctgcactagctccatccctagagccctgcttctccaggcccgagagaccagcaaaccgtcgccctccgtcccgttgggccccacattcccccactgcctcacagcctcagtcacccggagacccgacgtccttggaggagcatggtggcgaggagccgcccgaggagcagccacaccgagatgcaagcttgcatggattatcacagtataattcactgtaatttgcataaccacaccatcaccatgaacaaaactctgcccaacaggagagatctagttttctcaaggtcaaagaatgttttttaaaaacacaaagctgctgaatgttcaacctgtgaaactgagatgtttctagaatgaaacagtaaatgtgcctgtaataacttaatttttttcatagctcagaaaactatttttgtctccatcttttttacacacagtatattaaacgaaaaggtaaataaggtataaatagatttaaaaaataaaagttttaaaaaatgtacattttaagagattctgaacaccctcgctgtcaatacctgactgcctctgttaaatttgcactgttacattttggttcagtttatttccatgttgaattagagtggattaagttaattttattttgtcagtgttactgttttttacgaattttttaatgcttcagactgtctgattcagtgaactttttgtagtgaaaaagccatgaagccagtagacaagacagatattctgtatgctggaggggatacaggatgattttgaaaaggtacaaagtcctcagtgggcttagaaaattcactgtatgatccttatattatcctacttggcttgcacgtcttcgggtgcatgtatataccgctactgtgtcctcgccatcacctaaatgtgactcagtctgttccactgtaatatgttgtgaatttccttgtactgtacttttattgttggtcttcttgcatcgatgatccaacagcaacaccatttttaaattattgtgaaaagattaactggcaatgtacagagtttactcaaagttttcttaagggaaaacactacaaaaagtcacaaggataccaaatggaaacacatgatgatgcctctgggtctgtatgagaccgtgatgaagtagaaataaagcccttctgagatggc

SEQ ID NO: 1731 - protein, 1586 aa, Homo sapiens
MEEMRDSYLEEDVYQLQELRRELDRANKNCRILQYRLRKAEQKSLKVAETGQVDGELIRSLEQDLKVAKDVSVRLHHELKTVEEKRAKAEDENETLRQQMIEVEISKQALQNELERLKESSLKRRSTREMYKEKKTFNQDDSADLRCQLQFAKEEAFLMRKKMAKLGREKDELEQELQKYKSLYGDVDSPLPTGEAGGPPSTREAELKLRLKLVEEEANILGRKIVELEVENRGLKAEMEDMRGQQEREGPGRDHAPSIPTSPFGDSLESSTELRRHLQFVEEEAELLRRSISEIEDHNRQLTHELSKFKFEPPREPGWLGEGASPGAGGGAPLQEELKSARLQISELSGKVLKLQHENHALLSNIQRCDLAAHLGLRAPSPRDSDAESDAGKKESDGEESRLPQPKREGPVGGESDSEEMFEKTSGFGSGKPSEASEPCPTELLKAREDSEYLVTLKHEAQRLERTVERLITDTDSFLHDAGLRGGAPLPGPGLQGEEEQGEGDQQEPQLLGTINAKMKAFKKELQAFLEQVNRIGDGLSPLPHLTESSSFLSTVTSVSRDSPIGNLGKELGPDLQSRLKEQLEWQLGPARGDERESLRLRAARELHRRADGDTGSHGLGGQTCFSLELRGPPVLPEQSVSIEELQGQLVQAARLHQEETETFTNKIHKMEEEHLYALRWKELEMHSLALQNTLHERTWSDEKNLMQQELRSLKQNIFLFYVKLRWLLKHWRQGKQMEEEGEEFTEGEHPETLSRLGELGVQGGHQADGPDHDSDRGCGFPVGEHSPHSRVQIGDHSLRLQTADRGQPHKQVVENQQLFSAFKALLEDFRAELREDERARLRLQQQYASDKAAWDVEWAVLKCRLEQLEEKTENKLGELGSSAESKGALKKEREVHQKLLADSHSLVMDLRWQIHHSEKNWNREKVELLDRLDRDRQEWERQKKEFLWRIEQLQKENSPRRGGSFLCDQKDGNVRPFPHQGSLRMPRPVAMWPCADADSIPFEDRPLSKLKESDRCSASENLYLDALSLDDEPEEPPAHRPEREFRNRLPEEEENHKGNLQRAVSVSSMSEFQRLMDISPFLPEKGLPSTSSKEDVTPPLSPDDLKYIEEFNKSWDYTPNRGHNGGGPDLWADRTEVGRAGHEDSTEPFPDSSWYLTTSVTMTTDTMTSPEHCQKQPLRSHVLTEQSGLRVLHSPPAVRRVDSITAAGGEGPFPTSRARGSPGDTKGGPPEPMLSRWPCTSPRHSRDYVEGARRPLDSPLCTSLGFASPLHSLEMSKNLSDDMKEVAFSVRNAICSGPGELQVKDMACQTNGSRTMGTQTVQTISVGLQTEALRGSGVTSSPHKCLTPKAGGGATPVSSPSRSLRSRQVAPAIEKVQAKFERTCCSPKYGSPKLQRKPLPKADQPNNRTSPGMAQKGYSESAWARSTTTRESPVHTTINDGLSSLFNIIDHSPVVQDPFQKGLRAGSRSRSAEPRPELGPGQETGTNSRGRSPSPIGVGSEMCREEGGEGTPVKQDLSAPPGYTLTENVARILNKKLLEHALKEERRQAAHGPPGLHSDSHSLGDTAEPGPMENQTVLLTAPWGL

SEQ ID NO: 1732 - DNA, 2333 bp, Homo sapiens
tgcggagcttcgtgatgcacgccccgatgcctgcggggctataaaaacgctcgcaagcgccaagtctcctcaggagccgccggcaagggggcaacgaggaagctcttaagagcgcggccggaaagcagttgagttacagacatcctgccaaaatgatttcttcaaagcccagacttgtcgtaccctatggcctcaagactctgctcgagggaattagcagagctgttctcaaaaccaacccatcaaacatcaaccagtttgcagcagcttattttcaagaacttactatgtatagagggaatactactatggatataaaagatctggttaaacaatttcatcagattaaagtagagaaatggtcagaaggaacgacaccacagaagaaattagaatgtttaaaagaaccaggaaaaacatctgtagaatctaaagtacctacccagatggaaaaatctacagacacagacgaggacaatgtaaccagaacagaatatagtgacaaaaccacccagtttccatcagtttatgctgtgccaggcactgagcaaacggaagcagttggtggtctttcttccaaaccagccacccctaagactactaccccaccctcatcaccacctccaacagctgtctcaccagagtttgcctacgtcccagctgacccagctcagcttgctgctcagatgttaggtaaagtttcatctattcattctgatcaatctgatgtgttaatggtggatgtggcaaccagtatgcctgttgttatcaaggaggtgccaagctcagaggctgctgaagatgtcatggtggctgctcctcttgtgtgttctggaaaggtgctagaagtgcaggttgtgaaccaaacatctgtccatgtagatttgggttctcaacctaaagaaaatgaggctgaaccatcaacggcttcctcagtccccttgcaggatgaacaagaacctcctgcttatgatcaagctcctgaggtcactttgcaggctgatattgaggttatgtcaactgttcatatatcatctgtctataacgatgtgcctgtgactgaaggagttgtttatatcgagcaactgccagaacaaatagttatcccttttactgatcaagttgcttgtcttaaagaaaatgagcagtcaaaagaaaatgagcagtcaccacgagttagtcccaaatctgtagtagaaaagaccacctctggcatgtctaaaaaatctgtagagtctgtaaaacttgcacagttggaggagaatgcaaaatattcctcagtatatatggaggcagaagcaacagctctgctctctgacacatctttgaaaggtcagcctgaggtacctgcacaactcctggatgcagaaggtgctatcaaaataggctctgaaaaatctctgcaccttgaagtggagatcacttcaatagtctctgacaatactgggcaggaggagtctggggaaaactctgtaccccaggagatggaaggcaaacctgtgctctctggggaagctgcagaagcagtgcactcaggtacatctgtaaagtcatctagtggccccttccctcctgctccagaaggccttactgcaccagaaattgaaccagaaggggaatcaacagctgaataaggtttgatgaagccagcaatggcaacaagtgaacgaggacaaccaccaccatgttctaacatgtggaccctttattgtctaactgataagaatcaacaaggtcacccatcaccgccacctgcacctgggccttttccccaagcaaccctctatttacctaatcctaaggatccacagtttcagcagcatccaccaaaagtcacttttccaacttatgtgatgggcgacaccaagaagaccagtgccccaccttttatcttagtaggctcaaatgttcaggaagcacagggatggaaacctcttcctggacatgctgtcgtttcacagtcagatgtcttgagatatgttgcaatgcaagtgcccattgctgttcctgcagatgagaaataccagaaacataccctaagtccccagaatgctaatcctccaagtggacaagatgtccccaggccaaaaagccctgttttcctttctgttgctttcccagtagaagatgtagctaaaaaaagttcaggatctggtgacaaatgtgctccctttggaagttacggtattgctggggaggtaaccgtgactactgctcacaaacgtcgcaaagcagaaactgaaaactgatccagaaatgacgctgtctgggtcaacatttcagggaggagtctgccaccagtgtaatgtatcaataaacttcatgcaagcata

SEQ ID NO: 1733 - protein, 493 aa, Homo sapiens
MISSKPRLVVPYGLKTLLEGISRAVLKTNPSNINQFAAAYFQELTMYRGNTTMDIKDLVKQFHQIKVEKWSEGTTPQKKLECLKEPGKTSVESKVPTQMEKSTDTDEDNVTRTEYSDKTTQFPSVYAVPGTEQTEAVGGLSSKPATPKTTTPPSSPPPTAVSPEFAYVPADPAQLAAQMLGKVSSIHSDQSDVLMVDVATSMPVVIKEVPSSEAAEDVMVAAPLVCSGKVLEVQVVNQTSVHVDLGSQPKENEAEPSTASSVPLQDEQEPPAYDQAPEVTLQADIEVMSTVHISSVYNDVPVTEGVVYIEQLPEQIVIPFTDQVACLKENEQSKENEQSPRVSPKSVVEKTTSGMSKKSVESVKLAQLEENAKYSSVYMEAEATALLSDTSLKGQPEVPAQLLDAEGAIKIGSEKSLHLEVEITSIVSDNTGQEESGENSVPQEMEGKPVLSGEAAEAVHSGTSVKSSSGPFPPAPEGLTAPEIEPEGESTAE

SEQ ID NO: 1734 - DNA, 1153 bp, Homo sapiens
tgcggagcttcgtgatgcacgccccgatgcctgcggggctataaaaacgctcgcaagcgccaagtctcctcaggagccgccggcaagggggcaacgaggaagctcttaagagcgcggccggaaagcagtagagaaatggtcagaaggaacgacaccacagaagaaattagaatgtttaaaagaaccaggaaaaacatctgtagaatctaaagtacctacccagatggaaaaatctacagacacagacgaggacaatgtaaccagaacagaatatagtgacaaaaccacccagtttccatcagtttatgctgtgccaggcactgagcaaacggaagcagttggtggtctttcttccaaaccagccacccctaagactactaccccaccctcatcaccacctccaacagctgtctcaccagagtttgcctacgtcccagctgacccagctcagcttgctgctcagatgttagcaatggcaacaagtgaacgaggacaaccaccaccatgttctaacatgtggaccctttattgtctaactgataagaatcaacaaggtcacccatcaccgccacctgcacctgggccttttccccaagcaaccctctatttacctaatcctaaggatccacagtttcagcagcatccaccaaaagtcacttttccaacttatgtgatgggcgacaccaagaagaccagtgccccaccttttatcttagtaggctcaaatgttcaggaagcacagggatggaaacctcttcctggacatgctgtcgtttcacagtcagatgtcttgagatatgttgcaatgcaagtgcccattgctgttcctgcagatgagaaataccagaaacataccctaagtccccagaatgctaatcctccaagtggacaagatgtccccaggccaaaaagccctgttttcctttctgttgctttcccagtagaagatgtagctaaaaaaagttcaggatctggtgacaaatgtgctccctttggaagttacggtattgctggggaggtaaccgtgactactgctcacaaacgtcgcaaagcagaaactgaaaactgatccagaaatgacgctgtctgggtcaacatttcagggaggagtctgccaccagtgtaatgtatcaataaacttcatgcaagcata

SEQ ID NO: 1735 - protein, 281 aa, Homo sapiens
MEKSTDTDEDNVTRTEYSDKTTQFPSVYAVPGTEQTEAVGGLSSKPATPKTTTPPSSPPPTAVSPEFAYVPADPAQLAAQMLAMATSERGQPPPCSNMWTLYCLTDKNQQGHPSPPPAPGPFPQATLYLPNPKDPQFQQHPPKVTFPTYVMGDTKKTSAPPFILVGSNVQEAQGWKPLPGHAVVSQSDVLRYVAMQVPIAVPADEKYQKHTLSPQNANPPSGQDVPRPKSPVFLSVAFPVEDVAKKSSGSGDKCAPFGSYGIAGEVTVTTAHKRRKAETEN

SEQ ID NO: 1736 - DNA, 1284 bp, Homo sapiens
cctatggctccgaagtccccgctggcatcctgaaagttgagttacagacatcctgccaaaatgatttcttcaaagcccagacttgtcgtaccctatggcctcaagactctgctcgagggaattagcagagctgttctcaaaaccaacccatcaaacatcaaccagtttgcagcagcttattttcaagaacttactatgtatagagggaatactactatggatataaaagatctggttaaacaatttcatcagattaaagtagagaaatggtcagaaggaacgacaccacagaagaaattagaatgtttaaaagaaccaggaaaaacatctgtagaatctaaagtacctacccagatggaaaaatctacagacacagacgaggacaatgtaaccagaacagaatatagtgacaaaaccacccagtttccatcagtttatgctgtgccaggcactgagcaaacggaagcagttggtggtctttcttccaaaccagccacccctaagactactaccccaccctcatcaccacctccaacagctgtctcaccagagtttgcctacgtcccagctgacccagctcagcttgctgctcagatgttagcaatggcaacaagtgaacgaggacaaccaccaccatgttctaacatgtggaccctttattgtctaactgataagaatcaacaaggtcacccatcaccgccacctgcacctgggccttttccccaagcaaccctctatttacctaatcctaaggatccacagtttcagcagcatccaccaaaagtcacttttccaacttatgtgatgggcgacaccaagaagaccagtgccccaccttttatcttagtaggctcaaatgttcaggaagcacagggatggaaacctcttcctggacatgctgtcgtttcacagtcagatgtcttgagatatgttgcaatgcaagtgcccattgctgttcctgcagatgagaaataccagaaacataccctaagtccccagaatgctaatcctccaagtggacaagatgtccccaggccaaaaagccctgttttcctttctgttgctttcccagtagaagatgtagctaaaaaaagttcaggatctggtgacaaatgtgctccctttggaagttacggtattgctggggaggtaaccgtgactactgctcacaaacgtcgcaaagcagaaactgaaaactgatccagaaatgacgctgtctgggtcaacatttcagggaggagtctgccaccagtgtaatgtatcaataaacttcatgcaagcata

SEQ ID NO: 1737 - protein, 379 aa, Homo sapiens
MISSKPRLVVPYGLKTLLEGISRAVLKTNPSNINQFAAAYFQELTMYRGNTTMDIKDLVKQFHQIKVEKWSEGTTPQKKLECLKEPGKTSVESKVPTQMEKSTDTDEDNVTRTEYSDKTTQFPSVYAVPGTEQTEAVGGLSSKPATPKTTTPPSSPPPTAVSPEFAYVPADPAQLAAQMLAMATSERGQPPPCSNMWTLYCLTDKNQQGHPSPPPAPGPFPQATLYLPNPKDPQFQQHPPKVTFPTYVMGDTKKTSAPPFILVGSNVQEAQGWKPLPGHAVVSQSDVLRYVAMQVPIAVPADEKYQKHTLSPQNANPPSGQDVPRPKSPVFLSVAFPVEDVAKKSSGSGDKCAPFGSYGIAGEVTVTTAHKRRKAETEN

SEQ ID NO: 1738 - DNA, 2279 bp, Homo sapiens
tgcggagcttcgtgatgcacgccccgatgcctgcggggctataaaaacgctcgcaagcgccaagtctcctcaggagccgccggcaagggggcaacgaggaagctcttaagagcgcggccggaaagcagttgagttacagacatcctgccaaaatgatttcttcaaagcccagacttgtcgtaccctatggcctcaagactctgctcgagggaattagcagagctgttctcaaaaccaacccatcaaacatcaaccagtttgcagcagcttattttcaagaacttactatgtatagagtagagaaatggtcagaaggaacgacaccacagaagaaattagaatgtttaaaagaaccaggaaaaacatctgtagaatctaaagtacctacccagatggaaaaatctacagacacagacgaggacaatgtaaccagaacagaatatagtgacaaaaccacccagtttccatcagtttatgctgtgccaggcactgagcaaacggaagcagttggtggtctttcttccaaaccagccacccctaagactactaccccaccctcatcaccacctccaacagctgtctcaccagagtttgcctacgtcccagctgacccagctcagcttgctgctcagatgttaggtaaagtttcatctattcattctgatcaatctgatgtgttaatggtggatgtggcaaccagtatgcctgttgttatcaaggaggtgccaagctcagaggctgctgaagatgtcatggtggctgctcctcttgtgtgttctggaaaggtgctagaagtgcaggttgtgaaccaaacatctgtccatgtagatttgggttctcaacctaaagaaaatgaggctgaaccatcaacggcttcctcagtccccttgcaggatgaacaagaacctcctgcttatgatcaagctcctgaggtcactttgcaggctgatattgaggttatgtcaactgttcatatatcatctgtctataacgatgtgcctgtgactgaaggagttgtttatatcgagcaactgccagaacaaatagttatcccttttactgatcaagttgcttgtcttaaagaaaatgagcagtcaaaagaaaatgagcagtcaccacgagttagtcccaaatctgtagtagaaaagaccacctctggcatgtctaaaaaatctgtagagtctgtaaaacttgcacagttggaggagaatgcaaaatattcctcagtatatatggaggcagaagcaacagctctgctctctgacacatctttgaaaggtcagcctgaggtacctgcacaactcctggatgcagaaggtgctatcaaaataggctctgaaaaatctctgcaccttgaagtggagatcacttcaatagtctctgacaatactgggcaggaggagtctggggaaaactctgtaccccaggagatggaaggcaaacctgtgctctctggggaagctgcagaagcagtgcactcaggtacatctgtaaagtcatctagtggccccttccctcctgctccagaaggccttactgcaccagaaattgaaccagaaggggaatcaacagctgaataaggtttgatgaagccagcaatggcaacaagtgaacgaggacaaccaccaccatgttctaacatgtggaccctttattgtctaactgataagaatcaacaaggtcacccatcaccgccacctgcacctgggccttttccccaagcaaccctctatttacctaatcctaaggatccacagtttcagcagcatccaccaaaagtcacttttccaacttatgtgatgggcgacaccaagaagaccagtgccccaccttttatcttagtaggctcaaatgttcaggaagcacagggatggaaacctcttcctggacatgctgtcgtttcacagtcagatgtcttgagatatgttgcaatgcaagtgcccattgctgttcctgcagatgagaaataccagaaacataccctaagtccccagaatgctaatcctccaagtggacaagatgtccccaggccaaaaagccctgttttcctttctgttgctttcccagtagaagatgtagctaaaaaaagttcaggatctggtgacaaatgtgctccctttggaagttacggtattgctggggaggtaaccgtgactactgctcacaaacgtcgcaaagcagaaactgaaaactgatccagaaatgacgctgtctgggtcaacatttcagggaggagtctgccaccagtgtaatgtatcaataaacttcatgcaagcata

SEQ ID NO: 1739 - protein, 475 aa, Homo sapiens
MISSKPRLVVPYGLKTLLEGISRAVLKTNPSNINQFAAAYFQELTMYRVEKWSEGTTPQKKLECLKEPGKTSVESKVPTQMEKSTDTDEDNVTRTEYSDKTTQFPSVYAVPGTEQTEAVGGLSSKPATPKTTTPPSSPPPTAVSPEFAYVPADPAQLAAQMLGKVSSIHSDQSDVLMVDVATSMPVVIKEVPSSEAAEDVMVAAPLVCSGKVLEVQVVNQTSVHVDLGSQPKENEAEPSTASSVPLQDEQEPPAYDQAPEVTLQADIEVMSTVHISSVYNDVPVTEGVVYIEQLPEQIVIPFTDQVACLKENEQSKENEQSPRVSPKSVVEKTTSGMSKKSVESVKLAQLEENAKYSSVYMEAEATALLSDTSLKGQPEVPAQLLDAEGAIKIGSEKSLHLEVEITSIVSDNTGQEESGENSVPQEMEGKPVLSGEAAEAVHSGTSVKSSSGPFPPAPEGLTAPEIEPEGESTAE

SEQ ID NO: 1740 - DNA, 1390 bp, Homo sapiens
tgcggagcttcgtgatgcacgccccgatgcctgcggggctataaaaacgctcgcaagcgccaagtctcctcaggagccgccggcaagggggcaacgaggaagctcttaagagcgcggccggaaagcagttgagttacagacatcctgccaaaatgatttcttcaaagcccagacttgtcgtaccctatggcctcaagactctgctcgagggaattagcagagctgttctcaaaaccaacccatcaaacatcaaccagtttgcagcagcttattttcaagaacttactatgtatagagggaatactactatggatataaaagatctggttaaacaatttcatcagattaaagtagagaaatggtcagaaggaacgacaccacagaagaaattagaatgtttaaaagaaccaggaaaaacatctgtagaatctaaagtacctacccagatggaaaaatctacagacacagacgaggacaatgtaaccagaacagaatatagtgacaaaaccacccagtttccatcagtttatgctgtgccaggcactgagcaaacggaagcagttggtggtctttcttccaaaccagccacccctaagactactaccccaccctcatcaccacctccaacagctgtctcaccagagtttgcctacgtcccagctgacccagctcagcttgctgctcagatgttagcaatggcaacaagtgaacgaggacaaccaccaccatgttctaacatgtggaccctttattgtctaactgataagaatcaacaaggtcacccatcaccgccacctgcacctgggccttttccccaagcaaccctctatttacctaatcctaaggatccacagtttcagcagcatccaccaaaagtcacttttccaacttatgtgatgggcgacaccaagaagaccagtgccccaccttttatcttagtaggctcaaatgttcaggaagcacagggatggaaacctcttcctggacatgctgtcgtttcacagtcagatgtcttgagatatgttgcaatgcaagtgcccattgctgttcctgcagatgagaaataccagaaacataccctaagtccccagaatgctaatcctccaagtggacaagatgtccccaggccaaaaagccctgttttcctttctgttgctttcccagtagaagatgtagctaaaaaaagttcaggatctggtgacaaatgtgctccctttggaagttacggtattgctggggaggtaaccgtgactactgctcacaaacgtcgcaaagcagaaactgaaaactgatccagaaatgacgctgtctgggtcaacatttcagggaggagtctgccaccagtgtaatgtatcaataaacttcatgcaagcataaaaaaaaaaaaaaa

SEQ ID NO: 1741 - protein, 379 aa, Homo sapiens; identical to SEQ ID NO: 1737

SEQ ID NO: 1742 - DNA, 902 bp, Homo sapiens
tgcggagcttcgtgatgcacgccccgatgcctgcggggctataaaaacgctcgcaagcgccaagtctcctcaggagccgccggcaagggggcaacgaggaagctcttaagagcgcggccggaaagcagttgagttacagacatcctgccaaaatgatttcttcaaagcccagacttgtcgtaccctatggcctcaagactctgctcgagggaattagcagagctgttctcaaaaccaacccatcaaacatcaaccagtttgcagcagcttattttcaagaacttactatgtatagagggaatactactatggatataaaagatctggttaaacaatttcatcagattaaagtagagaaatggtcagaaggaacgacaccacagaagaaattagaatgtttaaaagaaccaggaaaaacatctgtagaatctaaagtacctacccagatggaaaaatctacagacacagacgaggacaatgtaaccagaacagaatatagtgacaaaaccacccagtttccatcagtttatgctgtgccaggcactgagcaaacggaagcagttggtggtctttcttccaaaccagccacccctaagactactaccccaccctcatcaccacctccaacagctgtctcaccagagtttgcctacgtcccagctgacccagctcagcttgctgctcagatgttagaagatgtagctaaaaaaagttcaggatctggtgacaaatgtgctccctttggaagttacggtattgctggggaggtaaccgtgactactgctcacaaacgtcgcaaagcagaaactgaaaactgatccagaaatgacgctgtctgggtcaacatttcagggaggagtctgccaccagtgtaatgtatcaataaacttcatgcaagcata

SEQ ID NO: 1743 - protein, 221 aa, Homo sapiens
MISSKPRLVVPYGLKTLLEGISRAVLKTNPSNINQFAAAYFQELTMYRGNTTMDIKDLVKQFHQIKVEKWSEGTTPQKKLECLKEPGKTSVESKVPTQMEKSTDTDEDNVTRTEYSDKTTQFPSVYAVPGTEQTEAVGGLSSKPATPKTTTPPSSPPPTAVSPEFAYVPADPAQLAAQMLEDVAKKSSGSGDKCAPFGSYGIAGEVTVTTAHKRRKAETEN

SEQ ID NO: 1744 - DNA, 3336 bp, Homo sapiens
ccagggccggtgtctccaggagagggccgagcgcacagcagctctaggacctcgcaggcgcctcggcgcggcactcacgtagagcccaaggagcagtccccgacctctcctcggagggccgtgcaggcttccccggcggtccctacctgcgcctccgcccgccagcggcgctggggaaggggaggagcggcccggacgctgcccgccgcgcgcagggagccgcccgccgcaggccttgccgccgcccgcccgcgctctccccgcgagccccggagggcgggtctgcggccgagccagcggcggcggaggggcagcgcagacctctgcggcccgggcgggcgcggcgcgggagtcctgggccgctggcgggcaacgcctctgcccgacctcgctggggaaggctggcgctgctgcccggccggagccaggggcaggctgcgcaaaggtgacttagggagaccttgcgggccgccctgggtcgcgcctcccggatcggctcgcctcggctcgactggaggggaggaggaggagcaggccgagcgcattcgcgctggagcttgcgaggagcgcagggtggagcgcgccagccggggtcctcggatctggcccaggtgaggaattttaaattggaacaagagcaagaaaaaaacaaaatcttgtcagaagcactggagacgctggccactgaacatcatgaattagagcagtctctggtgaaaggctctccacccgccagcatccttagcgaggacgagttctatgatgcgctgtcagattccgagtccgaaaggtccctgagtagattggaagcagtgacagcacgctcctttgaagaggaaggagagcatttgggcagtagaaaacacagaatgtccgaagaaaaagactgtggtggcggagatgctctctccaatggcatcaagaaacacagaacaagtttgccttctcctatgttttccagaaatgacttcagtatctggagcatcctcagaaaatgtattggaatggaactatccaagatcacgatgccagttatatttaatgagcctctgagcttcctacagcgcctaactgaatacatggagcatacttacctcatccacaaggccagttcactctctgatcctgtggaaaggatgcagtgtgtagctgcgtttgctgtatctgctgttgcttctcagtgggaacggactggaaaacctttcaacccactgctgggagagacttatgaattagtgcgagatgaccttggatttagactcatctccgaacaggtcagccatcacccaccaatcagtgcatttcatgctgaaggattaaacaatgacttcatctttcatggctctatctatcccaaactgaaattctgggggaagagtgtagaagcagaacccaaaggaaccatcaccttggagctccttgaacacaatgaggcatatacatggacaaatcccacctgctgtgtgcataatatcattgtgggtaaactgtggatcgaacagtatggcaatgtggaaattataaaccacaagactggggacaaatgtgtgttgaattttaagccatgtggcctttttggtaaggaattacacaaagttgaaggctacattcaagataaaagcaaaaagaagctctgtgccctctatgggaagtggactgaatgtttatacagtgttgaccctgccacgtttgacgcttacaaaaaaaatgataagaaaaatacagaagagaagaagaacagcaaacagatgagcacctctgaggagttggatgaaatgccagtgccggattctgaaagtgtattcattatccctggaagcgttcttctatggcgaatagccccacggcctccaaattctgcccagatgtataattttactagttttgcaatggttttgaatgaagtagacaaagacatggagagtgtgattcccaagacagactgcaggttacggcctgacatcagagccatggaaaatggagagatagatcaagctagtgaagaaaaaaaacgacttgaggaaaaacaaagagcagcccgcaaaaacaggtccaagtcagaagaggactggaagacgaggtggttccatcaaggtcctaatccctacaatggagcacaggactggatttactctggcagctactgggacagaaattacttcaatttgcctgacatttattaaaatgcatacaagtcagggtgtttggctaatctacaaataagtcttaaacctatgtttttaaatttttttcccttggtttctacttatcttttaaaaaaaaaatgaaaaaacactcatgagataactgcatttcacccaacaaaagcagggtataaggcgatattggtgatgaaagtcttaggaaaaatgcataattttgctataaaatgtacttatttggaatactattttatatagaggtaagagaacactgctggggaatatgctttttatggttgctgttgccatatttactgaaggtttatacctaaatgtaactttagctttatggaactatatagtaatcccaaatcaagttattttgaatatttttatgctgtcatgcttgaatgttttagatgtaacctttgacatatttagaactctcctcctatacaatgtttattctcagatatagaggttatgtcattttataaagacttcattgataagatggcttttattcatactaatcctcccaatgttaccccttccatcttccaagaagaaaaaaaatgcctgaatattcagaatagatatttctgatttgaaaattctaaagaattaaactggaaaagtatttcatttacttagtgctctgaatttacttttacagttttctgcagtcagtatcattaaaatggttaagtttacatttgaactgaaaatatgtataaaatctagcaattcacaaaaatgccctagaaatatagattttaatcaccattacataatgacaaaccttgttaaatgcttccacttccagtggcaaatgccactagggaaagtaagttgcactcatgtaagtatcaaactatataaaaggaggccttgtgcatttcaagtttgcaaagtacctgtgtacttaaaatatgtgtggagacctactgtacagtagttttgcccctttaattggggcacattcatcttaaatcttatagtatttatccacccaaaccccagactgagatactgctcccaggggcctaggtagctgccagtccgtgattttaattgctgtcttgaagttaacaagtgttataatgaaataatctacctgatgctaaataaaggctttagaatgttccccaaaaaaaaaaaaaaaaaaaaaaaa

SEQ ID NO: 1745 - protein, 437 aa, Homo sapiens
MSEEKDCGGGDALSNGIKKHRTSLPSPMFSRNDFSIWSILRKCIGMELSKITMPVIFNEPLSFLQRLTEYMEHTYLIHKASSLSDPVERMQCVAAFAVSAVASQWERTGKPFNPLLGETYELVRDDLGFRLISEQVSHHPPISAFHAEGLNNDFIFHGSIYPKLKFWGKSVEAEPKGTITLELLEHNEAYTWTNPTCCVHNIIVGKLWIEQYGNVEIINHKTGDKCVLNFKPCGLFGKELHKVEGYIQDKSKKKLCALYGKWTECLYSVDPATFDAYKKNDKKNTEEKKNSKQMSTSEELDEMPVPDSESVFIIPGSVLLWRIAPRPPNSAQMYNFTSFAMVLNEVDKDMESVIPKTDCRLRPDIRAMENGEIDQASEEKKRLEEKQRAARKNRSKSEEDWKTRWFHQGPNPYNGAQDWIYSGSYWDRNYFNLPDIY

SEQ ID NO: 1746 - DNA, 4165 bp, Homo sapiens
ccgtggtcccggcgccgggtcccggagacagacgttacgcgggctcgagcgtcctcggggagtgccagccagagttggtgacgaccacttcctcgacgtggggcgggcggacgggaagcctggggtcgtggccaccgcctcgggagctctgggagcccgggtgaccgcgtagaaatgaacacagaagcggagcaacagcttctccatcacgccagaaatggcaatgctgaagaagtaagacaactattagagaccatggcgaggaatgaagtgattgctgacattaattgcaaaggaagaagtaagtctaacttgggctggacacctctacatctggcatgctattttggacacagacaagtggtccaggatctgttgaaggctggtgcagaagtgaatgtgttgaatgacatgggagacacgccgcttcatcgagctgcctttacaggacgaaaggagttggtaatgcttctcttagaatataatgctgatactactattgttaatgggagtggacagacagcaaaagaagttactcatgctgaagaaatcagaagcatgcttgaagctgtagaaaggactcaacaaagaaagcttgaagaattacttttagcagcagcaagagaaggcaaaacaacagaactcacagctctgctcaacaggcccaatcctcctgatgttaactgttcggatcagttaggaaatacacccttgcattgtgcagcttaccgggcccataaacaatgtgccttaaagcttctaagaagtggagcagaccctaatctgaagaacaaaaatgatcagaaacctcttgaccttgcccagggtgctgaaatgaaacacattcttgttggtaataaggtcatctacaaagcattgaaacgatatgagggccctctctggaagagttcaagattttttggctggagattattctgggtagtgttagagcatggagtcctttcatggtataggaaacagcctgatgcagttcataatatttatcgccagggatgcaaacacctgactcaagcagtatgcacggtaaaatccactgatagctgcctcttctttattaaatgctttgatgacaccattcatggcttccgggttcctaagaatagccttcagcagtcaagagaggactggctggaagcaatagaagaacattctgcttacagcactcactactgttcccaggaccagctgactgatgaggaggaggaagatacggtttctgctgcagacctgaagaaatcattagagaaagcacagtcatgccaacagcgactagatagggaaatttccaactttctcaaaatgattaaggagtgtgacatggctaaagaaatgcttccatcatttcttcagaaagttgaagttgtctcagaagcttctagagaaacttgtgtagctttgactgattgccttaatctcttcaccaaacaagaaggggtgaggaattttaaattggaacaagagcaagaaaaaaacaaaatcttgtcagaagcactggagacgctggccactgaacatcatgaattagagcagtctctggtgaaaggctctccacccgccagcatccttagcgaggacgagttctatgatgcgctgtcagattccgagtccgaaaggtccctgagtagattggaagcagtgacagcacgctcctttgaagaggaaggagagcatttgggcagtagaaaacacagaatgtccgaagaaaaagactgtggtggcggagatgctctctccaatggcatcaagaaacacagaacaagtttgccttctcctatgttttccagaaatgacttcagtatctggagcatcctcagaaaatgtattggaatggaactatccaagatcacgatgccagttatatttaatgagcctctgagcttcctacagcgcctaactgaatacatggagcatacttacctcatccacaaggccagttcactctctgatcctgtggaaaggatgcagtgtgtagctgcgtttgctgtatctgctgttgcttctcagtgggaacggactggaaaacctttcaacccactgctgggagagacttatgaattagtgcgagatgaccttggatttagactcatctccgaacaggtcagccatcacccaccaatcagtgcatttcatgctgaaggattaaacaatgacttcatctttcatggctctatctatcccaaactgaaattctgggggaagagtgtagaagcagaacccaaaggaaccatcaccttggagctccttgaacacaatgaggcatatacatggacaaatcccacctgctgtgtgcataatatcattgtgggtaaactgtggatcgaacagtatggcaatgtggaaattataaaccacaagactggggacaaatgtgtgttgaattttaagccatgtggcctttttggtaaggaattacacaaagttgaaggctacattcaagataaaagcaaaaagaagctctgtgccctctatgggaagtggactgaatgtttatacagtgttgaccctgccacgtttgacgcttacaaaaaaaatgataagaaaaatacagaagagaagaagaacagcaaacagatgagcacctctgaggagttggatgaaatgccagtgccggattctgaaagtgtattcattatccctggaagcgttcttctatggcgaatagccccacggcctccaaattctgcccagatgtataattttactagttttgcaatggttttgaatgaagtagacaaagacatggagagtgtgattcccaagacagactgcaggttacggcctgacatcagagccatggaaaatggagagatagatcaagctagtgaagaaaaaaaacgacttgaggaaaaacaaagagcagcccgcaaaaacaggtccaagtcagaagaggactggaagacgaggtggttccatcaaggtcctaatccctacaatggagcacaggactggatttactctggcagctactgggacagaaattacttcaatttgcctgacatttattaaaatgcatacaagtcagggtgtttggctaatctacaaataagtcttaaacctatgtttttaaatttttttcccttggtttctacttatcttttaaaaaaaaaatgaaaaaacactcatgagataactgcatttcacccaacaaaagcagggtataaggcgatattggtgatgaaagtcttaggaaaaatgcataattttgctataaaatgtacttatttggaatactattttatatagaggtaagagaacactgctggggaatatgctttttatggttgctgttgccatatttactgaaggtttatacctaaatgtaactttagctttatggaactatatagtaatcccaaatcaagttattttgaatatttttatgctgtcatgcttgaatgttttagatgtaacctttgacatatttagaactctcctcctatacaatgtttattctcagatatagaggttatgtcattttataaagacttcattgataagatggcttttattcatactaatcctcccaatgttaccccttccatcttccaagaagaaaaaaaatgcctgaatattcagaatagatatttctgatttgaaaattctaaagaattaaactggaaaagtatttcatttacttagtgctctgaatttacttttacagttttctgcagtcagtatcattaaaatggttaagtttacatttgaactgaaaatatgtataaaatctagcaattcacaaaaatgccctagaaatatagattttaatcaccattacataatgacaaaccttgttaaatgcttccacttccagtggcaaatgccactagggaaagtaagttgcactcatgtaagtatcaaactatataaaaggaggccttgtgcatttcaagtttgcaaagtacctgtgtacttaaaatatgtgtggagacctactgtacagtagttttgcccctttaattggggcacattcatcttaaatcttatagtatttatccacccaaaccccagactgagatactgctcccaggggcctaggtagctgccagtccgtgattttaattgctgtcttgaagttaacaagtgttataatgaaataatctacctgatgctaaataaaggctttagaatgttccccaaaaaaaaa

SEQ ID NO: 1747 - protein, 950 aa, Homo sapiens
MNTEAEQQLLHHARNGNAEEVRQLLETMARNEVIADINCKGRSKSNLGWTPLHLACYFGHRQVVQDLLKAGAEVNVLNDMGDTPLHRAAFTGRKELVMLLLEYNADTTIVNGSGQTAKEVTHAEEIRSMLEAVERTQQRKLEELLLAAAREGKTTELTALLNRPNPPDVNCSDQLGNTPLHCAAYRAHKQCALKLLRSGADPNLKNKNDQKPLDLAQGAEMKHILVGNKVIYKALKRYEGPLWKSSRFFGWRLFWVVLEHGVLSWYRKQPDAVHNIYRQGCKHLTQAVCTVKSTDSCLFFIKCFDDTIHGFRVPKNSLQQSREDWLEAIEEHSAYSTHYCSQDQLTDEEEEDTVSAADLKKSLEKAQSCQQRLDREISNFLKMIKECDMAKEMLPSFLQKVEVVSEASRETCVALTDCLNLFTKQEGVRNFKLEQEQEKNKILSEALETLATEHHELEQSLVKGSPPASILSEDEFYDALSDSESERSLSRLEAVTARSFEEEGEHLGSRKHRMSEEKDCGGGDALSNGIKKHRTSLPSPMFSRNDFSIWSILRKCIGMELSKITMPVIFNEPLSFLQRLTEYMEHTYLIHKASSLSDPVERMQCVAAFAVSAVASQWERTGKPFNPLLGETYELVRDDLGFRLISEQVSHHPPISAFHAEGLNNDFIFHGSIYPKLKFWGKSVEAEPKGTITLELLEHNEAYTWTNPTCCVHNIIVGKLWIEQYGNVEIINHKTGDKCVLNFKPCGLFGKELHKVEGYIQDKSKKKLCALYGKWTECLYSVDPATFDAYKKNDKKNTEEKKNSKQMSTSEELDEMPVPDSESVFIIPGSVLLWRIAPRPPNSAQMYNFTSFAMVLNEVDKDMESVIPKTDCRLRPDIRAMENGEIDQASEEKKRLEEKQRAARKNRSKSEEDWKTRWFHQGPNPYNGAQDWIYSGSYWDRNYFNLPDIY

SEQ ID NO: 1748 - DNA, 1025 bp, Homo sapiens
atgccatttaccgacaaaataatgaaggattggatagagaactggccttcgaagtgcagagtgaaatgcaagagagaatccggtgtcaggcagatctttgaaggtcaccagattcttgataatgccagaaacaaggcctaccacgtgaccatgacgagaacgatgaccaggccctgggacggccctggtgtgagcagagtaagcagaggtgaaaccttggagcccaaaaggccggcagaagaaagtgatgatttaagctcaccaagagagcattcaggtcctgggaatgatctgccagatgcatgtgctcataatgcaaaggatttctctgaaaggaaaagcaagaaactgaagctggactcttggtggctggaagtaaacttaattttcaaagatcagatttgcgacatgttcaggtacttgcctccagtcacacaagtagttctcatcagtgttacactgcctcgcgaaatcctagagatgaccaacaagtacatgatggacccaatccacatcttggtgaattgactctggaaggcatcaaacagccttttgtggcagtggaaagagaagagtggaaattcgacatcccatgtgatctctacgaaatgctaactgttattcaggtggtcatcttctgtaacaccaaaaggaaagttgactggctgatggagaaaatgagagatgctgctctcaccgtgtcctcgatgcacagagacacacctcagaaagggccacagtccgtcagtaaggagttcccatccggcaccagcacagggctcatttccacagatgtctgggccgggaggtcagatgtccctcaggtgtccgtcatcattaactatgacctgcccaaaaaacagaattgtactcacacagaatttggagatcaggtcgatatggctggaaggctgtggccattaactttgtaaagaatgaccaacatctgcatcctgagagacattgaacagtactattccactcagacagaagcaatgtctatgaacatcactgatctgatctga

SEQ ID NO: 1749 - DNA, 5888 bp, Homo sapiens
acttctgacagtggggaaagcagctgtgtgtgatagcttggaaggtttactgctgcctcaagtcctcttctctgcagttgaggtttcaggtttcaatcctcccaataccacaagacagagcacggggcggctgccgcctccgcctccgcgccttaacctaggcggcttgccgaagatctcagccccgcggccgcgcgctcgccctgccctagaccagggttgggcgcagcggcggaggtggcttctgggctgcgcgagctgggagagctgggaggcggcgatcgcagctgggccgggacttccttcctccaccgcacggcaacaaaacaaccctgcggcaggcactgagtgcttcgcagctgtctgggcgagaggcacagcgatgggctccgtgctgagcaccgacagcggcaaatcggcgcccgcctctgccaccgcgcgggccctggagcgcaggagggacccggagttgcccgtcacgtccttcgactgcgccgtgtgccttgaggtgttacaccagcctgtccggacccgctgtggccacgtattctgccgttcctgtattgctaccagtctaaagaacaacaagtggacctgtccttattgccgggcatatcttccttcagaaggagttccagcaactgatgtagccaaaagaatgaaatcagagtataagaactgcgctgagtgtgacaccctggtttgcctcagtgaaatgagggcacatattcggacttgtcagaagtacatagataagtatggaccactacaagaacttgaggagacagcagcaaggtgtgtatgtcccttttgtcagagggaactgtatgaagacagcttgctggatcattgtattactcatcacagatcggaacggaggcctgtgttctgtccactttgccgtttaatacccgatgagaatccaagcagcttcagtggcagtttaataagacatctgcaagttagtcacactttgttttatgatgatttcatagattttaatataattgaggaagctcttatccgaagagtcttagaccggtcacttcttgaatatgtgaatcactcgaacaccacataattttattaaaacgaagggaaaagggaccactgaattgcaccatttaagatgctgcttgaacaaatgggagggaagttgtcaatgattgatgggcaaaaatgtacaacacagttatgtgtttgtccatgtttattgttatagtgcatttaaaaactgctttaattttaatggtttaaatctgttttacatccttgagattcttacacatctaacaacaaaaaaaattatctacatcagtcattgttacatggaaaagacaggtggtaggcaagtaggtggaggatctcggtttgcaaattagataatactctgtgtataatgctacatatcaataactaccatcatggttaggcacgataactaatctttgttctgtgtaaaaaaatatggagagtgaaacaaagtgcagacattcaaagaaataagaaatctgctccaatgctcttgttctaatctctaataggttaacgttaataatcttgtatgggagttggaaaggaaaattttggaagtcaagaaagtccatttaggccggacgcggtggcttacgcttgtaatcccagcactttgggaggctgaagcaggcggatcacaaggtcaggagttcgagaccagcctggccaacactggtctctgtgaaactccgtctctactaaaaatacaaaaattagctggacgtgttggcgggcatctgtaataccagctacttgggaggctgaggcagaagaatcacttgaacccgggaggcagaggttacagtgagctgagatcgcaccagtacactccagcctgggtaacagagctagactccatctcaaaaaaaaaaaaaaaaaaaatccatttaaccaaattgtcttacataatactgtaacaaaacaaattttgtgttagaaaagtatacttaattctttgactttttataactgcatacataagaattcaatatttttcaaatatttatagcttatttagaaatatttctataatataagcaatttcttaaaaaccatcagatgatacttacagtataagtattcacatccagactttttagtagaaaaccctaagggctttgatatcttttttgattgtaacattttaaaaattatgaaataaaagtactgaaaaccagacacaaaatttatagctgaatgccttattataaggaaatactcttttaggactcagccagtcaccccacgtgtcctttttgtgtcctgtcacaattacaaccccacaaaagtaactgctagactgatttaaatggtaatcactttgttgcatttgattactgctgccacacctaaatgcatatatctatattttaatattatcaatttaaagttgttattaaatgtatattttattttacatctcttttttaatctagaagttcctccttctttccagttccttaaaatttacctggtgaagaacctgatcctaggacctatagagtttcccatactttgtattttgctgattgcacactcatggcacggttcagcacattgccctgtcctctcgatattagcacacagtgcaggttcaggcacattgaatttgagaagacttaggttcagtcctttggcaagactgtaaatcacggtgtctttctttccttcctccttcttctctctctctctctctctctctttccttttctttctctttttttcagagttgcactctgttgcccaggctggagtacagtggcacgatctcgactcactgcaacctccatctcccgggttcaagcagttctcctgtttcagcctcccaagtagctgggactacaggtgcacgccaccatgcccggctaatttttgtatttttagtagaggggtttcaccataatggtcaggctggtcttgaactcctgaactcaagtgatccaccagccttggcctcccaaaatgctgggattacaggcatgagccaccatgcccagctaatttttgtatttttagtagagacagggtttcaccataatagccaggctggtctcaaactccttaccttgtgatccgcccacctcagccttccaaagtgctgggattataggcgtgagccactgtgcccggcctacagggtttttatctaacctttctgttacaactgtacctctccttctgtactgaaagtcctggttttcaagaacacagggcacgatagaattagaacatcccacaattactcatttcttttatttatcttacacttacagctgtctcagaataacaatagaaatacaaccacaaataatatggcaattgaaacaattaaaaagttttcatttgcttttctcattctttcccaatttttttttttttttgagatggagtctcgcgctcttgttgcccaggctggagtgcaatggcacgatctcggctcactgcaacctctgcctcctggattcaagcaattctcctgcctcagcttcccgagtagctgggattataggcatgcgccaccacgccctgctaattttgtatttttagtagagtcaggatttctccacattggtcaggctggcctcaaactctcgacctcaggtgatccgcctgcctcggcctcccaaagtgctgggattacaggtgtgagccactgcgcccgacatcccaatttttaaaatagttatactatgtcaacattttcagaacatactggtatagcatactgtactttcttccttttatcccccatttattcttagttcttcaactatatatttaacacttgcccccagttttgttttgttttgttttgaggaggaatcttgctctgttgcccaggctggagtgcagtggtgtgatcttggctcactgcaacctccgcctcccgggttcaagtgattctcctgcctcagcctctcgagtagctgggattacaagtgggcaccaccacacccggctaattgttgtatttttagtagagatgggttttgccatgttggccaggctggttttgaactcctgacctcaagtgatccacctgtgttggcctcctaaagtactgggattacaggtgtgtgccaccgcgccaggcaattgcccccagtttttatttgatggctctgactgtttctcatatctgactctttaattatgaatccagggcatagattagtatctccatcttgtaaggatgcaaagaagccatgaaaataagtaatatcaactcctgaggataaaacgttacttgactagagttagctttttaattgtaatcatttataaacttctttgttccttacatataagcatagtcataaccatggtacccaaaattttctataagttattgtaactccttaaaggtcttgctacagttcttttatccagtacaaataattgggaaaatgtaaagctgaatgaaatctagtgagcctcatatcctcccttttagatattgattttaagtttgcttttcacagctgctaaaaagtaacaactgatttttagttccacaacctctctttcttcaatttagatggatcatacaataaagcaaaatctggctggttacagtggctcacacctataatcccagcactttgggaggctgaggtggagggtctcatgagcccaggagttcaagaccaacctgggcaatatagtgagactctttctatttaaacaaaaacaaaaacaaacaaacaaacaaacaaaaagctgggcatgatgcacacctttagtttcagctactaaggaggctgaggttggaggatcacttgagcctaggaggtcaacactgcagtgagctatgatcatgctactgccctccagcctgggcaacagagcaagaccctgtctccaaaaacataaataattaaatataaataaaaataaagcaaaatctgttgggaaacgagaaaaaggagaggaatttttcaggaataatcataaaaagaaatgatcatcagactgaaagtccagagcctgagaaatgaaaacatatttttaagcattggtgttgaccatgcagacaaacttttgttaattcagagcgatacaaaaggcactttgaatctataaaacttgaaaaagttaaaaattgtatgtcggataaagctttaagtcatctgtcactattaacctcagtgcagcaattctgactcctgtgcctggattccttttatgataattttgccacctacaggacagattaggtgctggtcgcctgaattattttgtgttctgaattattttgagctctaaaatggtaaagtacaaatactcattgttttactgtgcctttggccttttataaaaaggtatttataattcgttgataaaaaccaatatttgaagctgttgattaccaacaaaaaagtttcactctctttatagtgcttcaggatacaactttttcagggccttattagagaaaaactgattcacatgttattcttctaaagctaaattattaaaatgtaggttgaaagattggattgattgtgaatctacactaaagatatggttccaggcagacctccttagagacctccaggcagacctccttactgtcttcagtgatgtttaatttcattactgttactgggtgccaagtgtctttcatttggaagtgaacttactccagttattgaatgtttatcatatcataatttgcatttttccaacattgaaggtattttaaaaagtcactaagagattcattcttttattattcaactacaaaaaaatagtgtaatgatcagaatttaaaatgtgtgattctttttcttctgtaagtatgtattgctatgataaataaaaaatggcaggaccattgtttttattaaaat

SEQ ID NO: 1750 - protein, 232 aa, Homo sapiens
MGSVLSTDSGKSAPASATARALERRRDPELPVTSFDCAVCLEVLHQPVRTRCGHVFCRSCIATSLKNNKWTCPYCRAYLPSEGVPATDVAKRMKSEYKNCAECDTLVCLSEMRAHIRTCQKYIDKYGPLQELEETAARCVCPFCQRELYEDSLLDHCITHHRSERRPVFCPLCRLIPDENPSSFSGSLIRHLQVSHTLFYDDFIDFNIIEEALIRRVLDRSLLEYVNHSNTT

SEQ ID NO: 1751 - DNA, 413 bp, Homo sapiens
atggtgcgcataaatgtcctggctgatgctctcaagagcatcaacaatgccaaaaagagaggcaaacaccaggttcttattgggccatgctccaaagtcatcatccggtttctaactgtgataatgaagcatggttacattggcgagtctgaaatcattgatgatcagagctgggaagattgtgaacctcacaggcaggctaaacaagtgtagagtgattagccccagatttgacgtgcaactcaaagatctagaaaaatggcagaataatctgctcccatcctgccagtttggtttcattgtactgacaacctcagctggcatcatggaccatgaagaagcaaagacgaaaacacacaggagggaaaatcctaggattcttttctagagatgtaatatatatttacaaataa

SEQ ID NO: 1752 - DNA, 801 bp, Homo sapiens
atgccgtgggcccgccccgctcgcccctcaccccgccccaggacgcggcctcacgctctaggccacgccctcaccgggctccaggcgcgggctcgcgccccgccctcagcccccgtcttcgcccaaggcctcccttttcactgcttttccgcctctactcaccccgaccccgagccccgagtgcccagcccgtgtccgcggcttcctccccgccccgcttcccggcaccccggcccctccacgcttccgccggggagactctcacctaggagccccgaagcggcgttgtggacggagctgcttttccttcacgtccgaggccccggggcaaatggagggcggcgtgcgctgtgcttatcggcccctaacggggccggagccgaggctcatggtgcagggagattcgcccgccgccgccagcagctctgtcttggcattgcgctgcctacagcctacccggccgtcaccgaacgcgggagcgccggggatctgggcggaggagccaggagaggcggggaggcacggggtgtgaagtgcggcctgtatagcaaccggcgcacggcgccttccgcgggttgtgacctttgaagagaaatgccgtagaagcatggacgtggcttttcaccaaggttattcactaatttaagtgttttttttaattttattttattttattttattttttgagacaggtactcactctgtctcccaggccggagtgcaattatctgtacaattgataatctataagatggtccaacctgcgtaacagagtgagattccgtctcaaaaaaaaaaaaa

SEQ ID NO: 1753 - protein, 195 aa, Homo sapiens
MPWARPARPSPRPRTRPHALGHALTGLQARARAPPSAPVFAQGLPFHCFSASTHPDPEPRVPSPCPRLPPRPASRHPGPSTLPPGRLSPRSPEAALWTELLFLHVRGPGANGGRRALCLSAPNGAGAEAHGAGRFARRRQQLCLGIALPTAYPAVTERGSAGDLGGGARRGGEARGVKCGLYSNRRTAPSAGCDL

SEQ ID NO: 1754 - DNA, 3566 bp, Homo sapiens
gccgtgcgccggttgctatacaggccgcacttcacaccccgtgcctccccgcctctcctggctcctccgcccagatccccggcgctcccgcgttcggtgacggccgggtaggctgtaggcagcgcaatgccaagacagagctgctggcggcggcgggcgaatctccctgcaccatgagcctcggctccggccccgttaggggccgataagcacagcgcacgccgccctccatttgccccggggcctcggctgcgaagatagcggcggccggacaggaagctcgaggaaagcgctgggccgggtctctacgaacacgtgaaggaaaagcagctccgtccacaacgccgcttcggggctcctagggagtcgggccccgggccgccaccgtcacctcggccgctgccgctgtcgccatcgccttgtttccccatcccccgccatggccgaggacctctctgcggccacgtcctacaccgaagatgatttctactgccccgtctgtcaggaggtgctcaaaacgcccgtgcggaccacggcctgtcagcacgttttctgtagaaaatgtttcctgactgcaatgagggaaagcggagcacattgtcccctatgtcgtggaaatgtgactagaagagagagagcatgtcctgaacgggccttagaccttgaaaatataatgaggaagttttctggtagctgcagatgctgtgcaaaacagattaaattctatcgcatgagacatcattacaaatcttgtaagaagtatcaggatgaatatggtgtttcttctatcattccaaactttcagatctctcaagattcagtagggaacagcaataggagtgaaacatccacatctgataacacagaaacttaccaagagaatacaagttcttctggtcatcctacttttaagtgtcccctgtgtcaagaatcaaattttaccagacagcgtttactggatcactgtaacagtaatcacctatttcagatagttcctgtgacatgtcctatttgtgtgtctcttccttggggagatcctagccagattaccagaaatttcgttagtcatctaaatcagagacatcaatttgattatggagaatttgtgaatcttcagctagatgaagaaacccaataccaaactgctgttgaagaatcttttcaagtaaacatctgaaggctgtagacatctctgcatctttgtacctgcaagtgccatctttaagggggaaactacatgaagtcaccgttacagtaacttgatgtgtatattaataaaagtaattcagtcattttagtttttgattgaaaataaaggtagggcttctaaaaacttcatcatcttgataagttaaaaaatgaaagttatgacattagctttaaaggtgtaaaaaagatgtttcactaatgtaacggtgaaagagaatccctgttgtactttatctttttgtaatattatttttgaatttttcattattatgttgcttttgaaatttgatgcattcctcccatttactttattattgtacacatttaacacacagtagcaaattttgaacgatgtgattgatataacctaacaaatctgagccagttattattagagttgcagaatagaaacttgaagtgctaaatggaataatccaaaggaaattttttaaatgcaggttctagctgaaaaattcaactataagaaaattgtatttatataacatttactatttttgaagactagtgagatttctgtaataattttaattctttaaaaagtgaaagcttgttgtaaagatattttctttttgttattagaaggaaatacaaagagaaaaatttctttctttcatgggcatttgataatttcagtctttgactgatttgtaagcctagaatatactaagctgaataacagctctttggcctcagaattttcagtagccagtatttctgattaactaagttgaaactcttattagaaactttcagttggtgatattgtattctagaagatataaatgagaggtttggcttcatctcagtttagaaatttattcaaagctaaagatgtatatatacatatacttttgtgtgtatatatacacatatgtgtgtatgcagtttgtcaggttatatatagaatttctattaaggattttttaaatggacaagcaatagggggttgaagtgtttatctgatttgtttaaaattttgtatatcaccaaatttttaaaaagtgatagtcacagtgctaagttatctagttggctactattacaccttaaaaattgagtttacacacacacaattacctgtttatatggtgctcatttgttattctcaaatataatgtgtgaccgtgatatagtgagaaagattctaccaaccactgtttcactactttttagttaaaattgggtatgttcttaatattcattagtgagaatcacaaagtattttgtagaaggcccaaatcacagaataaaggactaagagtggatttgctgacattccatactaatatacattgtttatgctttctttaaaataactagaagaacataaaagaaagagaatctcagaagtagtttgctgctaatatatacatatattgtataaaaaggtatattttggttttgttaaaacccttgttgacttttctacactgaacattttttttaacttgatttaataaaaatgttaattttggaagtgcagttttgtaaaaacctttttcagtcaaacagtaaagactttatttatggattgtaataacaaccacaagaaaagccatacatcttaatgaacatacgcctttgttctgtcattttaaagagtggtgtttactatgtgtgtgcttgagcattttctttcagttacatgggtgtaatttaaaaaacagctcctttttaagacttttgaccatagtgttttccagtttaaagcaataactttcatagtttctttcaaagtttaatacatccaatatgtcaagttaaaccattctgggatttgcaaagtttaatacatccaatatgtcaagttaaaccattctgggatttgcaaagtttaatacatccaatatgtcaagttaaaccattctgggatttgggaacttctttaaaggaaaattgtagtagaggtcatcttgatggaattgtgttttaaagttttgtgaatgagttaaatatcattgatagtcttgtgtgtctcacatatcagctttttcataaggaaaatactttatttgcttttatctgagaatttctcagtatgaaaatgattgtttaaaatttcccctctttttgtcagtgcattgggaatagggatagactttacagatttatggaaattaaatttatggggaaaagtttatttttaatattacttatagctgagtcagaattaaaggagggaattgtattgatactccaatacctaaatttcacaataccacttaggaaagctatttcaacaaattacagttttattgttaaaacagagtcttatttgagatgtattgctttatttttcaattaaaagtggttttctcctaaaaaaaaaaaaaaaa

SEQ ID NO: 1755 - protein, 245 aa, Homo sapiens
MAEDLSAATSYTEDDFYCPVCQEVLKTPVRTTACQHVFCRKCFLTAMRESGAHCPLCRGNVTRRERACPERALDLENIMRKFSGSCRCCAKQIKFYRMRHHYKSCKKYQDEYGVSSIIPNFQISQDSVGNSNRSETSTSDNTETYQENTSSSGHPTFKCPLCQESNFTRQRLLDHCNSNHLFQIVPVTCPICVSLPWGDPSQITRNFVSHLNQRHQFDYGEFVNLQLDEETQYQTAVEESFQVNI

SEQ ID NO: 1756 - DNA, 2938 bp, Homo sapiens
ctccgggttcatgtagggagtcgggccccgggccgccaccgtcacctcggccgctgccgctgtcgccatcgccttgtttccccatcccccgccatggccgaggacctctctgcggccacgtcctacaccgaagatgatttctactgccccgtctgtcaggaggtgctcaaaacgcccgtgcggaccacggcctgtcagcacgtcaataggagtgaaacatccacatctgataacacagaaacttaccaagagaatacaagttcttctggtcatcctacttttaagtgtcccctgtgtcaagaatcaaattttaccagacagcgtttactggatcactgtaacagtaatcacctatttcagatagttcctgtgacatgtcctatttgtgtgtctcttccttggggagatcctagccagattaccagaaatttcgttagtcatctaaatcagagacatcaatttgattatggagaatttgtgaatcttcagctagatgaagaaacccaataccaaactgctgttgaagaatcttttcaagtaaacatctgaaggctgtagacatctctgcatctttgtacctgcaagtgccatctttaagggggaaactacatgaagtcaccgttacagtaacttgatgtgtatattaataaaagtaattcagtcattttagtttttgattgaaaataaaggtagggcttctaaaaacttcatcatcttgataagttaaaaaatgaaagttatgacattagctttaaaggtgtaaaaaagatgtttcactaatgtaacggtgaaagagaatccctgttgtactttatctttttgtaatattatttttgaatttttcattattatgttgcttttgaaatttgatgcattcctcccatttactttattattgtacacatttaacacacagtagcaaattttgaacgatgtgattgatataacctaacaaatctgagccagttattattagagttgcagaatagaaacttgaagtgctaaatggaataatccaaaggaaattttttaaatgcaggttctagctgaaaaattcaactataagaaaattgtatttatataacatttactatttttgaagactagtgagatttctgtaataattttaattctttaaaaagtgaaagcttgttgtaaagatattttctttttgttattagaaggaaatacaaagagaaaaatttctttctttcatgggcatttgataatttcagtctttgactgatttgtaagcctagaatatactaagctgaataacagctctttggcctcagaattttcagtagccagtatttctgattaactaagttgaaactcttattagaaactttcagttggtgatattgtattctagaagatataaatgagaggtttggcttcatctcagtttagaaatttattcaaagctaaagatgtatatatacatatacttttgtgtgtatatatacacatatgtgtgtatgcagtttgtcaggttatatatagaatttctattaaggattttttaaatggacaagcaatagggggttgaagtgtttatctgatttgtttaaaattttgtatatcaccaaatttttaaaaagtgatagtcacagtgctaagttatctagttggctactattacaccttaaaaattgagtttacacacacacaattacctgtttatatggtgctcatttgttattctcaaatataatgtgtgaccgtgatatagtgagaaagattctaccaaccactgtttcactactttttagttaaaattgggtatgttcttaatattcattagtgagaatcacaaagtattttgtagaaggcccaaatcacagaataaaggactaagagtggatttgctgacattccatactaatatacattgtttatgctttctttaaaataactagaagaacataaaagaaagagaatctcagaagtagtttgctgctaatatatacatatattgtataaaaaggtatattttggttttgttaaaacccttgttgacttttctacactgaacattttttttaacttgatttaataaaaatgttaattttggaagtgcagttttgtaaaaacctttttcagtcaaacagtaaagactttatttatggattgtaataacaaccacaagaaaagccatacatcttaatgaacatacgcctttgttctgtcattttaaagagtggtgtttactatgtgtgtgcttgagcattttctttcagttacatgggtgtaatttaaaaaacagctcctttttaagacttttgaccatagtgttttccagtttaaagcaataactttcatagtttctttcaaagtttaatacatccaatatgtcaagttaaaccattctgggatttgcaaagtttaatacatccaatatgtcaagttaaaccattctgggatttgcaaagtttaatacatccaatatgtcaagttaaaccattctgggatttgggaacttctttaaaggaaaattgtagtagaggtcatcttgatggaattgtgttttaaagttttgtgaatgagttaaatatcattgatagtcttgtgtgtctcacatatcagctttttcataaggaaaatactttatttgcttttatctgagaatttctcagtatgaaaatgattgtttaaaatttcccctctttttgtcagtgcattgggaatagggatagactttacagatttatggaaattaaatttatggggaaaagtttatttttaatattacttatagctgagtcagaattaaaggagggaattgtattgatactccaatacctaaatttcacaataccacttaggaaagctatttcaacaaattacagttttattgttaaaacagagtcttatttgagatgtattgctttatttttcaattaaaagtggttttctcctaaaaaaaaaaaaaaaa

SEQ ID NO: 1757 - protein, 151 aa, Homo sapiens
MAEDLSAATSYTEDDFYCPVCQEVLKTPVRTTACQHVNRSETSTSDNTETYQENTSSSGHPTFKCPLCQESNFTRQRLLDHCNSNHLFQIVPVTCPICVSLPWGDPSQITRNFVSHLNQRHQFDYGEFVNLQLDEETQYQTAVEESFQVNI

SEQ ID NO: 1758 - DNA, 3353 bp, Homo sapiens
gaccgcagcagagccggaggggtgggcaggcgcgggtccgggagacgcgcggggaaacgcgcggagccgtgtctgctcaatcaagtcaaatactgaacaacttcctggcggagaggctgagaattttatacttgcttgctcgaaagcaccccaaataagatgatccacgccaacacctcccctttacaggttttaaaatattcttataactatgactgaaaacaagacagtttcctcttcttccactagagatgatcaaaccaatataggtttaacatgtcaggaagtaaaggctctcagagagaaggcatggtcaaggacaaatgaaggcaatgccatgtctcaaagtttggttctatatggagcctctaaggagaacagtgaaggttttcatgaaagtaaaatgacaaatactgaaggggtgaataaaggcatttactttagctacccatgtcgacgtcacagctgtgccgtagtaaatattccagcaccttgtgtcaacaaaatgatttcacacatccaagatgtggagtccaaaatacaggagcatttgaaaaggtttgaaacttcttttgaagaatggagcagaacttcttccacaaaagacctgaaagaagattggagtgtaactacaccagtgaaagaggtcaaaccaggagaaaagagagatgaaaagtgtccagagttaaagcaggaaatggaaacattgctctcagaggccattcgtctcattaaaagtctagaaactgaccgggcagacgctgaagaagctttaaaacaacagagatcaagaaagaatatgattaacatgaaaattgactcttggtcagtctggaaacttcaagaactcccattggctgtgcagaaagaacatgaggcctatttgagtgatgttatagaattacaatggcatcttgaagataaagctaatcaactacaacattttgaaaaacaaaagacagagttagaagaagcaaatgcaaagattcaagcagacatagactacatgaatgaacatggccctctactggactctaagcagaatcaggaacttcaagatctgaagaaccattataaaaaaaaaatggaggtaatggacctacacagaaaagttaatgaagaacttgaagaagctttagaagcctgtgaaaatgccagattgaaggctcagcaaattaaagaagagattgataaggatatttaccaggatgaaaaaaccatagaggcctacaagagagagatatatcaacttaacagtctatttgatcattactcttcatcagtgataaatgttaatactaatattgaggagaaggaagaggaagtgactgaagcaataagggaaacaaagtcatcaaaaaatgaattacattctctatcaaaaatgctggaagatttgagaagagtttatgaccaactaacctggaagcaaaaaagtcatgaaaatcagtatctggaagcagttaatgatttttatgctgcaaaaaaaacatgggatattgagctttctgatgttgcaaaagatttttcagctatttctttggcatgtacaaaactgacggaagacaataaaaaacttgagattgatattaacaaaataacagtaaaaaccaatgaaagcatacggaaaaaatcaaaatacgaatctgaaataaaatatttgacaataatgaagttaaagaatgataaacatctcaagaacatctataaggaggcttatcgcattggtactcttttccacctaaccaaacacaagacagatgaaatggaagataaaatagcagaagtgagaagaaagttcaagggtagagaagaattcctgaaaaaactcactcaaggtgaagtggctgctggaatggtgcttcagaaaaaactatattccatttacgaagtccaggcacttgagcggaaagagcttataaaaaatagagcaatatgtgccatgtcactggcagaactacaggaacctctgcttcaactagaagatgaagctgaaagaatcagaagtctcgacaaagaacattctgttagtaaacgctcagcaatttttaaagacctagaagcaactaaaagtaagacaatgattttttatgcaaaaataaatgaattgaatgaggaattaaaagcaaaagaagaagaaaagaaaagttttgatcagacacttgaaatattaaagaacaaatttataactatgagatttaaaagggaacatgcacaaactgtgtttgatcattatatgcaagagaaaaaagactgtgaagagagaatctttgaggaagatcagagatttagagtgctccttgctgtaagacaaaaaactcttcaagatacccaaaaaataatagctgattcacttgaagaaaatctgcgtttagctcaagagtatcaacagctacagattacattcttaaaagaaaaggacaattatttcaatatatatgataaacagctatcacttgatacttcaattagagataagaaacagctctgtcagctgcagagaaggatgcacacactgtggcaggagcacttcaaactggtggtcctcttcagccagatgaggctggccaacttccagacagactctcaggagagtattcagaaaatattagctgtgcaggaggaatcttcaaatttaatgcaacacatcttaggtttcttccagactttgacagatggcacatgcgaaaacgatggttaagcaaacaaccaatgtatcttggatgctgaaataaaagacaagaaaagtcacacagttcagataacagtgtaattggacattcacctgtttgccatttcacacttccatgaacgaaaaactcactcacctcccagcatgctttgccactcttttactcacagcaaatccataacaatgaaacaggtgactttcatgctgctgtcaggaacgatctaatttcagctctgggtgactgattgcaattggctttgcctcatctgataattaatctatgtcaccattaattggaagagagaataattactggcggtgttgacagtgactgttcgcttccccagatttccctatcgtcttggcccaaataaaggctttgccattcagtacttaaagtttgtgtaaactgtaacaatatctatgcccatgtgacactttgagacactctgtctaatgtacttttgtttttgtgtttaccagtcttttttagctcactgagagctgtctctctcaatcactcctcaatgttctatcttaattttgtggaagtttaaagttttcaatgagctggagatgaatgattaatgaataaatttaaatgcttcattttgtccaaaaaaaaaaaaaaaaaaaaaaaaaaaaaaaaaaaaaaaaaaaa

SEQ ID NO: 1759 - protein, 829 aa, Homo sapiens
MTENKTVSSSSTRDDQTNIGLTCQEVKALREKAWSRTNEGNAMSQSLVLYGASKENSEGFHESKMTNTEGVNKGIYFSYPCRRHSCAVVNIPAPCVNKMISHIQDVESKIQEHLKRFETSFEEWSRTSSTKDLKEDWSVTTPVKEVKPGEKRDEKCPELKQEMETLLSEAIRLIKSLETDRADAEEALKQQRSRKNMINMKIDSWSVWKLQELPLAVQKEHEAYLSDVIELQWHLEDKANQLQHFEKQKTELEEANAKIQADIDYMNEHGPLLDSKQNQELQDLKNHYKKKMEVMDLHRKVNEELEEALEACENARLKAQQIKEEIDKDIYQDEKTIEAYKREIYQLNSLFDHYSSSVINVNTNIEEKEEEVTEAIRETKSSKNELHSLSKMLEDLRRVYDQLTWKQKSHENQYLEAVNDFYAAKKTWDIELSDVAKDFSAISLACTKLTEDNKKLEIDINKITVKTNESIRKKSKYESEIKYLTIMKLKNDKHLKNIYKEAYRIGTLFHLTKHKTDEMEDKIAEVRRKFKGREEFLKKLTQGEVAAGMVLQKKLYSIYEVQALERKELIKNRAICAMSLAELQEPLLQLEDEAERIRSLDKEHSVSKRSAIFKDLEATKSKTMIFYAKINELNEELKAKEEEKKSFDQTLEILKNKFITMRFKREHAQTVFDHYMQEKKDCEERIFEEDQRFRVLLAVRQKTLQDTQKIIADSLEENLRLAQEYQQLQITFLKEKDNYFNIYDKQLSLDTSIRDKKQLCQLQRRMHTLWQEHFKLVVLFSQMRLANFQTDSQESIQKILAVQEESSNLMQHILGFFQTLTDGTCENDG

SEQ ID NO: 1760 - DNA, 5690 bp, Homo sapiens
accgctggcggacaccccagtaacaagtgagagcgctccaccccgcagtcccccccgcctctcctccctgggtcccctcggctctcggaagaaaaaccaacagcatctccagctctcgcgcggaattgtctcttcaactttacccaaccgacgacaaggaaccagcctcaaccttttaatgcacagcccggccacaggattgccttccatctcctcttggtccctcctggatgtggtttattgatgacttgcgagcccctcagagagctgtcttccctcctctggctccctccgtttccttgagttagttttctaaggttttaccggggctcgggatctcttggaccgaatggaactttttgctgcctgcttttgctgctgattctgtcagtggacaaggaaaaaggcttcgaaggcagcagaggcgcaggggaggtggagaaagaggtggaggaagaggacgaggaggaggaggaagccgaaggggctcggcgcgtgtgtgtgcatgtgtgcatgcgtgtgtgagtgcatgtgtgtgagtgctgccgctgcccgcgacccctggccccgaaggtgttggctgaaatatggagaatagtcttagatgtgtttgggtacccaagctggcttttgtactcttcggagcttccttgttcagcgcgcatcttcaagtaaccggttttcaaattaaagctttcacagcactgcgcttcctctcagaaccttctgatgccgtcacaatgcggggaggaaatgtcctcctcgactgctccgcggagtccgaccgaggagttccagtgatcaagtggaagaaagatggcattcatctggccttgggaatggatgaaaggaagcagcaactttcaaatgggtctctgctgatacaaaacatacttcattccagacaccacaagccagatgagggactttaccaatgtgaggcatctttaggagattctggctcaattattagtcggacagcaaaagttgcagtagcaggaccactgaggttcctttcacagacagaatctgtcacagccttcatgggagacacagtgctactcaagtgtgaagtcattggggagcccatgccaacaatccactggcagaagaaccaacaagacctgactccaatcccaggtgactcccgagtggtggtcttgccctctggagcattgcagatcagccgactccaaccgggggacattggaatttaccgatgctcagctcgaaatccagccagctcaagaacaggaaatgaagcagaagtcagaattttatcagatccaggactgcatagacagctgtattttctgcaaagaccatccaatgtagtagccattgaaggaaaagatgctgtcctggaatgttgtgtttctggctatcctccaccaagttttacctggttacgaggcgaggaagtcatccaactcaggtctaaaaagtattctttattgggtggaagcaacttgcttatctccaatgtgacagatgatgacagtggaatgtatacctgtgttgtcacatataaaaatgagaatattagtgcctctgcagagctcacagtcttggttccgccatggtttttaaatcatccttccaacctgtatgcctatgaaagcatggatattgagtttgaatgtacagtctctggaaagcctgtgcccactgtgaattggatgaagaatggagatgtggtcattcctagtgattattttcagatagtgggaggaagcaacttacggatacttggggtggtgaagtcagatgaaggcttttatcaatgtgtggctgaaaatgaggctggaaatgcccagaccagtgcacagctcattgtccctaagcctgctatcccaagctccagtgtcctcccttcggctcccagagatgtggtccctgtcttggtttccagccgatttgtccgtctcagctggcgcccacctgcagaagcgaaagggaacattcaaactttcacggtctttttctccagagaaggtgacaacagggaacgagcattgaatacaacacagcctgggtcccttcagctcactgtgggaaacctgaagccagaagccatgtacacctttcgagttgtggcttacaatgaatggggaccgggagagagttctcaacccatcaaggtggccacacagcctgagttgcaagttccagggccagtagaaaacctgcaagctgtatctacctcacctacctcaattcttattacctgggaaccccctgcctatgcaaacggtccagtccaaggttacagattgttctgcactgaggtgtccacaggaaaagaacagaatatagaggttgatggactatcttataaactggaaggcctgaaaaaattcaccgaatatagtcttcgattcttagcttataatcgctatggtccgggcgtctctactgatgatataacagtggttacactttctgacgtgccaagtgccccgcctcagaacgtctccctggaagtggtcaattcaagaagtatcaaagttagctggctgcctcctccatcaggaacacaaaatggatttattaccggctataaaattcgacacagaaagacgacccgcaggggtgagatggaaacactggagccaaacaacctctggtacctattcacaggactggagaaaggaagtcagtacagtttccaggtgtcagccatgacagtcaatggtactggaccaccttccaactggtatactgcagagactccagagaatgatctagatgaatctcaagttcctgatcaaccaagctctcttcatgtgaggccccagactaactgcatcatcatgagttggactcctcccttgaacccaaacatcgtggtgcgaggttatattatcggttatggcgttgggagcccttacgctgagacagtgcgtgtggacagcaagcagcgatattattccattgagaggttagagtcaagttcccattatgtaatctccctaaaagcttttaacaatgccggagaaggagttcctctttatgaaagtgccaccaccaggtctataaccgatcccactgacccagttgattattatcctttgcttgatgatttccccacctcggtcccagatctctccacccccatgctcccaccagtaggtgtacaggctgtggctcttacccatgatgctgtgagggtcagctgggcagacaactctgtccctaagaaccaaaagacgtctgaggtgcgactttacaccgtccggtggagaaccagcttttctgcaagtgcaaaatacaagtcagaagacacaacatctctaagttacacagcaacaggcctcaaaccaaacacaatgtatgaattctcggtcatggtaacaaaaaacagaaggtccagtacttggagcatgactgcacatgccaccacgtatgaagcagcccccacctctgctcccaaggacttgacagtcattactagggaagggaagcctcgtgccgtcattgtgagttggcagcctcccttggaagccaatgggaaaattactgcttacatcttattttataccttggacaagaacatcccaattgatgactggattatggaaacaatcagtggtgataggcttactcatcaaatcatggatctcaaccttgatactatgtattactttcgaattcaagcacgaaattcaaaaggagtggggccactctctgatcctatcctcttcaggactctgaaagtggaacaccctgacaaaatggctaatgaccaaggtcgtcatggagatggaggttattggccagttgatactaatttgattgatagaagcaccctaaatgagccgccaattggacaaatgcaccccccgcatggcagtgtcactcctcagaagaacagcaacctgcttgtgatcattgtggtcaccgttggtgtcatcacagtgctggtagtggtcatcgtggctgtgatttgcacccgacgctcttcagcccagcagagaaagaaacgggccacccacagtgctggcaaaaggaagggcagccagaaggacctccgaccccctgatctttggatccatcatgaagaaatggagatgaaaaatattgaaaagccatctggcactgaccctgcaggaagggactctcccatccaaagttgccaagacctcacaccagtcagccacagccagtcagaaacccaactgggaagcaaaagcacctctcattcaggtcaagacactgaggaagcagggagctctatgtccactctggagaggtcgctggctgcacgccgagccccccgggccaagctcatgattcccatggatgcccagtccaacaatcctgctgtcgtgagcgccatcccggtgccaacgctagaaagtgcccagtacccaggaatcctcccgtctcccacctgtggatatccccacccgcagttcactctccggcctgtgccattcccaacactctcagtggaccgaggtttcggagcaggaagaagtcagtcagtgagtgaaggaccaactacccaacaaccacctatgctgcccccatctcagcctgagcattctagcagcgaggaggcaccaagcagaaccatccccacagcttgtgttcgaccaactcacccactccgcagctttgctaatcctttgctacctccaccaatgagtgcaatagaaccgaaagtcccttacacaccacttttgtctcagccagggcccactcttcctaagacccatgtgaaaacagcctcccttgggttggctggaaaagcaagatcccctttgcttcctgtgtctgtgccaacagcccctgaagtgtctgaggagagccacaaaccaacagaggattcagccaatgtgtatgaacaggatgatctgagtgaacaaatggcaagtttggaaggactcatgaagcagcttaatgccatcacaggctcagccttttaacatgtatttctgaatggatgaggtgaattttccgggaactttgcagcataccaattacccataaacagcacacctgtgtccaagaactctaaccagtgtacaggtcacccatcaggaccactcagttaaggaagatcctgaagcagttcagaaggaataagcattccttctttcacaggcatcaggaattgtcaaatgatgattatgagttccctaaacaaaagcaaagatgcattttcactgcaatgtcaaagtttaagctgctagaatagtcatgggcctttgtcactgcagtgaccacactgtcataactaatacctatgttttcctttgtcaaggcctgttgtttaatgtgtaggtctagtcttacaaaatgcaagtgcattatttaagcctgtaccatgccatggcaaaccagtgcaagctcactattttgttttcaacttaaacatacaaagcacccatgggaatctctcatgccatagcaccaaaggattggatgttttccttacagcacaaaaagtaaatagtaaacaaacaaaaggcagagaatgcttatgtttgtaactcagtcattcatcttgcacaagtggtggatattagtgagtggctaaaaattcacctattttggcaagtatttgtaaatccacccttggttaatatgtatgtctggagtccaggaatataaaaatctgcaactagtggcattctgccagcagcagtacatttctggaaagaggatataatatgcaatcttct

SEQ ID NO: 1761 - protein, 1447 aa, Homo sapiens
MENSLRCVWVPKLAFVLFGASLFSAHLQVTGFQIKAFTALRFLSEPSDAVTMRGGNVLLDCSAESDRGVPVIKWKKDGIHLALGMDERKQQLSNGSLLIQNILHSRHHKPDEGLYQCEASLGDSGSIISRTAKVAVAGPLRFLSQTESVTAFMGDTVLLKCEVIGEPMPTIHWQKNQQDLTPIPGDSRVVVLPSGALQISRLQPGDIGIYRCSARNPASSRTGNEAEVRILSDPGLHRQLYFLQRPSNVVAIEGKDAVLECCVSGYPPPSFTWLRGEEVIQLRSKKYSLLGGSNLLISNVTDDDSGMYTCVVTYKNENISASAELTVLVPPWFLNHPSNLYAYESMDIEFECTVSGKPVPTVNWMKNGDVVIPSDYFQIVGGSNLRILGVVKSDEGFYQCVAENEAGNAQTSAQLIVPKPAIPSSSVLPSAPRDVVPVLVSSRFVRLSWRPPAEAKGNIQTFTVFFSREGDNRERALNTTQPGSLQLTVGNLKPEAMYTFRVVAYNEWGPGESSQPIKVATQPELQVPGPVENLQAVSTSPTSILITWEPPAYANGPVQGYRLFCTEVSTGKEQNIEVDGLSYKLEGLKKFTEYSLRFLAYNRYGPGVSTDDITVVTLSDVPSAPPQNVSLEVVNSRSIKVSWLPPPSGTQNGFITGYKIRHRKTTRRGEMETLEPNNLWYLFTGLEKGSQYSFQVSAMTVNGTGPPSNWYTAETPENDLDESQVPDQPSSLHVRPQTNCIIMSWTPPLNPNIVVRGYIIGYGVGSPYAETVRVDSKQRYYSIERLESSSHYVISLKAFNNAGEGVPLYESATTRSITDPTDPVDYYPLLDDFPTSVPDLSTPMLPPVGVQAVALTHDAVRVSWADNSVPKNQKTSEVRLYTVRWRTSFSASAKYKSEDTTSLSYTATGLKPNTMYEFSVMVTKNRRSSTWSMTAHATTYEAAPTSAPKDLTVITREGKPRAVIVSWQPPLEANGKITAYILFYTLDKNIPIDDWIMETISGDRLTHQIMDLNLDTMYYFRIQARNSKGVGPLSDPILFRTLKVEHPDKMANDQGRHGDGGYWPVDTNLIDRSTLNEPPIGQMHPPHGSVTPQKNSNLLVIIVVTVGVITVLVVVIVAVICTRRSSAQQRKKRATHSAGKRKGSQKDLRPPDLWIHHEEMEMKNIEKPSGTDPAGRDSPIQSCQDLTPVSHSQSETQLGSKSTSHSGQDTEEAGSSMSTLERSLAARRAPRAKLMIPMDAQSNNPAVVSAIPVPTLESAQYPGILPSPTCGYPHPQFTLRPVPFPTLSVDRGFGAGRSQSVSEGPTTQQPPMLPPSQPEHSSSEEAPSRTIPTACVRPTHPLRSFANPLLPPPMSAIEPKVPYTPLLSQPGPTLPKTHVKTASLGLAGKARSPLLPVSVPTAPEVSEESHKPTEDSANVYEQDDLSEQMASLEGLMKQLNAITGSAF

SEQ ID NO: 1762 - DNA, 3185 bp, Homo sapiens
aacttctagaagttgaagttacaaaggtatatagaaggtacacagaatcagaaaagattataaaagaaagcaagatttttgttagtgacgtcctgtttcctctgaagagtaatagttggaatcaaaagagtcaacgcaatgaactgttatttactgctgcgttttatgttgggaattcctctcctatggccttgtcttggagcaacagaaaactctcaaacaaagaaagtcaagcagccagtgcgatctcatttgagagtgaagcgtggctgggtgtggaaccaattttttgtaccagaggaaatgaatacgactagtcatcacatcggccagctaagatctgatttagacaatggaaacaattctttccagtacaagcttttgggagctggagctggaagtacttttatcattgatgaaagaacaggtgacatatatgccatacagaagcttgatagagaggagcgatccctctacatcttaagagcccaggtaatagacatcgctactggaagggctgtggaacctgagtctgagtttgtcatcaaagtttcggatatcaatgacaatgaaccaaaattcctagatgaaccttatgaggccattgtaccagagatgtctccagaaggaacattagttatccaggtgacagcaagtgatgctgacgatccctcaagtggtaataatgctcgtctcctctacagcttacttcaaggccagccatatttttctgttgaaccaacaacaggagtcataagaatatcttctaaaatggatagagaactgcaagatgagtattgggtaatcattcaagccaaggacatgattggtcagccaggagcgttgtctggaacaacaagtgtattaattaaactttcagatgttaatgacaataagcctatatttaaagaaagtttataccgcttgactgtctctgaatctgcacccactgggacttctataggaacaatcatggcatatgataatgacataggagagaatgcagaaatggattacagcattgaagaggatgattcgcaaacatttgacattattactaatcatgaaactcaagaaggaatagttatattaaaaaagaaagtggattttgagcaccagaaccactacggtattagagcaaaagttaaaaaccatcatgttcctgagcagctcatgaagtaccacactgaggcttccaccactttcattaagatccaggtggaagatgttgatgagcctcctcttttcctccttccatattatgtatttgaagtttttgaagaaaccccacagggatcatttgtaggcgtggtgtctgccacagacccagacaataggaaatctcctatcaggtattctattactaggagcaaagtgttcaatatcaatgataatggtacaatcactacaagtaactcactggatcgtgaaatcagtgcttggtacaacctaagtattacagccacagaaaaatacaatatagaacagatctcttcgatcccactgtatgtgcaagttcttaacatcaatgatcatgctcctgagttctctcaatactatgagacttatgtttgtgaaaatgcaggctctggtcaggtaattcagactatcagtgcagtggatagagatgaatccatagaagagcaccatttttactttaatctatctgtagaagacactaacaattcaagttttacaatcatagataatcaagataacacagctgtcattttgactaatagaactggttttaaccttcaagaagaacctgtcttctacatctccatcttaattgccgacaatggaatcccgtcacttacaagtacaaacacccttaccatccatgtctgtgactgtggtgacagtgggagcacacagacctgccagtaccaggagcttgtgctttccatgggattcaagacagaagtcatcattgctattctcatttgcattatgatcatatttgggtttatttttttgactttgggtttaaaacaacggagaaaacagattctatttcctgagaaaagtgaagatttcagagagaatatattccaatatgatgatgaagggggtggagaagaagatacagaggcctttgatatagcagagctgaggagtagtaccataatgcgggaacgcaagactcggaaaaccacaagcgctgagatcaggagcctatacaggcagtctttgcaagttggccccgacagtgccatattcaggaaattcattctggaaaagctcgaagaagctaatactgatccgtgtgcccctccttttgattccctccagacctacgcttttgagggaacagggtcattagctggatccctgagctccttagaatcagcagtctctgatcaggatgaaagctatgattaccttaatgagttgggacctcgctttaaaagattagcatgcatgtttggttctgcagtgcagtcaaataattagggctttttaccatcaaaatttttaaaagtgctaatgtgtattcgaacccaatggtagtcttaaagagttttgtgccctggctctatggcggggaaagccctagtctatggagttttctgatttccctggagtaaatactccatggttattttaagctacctacatgctgtcattgaacagagatgtggggagaaatgtaaacaatcagctcacaggcatcaatacaaccagatttgaagtaaaataatttaggaagatattaaaagtagatgagaggacacaagatgtagtcgatccttatgcgattatatcattatttacttaggaaagagtaaaaataccaaacgagaaaatttaaaggagcaaaaatttgcaagtcaaatagaaatgtacaaatcgagataacatttacatttctatcatattgacatgaaaattgaaaatgtatagtcagagaaattttcatgaattattccatgaagtattgtttcctttatttaaaaaaaaaaaaaaaaaaaaagaatgctaggtaatcttcgtagaaaactagaaagtatgataaacaacagttggaggaatccatggaaaatagacgagaaaatgtaaataaggctttctggggatcacagaacttttgtatgaataaaagccttataaaaccagctctggcatatgactaaaatattcctctactatttttcaatgtcatctaatgcaaacgctcaacc

SEQ ID NO: 1763 - protein, 772 aa, Homo sapiens
MNCYLLLRFMLGIPLLWPCLGATENSQTKKVKQPVRSHLRVKRGWVWNQFFVPEEMNTTSHHIGQLRSDLDNGNNSFQYKLLGAGAGSTFIIDERTGDIYAIQKLDREERSLYILRAQVIDIATGRAVEPESEFVIKVSDINDNEPKFLDEPYEAIVPEMSPEGTLVIQVTASDADDPSSGNNARLLYSLLQGQPYFSVEPTTGVIRISSKMDRELQDEYWVIIQAKDMIGQPGALSGTTSVLIKLSDVNDNKPIFKESLYRLTVSESAPTGTSIGTIMAYDNDIGENAEMDYSIEEDDSQTFDIITNHETQEGIVILKKKVDFEHQNHYGIRAKVKNHHVPEQLMKYHTEASTTFIKIQVEDVDEPPLFLLPYYVFEVFEETPQGSFVGVVSATDPDNRKSPIRYSITRSKVFNINDNGTITTSNSLDREISAWYNLSITATEKYNIEQISSIPLYVQVLNINDHAPEFSQYYETYVCENAGSGQVIQTISAVDRDESIEEHHFYFNLSVEDTNNSSFTIIDNQDNTAVILTNRTGFNLQEEPVFYISILIADNGIPSLTSTNTLTIHVCDCGDSGSTQTCQYQELVLSMGFKTEVIIAILICIMIIFGFIFLTLGLKQRRKQILFPEKSEDFRENIFQYDDEGGGEEDTEAFDIAELRSSTIMRERKTRKTTSAEIRSLYRQSLQVGPDSAIFRKFILEKLEEANTDPCAPPFDSLQTYAFEGTGSLAGSLSSLESAVSDQDESYDYLNELGPRFKRLACMFGSAVQSNN

SEQ ID NO: 1764 - DNA, 2656 bp, Homo sapiens
atggcggcgggtgggagcggcgggcgtgcgtcgtgcccgccgggggtcggggtcggcccgggcacggggggcagtcccgggcccagcgccaacgccgccgccaccccggcccccggcaacgcggccgccgccgccgccgccgccgccgccgccgccgccgcccctgggccgacgccgcccgccccgccgggccccgggacagacgcgcaggccgcgggcgcggagcgggcggaggaggcggcgggcccgggggcggcggcgctgcagcgcgaggccgcgtacaactggcaggccagcaagcccaccgtgcaggagcgcttcgccttcctcttcaacaacgaggtgctgtgcgacgtgcacttcctggtgggcaaggggctcagctcgcagcgcatccccgcgcacaggttcgtgctggccgtgggcagcgccgtctttgatgccatgttcaacgggggaatggccacaacatccacggagattgagctgcccgacgtggaacccgctgccttcctcgcactgctcaagtttctctactcggacgaggtgcagattggcccggagacggtgatgaccacgctatacaccgccaagaagtacgcggtgccagcgctcgaggcccattgcgtggagttcctgaagaagaacctgcgagccgacaacgccttcatgctgctcacgcaggcgcgactcttcgatgaaccgcagctggccagcctgtgcctggagaacatcgacaaaaacactgcagacgccatcaccgcggagggcttcaccgacattgacctggacacgctggtggctgtcctggagcgcgacacactgggcatccgtgaggtgcggctgttcaatgccgttgtccgctggtccgaggccgagtgtcagcggcagcagctgcaggtgacgccagagaacaggcggaaggttctgggcaaggccctgggcctcattcgcttcccgctcatgaccatcgaggagttcgctgcaggtcccgcacagtcgggcatcctggtggaccgcgaggtggtcagcctcttcctgcacttcaccgtcaaccccaagccacgagtggagttcattgaccggccccgctgctgcctgcgtgggaaggagtgcagcatcaaccgcttccagcaggtggagagtcgctggggctacagcgggaccagtgaccgcatcaggttctcagtcaacaagcgcatcttcgtggtgggatttgggctgtatggatccatccacgggcccaccgactaccaagtgaacatccagattattcacaccgatagcaacaccgtcttgggccagaacgacacgggcttcagctgcgacggctcagccagcaccttccgcgtcatgttcaaggagccggtggaggtgctgcccaacgtcaactacacggcctgtgccacgctcaagggcccagactcccactacggcaccaaaggcctgcgcaaggtgacacacgagtcgcccaccacgggcgccaagacctgcttcaccttttgctacgcggccgggaacaacaatggcacatccgtggaggacggccagatccccgaggtcatcttctacacctaggctgcccgacaccgacaccgccctccctccgtggggatagccgcagccccaggccatcatctgctgctggggcccccccaccacgcggtgccaggcccagtgtcccccaggccgtctgtccactccatgccacctttctcagcatcaggacggggttgccctgtgttcaccacgagtgtggctgctggatcagggcagccggggaggtggccaggccagtggccaggccctgtggagacaatccctcaggactagggacagggctgtgccggcctgggccagggcccacggacccgcagctcagggcgcctgcccacgtcgtctgccggcggtgcgccgcgggcgtccctcgcgtctcttcactgcacattgcaatgcatttgcgattcccatttctctgctaggagccagcctgggtggcgctgctcccagagccgtgggtcccagaccttgcgttccttttgttcctgtccgtttatcaggacacgggccccacctgtcacgtgcccgaggccacccaagcccagcctgcggggcgttcccactgcctggatgccggcttgagttctgcgcacgcaggattcagtgtggggacggcccctgccggataggcctagccctggcccaggtggtgagcggtttgcagtgtccgttctcatccacctgatgggcccagataaaggcccccgctgtccagcctccctggacggccctcgcggtccctgcagcccaagatgggactcagaccctgtgccccagagctcccctgccgcagaatggggccccagccggccccgaccgggtccaggagcactgctcgcctgtacatactgttgccctagcccacctggtgccgtgggagccacccccaggtgctgggggcacagcccctccccactccggccacgcccccacccaccccgcgtgtttctgccctgtgactcctggaacctgcgtcctccccaaagccatgggaggggtgtcctcctcagaccatgcccccagatgatttttttaaataaagaaacaaatgcacctgcaaaaaaaaaaaaaaaaaaaaaaaaaaaaaaaaaaaaaa

SEQ ID NO: 1765 - protein, 525 aa, Homo sapiens
MAAGGSGGRASCPPGVGVGPGTGGSPGPSANAAATPAPGNAAAAAAAAAAAAAAPGPTPPAPPGPGTDAQAAGAERAEEAAGPGAAALQREAAYNWQASKPTVQERFAFLFNNEVLCDVHFLVGKGLSSQRIPAHRFVLAVGSAVFDAMFNGGMATTSTEIELPDVEPAAFLALLKFLYSDEVQIGPETVMTTLYTAKKYAVPALEAHCVEFLKKNLRADNAFMLLTQARLFDEPQLASLCLENIDKNTADAITAEGFTDIDLDTLVAVLERDTLGIREVRLFNAVVRWSEAECQRQQLQVTPENRRKVLGKALGLIRFPLMTIEEFAAGPAQSGILVDREVVSLFLHFTVNPKPRVEFIDRPRCCLRGKECSINRFQQVESRWGYSGTSDRIRFSVNKRIFVVGFGLYGSIHGPTDYQVNIQIIHTDSNTVLGQNDTGFSCDGSASTFRVMFKEPVEVLPNVNYTACATLKGPDSHYGTKGLRKVTHESPTTGAKTCFTFCYAAGNNNGTSVEDGQIPEVIFYT

SEQ ID NO: 1766 - DNA, 1778 bp, Homo sapiens
cggctcctctcagcggcggtggcccaggtagaggggtccgcgctggcggcggcggcggcgctgttccccgcgcggtccgcggagcggggtccgggctgcgcgacgtggggcggcggcggcactgcggccccggcccaagcccgaccccgggtcccctcctcggccgccccccgcccggccgcccgccctcgggcctccccccgggccctcggtcccctcccccgctggcggggcccggacagaagatggtgcagaagaaaccagccgaacttcagggtttccaccgttcgttcaaggggcagaaccccttcgagctggccttctccctagaccagcccgaccacggagactctgactttggcctgcagtgctcagcccgccctgacatgcccgccagccagcccattgacatcccggacgccaagaagaggggcaagaagaagaagcgcggccgggccaccgacagcttctcgggcaggtttgaagacgtctaccagctgcaggaagatgtgctgggggagggcgctcatgcccgagtgcagacctgcatcaacctgatcaccagccaggagtacgccgtcaagatcattgagaagcagccaggccacattcggagcagggttttcagggaggtggagatgctgtaccagtgccagggacacaggaacgtcctagagctgattgagttcttcgaggaggaggaccgcttctacctggtgtttgagaagatgcggggaggctccatcctgagccacatccacaagcgccggcacttcaacgagctggaggccagcgtggtggtgcaggacgtggccagcgccttggactttctgcataacaaaggcatcgcccacagggacctaaagccggaaaacatcctctgtgagcaccccaaccaggtctcccccgtgaagatctgtgacttcgacctgggcagcggcatcaaactcaacggggactgctcccctatctccaccccggagctgctcactccgtgcggctcggcggagtacatggccccggaggtagtggaggccttcagcgaggaggctagcatctacgacaagcgctgcgacctgtggagcctgggcgtcatcttgtatatcctactcagcggctacccgcccttcgtgggccgctgtggcagcgactgcggctgggaccgcggcgaggcctgccctgcctgccagaacatgctgtttgagagcatccaggagggcaagtacgagttccccgacaaggactgggcccacatctcctgcgctgccaaagacctcatctccaagctgctggtccgtgacgccaagcagaggctgagtgccgcccaagtcctgcagcacccctgggttcaggggtgcgccccggagaacaccttgcccactcccatggtcctgcagaggtgggacagtcacttcctcctccctccccacccctgtcgcatccacgtgcgacctggaggactggtcagaaccgttactgtgaatgagtgaagatcctggaggaccctgggccccaggccagctcccatcgctgggggacggtgaacggccatgtgttaatgttacgatgtttttaaaagacaaaaaaaaaaaaaaaacctcaaaagtttttttaaagtgggggaaaaacatccaagcactttaattccaatgtaccaggtgaactgacggagctcagaagttttcctttacaccaactgtcaatgccggaattttgtattctgttttgtaaagatttaataaaagtcaaaaaacttgcaaaaaaaaaaaaaaaaaaaa

SEQ ID NO: 1767 - protein, 414 aa, Homo sapiens
MVQKKPAELQGFHRSFKGQNPFELAFSLDQPDHGDSDFGLQCSARPDMPASQPIDIPDAKKRGKKKKRGRATDSFSGRFEDVYQLQEDVLGEGAHARVQTCINLITSQEYAVKIIEKQPGHIRSRVFREVEMLYQCQGHRNVLELIEFFEEEDRFYLVFEKMRGGSILSHIHKRRHFNELEASVVVQDVASALDFLHNKGIAHRDLKPENILCEHPNQVSPVKICDFDLGSGIKLNGDCSPISTPELLTPCGSAEYMAPEVVEAFSEEASIYDKRCDLWSLGVILYILLSGYPPFVGRCGSDCGWDRGEACPACQNMLFESIQEGKYEFPDKDWAHISCAAKDLISKLLVRDAKQRLSAAQVLQHPWVQGCAPENTLPTPMVLQRWDSHFLLPPHPCRIHVRPGGLVRTVTVNE

SEQ ID NO: 1768 - DNA, 3805 bp, Homo sapiens
cggctcctctcagcggcggtggcccaggtagaggggtccgcgctggcggcggcggcggcgctgttccccgcgcggtccgcggagcggggtccgggctgcgcgacgtggggcggcggcggcactgcggccccggcccaagcccgaccccgggtcccctcctcggccgccccccgcccggccgcccgccctcgggcctccccccgggccctcggtcccctcccccgctggcggggcccggacagaagatggtgcagaagaaaccagccgaacttcagggtttccaccgttcgttcaaggggcagaaccccttcgagctggccttctccctagaccagcccgaccacggagactctgactttggcctgcagtgctcagcccgccctgacatgcccgccagccagcccattgacatcccggacgccaagaagaggggcaagaagaagaagcgcggccgggccaccgacagcttctcgggcaggtttgaagacgtctaccagctgcaggaagatgtgctgggggagggcgctcatgcccgagtgcagacctgcatcaacctgatcaccagccaggagtacgccgtcaagatcattgagaagcagccaggccacattcggagcagggttttcagggaggtggagatgctgtaccagtgccagggacacaggaacgtcctagagctgattgagttcttcgaggaggaggaccgcttctacctggtgtttgagaagatgcggggaggctccatcctgagccacatccacaagcgccggcacttcaacgagctggaggccagcgtggtggtgcaggacgtggccagcgccttggactttctgcataacaaaggcatcgcccacagggacctaaagccggaaaacatcctctgtgagcaccccaaccaggtctcccccgtgaagatctgtgacttcgacctgggcagcggcatcaaactcaacggggactgctcccctatctccaccccggagctgctcactccgtgcggctcggcggagtacatggccccggaggtagtggaggccttcagcgaggaggctagcatctacgacaagcgctgcgacctgtggagcctgggcgtcatcttgtatatcctactcagcggctacccgcccttcgtgggccgctgtggcagcgactgcggctgggaccgcggcgaggcctgccctgcctgccagaacatgctgtttgagagcatccaggagggcaagtacgagttccccgacaaggactgggcccacatctcctgcgctgccaaagacctcatctccaagctgctggtccgtgacgccaagcagaggctgagtgccgcccaagtcctgcagcacccctgggttcaggggtgcgccccggagaacaccttgcccactcccatggtcctgcagaggaacagctgtgccaaagacctcacgtccttcgcggctgaggccattgccatgaaccggcagctggcccagcacgacgaggacctggctgaggaggaggccgcggggcagggccagcccgtcctggtccgagctacctcacgctgcctgcagctgtctccaccctcccagtccaagctggcgcagcggcggcaaagggccagtctgtcctcggccccagtggtcctggtgggagaccacgcctgaccctcccatctcccctctgtacataggtcacccgtcccccaatcaaatctaaaggttttttaagctatcgccagccggtgtccagcgggctgcccctcctctgcctggattcccaggcactaagctcagctgaggggggtgttttatagaaggtttttgcttttgggttttttttttcctgtttccacccctccccgttattttttcctttggatggttaaaagcattgcaggcacccgggaaggtgagcagagggtaggtgggtgggcttgtcccctccccggtcccccgccctgctcacctctactatgaaggtgcccccaggtcacctgtgctgcccgccatctgcccacgtggcttgcagtgactcaggagagcaggcccacagcgtttgccatcttgcagagctggggaggggcacaggaccctgccctcgtgttccctcccagcccgcagtatttcagggacaggctcttcccctctatccctcaccctgagagcacccctggtggcttggttggggaagggaggggctgcctgtctctggaggtgtcaggcaggcaggtggcaggcagctcacccacccaccccatgggatcccccagcccttcacccgcgcctgccttgtccccatgatagttgacaatcggggcttcctgcaaggcccgtctgtctgtccaggactcctggtggccagattcggcctccgaccttgaccttaaactgcagctgaccccaggggctcgccgctgcccctcccctccacaccaaggcctgagacagcaggagccccgcctggcccgaagccgtttccaccgcagcaggcagaggggctggacaggcactgtcagccaatgtggggggtcctgaagacacccccttggggcacccgagtgccccttctcagggctcagtctgaccgtagccacgtcctgcctcgcgccgcccctcgggcctgacctggaagctccgtcagctccgtccttgtccttagagctgagcccagaccccggggtctggccgaatcctcacccccagggcagtgtttttggtctgccaccttcaggaaaacggctgcggcctcggcctcccttcgggcacccaggaatgcgggggtctgctcagtccccccaccctccatgctccaacccccgggggctgcggagcctgctgccccctccccgcgggtggggacgttctatgcaatacagggttccactttagaagtgcgcgcggctagggtcaccgcccgcccttcccggcgcagcccccgagctccacagctggggcagcccctctggcttctaaatccgcggtcgggattcttcctcctgtttagttttttagtttttccttaaaaaaaaacaacacatcgatggactttgcttccctgttcttgaagaatacttgaatgtcggggggcctgggggtgggggcctcggagaccgtctgcctggccctgctgcccctcctgaatctcgtatgatggtcacagtccggtggccgtgggggtgctctgccttccctggtccccactgcccatatctgtggactgccccttccaaagacccctggggggggtggggcattccgcccacccctttcccccatcacttctcgcctgtcagtgattccatgtttcgtaacgggggattctctgcctttttgtatcaaagaacaagcaaatggacccccgcccgctgcaggcgcccatagccatcgggtctctaaagctgagtggctagcagcgtttgtttgtttgtttttttttttttttctgaaggtgggacagtcacttcctcctccctccccacccctgtcgcatccacgtgcgacctggaggactggtcagaaccgttactgtgaatgagtgaagatcctggaggaccctgggccccaggccagctcccatcgctgggggacggtgaacggccatgtgttaatgttacgatgtttttaaaagacaaaaaaaaaaaaaaaacctcaaaagtttttttaaagtgggggaaaaacatccaagcactttaattccaatgtaccaggtgaactgacggagctcagaagttttcctttacaccaactgtcaatgccggaattttgtattctgttttgtaaagatttaataaaagtcaaaaaacttgcaaaaaaaaaaaaaaaaaaaa

SEQ ID NO: 1769 - protein, 465 aa, Homo sapiens
MVQKKPAELQGFHRSFKGQNPFELAFSLDQPDHGDSDFGLQCSARPDMPASQPIDIPDAKKRGKKKKRGRATDSFSGRFEDVYQLQEDVLGEGAHARVQTCINLITSQEYAVKIIEKQPGHIRSRVFREVEMLYQCQGHRNVLELIEFFEEEDRFYLVFEKMRGGSILSHIHKRRHFNELEASVVVQDVASALDFLHNKGIAHRDLKPENILCEHPNQVSPVKICDFDLGSGIKLNGDCSPISTPELLTPCGSAEYMAPEVVEAFSEEASIYDKRCDLWSLGVILYILLSGYPPFVGRCGSDCGWDRGEACPACQNMLFESIQEGKYEFPDKDWAHISCAAKDLISKLLVRDAKQRLSAAQVLQHPWVQGCAPENTLPTPMVLQRNSCAKDLTSFAAEAIAMNRQLAQHDEDLAEEEAAGQGQPVLVRATSRCLQLSPPSQSKLAQRRQRASLSSAPVVLVGDHA

SEQ ID NO: 1770 - DNA, 3347 bp, Homo sapiens
agttgggtaccgggaggggcgaaggcgggcggcagaggcgatcagaagtttccaagggtcacttgtgtctcgtccgtgggaagaccgggggagcccagaaggccttggtgtggaattctgagagctgattcctgccttgtcttctccactgttcctggaggaatccgagaagagcagagcggagggagccccagacacggtccgcgggagagctgtggggcttggtgagtgtttcgtggcctctcgggttggtcagcacccccagccagctggcccaggacccctctacagaagtccaggagagcaggcgtcaccaagatgtccaaccccttcctgaagcaagtcttcaacaaggacaagacattccgccccaagcgcaagtttgagccaggcacccagcgcttcgagctgcacaagaaggcgcaggcgtcgctgaacgccgggctggacctgcggctggccgtgcagttgcccccgggcgaggacctgaacgactgggtggctgttcacgtggtggacttctttaaccgcgtcaacctcatctacggcaccatcagcgacggctgcacggagcagtcctgccccgtcatgtcggggggccccaagtatgagtaccgctggcaggatgagcataagttccggaagcccacggcactctccgcgcccaggtacatggacctgctgatggactggatcgaggcgcagatcaacaacgaggacctcttccccaccaacgttggcactccgtttcccaagaacttcctgcagacggtgcggaagatcctgtcgcggctgttccgcgtgttcgtgcacgtctacatccaccactttgaccgcatcgcgcagatgggctccgaggcccacgtgaacacctgctacaagcacttctactatttcgtcaaggagttcggcctcatcgacaccaaggagctggagccactgaaagaaatgaccgcccggatgtgccactgagagccccgcgggtctcccggtgcccgaaccgccgctggggcctcggagacttggaggaggacgctctggaaccatcatcccgcttctctccggcctgagcatctcagggagaccaggggccgagccgctgagcaggtgttggtcctcaggagctccaaccccggacggcagatgccttcctcagtctcgagcctcagtctcccgtctgggactaaaacgtgaactctgtaattctatgtgttactagcaaccggaaaagcccactgtgtttttaaaccacttccactttccaggaggctggatggcttccagggtcactccttgccctgggtggctcccaggctcctggaacttctgcctccacctcgctggggagcccccagggctgctgtggccacagccctgcctgggcctgtctctcaagggcacccagcttgctcggcctcctacatgtctcccgttggggaggcaagaggctgaggggcttccgagcccctgagagcggacatctcctcccgcaggcctttactccgcactccccactggcagccgctggtgtctcttcacacagaggcacaacctggacccaggcagcctctttcctccctccccaatctcttccatttttctacagatttttttttttttggtcatactagagacaggggtctcgctgaactcctggcctccagtgatcctccatcctcggcctcccaaagtgctggaatcacaggggtgagccaccgcacccagccctctctcttcctcaatgcactctgcttcttccgttcttccgaaacattcagctgactgtatccagggcttcctggactcctgggaccccacgtcctgcaccccggcttctgactcatttcctaagggcccctttgtgtatcataaagggtttgatttttatagtcacatttacaaccatcttgagatttttattttttttgaacggagtctcccactgtcgcccagactggagtccagtggcacaatctcggctcactgcatcctccacctcctgggttcaagtgattctcctgcttcagcctcccaagtagctgggattacaggtgtgcgccaccacgcccaggaaattattgtagttttagtagagacaagatttcaccatgttggccaggctggtctcaaactcctgacttcaggtgatccgcctaccttggcctccaaaagtgctgggattacaggcatgagctactgcacccggcctaaccaggctggagtgcagtggtgggatctcggctcactgcaagctccgcctcccagattcacgccattctcctgcctcagcctccccagcagctgggactacaggcacccaccgtcacacccggctaatttttttgtattttagtagagacagggtttcaccgtgttagccaggatggtcttgatctcctgaccttgtgatccaccagcctcagcctcccaaagtgctgggattacaggcgtgagccactgtgcccggccaagaatttttttatcgataacatagtgagctctctgcctcttcggaacgatgtccactttgcttatgatcaacccaagcaggactcttctctccctggacgcctctcccctggtctggaatcttccagttctgccagaattggcctttcccagatgctgcaaacttccagttgaacccctttttctgtgtggcccctggggctgcgagaccaaaatccatgagttctgtgtaccctagacctttggaaggtgagagcagggccctgagaaaaggcagccacctcctctccctggctgaacccctgccaccctactcctcaccagaattgtcagtggcctttcaccacagtggtccttcctgcctgagccctgcactgtcccagaccacacagaagtctggtcacctctgggcgcctgggatggtcaccgaagagaagcacgctgtccccgtctctcctggcttctgccagaaaatcgaacaagtgcaattaacacactgttactgccgaagcctgaaactcccaggacttgtccttgatccttccagaaaccaccaggtccggcacttggagccccccggagagggacctcccagccgagccctcaaagaactccatgaaatcaggaactgcttgatgaaatgtatctccttgtacctggaagatgaagcccaaacacccacacctctgtctcccccagggctcgggatgtctccagcagcccggccacgcagcttcccaggtgggctcggggaggtgggagcagggaccatctctgtcccctccaccctcactccatccacctcggagaccaccctcccccagccagatacggaataaaactacagacgcagacgtcggaaaaaaaaaaaaaaaaaa

SEQ ID NO: 1771 - protein, 217 aa, Homo sapiens
MSNPFLKQVFNKDKTFRPKRKFEPGTQRFELHKKAQASLNAGLDLRLAVQLPPGEDLNDWVAVHVVDFFNRVNLIYGTISDGCTEQSCPVMSGGPKYEYRWQDEHKFRKPTALSAPRYMDLLMDWIEAQINNEDLFPTNVGTPFPKNFLQTVRKILSRLFRVFVHVYIHHFDRIAQMGSEAHVNTCYKHFYYFVKEFGLIDTKELEPLKEMTARMCH

SEQ ID NO: 1772 - DNA, 966 bp, Homo sapiens
ggccgttggttggtgcgcggctgaagggtgtggcgcgagcagcgtcgttggttggccggcggcgggccgggacgggcatggccctgctgctgtgcctggtgtgcctgacggcggcgctggcccacggctgtctgcactgccacagcaacttctccaagaagttctccttctaccgccaccatgtgaacttcaagtcctggtgggtgggcgacatccccgtgtcaggggcgctgctcaccgactggagcgacgacacgatgaaggagctgcacctggccatccccgccaagatcacccgggagaagctggaccaagtggcgacagcagtgtaccagatgatggatcagctgtaccaggggaagatgtacttccccgggtatttccccaacgagctgcgaaacatcttccgggagcaggtgcacctcatccagaacgccatcatcgaaagccgcatcgactgtcagcaccgctgtggcatcttccagtacgagaccatctcctgcaacaactgcacagactcgcacgtcgcctgctttggctataactgcgagtcctcggcgcagtggaagtcagctgtccagggcctcctgaactacataaataactggcacaaacaggacacgagcatgagcctggtatcgccagccttaaggtgtctggagcccccacacttggccaacctgaccttggaagatgctgctgagtgtctcaagcagcactgacagcagctgggcctgccccagggcaacgtgggggcggagactcagctggacagcccctgcctgtcactctggagctgggctgctgctgcctcaggaccccctctccgaccccggacagagctgagctggccagggccaggagggcgggagggagggaatgggggtgggctgtgcgcagcatcagcgcctgggcaggtccgcagagctgcgggatgtgattaaagtccctgatgtttctcaaaaa

SEQ ID NO: 1773 - protein, 214 aa, Homo sapiens
MALLLCLVCLTAALAHGCLHCHSNFSKKFSFYRHHVNFKSWWVGDIPVSGALLTDWSDDTMKELHLAIPAKITREKLDQVATAVYQMMDQLYQGKMYFPGYFPNELRNIFREQVHLIQNAIIESRIDCQHRCGIFQYETISCNNCTDSHVACFGYNCESSAQWKSAVQGLLNYINNWHKQDTSMSLVSPALRCLEPPHLANLTLEDAAECLKQH

SEQ ID NO: 1774 - DNA, 1020 bp, Homo sapiens
ggccgttggttggtgcgcggctgaagggtgtggcgcgagcagcgtcgttggttggccggcggcgggccgggacgggcatggccctgctgctgtgcctggtgtgcctgacggcggcgctggcccacggctgtctgcactgccacagcaacttctccaagaagttctccttctaccgccaccatgtgaacttcaagtcctggtgggtgggcgacatccccgtgtcaggggcgctgctcaccgactggagcgacgacacgatgaaggagctgcacctggccatccccgccaagatcacccgggagaagctggaccaagtggcgacagcagtgtaccagatgatggatcagctgtaccaggggaagatgtacttccccgggtatttccccaacgagctgcgaaacatcttccgggagcaggtgcacctcatccagaacgccatcatcgaaagccgcatcgactgtcagcaccgctgtggcatcttccagtacgagaccatctcctgcaacaactgcacagactcgcacgtcgcctgctttggctataactgcgagtcctcggcgcagtggaagtcagctgtccagggcctcctgaactacataaataactggcacaaacaggacacgagcatgagaccacgctcctctgccttctcctggcctgggacacacagagccaccccggccttcctggtatcgccagccttaaggtgtctggagcccccacacttggccaacctgaccttggaagatgctgctgagtgtctcaagcagcactgacagcagctgggcctgccccagggcaacgtgggggcggagactcagctggacagcccctgcctgtcactctggagctgggctgctgctgcctcaggaccccctctccgaccccggacagagctgagctggccagggccaggagggcgggagggagggaatgggggtgggctgtgcgcagcatcagcgcctgggcaggtccgcagagctgcgggatgtgattaaagtccctgatgtttctcaaaaa

SEQ ID NO: 1775 - protein, 232 aa, Homo sapiens
MALLLCLVCLTAALAHGCLHCHSNFSKKFSFYRHHVNFKSWWVGDIPVSGALLTDWSDDTMKELHLAIPAKITREKLDQVATAVYQMMDQLYQGKMYFPGYFPNELRNIFREQVHLIQNAIIESRIDCQHRCGIFQYETISCNNCTDSHVACFGYNCESSAQWKSAVQGLLNYINNWHKQDTSMRPRSSAFSWPGTHRATPAFLVSPALRCLEPPHLANLTLEDAAECLKQH

SEQ ID NO: 1776 - DNA, 2446 bp, Homo sapiens
ccctctgcccgcccccagccctcgccccaccctcggcgcccgcacatctgcctgctcagctccagacggcgcccggacccccgggcgcgggatccagccaggtgggagccccgcagatgaggtctctgaaggtgtgcctgaaccagtgccagcctgccctgtctgcagcatcggcctgatggggtggtgactgatccctcagggctccggagccatgtggcccaacggcagttccctggggccctgtttccggcccacaaacattaccctggaggagagacggctgatcgcctcgccctggttcgccgcctccttctgcgtggtgggcctggcctccaacctgctggccctgagcgtgctggcgggcgcgcggcaggggggttcgcacacgcgctcctccttcctcaccttcctctgcggcctcgtcctcaccgacttcctggggctgctggtgaccggtaccatcgtggtgtcccagcacgccgcgctcttcgagtggcacgccgtggaccctggctgccgtctctgtcgcttcatgggcgtcgtcatgatcttcttcggcctgtccccgctgctgctgggggccgccatggcctcagagcgctacctgggtatcacccggcccttctcgcgcccggcggtcgcctcgcagcgccgcgcctgggccaccgtggggctggtgtgggcggccgcgctggcgctgggcctgctgcccctgctgggcgtgggtcgctacaccgtgcaatacccggggtcctggtgcttcctgacgctgggcgccgagtccggggacgtggccttcgggctgctcttctccatgctgggcggcctctcggtcgggctgtccttcctgctgaacacggtcagcgtggccaccctgtgccacgtctaccacgggcaggaggcggcccagcagcgtccccgggactccgaggtggagatgatggctcagctcctggggatcatggtggtggccagcgtgtgttggctgccccttctggtcttcatcgcccagacagtgctgcgaaacccgcctgccatgagccccgccgggcagctgtcccgcaccacggagaaggagctgctcatctacttgcgcgtggccacctggaaccagatcctggacccctgggtgtatatcctgttccgccgcgccgtgctccggcgtctccagcctcgcctcagcacccggcccaggtcgctgtccctccagccccagctcacgcagcgctccgggctgcagtaggaagtggacagagcgcccctcccgcgcctttccgcggagcccttggcccctcggacagcccatctgcctgttctgaggattcaggggctgggggtgctggatggacagtgggcatcagcagcagggttttgggttgaccccaatccaacccggggacccccaactcctccctgatccttttaccaagcactctcccttcctcggcccctttttcccatccagagctcccaccccttctctgcgtccctcccaaccccaggaagggcatgcagacattggaagagggtcttgcattgctatttttttttttagacggagtcttgctctgtcccccaggctggagtgcagtggcgcaatctcagctcactgcaacctccacctcccgggttcaagcgattctcctgcctcagcctcctgagtagctgggactataggcgcgcgccaccacgcccggctaatttttgtatttttagtagagacggggtttcaccgtgttggccaggctggtcttgaactcctgacctcaggtgattcaccagcctcagcctcccaaagtgctgggatcacaggcatgaaccaccacacctggccatttttttttttttttttagacggagtctcactctgtggcccagcctggagtacagtggcacgatctcggctcactgcaacctccgcctcccgggttcaagcgattctcgtgcctcagcctcccgagcagctgggattacaggcgtaagccactgcgcccggccttgcatgctctttgaccctgaatttgacctacttgctggggtacagttgcttccttttgaacctccaacagggaaggctctgtccagaaaggattgaatgtgaacgggggcacccccttttcttgccaaaatatatctctgcctttggttttattttcctttgggtccagaagttttcaatctctggagtttgtgcattgggcctcacccggagcagacgagggcagggctgggaaggatggggagggacatagaggattcggttcctcccccaccttgtttcttgagtgtttcctaatcacttgatgggtggtaccacctagaattcttccagcagcctgtaatgggagggctacaggttagccctggaacctgcaatcaaaccacctttgaatctgtgtgtcattaaaagtagatataaatgggcaaaaaaaaaaaaaaaaaa

SEQ ID NO: 1777 - protein, 343 aa, Homo sapiens
MWPNGSSLGPCFRPTNITLEERRLIASPWFAASFCVVGLASNLLALSVLAGARQGGSHTRSSFLTFLCGLVLTDFLGLLVTGTIVVSQHAALFEWHAVDPGCRLCRFMGVVMIFFGLSPLLLGAAMASERYLGITRPFSRPAVASQRRAWATVGLVWAAALALGLLPLLGVGRYTVQYPGSWCFLTLGAESGDVAFGLLFSMLGGLSVGLSFLLNTVSVATLCHVYHGQEAAQQRPRDSEVEMMAQLLGIMVVASVCWLPLLVFIAQTVLRNPPAMSPAGQLSRTTEKELLIYLRVATWNQILDPWVYILFRRAVLRRLQPRLSTRPRSLSLQPQLTQRSGLQ

SEQ ID NO: 1778 - DNA, 1785 bp, Homo sapiens
ccctctgcccgcccccagccctcgccccaccctcggcgcccgcacatctgcctgctcagctccagacggcgcccggacccccgggcgcgggatccagccaggtgggagccccgcagatgaggtctctgaaggtgtgcctgaaccagtgccagcctgccctgtctgcagcatcggcctgatggggtggtgactgatccctcagggctccggagccatgtggcccaacggcagttccctggggccctgtttccggcccacaaacattaccctggaggagagacggctgatcgcctcgccctggttcgccgcctccttctgcgtggtgggcctggcctccaacctgctggccctgagcgtgctggcgggcgcgcggcaggggggttcgcacacgcgctcctccttcctcaccttcctctgcggcctcgtcctcaccgacttcctggggctgctggtgaccggtaccatcgtggtgtcccagcacgccgcgctcttcgagtggcacgccgtggaccctggctgccgtctctgtcgcttcatgggcgtcgtcatgatcttcttcggcctgtccccgctgctgctgggggccgccatggcctcagagcgctacctgggtatcacccggcccttctcgcgcccggcggtcgcctcgcagcgccgcgcctgggccaccgtggggctggtgtgggcggccgcgctggcgctgggcctgctgcccctgctgggcgtgggtcgctacaccgtgcaatacccggggtcctggtgcttcctgacgctgggcgccgagtccggggacgtggccttcgggctgctcttctccatgctgggcggcctctcggtcgggctgtccttcctgctgaacacggtcagcgtggccaccctgtgccacgtctaccacgggcaggaggcggcccagcagcgtccccgggactccgaggtggagatgatggctcagctcctggggatcatggtggtggccagcgtgtgttggctgccccttctggtcttcatcgcccagacagtgctgcgaaacccgcctgccatgagccccgccgggcagctgtcccgcaccacggagaaggagctgctcatctacttgcgcgtggccacctggaaccagatcctggacccctgggtgtatatcctgttccgccgcgccgtgctccggcgtctccagcctcgcctcagcacccggcccagcggagtctcactctgtggcccagcctggagtacagtggcacgatctcggctcactgcaacctccgcctcccgggttcaagcgattctcgtgcctcagcctcccgagcagctgggattacaggcgtaagccactgcgcccggccttgcatgctctttgaccctgaatttgacctacttgctggggtacagttgcttccttttgaacctccaacagggaaggctctgtccagaaaggattgaatgtgaacgggggcacccccttttcttgccaaaatatatctctgcctttggttttattttcctttgggtccagaagttttcaatctctggagtttgtgcattgggcctcacccggagcagacgagggcagggctgggaaggatggggagggacatagaggattcggttcctcccccaccttgtttcttgagtgtttcctaatcacttgatgggtggtaccacctagaattcttccagcagcctgtaatgggagggctacaggttagccctggaacctgcaatcaaaccacctttgaatctgtgtgtcattaaaagtagatataaatgggcaaaaaaaaaaaaaaaaaa

SEQ ID NO: 1779 - protein, 369 aa, Homo sapiens
MWPNGSSLGPCFRPTNITLEERRLIASPWFAASFCVVGLASNLLALSVLAGARQGGSHTRSSFLTFLCGLVLTDFLGLLVTGTIVVSQHAALFEWHAVDPGCRLCRFMGVVMIFFGLSPLLLGAAMASERYLGITRPFSRPAVASQRRAWATVGLVWAAALALGLLPLLGVGRYTVQYPGSWCFLTLGAESGDVAFGLLFSMLGGLSVGLSFLLNTVSVATLCHVYHGQEAAQQRPRDSEVEMMAQLLGIMVVASVCWLPLLVFIAQTVLRNPPAMSPAGQLSRTTEKELLIYLRVATWNQILDPWVYILFRRAVLRRLQPRLSTRPSGVSLCGPAWSTVARSRLTATSASRVQAILVPQPPEQLGLQA

SEQ ID NO: 1780 - DNA, 5047 bp, Homo sapiens
gcggcggtcgcagctcgggtccccctcgggcgcccccgccgccgtccgcgcgcggccatggagctggaggtaccggacgaggcggagagcgctgaggcgggggccgtgccctcggaggcggcgtgggcggcagagagcggggcggcggcaggtttggctcagaagaaggcggccccaacagaggttctgtccatgacggcacagccgggccctggccatgggaagaagttgggccatcgaggtgtggacgcatccggcgaaaccacctacaagaagaccacctcctccaccctgaagggtgccatccagctgggcatcggctacaccgtgggccacctgagctccaagcccgaacgcgacgtgctcatgcaggacttctacgtggtggagagcatcttcttccccagcgaaggcagcaacctcacccccgcccaccacttccaggacttccgcttcaagacctatgcacctgtcgccttccgctacttccgggagctctttgggatccggccagatgattacttgtactccctgtgcaatgagccgctgatcgagctgtccaacccgggcgccagtggctccctcttctacgtcaccagcgacgacgagttcatcatcaagaccgtcatgcacaaggaggccgagttcctgcagaagctgctccctggctactacatgaacctcaaccagaacccgcggacgctgctgcccaagttctatgggctgtactgcgtgcagtcggggggcaagaacatccgcgtcgtggtcatgaacaacatcctgccccgcgtggtcaagatgcacctcaagttcgacctcaagggctccacctacaagcggcgcgccagcaagaaggagaaggagaagagcttccccacctacaaggacctggacttcatgcaggacatgcccgaggggctcctgctggacgccgacaccttcagcgccctggtcaagacgctgcagcgggactgcctggtcctggaaagtttcaagatcatggactacagcctgctgctgggcgtgcacaacatcgaccagcacgagcgcgagcggcaggcgcagggcgcccagagcacctcagatgagaagcggcctgtgggccagaaggcgctctactccacggccatggagtccatccagggtggcgccgcgcgcggggaggccatcgaatcggatgacacgatgggcgggatccccgctgtgaacggccgcggggagcggctgctgctgcacattggcatcatcgacatcctgcagtcctacaggttcatcaagaaactggagcacacctggaaggccctcgtccacgatggggacacggtgtccgtccaccgccccagcttctatgccgagcgctttttcaagttcatgagcaacacggtctttcggaagaactcctccctgaagtcctcgccctccaagaaggggcgcggcggagccttgctagctgtgaaaccgctggggcccaccgctgccttctcggccagccagatccctagcgagcgggaggaggcccagtacgacctgcggggggcccgcagctaccccacgctggaggacgaaggccggcccgacctcctgccctgcacgccaccttctttcgaagaagccactacagcctccattgccacgactctgtcatccacatccctctccattcctgagcggtccccctcggagacgtcggagcagccgcggtacaggcggcgcacacagtcgtctggacaggatggcaggccgcaggaggagccacccgcggaagaggatctgcagcagattacagtgcaggtggagcctgcgtgcagcgtggagattgtggtccccaaagaggaggacgcaggggtggaggcttccccggccggtgcctctgctgctgttgaagtagaaactgccagccaggcctcagacgaggagggcgcacctgccagccaggcctcggacgaggaggacgcgcccgccaccgacatctactttcccaccgatgagaggagctgggtgtactccccgctccactatagcgcccaggcccccccggcctccgacggcgagagcgacacataatttctatgcagcccccgacccagagccgagctccacttctgctccggctgcccccgaaggcgctgcccaccccgctgaggcccagagctcgggagatgcccgcctcgccgccccaccggacctcgtcctccccctgcacggatgccgacggccgggcccctccccgacaagcctcccagggccccggcaccccggtcggcagcctgcccctgtgagacccaccctcccgagcggccaatcgcatttgagtccttatttggcacagagacggaagcacgtgtgtgccgttttaggaaaagaacaaaaaagacacaaacaaaccaaccagagggagaagagcccctgcccactgcactctttggttctctgctgtgcctgcctgtgtcctgaggaagaagccaggctgttcgcggtggcctctggggacctgagccccgggggccccatcggcctgcagaggggacggctggggtcccgagcaactctgcctccatccacgtgggaagcggaccctcctgccctcagcttgggtttgggggcctcagtgcaggacatctggcctgaacatcgactgtggggacagccctcgccctgccaagcactgcggccactcagcagctatgttcccgccgcagtggggccctgacgcccacctcccaggtgcccctcgagcaaaaacctctggcgcctccaatccagacccaccacagctggagggccaggcctcctcttccccaggctgccacccacgctggcggagctcagggctggggacttgtccttctcttccaacgtaggccactcagcaactggcatggagggcccaggcaacggagacgttttctccatggcaggacagagcgggaggccgggccttgggccacaggagaccagctcagggcggaaggtcaggctccccgccccctccacgtggagacatggcctagggggccaggcccggctccacaggagtctccttcaggactggtgtggatgtccgccgcctctttcttgtttaagtgatgtgatgtctccgaggaggggagagaagactttgtttccgactcatcaccctccaagagggcagcgctcccagtggtgggactcagcccagactgccctggggcagcttcctgggcccgctgcgctcagagggtgctggttggaggccagagctcggcagagtcacccaccctgcccttccccaggacccctgagaggggcttattggtgatggctgtgggaatcccccacttccaagatgtgcccaggatgtgaggagctggagtggaagctgcacctttgggaagaattcctctccagacctggcagagcctggtgtggggtctgagacggccggagaacctcccaggcagggctctgtgttttgtctgttacaacctccgtatgacgccacgccacccgctgttcacgtcccgtcggcctcctgcacagcccacacgctgcgcccggaaggcccctgctgtggagaagccggacccatccccgaggtccccagcgaggacacacactccacgagagcagcccctccactctgcccaggagaggggccgaccctcctcgggaaccggccagccgcgtggctcccagcatccatcaggacaagcccacgtggggtcctccctgcgtgctcagagggtctgtccagccctgggaagcgaccttggcctcagttcacagcctggtgctcatctgctggcaccgggcatccacccatcagcccccgccctgtccctccgaaggacacccagcaggcaccccccggggaggcaggggcagaggtcagaaggggtgtctgggacctggatggccagcagggacaggggcattgtcatctcaaaggcccaacccccagaggccacaccagtcctcccagggagtcctcgagtcgccctgcccagagccctggcaccagagacgccaagagcctgtggggtgactcggagcagcaggtgtggccccgggcgggcggcaccgcgtccagggcagcctccctccgctgagtgacacgggacaccagtgcccggccgacgcgcctttgcaggagaaatgtgcaaacctctgtggataccatttcatttccattcttgtgttgtctccaaggcccttttggagatatacttggtgttggttgtgttttttggttccttttcagagaactgtaaaccgaggctgacgtgctccactgactgtgccgaggggcgggggcaggaggacggcaagacctatttataatatttagcgaactcggtctccctcagatcccccgcgagggaggctgctggacccaccccgctgtcccccatgatagaagtctgtaaataccttggtgaccaatgcccacttcccctcctgggtcacctctgatggctgctgtccactgagaacgtgggcagtgtccaaattcctgtactgtaaagactaaaaggcgtttgctctgagactgacaaggcggaaacttccatgtgtctcctgccaggctctgtccccctacgccatcccgacacgtccccgttcccccgaaacctggctcagtgcaatactcccattgccatggggtccttcaccatggtactgtctccacagccctcagtccccaccccaggagaggcgcctgccacctcctcctcatctccggtggttcaatcgctccgcctgtccccaacccagtcccatttttatggccaaactgattctgaaacaaaatgaaactgcaaacctcgtgtgtcttaactccccccagggatgccactccattcctccgccccgtggtctggtgcgtgacaatccaaagcgccgagacgagggtgctgtgtccctcaaacccagagtggtgggcgcctctgaaaccatacagccactcctggccccaaacactggtttgcatcccaggttcctcgcccacctacccccgccacaccccgtctttttagagatctctctaataaatcgggtaataagc

SEQ ID NO: 1781 - protein, 668 aa, Homo sapiens
MELEVPDEAESAEAGAVPSEAAWAAESGAAAGLAQKKAAPTEVLSMTAQPGPGHGKKLGHRGVDASGETTYKKTTSSTLKGAIQLGIGYTVGHLSSKPERDVLMQDFYVVESIFFPSEGSNLTPAHHFQDFRFKTYAPVAFRYFRELFGIRPDDYLYSLCNEPLIELSNPGASGSLFYVTSDDEFIIKTVMHKEAEFLQKLLPGYYMNLNQNPRTLLPKFYGLYCVQSGGKNIRVVVMNNILPRVVKMHLKFDLKGSTYKRRASKKEKEKSFPTYKDLDFMQDMPEGLLLDADTFSALVKTLQRDCLVLESFKIMDYSLLLGVHNIDQHERERQAQGAQSTSDEKRPVGQKALYSTAMESIQGGAARGEAIESDDTMGGIPAVNGRGERLLLHIGIIDILQSYRFIKKLEHTWKALVHDGDTVSVHRPSFYAERFFKFMSNTVFRKNSSLKSSPSKKGRGGALLAVKPLGPTAAFSASQIPSEREEAQYDLRGARSYPTLEDEGRPDLLPCTPPSFEEATTASIATTLSSTSLSIPERSPSETSEQPRYRRRTQSSGQDGRPQEEPPAEEDLQQITVQVEPACSVEIVVPKEEDAGVEASPAGASAAVEVETASQASDEEGAPASQASDEEDAPATDIYFPTDERSWVYSPLHYSAQAPPASDGESDT

SEQ ID NO: 1782 - DNA, 2859 bp, Homo sapiens
atgaacctgtgtggcctcatgcccatcttccccgctcccctcgaccaggtggctgacatggaggagctgaccatctgggaacagcacacggccacactgtccaaggacccccgccggggctttggcattgcgatctctggaggccgagaccggcccggtggatccatggttgtatctgacgtggtacctggagggccggcggagggcaggctacagacaggcgaccacatcgtcatggtgaacggggtttccatggagaatgccacctccgcgtttgccattcagatactcaagacctgcaccaagatggccaacatcacagtgaaacgtccccggaggatccacctgcccgccaccaaagccagcccctccagcccagggcgccaggactcggatgaagacgatgggccccagcgggtggaggaggtggaccagggccggggctatgacggcgactcatccagtggctccggccgctcctgggacgagcgctcccgccggccgaggcctggtcgccggggccgggccggcagccatgggcgtaggagcccaggtggtggctctgaggccaacgggctggccctggtgtccggctttaagcggctgccacggcaggacgtgcagatgaagcctgtgaagtcagtgctggtgaagaggagagacagcgaagagtttggcgtcaagctgggcagtcagatcttcatcaagcacattacagattcgggcctggctgcccggcaccgtgggctgcaggaaggagatctcattctacagatcaacggggtgtctagccagaacctgtcactgaacgacacccggcgactgattgagaagtcagaagggaagctaagcctgctggtgctgagagatcgtgggcagttcctggtgaacattccgcctgctgtcagtgacagcgacagctcgccattggaggaaggcgtgaccatggctgatgagatgtcctctccccctgcagacatctcggacctcgcctcggagctatcgcaggcaccaccatcccacatcccaccaccaccccggcatgctcagcggagccccgaggccagccagaccgactctcccgtggagagtccccggcttcggcgggaaagttcagtagattccagaaccatctcggaaccagatgagcaacggtcagagttgcccagggaaagcagctatgacatctacagagtgcccagcagtcagagcatggaggatcgtgggtacagccccgacacgcgtgtggtccgcttcctcaagggcaagagcatcgggctgcggctggcagggggcaatgacgtgggcatcttcgtgtccggggtgcaggcgggcagcccggccgacgggcagggcatccaggagggagatcagattctgcaggtgaatgacgtgccattccagaacctgacacgggaggaggcagtgcagttcctgctggggctgccaccaggcgaggagatggagctggtgacgcagaggaagcaggacattttctggaaaatggtgcagtcccgcgtgggtgactccttctacatccgcactcactttgagctggagcccagtccaccgtctggcctgggcttcacccgtggcgacgtcttccacgtgctggacacgctgcaccccggccccgggcagagccacgcacgaggaggccactggctggcggtgcgcatgggtcgtgacctgcgggagcaagagcggggcatcattcccaaccagagcagggcggagcagctggccagcctggaagctgcccagagggccgtgggagtcgggcccggctcctccgcgggctccaatgctcgggccgagttctggcggctgcggggtcttcgtcgaggagccaagaagaccactcagcggagccgtgaggacctctcagctctgacccgacagggccgctacccgccctacgaacgagtggtgttgcgagaagccagtttcaagcgcccggtagtgatcctgggacccgtggccgacattgctatgcagaagttgactgctgagatgcctgaccagtttgaaatcgcagagactgtgtccaggaccgacagcccctccaagatcatcaaactagacaccgtgcgggtgattgcagaaaaagacaagcatgcgctcctggatgtgaccccctccgccatcgagcgcctcaactatgtgcagtactaccccattgtggtcttcttcatccccgagagccggccggccctcaaggcactgcgccagtggctggcgcctgcctcccgccgcagcacccgtcgcctctacgcacaagcccagaagctgcgaaaacacagcagccacctcttcacagccaccatccctctgaatggcacgagtgacacctggtaccaggagctcaaggccatcattcgagagcagcagacgcggcccatctggacggcggaagatcagctggatggctccttggaggacaacctagacctccctcaccacggcctggccgacagctccgctgacctcagctgcgacagccgcgttaacagcgactacgagacggacggcgagggcggcgcgtacacggatggcgagggctacacagacggcgagggggggccctacacggatgtggatgatgagcccccggctccagccctggcccggtcctcggagcccgtgcaggcagatgagtcccagagcccgagggatcgtgggagaatctcggctcatcagggggcccaggtggacagccgccacccccagggacagtggcgacaggacagcatgcgaacctatgaacgggaagccctgaagaaaaagtttatgcgagtacatgatgcggagtcctccgatgaagacggctatgactggggtccggccactgacctgtga

SEQ ID NO: 1783 - protein, 952 aa, Homo sapiens
MNLCGLMPIFPAPLDQVADMEELTIWEQHTATLSKDPRRGFGIAISGGRDRPGGSMVVSDVVPGGPAEGRLQTGDHIVMVNGVSMENATSAFAIQILKTCTKMANITVKRPRRIHLPATKASPSSPGRQDSDEDDGPQRVEEVDQGRGYDGDSSSGSGRSWDERSRRPRPGRRGRAGSHGRRSPGGGSEANGLALVSGFKRLPRQDVQMKPVKSVLVKRRDSEEFGVKLGSQIFIKHITDSGLAARHRGLQEGDLILQINGVSSQNLSLNDTRRLIEKSEGKLSLLVLRDRGQFLVNIPPAVSDSDSSPLEEGVTMADEMSSPPADISDLASELSQAPPSHIPPPPRHAQRSPEASQTDSPVESPRLRRESSVDSRTISEPDEQRSELPRESSYDIYRVPSSQSMEDRGYSPDTRVVRFLKGKSIGLRLAGGNDVGIFVSGVQAGSPADGQGIQEGDQILQVNDVPFQNLTREEAVQFLLGLPPGEEMELVTQRKQDIFWKMVQSRVGDSFYIRTHFELEPSPPSGLGFTRGDVFHVLDTLHPGPGQSHARGGHWLAVRMGRDLREQERGIIPNQSRAEQLASLEAAQRAVGVGPGSSAGSNARAEFWRLRGLRRGAKKTTQRSREDLSALTRQGRYPPYERVVLREASFKRPVVILGPVADIAMQKLTAEMPDQFEIAETVSRTDSPSKIIKLDTVRVIAEKDKHALLDVTPSAIERLNYVQYYPIVVFFIPESRPALKALRQWLAPASRRSTRRLYAQAQKLRKHSSHLFTATIPLNGTSDTWYQELKAIIREQQTRPIWTAEDQLDGSLEDNLDLPHHGLADSSADLSCDSRVNSDYETDGEGGAYTDGEGYTDGEGGPYTDVDDEPPAPALARSSEPVQADESQSPRDRGRISAHQGAQVDSRHPQGQWRQDSMRTYEREALKKKFMRVHDAESSDEDGYDWGPATDL

SEQ ID NO: 1784 - DNA, 4078 bp, Homo sapiens
agtgaagcggaagccattactctctggagtcgattgccccgagacacatgggccaaggaggggtcagcggcgaattctttcggcctgttggggacccctcgtgtccccacgccagactggacctcccgtatgaacttctcttcgcatcggcggcggcttccgtcacctccgctcccccgatcctattcccagtcgtatgccagcttggagagtcacgtgagagcaagagagtagctttctggttgtcctggtgccctgctcaggcaaactgactgccattctctgaggatggcagctctgtcccccacatttgccacgtccacccaggattccacctgtctccaggactcagaatttcctgtttcttcaaaagaccattcctgtccccagaatttggacctgttcgtgtgcagtggtctggagcctcacacacccagtgttggttcccaggaatcggtgactttccaagatgtcgctgtggactttaccgagaaggagtggcccttgctggattcttctcagagaaaactgtacaaagatgtaatgctggagaactacagcaacctcacttcactggggtatcaggtcggcaaacccagcctcatctcacacttggagcaggaggaggagccgaggacagaggagaggggcgctcaccagggcgcttgtgcagattgggagactccatctaaaaccaagtggtcacttcttatggaagatatttttgggaaggaaacgcccagtggtgtgacgatggaaagagccggtcttggagagaagtccactgaatacgctcacttgttcgaagtctttggcatggaccctcatctcactcagccaatgggaaggcacgctggcaagaggccctatcaccgccgcgactatggggtagcgttcaagggcaggccgcacctcactcagcacatgagcatgtacgacgggagaaaaatgcatgaatgtcatcagtgccaaaaagccttcaccacgagcgcgtccctcacacggcacaggagaatccacaccggggagaagccttacgagtgcagcgactgcgggaaagccttcaacgacccttcagcccttaggagccacgcaagaactcacctcaaagagaagccctttgactgcagtcagtgtggaaatgcattccggaccctctcggccctgaaaatccacatgcgagttcacactggcgagaggccttacaagtgtgatcagtgcgggaaggcttacggccggagctgccacctcatcgcacacaagagaacgcacaccggagagaggccctacgagtgtcacgactgtgggaaagctttccagcacccctcccacctcaaagagcacgtgaggaatcacacgggggagaagccctacgcgtgcacgcagtgcggcaaagccttccgctggaagtccaactttaatttgcacaagaagaaccacatggtggagaagacctacgaatgtaaagaatgcgggaaatcctttggcgatctcgtgtcccggaggaaacacattaggattcacatcgtcaagaaacccgtggaatgtcggcagtgcgggaagaccttccgaaaccagtccatccttaagactcacatgaactctcacactggagagaaaccatacgggtgcgatctctgcgggaaagctttcagcgcgagttcaaacctcaccgcacacaggaagatacacacgcaagagagacgctacgaatgcgccgcctgcgggaaagtcttcggtgactatttatcccggcggaggcacatgagcgttcaccttgtaaagaaacgagttgagtgtaggcagtgtggcaaggccttcaggaaccagtcaacgctgaagacgcacatgcgaagccacacgggggagaaaccgtacgaatgcgatcactgtgggaaggccttcagcataggctccaacctgaatgtgcacaggcggatccacaccggggagaagccctacgaatgccttgtctgcgggaaagccttcagcgaccactcatccctcaggagccacgtgaaaactcaccggggagagaagctctttgtgtcatccgtgtggaaaaggctccagtgagcgcgcctgctttagagacacaggatgattcagaccggaaacagacctcgtgggtgtaagaggaagcctctgtgagctcgcaccttactgggtgcaaaagaatccacggaacttgggagaagtccagttcctgtaaaaactgggaagacgaggcgttctcatcccataggaggtttgtgagaactcacgccgggggtgaaaatgtacgtctgtagcatggagaagccttcagggtacattcagctcttaacaaacacaggaggacttaatggcagcttggcatttaatgtcaaaatccaagccgtggcatttaatgtcaaaatgacttcagaccacttctagccttctgggcccatgagtaataatgagcacactagggagcatctctgtaaacacagtggctggggaaacccttcctagtctcacttgattcctcatgacggaaatcacactaaagagagaaatcagtgaagtaaggaacgtggaaggtcatgaatgggcagcaaaccacggccagctgcttgtctttgtatggcttgtcagctaacaatagtggttccctctttaaggaagaagaatgtttgatggagaaaatttgtggccaatgaagtctggaatacttcctgtcatctgccccttccagaaaaacttggcccgacccttggtctacagcacgggttctcagtcgggcgacgatttggctgtctaggcgtcatttggcaatgtctagagacatttttggtagttagaatggggggaagatactcctgacttgtaataagaagacatcagagatgctgctaagtcggctccagcacacaggagccccccacaacgaagagttagtgcccccaaacgtcactgttgctgaggttgaaaataatcatgcagtcattcctcaattactgcctgcagcaattcctccatttttatgaatcttgtgagcacttacgctaggagaaatttcttttacaaaacttttaaaatacaattagtgctgataattcctatgtggaaatgattccagccatggtcccctcacttgagcatgtgaatattctcacggagagaagccccagcgagattttccggtgaatacgggattgcacttactctttcatcacggaaacagaccccccgagagaagccccaacgagattttccggtgaatacgggactgcacgtactctctcatcatgaaaacagagccccgttcataaatttttcatctttatttttaaggttatactcctctaaataacccttaagcctcatcaagaaaggtttgtttatagtatttttactatagcttcatccttgataacgtcctaatttccttctggacaacctccttgaccaatggcatattgagatctatgtgacatgaggatatttctcagtaccactttgttactggtacctgatgtacacggattgcgaccagagcatgatgcctccatcaagtggtaatatgtttgcagcctgctgtccagccaagagtgacagatacttctagtgacttccccggtatccactctcatcttcttccaatatcaagagaatccaggttctgtcagattagtaaggtgtgctaatctaaattttaaaaaatctcttacaggttttcttgcagctggtgccatccatgtctcacagccctggccactggcagatcagcagatgtcaccacatgggcttctgagaaagctcttgaatggggatcgttcttaaacatgaattcctccctgtatgttttgttctttgctttacttttcaccttgcaaagagatccagtacctagtattggaagatccaccttaacgaccgtgcatatgaaaaccacagtctaaggaagtgactgcagaaagctcacagcgaccctggcctcccctgtggcctctttgagtgtctgcagcagccctggacttccagacttctatcacatgagaaaaaataaaactgattattggtttaaaaaaaaaaaaaaaaaaaaaaaaaaaaa

SEQ ID NO: 1785 - protein, 595 aa, Homo sapiens
MAALSPTFATSTQDSTCLQDSEFPVSSKDHSCPQNLDLFVCSGLEPHTPSVGSQESVTFQDVAVDFTEKEWPLLDSSQRKLYKDVMLENYSNLTSLGYQVGKPSLISHLEQEEEPRTEERGAHQGACADWETPSKTKWSLLMEDIFGKETPSGVTMERAGLGEKSTEYAHLFEVFGMDPHLTQPMGRHAGKRPYHRRDYGVAFKGRPHLTQHMSMYDGRKMHECHQCQKAFTTSASLTRHRRIHTGEKPYECSDCGKAFNDPSALRSHARTHLKEKPFDCSQCGNAFRTLSALKIHMRVHTGERPYKCDQCGKAYGRSCHLIAHKRTHTGERPYECHDCGKAFQHPSHLKEHVRNHTGEKPYACTQCGKAFRWKSNFNLHKKNHMVEKTYECKECGKSFGDLVSRRKHIRIHIVKKPVECRQCGKTFRNQSILKTHMNSHTGEKPYGCDLCGKAFSASSNLTAHRKIHTQERRYECAACGKVFGDYLSRRRHMSVHLVKKRVECRQCGKAFRNQSTLKTHMRSHTGEKPYECDHCGKAFSIGSNLNVHRRIHTGEKPYECLVCGKAFSDHSSLRSHVKTHRGEKLFVSSVWKRLQ

SEQ ID NO: 1786 - DNA, 3226 bp, Homo sapiens
ttattttttgagacagttctccctctgttgcccaggctggagtgcagtggtgtaaacatagctccctgcagttgcaaattcctgggctcaagtgatccttccatctcagcctcccgagtagctgggactacaggtgtccaccaccatgcctggctaatgacctcttcttttgtagatacatcagctacatggaagcaggaaaccaaacaggatttttagagtttatccttctcggactctctgaggatccagaactacagccgttcatatttgggctgttcctgtccatgtacctggtgacggtgctgggaaacctgctcatcatcctggccatcagctctgactcccacctccacacccccatgtacttcttcctctccaacctgtcctgggttgacatctgtttcagcacttgcatcgtccccaagatgctggtgaacatccagaccgagaacaaagccatctcctacatggactgcctcacacaggtctatttctccatgttttttcctattctggacacgctactcctgaccgtgatggcctatgaccggtttgtggctgtctgccaccctctgcactatatgatcatcatgaacccccacctctgtggcctcctggtttttgtcacctggctcattggtgtcatgacatccctcctccatatttctctgatgatgcatctaatcttctgtaaagattttgaaattccacattttttctgcgaactgacgtacatcctccagctggcctgctctgataccttcctgaacagcacgttgatatactttatgacgggtgtgctgggcgtttttcccctccttgggatcattttctcttattcacgaattgcttcatccataaggaagatgtcctcatctgggggaaaacaaaaagcactttccacctgtgggtctcacctctccgtcgtttctttattttatgggacaggcattggggtccacttcacttctgcggtgactcactcttcccagaaaatctccgtggcctcggtgatgtacactgtggtcacccccatgttgaaccccttcatctacagcctgaggaacaaggatgtgaagggagccctggggagtctcctcagcagggcagcctcttgtttgtgatggatcccttggccccaggactaagaagttttgtgagcaccaatggcaaaaatgttttattttgaaattcttactctttaaaattaaaaacatttttttatactttgagagtacaaatgcagatttcttaacatgcatttgcataagggtgaagtctgagcttttggcgtaccaattacctgaatagtgaacataaggcactttttttttttttttgagacggagtctcactctgtctcccaggctggagtgcagtggagtgatctcggctcactgcaacctccgcctcccgggttcaagtgattcttctgtctcagcctcctgagtagctgagattacaggtgtgtgccacccatgccttttagtagagacggggtttcaccatcttggccaggctggtctcgaactcctgaccttgtgatccacctgccttggcctctcaaagtgctgggattacaggtgtgagccaccacgcccagccaaggcagtttttaaactctcactcccctctcaccttttgcagtctccagtgtccattattctgttataatgcccatgcgtatacattgtttagctcccaattataagtgagatcatgcagcatttgactttgtttctttactaccttacttaagagaatggcttccagtcccatcgatgttgctgcaaaagacatgatttcatccttttttatggctgagtagtactccattgtatatatcctcgatatctatatagatatagacatatgtagatacataccatgttttctttttttaaaaaaaatttatttttatgtcagtagtttttggggtacatgtggtttttcattacacggatgagttctttagtggtgacttctgagtttttagtgtacccgtcacccaagtggtagtagtctcttattcctcacccccctcccaacctttctcccgtcaagtcaccaaagttcattatattgttcatattcctttgtgtcctcatagcttagctcccacttataactgagaacatacgatatgttcatatggatcttatgtatgttggttgaacatacaaacaagtccaggtttttcattcctgagttacttcacctagagtaatgacctccagttccatccaagttgctacaaaagacattatttggttcctttttatggataagtagtattccatgctgtacatataccacaatctttatcactcattggttgatgggcacttaggttggttccatgcctttgtaattgctaattatgttgctataaacatgcaggtgtatgtgtcttttttacataatgactttgtttcctttgggtagatacccagtagtggaactgctggactgaaaggtagttctacttttagttcttttttttgtttttttttttaagacagagtctcactctgttgcccaggctggagtgcagtggcgcgatctcatctcactgcaacctccacctcccaggttcaagcgattctcctgcctcaacctcctgagtagctgggactacaggcacctgccaccccacccagctaattcttctatttttagtagagacagggtttcaccatgttggccaggctggtcttgaactcctgacctcaggtgatacgcccacctcggcctcccaaagtgctgggattacaggtgtgagccactgtgcctggccttctagttctttaagataccactttaaaaaaagtccagtcctccattgatggacacgtaggttgattccatatctttgctaatgtgaatagtgccgtgataaacatgggggtgtaagttaacaattaatctccaagtaatttccttgatggcacttctgtcctatgtgctattcaaaaattgtgtccttgatcatcgttcttaattctccattagtgagttctgaacttgggtttgaagcatttgctatagctttgttatctcaagtggtggcacagagttcttaagctattgattgttcactgactttatttctatgtgtttgcatgtgggtttttgttgtttgtgtgttcgatcatgaacagatcaacagtgtttatttgttttcctactggatgaagtatgattaaaatacgtatttaaatat

SEQ ID NO: 1787 - protein, 312 aa, Homo sapiens
MEAGNQTGFLEFILLGLSEDPELQPFIFGLFLSMYLVTVLGNLLIILAISSDSHLHTPMYFFLSNLSWVDICFSTCIVPKMLVNIQTENKAISYMDCLTQVYFSMFFPILDTLLLTVMAYDRFVAVCHPLHYMIIMNPHLCGLLVFVTWLIGVMTSLLHISLMMHLIFCKDFEIPHFFCELTYILQLACSDTFLNSTLIYFMTGVLGVFPLLGIIFSYSRIASSIRKMSSSGGKQKALSTCGSHLSVVSLFYGTGIGVHFTSAVTHSSQKISVASVMYTVVTPMLNPFIYSLRNKDVKGALGSLLSRAASCL

SEQ ID NO: 1788 - DNA, 939 bp, Homo sapiens
atggaagcagaaaaccttacagaattatcaaaatttctcctcctgggactctcagatgatcctgaactgcagcccgtcctctttgggctgttcctgtccatgtacctggtcacggtgctggggaacctgctcatcattctggccgtcagctctgactcccacctccacacccccatgtacttcttcctctccaacctgtcctttgttgacatctgtttcatctccaccacagtccccaagatgctagtgagcatccaggcacggagcaaagacatctcctacatggggtgcctcactcaggtgtattttttaatgatgtttgctggaatggatactttcctactggccgtgatggcctatgaccggtttgtggccatctgccacccactgcactacacggtcatcatgaacccctgcctctgtggcctcctggttctggcatcttggttcatcattttctggttctccctggttcatattctactgatgaagaggttgaccttctccacaggcactgagattccgcatttcttctgtgaaccggctcaggtcctcaaggtggcctgctctaacaccctcctcaataacattgtcttgtatgtggccacggcactgctgggtgtgtttcctgtagctgggatcctcttctcctactctcagattgtctcctccttaatgggaatgtcctccaccaagggcaagtacaaagccttttccacctgtggatctcacctctgtgtggtctccttgttctatggaacaggacttggggtctatctgagttctgctgtgacccattcttcccagagcagctccaccgcctcagtgatgtacgccatggtcacccccatgctgaaccccttcatctacagcctgaggaacaaggatgtgaagggggccctggaaagactcctcagcagggccgactcttgtccatga

SEQ ID NO: 1789 - protein, 312 aa, Homo sapiens
MEAENLTELSKFLLLGLSDDPELQPVLFGLFLSMYLVTVLGNLLIILAVSSDSHLHTPMYFFLSNLSFVDICFISTTVPKMLVSIQARSKDISYMGCLTQVYFLMMFAGMDTFLLAVMAYDRFVAICHPLHYTVIMNPCLCGLLVLASWFIIFWFSLVHILLMKRLTFSTGTEIPHFFCEPAQVLKVACSNTLLNNIVLYVATALLGVFPVAGILFSYSQIVSSLMGMSSTKGKYKAFSTCGSHLCVVSLFYGTGLGVYLSSAVTHSSQSSSTASVMYAMVTPMLNPFIYSLRNKDVKGALERLLSRADSCP

SEQ ID NO: 1790 - DNA, 3059 bp, Homo sapiens
gttcggtggtgtcccggtgcagccacgcgagagtagaagggtggaaaggggaggtgcccagtgaaatggagcctgtcccgtgcactttcgggcatttcgagcatcttgtgggctctcccaagtcgcggcccctcctctgagagccacagtcaggtctgtcctcaggggtcgaggcggctgcgctggggcctcggcccgggaggaggcggggggcacggcctttccattttccctgctcccctctgcagaagcctcatagggcccggcgcggcggctcacgcctgtcattcccagcgctttgggcggattgggtaggaggattacttgaggccaggagttcaagaccaggcagggcaacatagggagaccccccccccaaccatctctaatggaaaaaaaaaaaaaagtctccacatccagcgttgtgccttttctctataaggaacagcatctctgccttcctgttcacggtgaccttcgcttggtgtcctcctggcctcagcaacctgacaattctgtcgtgtcccgagagatggctaatgaatggcgcttgatgacagatgagtaatgcctgttgctgaaagattgacgatcatctttctcaagatgttttctgtcttcatgagtcaaaatttgaagaggaaaggatggtggctgggtggttgacaaattactctcaggactcagtgacctttgaggatgtggctgtggacttcacccaggaggagtggactttgctggatcaaactcagagaaacttatacagagatgtgatgctggagaactataagaatctagttgcagtagattgggagagtcatattaataccaaatggtcagcacctcagcagaattttttgcaggggaaaacatccagtgtggtggaaatggagagaaaccattttggagaggaactgtttgactttaaccaatgtgaaaaagccttgagtgaacactcatgccttaagactcacaggagaacttactttagaaagaaaacctgtgagtgtaatcaatgtgaaaaagccttcagaaaaccctctatctttactttacacaagaaaactgatatcggagaggaacttcctaactgtaatcaatgtgaaacagccttcagccaacatctacatcttgtttgcaagaaaactagccaaaatctacatcttgtttgcaagaaaactcacactcaagagaaaccatataaatgcagtgactgtgaaaaaggcttaccttcctcctcacacctcagagaatgtgtaagaatttatggtggagagagaccatatactcataaggagtatgtcgaaaccttttctcattctacagccctttttgtacacatgcaaactcaagatggagaaaaattctatgaatgtaaagcatgtgggaaacccttcactgagtcgtcatatcttactcaacatttaagaactcatagtagagtgttacctatagaacataagaaatttggcaaagcctttgctttttccccagatcttgctaaacatataagacttagaactagaggaaaacactatgtttgtaatgaatgtggcaaagaatttacttgtttctcaaaactcaacattcacataagggttcacactggagaaaaaccgtatgagtgcaacaaatgtgggaaagccttcactgattcatcaggtcttataaaacacaggcgaactcacactggagaaaagccttatgaatgtaaggaatgtgggaaagcttttgctaactcttcacatcttactgtacatatgagaactcacactggtgagaagccttatcaatgtaaggaatgtggaaaagcctttattaattcctcttcctttaaaagtcacatgcagactcatcctggtgtaaaaccctatgactgtcaacagtgtgggaaagccttcattcgatcctcatttcttattcgacatttgagaagtcacagtgcagaaaggccttttgaatgtgaggaatgtgggaaagcctttagatactcctcgcaccttagtcaacataaaagaatacatacaggggagaggccatataaatgtcaaaagtgtgggcaagccttcagtatctcatcaggccttacagtacacatgagaactcacactggtgaacggccctttgaatgtcaggaatgtgggaaagcctttactcggtccacatatcttattcgacatctaagaagtcatagtgtggagaaaccatataaggaatgtgggcaaacctttagtaattcctcatgccttactgaatgtgtgtgaattggggctgatacttggaaagaatgtggtaaagccactacttcctcacacttactgaacatgtactcattcatagtggcaatgtacacagtcataaggaatgtgggaagccttccttggtgtctcagatcttaacaattccaatagaagagaagacatatgaatgtaaggaatgtgggaaaatcttggctccttccataggccttactattcatgtgtctgtgcatcctaggaaacaaactgaacgtaggaaacctgtcgatgcttacatcttactgagtctgtttgaactcatgctggagagaaatgctatgaatgtgaggaaggtggaaaagctttcattattttcctcgggccttactgagcttgtgagcacattggatataaatgcacgtcctctggctgtaaggaatgtgttgaaacctttcactctgccttataccttaatattcagctgtgatctcacaagtgtgaaaaatcttatgaatgtaaaatgtgtggagattcttctttgtttttagcttccactttgggaacatgtcaaagcacacattgagaagtcccatgagtgaaagagatgttggaaagcccttgaacttggtcgttaggaaacatccacactgaagaggaacctgactgtatggaaggtcaaaaaggctgtattaatttacatgcaaaaagtcacactagaggaatgccatatcagaatgcttttggtaaatatacatgttttaaagaggttatatatcattaataaaaatatctagctggtctgaaaaaaaaaaaaaaaaaaaa

SEQ ID NO: 1791 - protein, 538 aa, Homo sapiens
MVAGWLTNYSQDSVTFEDVAVDFTQEEWTLLDQTQRNLYRDVMLENYKNLVAVDWESHINTKWSAPQQNFLQGKTSSVVEMERNHFGEELFDFNQCEKALSEHSCLKTHRRTYFRKKTCECNQCEKAFRKPSIFTLHKKTDIGEELPNCNQCETAFSQHLHLVCKKTSQNLHLVCKKTHTQEKPYKCSDCEKGLPSSSHLRECVRIYGGERPYTHKEYVETFSHSTALFVHMQTQDGEKFYECKACGKPFTESSYLTQHLRTHSRVLPIEHKKFGKAFAFSPDLAKHIRLRTRGKHYVCNECGKEFTCFSKLNIHIRVHTGEKPYECNKCGKAFTDSSGLIKHRRTHTGEKPYECKECGKAFANSSHLTVHMRTHTGEKPYQCKECGKAFINSSSFKSHMQTHPGVKPYDCQQCGKAFIRSSFLIRHLRSHSAERPFECEECGKAFRYSSHLSQHKRIHTGERPYKCQKCGQAFSISSGLTVHMRTHTGERPFECQECGKAFTRSTYLIRHLRSHSVEKPYKECGQTFSNSSCLTECV

SEQ ID NO: 1792 - DNA, 1839 bp, Homo sapiens
cgccatctcccatagctgtcgcctgcagctgagaaagggttgctgtcccagcaggccaggtccagggctgggtataagtaagcaagaagagggcctgggagaagagtctgacgagcaaggggaaggtagccaaggatggagtgaaatacagggtgacctgtgtttttcccctgggtcctttggaaattatgggaaaaaatcaaataccaaggaagaaaaatctataatgaaattagatgtggatttctttttatgtattcagcttgggggcttatgatacttctagtacccaaagagatgcggtcttgctgtgttgcctaggctggtctcaaactcctgctctcaagtgatcctcctgcctcagcctcctgagtacatttatatttaaagtaattattgatggctctgcctgcttaggactctgcccagccaggaaggaaacctacaggaggaagaatggctgcagggtggctgacaacctggtcacagaactcagtaaccttccaggaagtggcagtggacttttcccaggaggagtgggcattgctggaccctgctcaaaaaaatctatacaaagatgtgatgctggagaactttaggaacctggcctcagtagggtatcagctctgcagacacagtctgatctccaaggtggatcaagaacagctgaagacagatgaaagaggaattttacaaggtgactgtgcagactgggaaactcaacttaaaccaaaagatacaattgctatgcagaacattcctgggggaaaaacatccaatggcataaacatgaactgtgtcagaactcactctggagagatgccctatgaatgcagtgactgtgggaaagccttcatttttcagtcttcccttaagaaacacatgagatctcatactggagagaagccttatgagtgtgatcactgtggaaaatcctttagccagagctctcatctgaatgtgcacaaaagaactcacactggagagaaaccctatgactgtaaggaatgtgggaaggctttcactgttccttcatcccttcagaaacatgtgagaacccacactggagagaaaccctatgaatgcagtgactgtggaaaagccttcattgatcagtcatcccttaagaaacacacacgctctcacactggagagaagccttatgagtgtaaccagtgtggaaagtccttcagcacaggctcttaccttattgtgcacaagagaactcacactggtgagaaaacctatgagtgtaaagaatgtgggaaggcctttaggaattcctcttgcctgagggtacacgtgagaactcacactggagagaagccttataaatgttttcagtgtgaaaaagcctttagcacaagcactaaccttataatgcacaagcgaatccacaatggccagaaactccatgaatgaaatgactcagggaagtgtttgttgcccctcatgcctcctttctcactttagaacatatattggagagaagccctgttatggtcacctggaaacagccttctggcccaactctggatgcctgttatactgggacaaaccttataaatgttatagctatgattgtttttatcagtgagtatttcattcttatatgtgtcacaactgtagatcctatgaatattttagttatcttttcagtttaattgcattgtgaacagaacacatggtcttcaatatgtagattctgtgtgacatagatttgaacataattgctggacactgactgatgtactgtggcagacagaactagttgctgtctcaatatccattcctcccttctttcttaaagtaataaaatttaccatttagttcaaaaaa

SEQ ID NO: 1793 - protein, 321 aa, Homo sapiens
MAAGWLTTWSQNSVTFQEVAVDFSQEEWALLDPAQKNLYKDVMLENFRNLASVGYQLCRHSLISKVDQEQLKTDERGILQGDCADWETQLKPKDTIAMQNIPGGKTSNGINMNCVRTHSGEMPYECSDCGKAFIFQSSLKKHMRSHTGEKPYECDHCGKSFSQSSHLNVHKRTHTGEKPYDCKECGKAFTVPSSLQKHVRTHTGEKPYECSDCGKAFIDQSSLKKHTRSHTGEKPYECNQCGKSFSTGSYLIVHKRTHTGEKTYECKECGKAFRNSSCLRVHVRTHTGEKPYKCFQCEKAFSTSTNLIMHKRIHNGQKLHE

SEQ ID NO: 1794 - DNA, 3278 bp, Homo sapiens
ggcccgaagatggcggcggtggctggatctggggctgccgcggctccgagctcactgctcctcgtggtgggcagcgagttcgggagcccggggctcctcacctacgtcctggaggagctcgaaagaggcatccggtcttgggatgtcgatcctggcgtctgcaaccttgatgaacagctcaaggtctttgtgtcccgacactctgccaccttctccagcattgtgaaaggccagcggagcctgcaccaccgtggagacaacctggagaccctggtcctcctgaacccatcagacaagtccctgtatgatgagctccggaaccttctgttggaccctgcctctcacaagctactggtgttggctgggccctgcctggaggagacgggggagctgctgctacagacagggggcttctcgcctcaccacttcctccaggtcctgaaggacagagagatccgggacatcctggccaccacgcccccacctgtgcagccgcccatactcaccatcacctgccccaccttcggtgactgggctcagctggcacccgctgtgcctggccttcagggggcgctccggctccagctgcggctgaaccccccggcgcagctgcccaactctgagggcctgtgcgaattcctggagtacgtggctgagtctctggagccaccgtcccccttcgagctgctggagcccccgacctccgggggcttcctcaggctgggccggccctgctgctacatcttccctggaggcctcggggatgccgccttcttcgccgtcaatggcttcactgtgctggtcaacggtggctcaaaccccaagtccagtttctggaagctggtgcggcacctggaccgcgtggatgccgtgctggtgacccaccctggcgccgacagcctccccggcctcaacagcctgctgcggcgcaaactggcggagcgctccgaggtggctgctggtgggggctcctgggacgacaggctgcgcaggctcatctcccccaacctgggggtcgtgttcttcaacgcctgcgaggccgcgtcgcggctggcgcgcggcgaggatgaggcggagctggcgctgagcctcctggcgcagctgggcatcacgcctctgccactcagccgcggccccgtgccagccaaacccaccgtgctcttcgagaagatgggcgtgggccggctggacatgtatgtgctgcacccgccctccgccggcgccgagcgcacgctggcctctgtgtgcgccctgctggtgtggcaccccgccggccccggcgagaaggtggtgcgcgtgctgttccccggttgcaccccgcccgcctgcctcctggacggcctggtccgcctgcagcacttgaggttcctgcgagagcccgtggtgacgccccaggacctggaggggccggggcgagccgagagcaaagagagcgtgggctcccgggacagctcgaagagagagggcctcctggccacccaccctagacctggccaggagcgccctggggtggcccgcaaggagccagcacgggctgaggccccacgcaagactgagaaagaagccaagaccccccgggagttgaagaaagaccccaaaccgagtgtctcccggacccagccgcgggaggtgcgccgggcagcctcttctgtgcccaacctcaagaagacgaatgcccaggcggcacccaagccccgcaaagcgcccagcacgtcccactctggcttcccgccggtggcaaatggaccccgcagcccgcccagcctccgatgtggagaagccagcccccccagtgcagcctgcggctctccggcctcccagctggtggccacgcccagcctggagctggggccgatcccagccggggaggagaaggcactggagctgcctttggccgccagctcaatcccaaggccacgcacaccctcccctgagtcccaccggagccccgcagagggcagcgagcggctgtcgctgagcccactgcggggcggggaggccgggccagacgcctcacccacagtgaccacacccacggtgaccacgccctcactacccgcagaggtgggctccccgcactcgaccgaggtggacgagtccctgtcggtgtcctttgagcaggtgctgccgccatccgcccccaccagtgaggctgggctgagcctcccgctgcgtggcccccgggcgcggcgctcggcttccccacacgatgtggacctgtgcctggtgtcaccctgtgaatttgagcatcgcaaggcggtgccaatggcaccggcacctgcgtcccccggcagctcgaatgacagcagtgcccggtcacaggaacgggcaggtgggctgggggccgaggagacgccacccacatcggtcagcgagtccctgcccaccctgtctgactcggatcccgtgcccctggcccccggtgcggcagactcagacgaagacacagagggctttggagtccctcgccacgaccctttgcctgaccccctcaaggtccccccaccactgcctgacccatccagcatctgcatggtggaccccgagatgctgccccccaagacagcacggcaaacggagaacgtcagccgcacccggaagcccctggcccgccccaactcacgcgctgccgcccccaaagccactccagtggctgctgccaaaaccaaggggcttgctggtggggaccgtgccagccgaccactcagtgcccggagtgagcccagtgagaagggaggccgggcacccctgtccagaaagtcctcaacccccaagactgccactcgaggcccgtcggggtcagccagcagccggcccggggtgtcagccaccccacccaagtccccggtctacctggacctggcctacctgcccagcgggagcagcgcccacctggtggatgaggagttcttccagcgcgtgcgcgcgctctgctacgtcatcagtggccaggaccagcgcaaggaggaaggcatgcgggccgtcctggacgcgctactggccagcaagcagcattgggaccgtgacctgcaggtgaccctgatccccactttcgactcggtggccatgcatacgtggtacgcagagacgcacgcccggcaccaggcgctgggcatcacggtgttgggcagcaacagcatggtgtccatgcaggatgacgccttcccggcctgcaaggtggagttctagccccatcgccgacacgccccccactcagcccagcccgcctgtccctagattcagccacatcagaaataaactgtgactacacttggcaa

SEQ ID NO: 1795 - protein, 1059 aa, Homo sapiens
MAAVAGSGAAAAPSSLLLVVGSEFGSPGLLTYVLEELERGIRSWDVDPGVCNLDEQLKVFVSRHSATFSSIVKGQRSLHHRGDNLETLVLLNPSDKSLYDELRNLLLDPASHKLLVLAGPCLEETGELLLQTGGFSPHHFLQVLKDREIRDILATTPPPVQPPILTITCPTFGDWAQLAPAVPGLQGALRLQLRLNPPAQLPNSEGLCEFLEYVAESLEPPSPFELLEPPTSGGFLRLGRPCCYIFPGGLGDAAFFAVNGFTVLVNGGSNPKSSFWKLVRHLDRVDAVLVTHPGADSLPGLNSLLRRKLAERSEVAAGGGSWDDRLRRLISPNLGVVFFNACEAASRLARGEDEAELALSLLAQLGITPLPLSRGPVPAKPTVLFEKMGVGRLDMYVLHPPSAGAERTLASVCALLVWHPAGPGEKVVRVLFPGCTPPACLLDGLVRLQHLRFLREPVVTPQDLEGPGRAESKESVGSRDSSKREGLLATHPRPGQERPGVARKEPARAEAPRKTEKEAKTPRELKKDPKPSVSRTQPREVRRAASSVPNLKKTNAQAAPKPRKAPSTSHSGFPPVANGPRSPPSLRCGEASPPSAACGSPASQLVATPSLELGPIPAGEEKALELPLAASSIPRPRTPSPESHRSPAEGSERLSLSPLRGGEAGPDASPTVTTPTVTTPSLPAEVGSPHSTEVDESLSVSFEQVLPPSAPTSEAGLSLPLRGPRARRSASPHDVDLCLVSPCEFEHRKAVPMAPAPASPGSSNDSSARSQERAGGLGAEETPPTSVSESLPTLSDSDPVPLAPGAADSDEDTEGFGVPRHDPLPDPLKVPPPLPDPSSICMVDPEMLPPKTARQTENVSRTRKPLARPNSRAAAPKATPVAAAKTKGLAGGDRASRPLSARSEPSEKGGRAPLSRKSSTPKTATRGPSGSASSRPGVSATPPKSPVYLDLAYLPSGSSAHLVDEEFFQRVRALCYVISGQDQRKEEGMRAVLDALLASKQHWDRDLQVTLIPTFDSVAMHTWYAETHARHQALGITVLGSNSMVSMQDDAFPACKVEF

SEQ ID NO: 1796 - DNA, 3186 bp, Homo sapiens
tggcgcctgccccgtcagacaggggccccatcccactcgctaccctgtccgatggggaaactgaggcacggagctggacagtgactcagacaccaggagctgcctggagtggagctgagagctcaggtctgggctcagccagtccagagtacaaatctactgtcccttcctagctgtgtgatcttgacaggcactggacggggcctgcaggggtctccacagagaccatcaggatgtcgtattttggggagcatttttggggcgagaaaaatcatggctttgaggtcctgtaccacagcgtgaagcaggggcccatctccaccaaggagctggcggacttcatccgggagagggccaccatcgaggagacctactcgaaggcgatggcgaaactctccaagctggccagcaacgggacccccatggggaccttcgccccgctctgggaggtcttccgcgtctcctcggacaagctggcgctgtgccacctggaactgacacggaagttacaggatctcatcaaggacgttctccgctacggcgaggaacagctcaagacccacaagaagtgcaaggaggaagtggtgagcaccttggatgctgtgcaggtactctcgggcgtcagccagctcctgcccaagtcccgcgagaactacctgaaccgttgcatggaccaggagcggctgcggagggagagtaccagccagaaggagatggacaaggcggagactaaaaccaagaaggcggcagagagcctgcggcgctcagtggaaaaatacaactcagcccgagctgactttgagcagaagatgctggactcagccctgcgcttccaagccatggaggagacacacctgaggcacatgaaggcactgctgggctcatatgctcactcggtggaggacacgcacgtgcagattgggcaggtgcatgaggaatttaagcagaacatcgagaacgtcagcgtggagatgctactcaggaagtttgcagagagtaagggcacaggccgggagaagcctggacctctggacttcgaggcatacagtgcggctgccctgcaggaagcgatgaaacgtttgcggggagccaaggcctttcgccttccaggactaagccggcgggagcgggagccggagccacctgcagctgtagatttcctggagcccgattcagggacatgtccagaggtggatgaagaaggtttcactgtccggcctgatgtgacccagaacagcacggccgagccctcccgtttctcgtccagcgactccgacttcgacgatgaagagccccgcaagttctatgtgcacatcaagcctgccccggcccgggctccagcctgcagccccgaggcagcagcggcacagctcagggccaccgcaggcagcctcatccttcctcctggcccagggggcaccatgaaacgccattcttcacgggacgctgctgggaaaccccagagacctcggtctgcccccagaaccagcagctgtgcagagagattgcagtcagaggagcaggtgtccaagaacctctttgggccgcccctggagtcagcctttgaccacgaagattttacaggctctagcagcctgggcttcacctccagcccctcccctttctcctcctcgtcgcccgaaaacgtggaggattccggcctggactctccgtcccacgcggcacctggcccctccccagattcctgggtcccccgcccaggcaccccgcagagcccgcccagctgtagggcgccacccccagaggccaggggtatccgggcaccgcctctgccagactcgccgcagcccctcgcctcgtctccaggcccctgggggctggaggccttggccggaggagacctgatgcctgcacctgctgaccccacagccagggagggcctggcagccccacccaggagacttcgctctaggaaggtgtcctgccctctcacacgtagcaatggggacctgtctcgttccctgagcccctccccactgggctcttcagccgccagcactgccttggaacggcccagcttcttatcccagacaggacacggagtctcccggggtccgagccctgtggtcctgggctcccaggatgccctgcccatagccacagccttcacggagtatgtccacgcctacttccgtggccacagccccagctgcctggctcgagtaactggggagctgaccatgaccttccctgctggcatcgtgcgtgtgttcagcgggaccccaccaccacctgtcctcagcttccggcttgtacacacaaccgctattgagcacttccagcccaacgccgatctgctgttcagtgacccctcccagagtgaccctgagaccaaagacttctggctcaacatggcagctctgaccgaagccctgcagcgccaggcagagcagaaccccactgcctcctactacaacgtggtgctgctgcgataccagttctcccgcccgggtccccagtctgtgcctctgcagctcagtgcccactggcagtgtggagccaccctcacccaggtctcagtggagtacggctaccggcccggtgccacggctgtgcccacaccactcacgaacgtccagatcctgctgcctgtgggggagcctgtgaccaacgtccgcttgcagccggctgccacctggaacctggaggagaagcggctcacttggaggcttccagatgtgtccgaggcaggcggttctggccgcctctctgccagctgggagccgctctcagggcccagcacacccagccccgtggctgcacagttcaccagcgaggggaccactctgtcgggcgtggacttggaactggtgggcagcggttaccgcatgtcgctggtgaagaggaggtttgccacagggatgtacctggtgagctgctgaacccgcaaatgctgctgccccagctctacactgcgccctggtgctggctgaccaccccctgccctcctgccggaccctggggcctcccaccccagcctccctgaggcccatactccacggagaggagccccatgcccagcctggctgagcccgagattcgctcctccccctcatgccaaccccacacaggtcccggccttttaatgttctttgaataaacactttattttctaataaaataaaaaaggaaaaaaaaaaaaaaaaaaaaaaaaaaaaaaaaaaa

SEQ ID NO: 1797 - protein, 889 aa, Homo sapiens
MSYFGEHFWGEKNHGFEVLYHSVKQGPISTKELADFIRERATIEETYSKAMAKLSKLASNGTPMGTFAPLWEVFRVSSDKLALCHLELTRKLQDLIKDVLRYGEEQLKTHKKCKEEVVSTLDAVQVLSGVSQLLPKSRENYLNRCMDQERLRRESTSQKEMDKAETKTKKAAESLRRSVEKYNSARADFEQKMLDSALRFQAMEETHLRHMKALLGSYAHSVEDTHVQIGQVHEEFKQNIENVSVEMLLRKFAESKGTGREKPGPLDFEAYSAAALQEAMKRLRGAKAFRLPGLSRREREPEPPAAVDFLEPDSGTCPEVDEEGFTVRPDVTQNSTAEPSRFSSSDSDFDDEEPRKFYVHIKPAPARAPACSPEAAAAQLRATAGSLILPPGPGGTMKRHSSRDAAGKPQRPRSAPRTSSCAERLQSEEQVSKNLFGPPLESAFDHEDFTGSSSLGFTSSPSPFSSSSPENVEDSGLDSPSHAAPGPSPDSWVPRPGTPQSPPSCRAPPPEARGIRAPPLPDSPQPLASSPGPWGLEALAGGDLMPAPADPTAREGLAAPPRRLRSRKVSCPLTRSNGDLSRSLSPSPLGSSAASTALERPSFLSQTGHGVSRGPSPVVLGSQDALPIATAFTEYVHAYFRGHSPSCLARVTGELTMTFPAGIVRVFSGTPPPPVLSFRLVHTTAIEHFQPNADLLFSDPSQSDPETKDFWLNMAALTEALQRQAEQNPTASYYNVVLLRYQFSRPGPQSVPLQLSAHWQCGATLTQVSVEYGYRPGATAVPTPLTNVQILLPVGEPVTNVRLQPAATWNLEEKRLTWRLPDVSEAGGSGRLSASWEPLSGPSTPSPVAAQFTSEGTTLSGVDLELVGSGYRMSLVKRRFATGMYLVSC

SEQ ID NO: 1798 - DNA, 4715 bp, Homo sapiens
ggcggcggcgggtgaggagcctgaggcggcggcgggggtggctccgcgcgcggtggtctcgggggcaaaataacatggcagccagacgaattacacaggagacttttgatgctgtattacaagaaaaagccaaacgatatcacatggatgccagtggtgaggctgtaagcgaaactcttcagtttaaagctcaagatctcttaagggcagtcccaagatccagagcagagatgtatgatgacgtccacagcgatggcagatactccctcagtggatctgtagctcactctagagatgccggaagagaaggcctgagaagtgacgtatttccagggccttccttcagatcaagcaacccttccatcagtgatgacagctactttcgcaaagaatgtggccgggatctggaattttctcactctgattctcgggaccaggtcattggccaccggaaattggggcatttccgttctcaggactggaaatttgcgctccgtggttcttgggaacaagactttggccatccagtttctcaagagtcctcttggtcacaggagtatagttttggtccctctgcagttttgggggactttggatcttccaggctgattgagaaagagtgtttggagaaggagagtcgggattatgacgtggaccatcctggggaggctgactctgtgcttaggggcagcagtcaagtccaggccagaggtcgagctctaaacatcgttgaccaggaaggttccctcctaggaaagggggagactcagggcctgctcacagctaaggggggtgttgggaaacttgtcacattgagaaatgtgagcacaaaaaaaatacccaccgtgaatcgtattactcccaaaacgcagggcactaaccaaatccagaaaaacactccaagtcctgatgtgaccctggggacaaacccagggacagaagatatccagttccccattcagaagatccctctggggctggatctgaagaatcttcggctccccagaagaaagatgagctttgacatcatagataagtctgatgttttttcaagatttgggatagaaataatcaaatgggcaggattccacaccataaaagatgatattaaattttcccaacttttccagactctctttgaacttgaaacagaaacctgtgctaaaatgcttgcctcattcaaatgttccttaaaaccagagcacagagatttttgcttttttactatcaaatttttaaagcactctgctttgaaaacacccagagttgataatgagtttttaaacatgcttttagacaaaggtgctgtgaagaccaaaaattgcttttttgaaatcataaagccttttgacaagtacataatgagacttcaagaccggcttctgaagagtgtcacacctttgcttatggcctgcaatgcctacgagctaagtgtcaagatgaagaccctcagtaaccccctggacttggctcttgccctagaaaccaccaactctctctgccggaagtctttggcccttttgggacagacattttccttggcctcttctttccggcaggagaaaatcttagaagctgtcggcctgcaagatatagctccctcacctgctgcgtttccaaacttcgaagactccactttgtttgggcgagagtacatagaccacctgaaggcctggctagtcagcagcggatgtcccctccaggttaagaaagccgaaccagagccgatgcgagaggaggagaaaatgattcctcctacgaaacctgaaattcaggccaaggctccaagtagtctgagtgatgctgtcccccagcgagcagatcacagggtagtgggcaccatcgaccagcttgtgaaacgtgtcatcgaaggcagcctgtctcccaaagagagaactcttctcaaagaggaccctgcttactggtttttgtctgatgaaaatagtctggagtataaatattacaagctgaagttggcagaaatgcagcggatgagcgagaacttgcgaggagccgaccagaagccgacctcagcagactgtgcagtgagggccatgctgtactcccgggctgtccgcaacctcaagaagaaactccttccgtggcagcggcgggggctcctccgtgctcaagggctccggggctggaaggcgaggagagcgaccaccgggacccagaccctcctatcctcaggcaccaggctgaaacaccacggccggcaggctccaggcctctcacaggcaaaaccatccctgccagacagaaatgatgctgccaaggactgcccgccagacccagttggaccttctcctcaggaccccagcttagaagcctcaggcccatcccccaagccagcaggagtggacatctctgaagcacctcagacctcttctccctgcccatctgctgacattgacatgaagacaatggagactgcagagaaactggctagatttgttgctcaggtgggaccagagatcgaacaattcagcatagaaaacagcaccgataaccctgacctgtggtttctacatgaccaaaatagttctgctttcaaattctatcgaaagaaagtgtttgaactatgtccatcaatttgtttcacgtcatctccgcacaaccttcacactggtggtggtgacaccacgggttctcaggagagccccgtggacctcatggaaggggaagcagagtttgaagacgagccccctccgcgggaggctgagctggagagcccagaggtgatgcctgaggaggaggacgaggacgatgaggatgggggagaggaggcccccgctcctggaggggcgggcaagtctgagggcagcacccctgccgacggccttcccggcgaggctgccgaggacgacctggctggagcacctgccttgtcacaggcctcctcaggtacctgcttccctcggaagaggatcagcagcaagtcattgaaggttggcatgattccagctcccaagagagtgtgtctcatccaggagccaaaagtccatgaaccagttcgaattgcctatgacaggcctcggggtcgtcccatgtccaaaaagaagaaacccaaggacttggacttcgcccagcagaagctgaccgataagaacctgggcttccagatgctgcagaagatgggctggaaggagggccatggcctgggctccctcggaaagggcatcagggagccggtcagcgtgggaaccccctcggaaggggaagggttgggtgctgacgggcaggagcacaaagaagacacattcgatgtgttccgacagaggatgatgcagatgtacagacacaagcgggccaacaaatagatcaaaaccactgatgtgaaagataagccttgaagcagcaattgcccttaaaacatcatccctgccctggatcggcctggagccagtgcccaagtacggtttggtgtgtacatgaaaacaaacgtctctgcagtctctggggcggaggtttcgctggcttttctttctctcaaagaaaaaaacatgcaccattttcaatgtgcttttgcctctcctctctgttcacatgcttttagcagcaagtcccctccaaatctgtcttggttccccttcagaaggtggcgctgcccccgaaaggcacctcagcctgtgagtgctgaggaaccagctcctctggctgattttccagttggactggccattgctctccagaagtgctctgttagcaaacgtgatgtggaaacgatcacagatggtgttttctcgttgttcgccagaatttatacgggggagacaaattcccggtaattaccaagtctgcactcgggtaccaaagctctgaagctctctgaacagttgccatacttgagttgatgaatgtgttattcatggtgtctcatctcatcaatgcatcttgagagacttaatgaaattttagcaacagtatagaatagctctatcgggtggggagtaatcattaaacagatgaaatcggccccagatttacatgtctctttagaatccacagtgtaagcaaactacagttacaaagggatgggggttgtaaaccctctgagactctgcacttttcgcacgtatggcatcgtcaagtgctgtcttattacagcctttgtaaggagaggcaggctcctcctggggtgggctctgcagctgctctatttccaggcatgtgatcgcccccgctctccagattccccagcactctgctgcgtgtaactccactcaattctccactcatccttccttgtgaagcaggatcgttgaagttttaagtatgggcaaaaatctggaaaacttaggatccctctgacaccccaggattaggggacacagcagtggctagggcatcagccacagaactgagcgggaaatgccacttgtattggctgtaaagaaatcctggctttgggccaggcacagtggctcaagcctgtaatcccagcactttaggaggttgaggcggatggatcacctgaggtcaggagtttgagaccagcctggccaacatggtgtaaccccgtctctactaaaaatacaaaaaaattagccaggcgtggtagcgggcacctgtaatcccagctactcaggaggctgaggcaggagaatcacttgaaccggggaggcagaggttgcagtgagctgagatcatgccactccactccagcctgggcgacagagcaagactccatctctaaaaaaaaaaaaaaaaaa

SEQ ID NO: 1799 - protein, 1082 aa, Homo sapiens
MAARRITQETFDAVLQEKAKRYHMDASGEAVSETLQFKAQDLLRAVPRSRAEMYDDVHSDGRYSLSGSVAHSRDAGREGLRSDVFPGPSFRSSNPSISDDSYFRKECGRDLEFSHSDSRDQVIGHRKLGHFRSQDWKFALRGSWEQDFGHPVSQESSWSQEYSFGPSAVLGDFGSSRLIEKECLEKESRDYDVDHPGEADSVLRGSSQVQARGRALNIVDQEGSLLGKGETQGLLTAKGGVGKLVTLRNVSTKKIPTVNRITPKTQGTNQIQKNTPSPDVTLGTNPGTEDIQFPIQKIPLGLDLKNLRLPRRKMSFDIIDKSDVFSRFGIEIIKWAGFHTIKDDIKFSQLFQTLFELETETCAKMLASFKCSLKPEHRDFCFFTIKFLKHSALKTPRVDNEFLNMLLDKGAVKTKNCFFEIIKPFDKYIMRLQDRLLKSVTPLLMACNAYELSVKMKTLSNPLDLALALETTNSLCRKSLALLGQTFSLASSFRQEKILEAVGLQDIAPSPAAFPNFEDSTLFGREYIDHLKAWLVSSGCPLQVKKAEPEPMREEEKMIPPTKPEIQAKAPSSLSDAVPQRADHRVVGTIDQLVKRVIEGSLSPKERTLLKEDPAYWFLSDENSLEYKYYKLKLAEMQRMSENLRGADQKPTSADCAVRAMLYSRAVRNLKKKLLPWQRRGLLRAQGLRGWKARRATTGTQTLLSSGTRLKHHGRQAPGLSQAKPSLPDRNDAAKDCPPDPVGPSPQDPSLEASGPSPKPAGVDISEAPQTSSPCPSADIDMKTMETAEKLARFVAQVGPEIEQFSIENSTDNPDLWFLHDQNSSAFKFYRKKVFELCPSICFTSSPHNLHTGGGDTTGSQESPVDLMEGEAEFEDEPPPREAELESPEVMPEEEDEDDEDGGEEAPAPGGAGKSEGSTPADGLPGEAAEDDLAGAPALSQASSGTCFPRKRISSKSLKVGMIPAPKRVCLIQEPKVHEPVRIAYDRPRGRPMSKKKKPKDLDFAQQKLTDKNLGFQMLQKMGWKEGHGLGSLGKGIREPVSVGTPSEGEGLGADGQEHKEDTFDVFRQRMMQMYRHKRANK

SEQ ID NO: 1800 - DNA, 3662 bp, Homo sapiens
ctgcgcggcgcggcgctgcggagaccgttggttcatttgcatgtccccgcctcgcgcggcggcggcggcgggtgaggagcctgaggcggcggcgggggtggctccgcgcgcggtggtctcgggggcaaaataacatggcagccagacgaattacacaggagacttttgatgctgtattacaagaaaaagccaaacgatatcacatggatgccagtggtgaggctgtaagcgaaactcttcagtttaaagctcaagatctcttaagggcagtcccaagatccagagcagagatgtatgatgacgtccacagcgatggcagatactccctcagtggatctgtagctcactctagagatgccggaagagaaggcctgagaagtgacgtatttccagggccttccttcagatcaagcaacccttccatcagtgatgacagctactttcgcaaagaatgtggccgggatctggaattttctcactctgattctcgggaccaggtcattggccaccggaaattggggcatttccgttctcaggactggaaatttgcgctccgtggttcttgggaacaagactttggccatccagtttctcaagagtcctcttggtcacaggagtatagttttggtccctctgcagttttgggggactttggatcttccaggctgattgagaaagagtgtttggagaaggagagtcgggattatgacgtggaccatcctggggaggctgactctgtgcttaggggcagcagtcaagtccaggccagaggtcgagctctaaacatcgttgaccaggaaggttccctcctaggaaagggggagactcagggcctgctcacagctaaggggggtgttgggaaacttgtcacattgagaaatgtgagcacaaaaaaaatacccaccgtgaatcgtattactcccaaaactcagggcactaaccaaatccagaaaaacactccaagtcctgatgtgaccctggggacaaacccagggacagaagatatccagttccccattcagaagatccctctggggctggatctgaagaatcttcggctccccagaagaaagatgagctttgacatcatagataagtctgatgttttttcaagatttgggatagaaataatcaaatgggcaggattccacaccataaaagatgatattaaattttcccaacttttccagactctctttgaacttgaaacagaaacctgtgctaaaatgcttgcctcattcaaatgttccttaaaaccagagcacagagatttttgcttttttactatcaaatttttaaagcactctgctttgaaaacacccagagttgataatgagtttttaaacatgcttttagacaaaggtgctgtgaagaccaaaaattgcttttttgaaatcataaagccttttgacaagtacataatgagacttcaagaccggcttctgaagagtgtcacacctttgcttatggcctgcaatgcctacgagctaagtgtcaagatgaagaccctcagtaaccccctggacttggctcttgccctagaaaccaccaactctctctgccggaagtctttggcccttttgggacagacattttccttggcctcttctttccggcaggagaaaatcttagaagctgtcggcctgcaagatatagctccctcacctgctgcgtttccaaacttcgaagactccactttgtttgggcgagagtacatagaccacctgaaggcctggctagtcagcagcggatgtcccctccaggttaagaaagccgaaccagagccgatgcgagaggaggagaaaatgattcctcctacgaaacctgaaattcaggccaaggctccaagtagtctgagtgatgctgtcccccagcgagcagatcacagggtagtgggcaccatcgaccagcttgtgaaacgtgtcatcgaaggcagcctgtctcccaaagagagaactcttctcaaagaggaccctgcttactggtttttgtctgatgaaaatagtctggagtataaatattacaagctgaagttggcagaaatgcagcggatgagcgagaacttgcgaggagccgaccagaagccgacctcagcagactgtgcagtgagggccatgctgtactcccgggctgtccgcaacctcaagaagaaactccttccgtggcagcggcgggggctcctccgtgctcaagggctccggggctggaaggcgaggagagcgaccaccgggacccagaccctcctatcctcaggcaccaggctgaaacaccacggccggcaggctccaggcctctcacaggcaaaaccatccctgccagacagaaatgatgctgccaaggactgcccgccagacccagttggaccttctcctcaggaccccagcttagaagcctcaggcccatcccccaagccagcaggagtggacatctctgaagcacctcagacctcttctccctgcccatctgctgacattgacatgaagacaatggagactgcagagaaactggctagatttgttgctcaggtgggaccagagatcgaacaattcagcatagaaaacagcaccgataaccctgacctgtggtttctacatgaccaaaatagttctgctttcaaattctatcgaaagaaagtgtttgaactatgtccatcaatttgtttcacgtcatctccgcacaaccttcacactggtggtggtgacaccacgggttctcaggagagccccgtggacctcatggaaggggaagcagagtttgaagacgagccccctccgcgggaggctgagctggagagcccagaggtgatgcctgaggaggaggacgaggacgatgaggatgggggagaggaggcccccgctcctggaggggcgggcaagtctgagggcagcacccctgccgacggccttcccggcgaggctgccgaggacgacctggctggagcacctgccttgtcacaggcctcctcaggtacctgcttccctcggaagaggatcagcagcaagtcattgaaggttggcatgattccagctcccaagagagtgtgtctcatccaggagccaaaagtccatgaaccagttcgaattgcctatgacaggcctcggggtcgtcccatgtccaaaaagaagaaacccaaggacttggacttcgcccagcagaagctgaccgataagaacctgggcttccagatgctgcagaagatgggctggaaggagggccatggcctgggctccctcggaaagggcatcagggagccggtcagcgtgggaaccccctcggaaggggaagggttgggtgctgacgggcaggagcacaaagaagacacattcgatgtgttccgacagaggatgatgcagatgtacagacacaagcgggccaacaaatagttccagggtcacccccgagaggacaacaggcatctggaagtgctctctcgccactctgggtgctttactgtctctggcttgtttccatcactggaaatcacttagagaattgtagtgtttttggtccttgataaagcctagaagacatttgtgatgttacaaaatggaagttttcttttgtttctgttttttaagatctaagaagttgtgaatgttgttaatcatttagccgttgcaataaatgtagaggaaatgcaaaaaaaaaaaaaaaaaaaaaaa

SEQ ID NO: 1801 - protein, 1082 aa, Homo sapiens; identical to SEQ ID NO: 1799

SEQ ID NO: 1802 - DNA, 2319 bp, Homo sapiens
gcaaaacatttccctgctgggggcggcgaccaccgtgagcgtcccggaaggggcggcaaagacgcctccgtcgcgcacgaggtggcctcgttggctttaccttggttcgcggtcgtccttggttatcgtgagcgtccgcgagtctctgggaggccaagcctaggggcgccacagcgcctgcgcgcgtacggcggccggaaggggctagaggcggctccctgggtgacaaccgcgcgccccacctttccccacgtggccgcgaagaccggctcaggagcatctatcggctgcacgccaacatcaacacaggcgaagatggtctccaagcgcattgcccaggagacctttgatgcagctgtgcgcgagaacatcgaggagtttgcgatggggccagaggaggcagtgaaagaggccgtggagcagtttgaatcgcaaggggttgatctgagcaacattgtaaagacggcacctaaagtctctgcagacggatcccaggagcccacacatgacatcctgcagatgctcagtgacctccaggagtctgtggccagctctcgcccccaggaggtgtcagcatacctcacccgcttctgcgaccagtgcaaacaggacaaggcctgccgcttcctcgcggcccagaagggggcctaccccatcatcttcactgcctggaagctggccactgcaggtgaccagggccttctgctccagtccctcaatgccctgtcggtgctgactgatggacagccagacctcctggatgcccagggcctgcagctcctagtggccacgctgacccagaatgctgatgaggctgacctgacctgctctgggatccgctgtgtgcgtcacgcttgcctgaaacatgaacagaatcggcaagacctggtgaaagctggcgtgctgcctctgctgactggtgccatcacccatcatggccaccacactgacgtggtcagggaagcctgctgggccctgcgtgtcatgaccttcgatgacgacatccgtgtgccctttggccatgcccacaaccatgccaagatgattgtgcaggagaacaaaggcttgaaggtgctcatcgaagccaccaaagcgttcctggataaccctggcatcctgagcgagctctgtggaaccctgtcccgcctggccattcgcaacgagttctgccaggaggtcgtcgacctcgggggcctgagcattctggtgtccctgctagccgactgcaatgaccaccagatgagggaccagagcggcgttcaggagctcgtgaagcaagtgctgagcaccctgcgagccatcgcaggcaacgacgacgtgaaagatgctattgtccgtgctggtgggacggagtccatcgtggctgctatgacccagcatctgaccagcccccaggtgtgtgagcagagctgcgcggccctgtgcttcctggccctgcgtaagcccgacaacagccgcatcatcgtggagggtggcggggctgtggcagcactgcaggccatgaaggcacacccgcagaaggccggcgtgcagaaacaggcttgcatgctgatccgaaacctggtggcccacggccaggccttctcgaagcccatcctggacctgggggctgaggcactcatcatgcaggcccgatctgcccaccgtgactgtgaggacgtggccaaggccgccctgcgggacctgggttgtcatgtcgagctccgagagctgtggacaggccagaggggcaacctggcgccatgaccccaggcccagtctgggccgtgactctgggtgagtcgtgtgactcaggaatgggggtagatccatgtcctccactgtcccccattagttctgtccccttcacaatgagaagtgttttctggcaggccctaggtaaagggtcgggggaggggggagccttgtagggaggcctctacacagaagaaagcagcccccatgtcccagccacttctgggtcccagccagcagcacggatgttactgtcctgctccttcccccagccccacgccctaccagagggggcaaagggcacgtcccatcactcactgccctgtctgaaatgtggcagccactgtgggccaggctcagggcagggcaggcgattccagtggggttgggccccctggcgcctgctgcttactgcagtttcatgcaggcctctgctccttgtctttcttacctgtaaaatgggtctcagatgctccgccctgcttggccccagcttgtctgtctctgggtcctgggccagccaggatacctgataataaaagatcattgggtgaaaaaaaaaaaaaaaaaaaaaaaaaaaaaaaa

SEQ ID NO: 1803 - protein, 476 aa, Homo sapiens
MVSKRIAQETFDAAVRENIEEFAMGPEEAVKEAVEQFESQGVDLSNIVKTAPKVSADGSQEPTHDILQMLSDLQESVASSRPQEVSAYLTRFCDQCKQDKACRFLAAQKGAYPIIFTAWKLATAGDQGLLLQSLNALSVLTDGQPDLLDAQGLQLLVATLTQNADEADLTCSGIRCVRHACLKHEQNRQDLVKAGVLPLLTGAITHHGHHTDVVREACWALRVMTFDDDIRVPFGHAHNHAKMIVQENKGLKVLIEATKAFLDNPGILSELCGTLSRLAIRNEFCQEVVDLGGLSILVSLLADCNDHQMRDQSGVQELVKQVLSTLRAIAGNDDVKDAIVRAGGTESIVAAMTQHLTSPQVCEQSCAALCFLALRKPDNSRIIVEGGGAVAALQAMKAHPQKAGVQKQACMLIRNLVAHGQAFSKPILDLGAEALIMQARSAHRDCEDVAKAALRDLGCHVELRELWTGQRGNLAP

SEQ ID NO: 1804 - DNA, 3160 bp, Homo sapiens
ggggccgtggcggctggaggtagcggcggcggcgacgcgtccaggccggtgagggggcgcggggggcgccgggggggcccaagcgtcagcggcccgcgcctgtcgggctgaactgaggaccgagtctcctgccattccgagcaggcctggtatgggtaatggtgtgaaggaaggcccggtgcgattgcatgaggatgctgaggctgtcctgtcctcgtccgtctcatcaaagcgtgaccacaggcaagtgctcagctccctgctgcctggggccctggctggtgcccttgccaaaacagcggtagctcccctggaccgaaccaaaatcatcttccaagtgtcttcaaaaagattttctgccaaggaggccttccgggtcctctactacacctacctcaacgagggatttctcagcttgtggcgcgggaactcggccaccatggtgcgcgtggtgccctacgccgccatccagttcagcgcacacgaggagtacaagcgcatcctgggcagctactatggcttccgtggagaagccctgcccccttggcctcgcctcttcgccggcgcactggctggaacgacagccgcttcactgacctaccccctggacctggtcagagcgcggatggccgtaaccccgaaggaaatgtacagcaacatctttcatgtcttcatccgcatctcgagagaagaggggctgaagactctctaccatggatttatgcccaccgtgctgggggtcattccctacgctggcctgagcttcttcacctatgagacgctcaagagcttgcacagagagtacagcggccgccggcagccctaccccttcgagcgcatgatcttcggcgcctgcgctggcctcatcgggcagtcggcctcgtacccgctggatgtggtgcggcggcgcatgcagacggccggcgtcacgggctacccgcgcgcctccatcgcccgcacgctgcgcaccatcgtgcgggaggagggcgccgtgcgcggcctctacaaaggcttgagcatgaactgggtcaagggtcccatcgccgtgggcatcagcttcaccaccttcgacctcatgcagatcatgctgcggcacctgcagagctaggggaccctgagctgctctcaggacggtggaccggtgacccctttgtattctgggcccatggaacggtgggggggtgcgcttgattctacttcaggaggcacatggggcgctttatggaacgagcaggtgggcctgaggggcctgggctcagagtccacgtccaaacgcaaagctggcagccctggaagtgcagtgttggggcgatggtgtggggggtcccgcagctcccctcttccttcctctgcagacgctggcgctgtctgccggaggtgttgcccaaaaggccctagtggggcgtggtcagctccacctcctgatcctgtgtgtcctccgacatgctgctgattctagtgacccctgtccccaccaggctcagagccagactgcgcctggaccttcttgttctgactccacgtgcctgcccggcctccagggtgcgggggcgcctttcttgcaggcggaccctgcccaggatggggccagcctcgtgctcagctttggccacaaatgcagcccctggcccaccccaccctgccggccctgccttctccagtatttcccacatggccacgactcctcagtcactagagcctcctgctgggaacagtgtcccccagagcctcatgtctatcctagaccctgcaagcagctgggtccccaagagtgcatctccccctagagttgcctgcccatgcccacctgctttgtaaccttcccaggagattcatgcttgctctgcacagcagggctcgaggcccaggccatgacacggaactgcctcaggtttgggtcagacctgcatcctggggcatctgctgaaatgtgagcacacaaaccacctcctttggcccagaagccccccaggcctagcatctcagtgccccaaccctctgcccagctgtggtatccagcaggtccttgggtccccacttgagcaggcacttggctgggatatggagcaatttaaagcccacaggggttgttcagtttctatgaaatggagcatggggtgcctgctagcctcaatcccccgaagtgggagcctcatgatagagtatagcttgggggtgggaggtgaggaaaatctgaggtacccaggggaacccccagctaactggtctctcagaggagtcccccagggcccgccagctatcacagggactcagaaacacccatttcctaatgacatggtgagtttcttgatttcttttttttgtttgttttgttttggttttcaacttggctgaccccgggtctatgatctattcacatcgaacccctgactggtctgcctggtgccagggtgagcgtgaccgtgagtgttgctttcgacagctggctcagcacacgctgtgtgaagggatctgagcttgttcatctccagtcgtgacttcatttcccttccttctgtcctcctcctgttcttgccttggacctgcaggtgtgcagaccgctctctctgccttccttgcatgtggccaccagccatccctgatcttgtccccagaggcccaggcagcctgtgatggctgtgaggggctgtcccactgtgtgggtatcccttacccagcacttaaacttggcaggagaggcagggcaaccctcacagggagatgggagggcacccaactcccacaagcatgcaacagcagtaggaattgggggtctgccccaggtgggtgagaccaaatgagtggatttggggccacaggctaggcaggagagacaaggggtaggtgggagggtcccccagtccatgctgaccccagtgtgtctccccggagatggctcctagctgagtgggacccggcaggagttggggacagtgctgtcccccacccctgcacacagccaggccctcaggctctgcggtcactcgcctccctgctggtcactggtcttggtctggagttatattttgatgccatgaagacactgtttatatctaatgtttatatattttaaagatttgtgccaagagagtatatttaataaaaacttaaatgacttctaaaaaaaaaaaaaaaaaaaaaaagaaaaaaaaaaaaaaaa

SEQ ID NO: 1805 - protein, 318 aa, Homo sapiens
MGNGVKEGPVRLHEDAEAVLSSSVSSKRDHRQVLSSLLPGALAGALAKTAVAPLDRTKIIFQVSSKRFSAKEAFRVLYYTYLNEGFLSLWRGNSATMVRVVPYAAIQFSAHEEYKRILGSYYGFRGEALPPWPRLFAGALAGTTAASLTYPLDLVRARMAVTPKEMYSNIFHVFIRISREEGLKTLYHGFMPTVLGVIPYAGLSFFTYETLKSLHREYSGRRQPYPFERMIFGACAGLIGQSASYPLDVVRRRMQTAGVTGYPRASIARTLRTIVREEGAVRGLYKGLSMNWVKGPIAVGISFTTFDLMQIMLRHLQS

SEQ ID NO: 1806 - DNA, 1795 bp, Homo sapiens
gggtgagtgcaccgcgttctcgcacgcgtcatggcggtcctcggagtacagctggtggtgaccctgctcactgccaccctcatgcacaggctggcgccacactgctccttcgcgcgctggctgctctgtaacggcagtttgttccgatacaagcacccgtctgaggaggagcttcgggccctggcggggaagccgaggcccagaggcaggaaagagcggtgggccaatggccttagtgaggagaagccactgtctgtgccccgagatgccccgttccagctggagacctgccccctcacgaccgtggatgccctggtcctgcgcttcttcctggagtaccagtggtttgtggactttgctgtgtactcgggcggcgtgtacctcttcacagaggcctactactacatgctgggaccagccaaggagactaacattgctgtgttctggtgcctgctcacagtgaccttctccatcaagatgttcctgacagtgacacggctgtacttcagcgccgaggaggggggtgagcgctctgtctgcctcacctttgccttcctcttcctgctgctggccatgctggtgcaagtggtgcgggaggagaccctcgagctgggcctggagcctggtctggccagcatgacccagaacttagagccacttctgaagaagcagggctgggactgggcgcttcctgtggccaagctggctatccgcgtgggactggcagtggtgggctctgtgctgggtgccttcctcaccttcccaggcctgcggctggcccagacccaccgggacgcactgaccatgtcggaggacagacccatgctgcagttcctcctgcacaccagcttcctgtctcccctgttcatcctgtggctctggacaaagcccattgcacgggacttcctgcaccagccgccgtttggggagacgcgtttctccctgctgtccgattctgccttcgactctgggcgcctctggttgctggtggtgctgtgcctgctgcggctggcggtgacccggccccacctgcaggcctacctgtgcctggccaaggcccgggtggagcagctgcgaagggaggctggccgcatcgaagcccgtgaaatccagcagagggtggtccgagtctactgctatgtgaccgtggtgagcttgcagtacctgacgccgctcatcctcaccctcaactgcacacttctgctcaagacgctgggaggctattcctggggcctgggcccagctcctctactatcccccgacccatcctcagccagcgctgcccccatcggctctggggaggacgaagtccagcagactgcagcgcggattgccggggccctgggtggcctgcttactcccctcttcctccgtggcgtcctggcctacctcatctggtggacggctgcctgccagctgctcgccagccttttcggcctctacttccaccagcacttggcaggctcctagctgcctgcagaccctccaggggccctgaggtctgttcctggggcagcgggacactagcctgccccctctgtttgcgcccccgtgtccccagctgcaaggtggggccggactccccggcgttcccttcaccacagtgcctgacccgcggccccccttggacgccgagtttctgcctcagaactgtctctcctgggcccagcagcatgagggtcccgaggccattgtctccgaagcgtatgtgccaggtttgagtggcgagggtgatgctggctgctcttctgaacaaataaaggagcatgccgatttttaaaaaaaaaaaaaaaaa

SEQ ID NO: 1807 - protein, 479 aa, Homo sapiens
MAVLGVQLVVTLLTATLMHRLAPHCSFARWLLCNGSLFRYKHPSEEELRALAGKPRPRGRKERWANGLSEEKPLSVPRDAPFQLETCPLTTVDALVLRFFLEYQWFVDFAVYSGGVYLFTEAYYYMLGPAKETNIAVFWCLLTVTFSIKMFLTVTRLYFSAEEGGERSVCLTFAFLFLLLAMLVQVVREETLELGLEPGLASMTQNLEPLLKKQGWDWALPVAKLAIRVGLAVVGSVLGAFLTFPGLRLAQTHRDALTMSEDRPMLQFLLHTSFLSPLFILWLWTKPIARDFLHQPPFGETRFSLLSDSAFDSGRLWLLVVLCLLRLAVTRPHLQAYLCLAKARVEQLRREAGRIEAREIQQRVVRVYCYVTVVSLQYLTPLILTLNCTLLLKTLGGYSWGLGPAPLLSPDPSSASAAPIGSGEDEVQQTAARIAGALGGLLTPLFLRGVLAYLIWWTAACQLLASLFGLYFHQHLAGS

SEQ ID NO: 1808 - DNA, 5665 bp, Homo sapiens
ctgctcctaggggcctagcctgtgtggccctctgacctgcagatattgggagatccacagctaagacgccaggaccccctagaagcctagaaatggatgacccgaggtatggaatgtgtcctctcaagggagcaagtggatgccctggggctgagaggagtcttctggtgcagtcttattttgaaaaggggccattgacgtttagggatgtggccatagaattctctctggaggagtggcaatgcctggacagtgctcagcagggtttgtataggaaagtgatgttagagaactacagaaacctggtcttcttggcaggtattgctctcactaagccagacctgatcacctgtctggagcaaggaaaagagccctggaatataaagagacatgagatggtagccaaacccccagttatatgttctcattttccccaagacctttgggcagagcaggacattaaagattcttttcaagaagcgattctgaaaaaatatggaaaatatggacatgacaatttacagttacaaaaaggctgtaaaagtgtggatgagtgtaaagtgcacaaagaacatgataacaaattaaaccagtgtttgataactacccagagcaacatatttcaatgtgatccatctgcaaaagtctttcatacattttcaaattcaaacagacataagataagacatactagaaagaaacctttcaaatgtaaaaaatgtgaaaaatcattttgcatgcttttacacctaactcaacataaaagatttcatattacagagaattcctaccaatgtaaagattgtggcaaagccttcaactggttctcaacccttactacacacaggagaattcatactggagagaaaccctacaaatgtgaagaatgtgggaaagcatttaaccggtcctcacaccttactacacataagataattcatactggagagaaaccatacagatgtgaagaatgtgggaaagcttttaaccggtcttcacaccttactacacataaaagaattcatactggagtgaaaccctacaaatgtacagaatgtggcaaagcttttaaccggtcctcacaccttactacacacaggataattcatactggagagaaaccctacaaatgtgaagaatgtggcaaagcctttaaccagtcctcaacccttactacacataagataactcatgctggagagaaaccttacaaatgtgaagaatgtggcaaagctttttaccgattctcataccttattaaacataagacaagtcatactggagagaaattctacaaatgtgaagaatgcggcaaaggctttaactggtcctcagccctcactaaacataagagaattcatactggagagaaaccctacaaatgtgaagaatgtggcaaagcttttaatgagtcctcaaaccttactacccataagatgattcatactggagagaaaccctacaaatgtgacgaatgtggcaaagcctttaaccggtcctcacaactaactgcacataagatgattcatactggagagaaaccctacaaatgtgaggaatgtggcaaagcttttaaccgatcctcaacccttactaaacataagataactcatactggagagaaatcttacaaatgggaagaatgtggtaaagactttaaccagtccctaagccttattaaacaaaataactcatactggagagaaaccctacaaatgtgaaaaatgtggcaaagccttttaccagtcctcaactcttactaaacataaaaaaattcatactggagggaactcctgtgactgtgaagaatatggcaaagcctttaataaattctcaattcctaacagacataattcatactagagagaaattctacaaaccagaaagatgtgacagtgctttgaaaacacctcaaacttttcaaaacataaatcatagtgttgagaaatcctagaaatgtgaagaatgtgataaagttttaaatggttgtcacacttgattgtaggtaaggtaagttatactggagaaaacttctacatgtgtgaacagtgtgacaaaacttttaactaatgctcacaccttcacaggaaagcatttatacttgagaaatattgtacaaatataaagactgtgaaaaagccattaatacatgctcacatcttactcaacatcagagagttcatactcaataaaaacataagtgcaactactgtcaaaatatctttaagaaaatataagcttttaaagtgaagagtattttgaagaagaacattgtagtagaattgtaatatgtttacttgtatcacagatcttactgtacacgttttgtattagaggaaacctctgaagcagttgctcaaactttgttcaatatcagggaatttatattgaaaaaaactgcgaatgtaataaagttggaaaaatactttttcaaaaactacagcttagaaaacaccagagagttcatactaaaacatatttttgcagatacaggaaaaattttttaaaaattttaatcattaagtctgtaaatatcagagaatttacagtagaaatatgtaaggcactgatgcttcaggtattttactaaatcagagtgctgagtatagaaaataatctaaaactaaaattggtaaaatatttgtatataactttaaaagtagaaattttttgcagttattgcattcaaagtatgcttaactttttgaaaaaattagattttttgaaaagtgagtaataatgtaattcaactcttaaattatttcctgccttttcttcactcctatttacatgtgaaagcatgtgatcaattgttgctgcatcagatatgagagattcttttttattaggtgagcattatttataaactttgctatgaaaaagacattaaaatatgagatgtatgatgaaaatctaagtgaagagacttttatggttaacttataatattaagcaatgtgtgcgttaggcattcagagtaatattctgcattatgagaaaacttaatttcatttataagtaaattaaaattagtatattttactaatacttttatataaaatgcagtatattttttaaatttcagattatatgtgatgttaatatattcaacctttttaacatgttaaatactattgtgcattcagtgaagtgttattatgccacagacattaacctattccaccttactcaagggtgtacgtaaaacatggtaacagtatactatttggtaacataatggattaacatctctagtaatctcttttgctagtggctttgactgcaaataagttaaagaatattatttctgtaggttaaatttttgtttttattttattttatttttgagaggtagtcttgctctgtcacccaggctggagtgcagtggcacgatctcggctcactgtaacctccacctcctgggttcacgcaattctcctgcctcagcctcctaagtagctgggattacaggcacccaccaccatgcccagctaatttttgtattttagtagagacagggtttcataatgtaagtcaagctggtctcgaactcctgaccttaaatgatttgcctgcctcggcttcccaaagttctgggattacaggcatgagccaccgtgcccagccaaatgtttattttatttaaatttatttttcttaattatttggggtacataatatgagtatatattcatgcaatatatggcatattttgatacaagaatacagtatataataatcacatcagggtaaatgaggtatccatcacctctagtatttatcctttgtattacaagcaacccagttttatacttttagttattttaaaatgtaaaattaaattgttattgattacagtgttatttttatggtcataataaaagttatgtagaagtataataaaatccctacatttctgaggcctgaataagtatttttaaagttttctaatatttattttttgagcatgtttcctgtctgcctgcaaacacatgcagacatttagttttgatttacatatagttaaatatatgttagtctaaagataaaccttaagtgtaagaaaattatagagtgagtttgtgtgtatgaatttgtacctgttttccgaagaaaaaagcaatactgaacaaaacaaatcattttaacaagatgactactagaaaactaaaagcctcaaaaatgctaaaagaaaatgtattctctgctttgtattgaatttattactgtacattctgtggcttatagttctgaatctccccatgaaaattctgtttatacttgcctggtactcatgatagacccctaattattttgtatcttttttcatataaatattttacagattatgaagtattcattatgtgagctggtctgtgattataagaataatttttacaaaatttagtgcatacaaaatttttaaatgtaattccacaattagtgtattaagttacattttatttagttagaacacttcattttgtttttagttggagaactctatagccctttagttatttttcttttcactttttatagttgacataagtaaatttatttattgagtcaatttgttcaggtaagtactagggaagctttataagtcgtgaggatgtttttatatttaaatgtagcaaacatacatgacagttcttgctgtgtaacagatgctccatagtaagccataagtattcctgctaaagttagcttgtaacttcagttcagagatggaaaacatcagtggtgaagaaataaaattgattcttcatgtggagaggacatagtttccaggctgcaatgctgaatcttgctgaatttaaagagaagttctgcatcttttatttcttaattatcttcagatttctctgtatttattatgtgtatccccagctatgtatgcagcacagcccatctcctttttctgtgttatggcttcagttttctcactgttgtcttaatgccatttcatttcacatggtactttgtaaattttgacgagaaagttggttgttttttttttttttttttttttgagacagagtctcactcttgttgcccaagctggagtgcagtggtgcaatgtgggctcactgcaacctctgccttccaggttcaagcaattatcctgcctcagcctcccaagtagctgggattacaggcacctgccaccacatctggctgaattttttttttttttttaattttttgtagagacgaagtttcaccatgttggccaggctggtttcaaactcctgacctcatatgatccacctgcctcagcctcccaaagtgcttggattacaggcataagccactgcacccagctgaaagttggtattttttaatgcactgaataattgtttttaactggagagtttggttatcaatataactttcggattagttaagataaaagcatacattgtccacaggtgagaagattaaatcagaatagttgttctttgttaaaaaaaaaattagattcttaaagtgtggcaaacataaaatttgcaagaaaatgtagaaattaaatttttaagagttaatggtaagtgaacaattttaaatttattttttattatgtaacatacttttattaaaatatatacttatataataaaagtataacaattaaaaaaaaaaaaaaaaaaaaaaaaaaaaa

SEQ ID NO: 1809 - protein, 542 aa, Homo sapiens
MDDPRYGMCPLKGASGCPGAERSLLVQSYFEKGPLTFRDVAIEFSLEEWQCLDSAQQGLYRKVMLENYRNLVFLAGIALTKPDLITCLEQGKEPWNIKRHEMVAKPPVICSHFPQDLWAEQDIKDSFQEAILKKYGKYGHDNLQLQKGCKSVDECKVHKEHDNKLNQCLITTQSNIFQCDPSAKVFHTFSNSNRHKIRHTRKKPFKCKKCEKSFCMLLHLTQHKRFHITENSYQCKDCGKAFNWFSTLTTHRRIHTGEKPYKCEECGKAFNRSSHLTTHKIIHTGEKPYRCEECGKAFNRSSHLTTHKRIHTGVKPYKCTECGKAFNRSSHLTTHRIIHTGEKPYKCEECGKAFNQSSTLTTHKITHAGEKPYKCEECGKAFYRFSYLIKHKTSHTGEKFYKCEECGKGFNWSSALTKHKRIHTGEKPYKCEECGKAFNESSNLTTHKMIHTGEKPYKCDECGKAFNRSSQLTAHKMIHTGEKPYKCEECGKAFNRSSTLTKHKITHTGEKSYKWEECGKDFNQSLSLIKQNNSYWRETLQM

SEQ ID NO: 1810 - DNA, 5225 bp, Homo sapiens
ttggagctctgcgtctcgtcttcgttcttctgtgtcctctgctgctagaggtccagcctctgtggctctgtgacctgcgggtattgggggatccacagctaagacgccaggaccccccggaagcctagaaatgggaccattgacatttatggatgtggccatagaattctgtctggaggagtggcaatgcctggacattgcacagcagaatttatataggaatgtgatgttagagaactacagaaacctggtcttcctgggtattgctgtctctaagccagacctgatcacctgtctggagcaagaaaaagagccttgggagcctatgaggagacatgaaatggtagccaaacccccagttatgtgttctcattttacccaagacttttggccagagcagcatataaaagatcctttccaaaaagcgacactgagaagatataaaaactgtgaacataaaaatgtacatttaaaaaaagaccataaaagtgtggatgagtgtaaggtgcacagaggaggttataatggatttaaccaatgtttgccagctacccagagcaaaatatttctatttgataaatgtgtgaaagcctttcataaattttcaaattcaaacagacataagataagccatactgaaaaaaaacttttcaaatgcaaagaatgtggcaaatcattttgcatgcttccacatctagctcaacataaaataattcataccagagtgaatttctgcaaatgtgaaaaatgtggaaaagcttttaactgcccttcaatcatcactaaacataagagaattaatactggagagaaaccctacacatgtgaagaatgtggcaaagtctttaattggtcctcacgccttactacacataaaaaaaattatactagatacaaactctacaaatgtgaagaatgtggcaaagcttttaacaagtcctcaatccttactacccataagataattcgcactggagagaaattctacaaatgtaaagaatgtgccaaagcttttaaccaatcctcaaaccttactgaacataagaaaattcatcctggagagaaaccttacaaatgtgaagaatgtggcaaagcctttaactggccctcaactcttactaaacataagagaattcatactggagagaaaccctacacatgtgaagaatgtggcaaagcctttaaccagttctcaaaccttactacacataagagaatccatactgcagagaaattctataaatgtacagaatgtggtgaagcttttagccggtcctcaaaccttactaaacataagaaaattcatactgaaaagaaaccctacaaatgtgaagaatgtggcaaagcttttaagtggtcctcaaagcttactgaacataagttaactcatactggagagaaaccctacaaatgtgaagaatgtggcaaagcctttaactggccctcaacccttactaaacataacagaattcatactggagagaaaccctacaaatgtgaagtatgtggcaaagcctttaaccagttctcaaaccttactacacataagagaattcatactgcagaaaaaccgtacaaatgtgaagaatgtggcaaagcttttagccggtcctcaaaccttactaaacataagaaaattcacattgaaaagaaaccctacaaatgtgaagaatgtggcaaagcttttaagtggtcctcaaagcttactgaacataagataactcatactggagagaaaccctacaaatgtgaagaatgtggcaaagcttttaaccatttctcaatccttaccaaacataagaggattcatactggagagaaaccctacaagtgtgaagaatgtggcaaagcttttacccaatcctcaaaccttactacacataagaaaattcatactggagagaaattctacaaatgtgaagaatgtggcaaagcttttacccaatcttcaaaccttactacacataaaaaaattcatactggaggaaaaccctacaaatgtgaagaatgtggcaaagcttttaaccagttctcaactcttactaaacataagataattcacactgaggagaaaccctacaaatgtgaagaatgtggcaaagcctttaagtggtcctcaacccttactaaacataagataattcatactggagagaaaccctacaaatgtgaagaatgtggcaaagcttttaaactgtcctcaaccctttctacacataagattattcatactggagagaaaccctacaaatgtgaaaaatgtggcaaagcttttaaccgatcctcaaaccttattgaacataagaaaattcatactggagagcaaccctacaaatgtgaagaatgtggcaaagcatttaactattcctcacaccttaatacacataagagaattcatactaaagagcaaccctacaaatgtaaagaatgtggcaaagctttcaaccaatattcaaaccttactacacataacaaaattcatactggagagaaactctacaaacctgaagatgtgacagtgattttgacaacacctcaaactttttcaaacataaaataaattatactggtgagaaattctagaaatgtaaagaatgtgataaaggctttacatggttgtcacacttgattgtaggtaagataatttacattggagtaaacttctacaagtgtgaagaatgtggcaaaacttttaattaatgctcgtaccttattgcacaggaaagaatttttacttggaaaaaggtatatacacaaagaatgtggaaaagccattaatatgtgctcatatcttactcaacatcagagagtctgtacttaataaaaccattatagatgcaactagtgtcaaaagatctttcagaaaataaaagcctttaaagtgaagaagataattcattctgaagacaaacattacaaatattaagagggttgtagtaccattacttgcatcacagatcttattgtacacattttgtactaaagaaaaccctgaagcagttgctcaaatactgttcaacatcagaaaatttatattggaaaaaacccctggaaaatgtaataaatttgtaaaaacagttttgaaaaactacagcttataaaacatgagggtctataatgcttggttgatagtacaaagtttattcaacatcagggaatttatattggagaaaaaccctacaaatgtaatcagtttggaaaaacatttttaaaaaaaccacagcatagaaaacaccacagggttcatactaaaatatgtttttgcagatgcagtaaaaatgaaaaaaatttaatccgaaattaagtttatgtaaatatctgagaattcacagtagaaatatctaaggcgcggacacttcagacattacactaaatcagtgctaagtacagaaaacaacacaaaataaaacttggtggataaattatttgtatataacattaaaagaagtagaagattttcagttataattacaattaaagtatacttttatcttgaaaaaattactgatttttaaattagtgaataatgatgtaattaaactctcaaataactttatgctcttttttcattcctgctatattcacatgtgaaagcatgtgaccaattgttgctgcaccaaagatatgagagattcttttattaggtgggcattatttaaaacattttttatggaacagtaaggatattaaagtgtaagatgcagccaggcatggtggctcatgcctataatcccagcactttgggaggctgaggccggtggatcacctgaggtcaggagtttgagaccagcctgaccaacatggtgaaaccctgtctttactaaaaatacaaaaatttaccaggcacctataatcccagctacttcaaaggctgaagcaggagaatcacttgaacctggaaagtggaggtctcagtgagccgaaatcataccattgcactccaacctgggcaacaaaagtcaaactccatctcaaaaagaaaaaaaaaaaaaaaaaagatgcgtgatgaaaatgtaactggagaggctctttgtggttaacttataaaggagtgatgcaggagataggttttcagagtaatattcttctgcattatagtgacaaaagttttttattttagttaaaattggttaaattagtaagtcattttacttattgtaattttatgtaattaaatgtacatttttaaatttttagattacatgtaaatataacttttaaaaaaatgtgttaagaccattgtacattcaatgaagcattattatgcttctaactttaacctatttcaccttactcaagagtgtatgtaaaagatggtaacaatatactatttggtaacataatggactaacatttctattaatctatttcaccagtggctttcaactgcaaataagttaaagaatatttttctataggttaaatattcttttttgtcttatttaaacttactgttcttaatttctgtgggtacatagtatgattttaattaccttattttattctttgtgctattcataattttttttgtttgtttggtttttttttttgagacagagtcttgctctcgcccaggctggagtgcagtggcgcgatcttggctcactgcaagctccgcctcccaggttcactccattctcctgcctcagcctcccaagtagctgggaccacaggcgcccactacttgtttgggtttttttttggagatggagtctcgctctgtcacccaggctggagtacagtggcatgatcttggctcactgcaacccccacctccccggttcaagtgattctcctgcctcagcctcccgaatagctgggattacaggcgtccaccatcacaccaggctaatttttgtatttttagtagagatggagtttcaccatgttggccaggatggtctcgatcttctgacctcatgatctgcctgcctcggcctcccagagttctgggaccacaggcatgagccactgcacctggccaaatgtgtatatatttatgcaatatataacatgttttgatacaggcatataatatgtattagtcacatcaggataaagtatctattaccttcagcatttatcctttgtattacaagccaattctacacttcattattttaatgtacaattaaattgttattgactacagggtcattttaattataaaaattatatagaagtataaataaagtccatacattcctgagtcatgaaaaaaaaaa

SEQ ID NO: 1811 - protein, 809 aa, Homo sapiens
MGPLTFMDVAIEFCLEEWQCLDIAQQNLYRNVMLENYRNLVFLGIAVSKPDLITCLEQEKEPWEPMRRHEMVAKPPVMCSHFTQDFWPEQHIKDPFQKATLRRYKNCEHKNVHLKKDHKSVDECKVHRGGYNGFNQCLPATQSKIFLFDKCVKAFHKFSNSNRHKISHTEKKLFKCKECGKSFCMLPHLAQHKIIHTRVNFCKCEKCGKAFNCPSIITKHKRINTGEKPYTCEECGKVFNWSSRLTTHKKNYTRYKLYKCEECGKAFNKSSILTTHKIIRTGEKFYKCKECAKAFNQSSNLTEHKKIHPGEKPYKCEECGKAFNWPSTLTKHKRIHTGEKPYTCEECGKAFNQFSNLTTHKRIHTAEKFYKCTECGEAFSRSSNLTKHKKIHTEKKPYKCEECGKAFKWSSKLTEHKLTHTGEKPYKCEECGKAFNWPSTLTKHNRIHTGEKPYKCEVCGKAFNQFSNLTTHKRIHTAEKPYKCEECGKAFSRSSNLTKHKKIHIEKKPYKCEECGKAFKWSSKLTEHKITHTGEKPYKCEECGKAFNHFSILTKHKRIHTGEKPYKCEECGKAFTQSSNLTTHKKIHTGEKFYKCEECGKAFTQSSNLTTHKKIHTGGKPYKCEECGKAFNQFSTLTKHKIIHTEEKPYKCEECGKAFKWSSTLTKHKIIHTGEKPYKCEECGKAFKLSSTLSTHKIIHTGEKPYKCEKCGKAFNRSSNLIEHKKIHTGEQPYKCEECGKAFNYSSHLNTHKRIHTKEQPYKCKECGKAFNQYSNLTTHNKIHTGEKLYKPEDVTVILTTPQTFSNIK

SEQ ID NO: 1812 - DNA, 415 bp, Homo sapiens
aaacttgacgccatgaagatcccggtccttcctgccgtggtgctcctctccctcctggtgctccactctgcccagggagccaccctgggtggtcctgaggaagaaagcaccattgagaattatgcgtcacgacccgaggcctttaacaccccgttcctgaacatcgacaaattgcgatctgcgtttaaggctgatgagttcctgaactggcacgccctctttgagtctatcaaaaggaaacttcctttcctcaactgggatgcctttcctaagctgaaaggactgaggagcgcaactcctgatgcccagtgaccatgacctccactggaagagggggctagcgtgagcgctgattctcaacctaccataactctttcctgcctcaggaactccaataaaacattttccatccaaa

SEQ ID NO: 1813 - protein, 99 aa, Homo sapiens
MKIPVLPAVVLLSLLVLHSAQGATLGGPEEESTIENYASRPEAFNTPFLNIDKLRSAFKADEFLNWHALFESIKRKLPFLNWDAFPKLKGLRSATPDAQ

SEQ ID NO: 1814 - DNA, 607 bp, Homo sapiens
aagcacatgaacatgaagccggccactgcctctgctctgctcctgctcctgctgggcctggcctggacccaggggagccacggctggggtgcggacgcgtcatcactgcagaaacgtgcaggcagagccgatcagaactacaattacaaccagcatgcgtatcccactgcctatggtgggaagtactcagtcaagacccctgcaaaggggggagtctcaccttcttcctcggcttcccgggtgcaacctggcctgctgcagtgggtgaagttttggtaggcaatttcttgcaaccaccaccgaggccccgaaaagcactggtcgtcagggagctcctccccttggcccccagcctgtgccagccctggcccggctgccacacctctgtttcctaggctggggacccagcttgtctctccttgtttcttcccactgcactgtggtgcttcagtggccaccagcctcgtcacatacaccagcatctttctgtacctcctccctttggtgacctgaagtcactgtgacagttctccaggaaggaggagcttcctacttttgagtttctctgtggaaataaaacatgaatcttgtttccctaaaaaaaaaa

SEQ ID NO: 1815 - protein, 90 aa, Homo sapiens
MNMKPATASALLLLLLGLAWTQGSHGWGADASSLQKRAGRADQNYNYNQHAYPTAYGGKYSVKTPAKGGVSPSSSASRVQPGLLQWVKFW

SEQ ID NO: 1816 - DNA, 1982 bp, Homo sapiens
tctgagaagcccaggcagttgaggacaggagagagaaggctgcagacccagagggagggaggacagggagtcggaaggaggaggacagaggagggcacagagacgcagagcaagggcggcaaggaggagaccctggtgggaggaagacactctggagagagagggggctgggcagagatgaagttccaggggcccctggcctgcctcctgctggccctctgcctgggcagtggggaggctggccccctgcagagcggagaggaaagcactgggacaaatattggggaggcccttggacatggcctgggagacgccctgagcgaaggggtgggaaaggccattggcaaagaggccggaggggcagctggctctaaagtcagtgaggcccttggccaagggaccagagaagcagttggcactggagtcaggcaggttccaggctttggcgcagcagatgctttgggcaacagggtcggggaagcagcccatgctctgggaaacactgggcacgagattggcagacaggcagaagatgtcattcgacacggagcagatgctgtccgcggctcctggcagggggtgcctggccacaatggtgcttgggaaacttctggaggccatggcatctttggctctcaaggtggccttggaggccagggccagggcaatcctggaggtctggggactccgtgggtccacggataccccggaaactcagcaggcagctttggaatgaatcctcagggagctccctggggtcaaggaggcaatggagggccaccaaactttgggaccaacactcagggagctgtggcccagcctggctatggttcagtgagagccagcaaccagaatgaagggtgcacgaatcccccaccatctggctcaggtggaggctccagcaactctgggggaggcagcggctcacagtcgggcagcagtggcagtggcagcaatggtgacaacaacaatggcagcagcagtggtggcagcagcagtggcagcagcagtggcggcagcagtggcggcagcagtggtggcagcagtggcaacagtggtggcagcagaggtgacagcggcagtgagtcctcctggggatccagcaccggctcctcctccggcaaccacggtgggagcggcggaggaaatggacataaacccgggtgtgaaaagccagggaatgaagcccgcgggagcggggaatctgggattcagaactctgagacgtctcctgggatgtttaactttgacactttctggaagaattttaaatccaagctgggtttcatcaactgggatgccataaacaagaaccaggtcccgccccccagcacccgagccctcctctacttcagccgactctgggaggatttcaaacagaacactcctttcctcaactggaaagcaattattgagggtgcggacgcgtcatcactgcagaaacgtgcaggcagagccgatcagaactacaattacaaccagcatgcgtatcccactgcctatggtgggaagtactcagtcaagacccctgcaaaggggggagtctcaccttcttcctcggcttcccgggtgcaacctggcctgctgcagtgggtgaagttttggtaggcaatttcttgcaaccaccaccgaggccccgaaaagcactggtcgtcagggagctcctccccttggcccccagcctgtgccagccctggcccggctgccacacctctgtttcctaggctggggacccagcttgtctctccttgtttcttcccactgcactgtggtgcttcagtggccaccagcctcgtcacatacaccagcatctttctgtacctcctccctttggtgacctgaagtcactgtgacagttctccaggaaggaggagcttcctacttttgagtttctctgtggaaataaaacatgaatcttgtttccctaaaaaaaaaaaaaaaaaaaaaaaaaaaaaaaaaaaaaaaaaaaaaaaaaaaaaaaa

SEQ ID NO: 1817 - protein, 476 aa, Homo sapiens
MKFQGPLACLLLALCLGSGEAGPLQSGEESTGTNIGEALGHGLGDALSEGVGKAIGKEAGGAAGSKVSEALGQGTREAVGTGVRQVPGFGAADALGNRVGEAAHALGNTGHEIGRQAEDVIRHGADAVRGSWQGVPGHNGAWETSGGHGIFGSQGGLGGQGQGNPGGLGTPWVHGYPGNSAGSFGMNPQGAPWGQGGNGGPPNFGTNTQGAVAQPGYGSVRASNQNEGCTNPPPSGSGGGSSNSGGGSGSQSGSSGSGSNGDNNNGSSSGGSSSGSSSGGSSGGSSGGSSGNSGGSRGDSGSESSWGSSTGSSSGNHGGSGGGNGHKPGCEKPGNEARGSGESGIQNSETSPGMFNFDTFWKNFKSKLGFINWDAINKNQVPPPSTRALLYFSRLWEDFKQNTPFLNWKAIIEGADASSLQKRAGRADQNYNYNQHAYPTAYGGKYSVKTPAKGGVSPSSSASRVQPGLLQWVKFW

SEQ ID NO: 1818 - DNA, 2166 bp, Homo sapiens
agaattctttggcaggggcgaccttagaatcctggggaggagcgagaatggaatcccggggaggaacaggggtggaatccggggggcggggtcagaacgccaggagggggcggggccggagccagggtcggcttgactcgggggagcagcgggtggatcctgtgacgtcagcgggttcgaaccgccggagctgagcgagaggccgggggtgccgagccgggcggggagagctgggccgggagagcagaacagggaggctagagcgcagcgggaaccggcccggagccggagccggagccccacaggcacctactaaaccgcccagccgatcggcccccacagagtggcccgcgggcctccggccgggcccagtcccctcccgggccctccatggcccgggccgctgccctcctgccgtcgagatcgccgccgacgccgctgctgtggccgctgctgctgctgctgctcctggaaaccggagcccaggatgtgcgagttcaagtgctacccgaggtgcgaggccagctcgggggcaccgtggagctgccgtgccacctgctgccacctgttcctggactgtacatctccctggtgacctggcagcgcccagatgcacctgcgaaccaccagaatgtggccgccttccaccctaagatgggtcccagcttccccagcccgaagcctggcagcgagcggctgtccttcgtctctgccaagcagagcactgggcaagacacagaggcagagctccaggacgccacgctggccctccacgggctcacggtggaggacgagggcaactacacttgcgagtttgccaccttccccaaggggtccgtccgagggatgacctggctcagagtcatagccaagcccaagaaccaagctgaggcccagaaggtcacgttcagccaggaccctacgacagtggccctctgcatctccaaagagggccgcccacctgcccggatctcctggctctcatccctggactgggaagccaaagagactcaggtgtcagggaccctggccggaactgtcactgtcaccagccgcttcaccttggtgccctcgggccgagcagatggtgtcacggtcacctgcaaagtggagcatgagagcttcgaggaaccagccctgatacctgtgaccctctctgtacgctaccctcctgaagtgtccatctccggctatgatgacaactggtacctcggccgtactgatgccaccctgagctgtgacgtccgcagcaacccagagcccacgggctatgactggagcacgacctcaggcaccttcccgacctccgcagtggcccagggctcccagctggtcatccacgcagtggacagtctgttcaataccaccttcgtctgcacagtcaccaatgccgtgggcatgggccgcgctgagcaggtcatctttgtccgagaaacccccagggcctcgccccgagatgtgggcccgctggtgtggggggccgtgggggggacactgctggtgctgctgcttctggctggggggtccttggccttcatcctgctgagggtgaggaggaggaggaagagccctggaggagcaggaggaggagccagtggcgacgggggattctacgatccgaaagctcaggtgttgggaaatggggaccccgtcttctggacaccagtagtccctggtcccatggaaccagatggcaaggatgaggaggaggaggaggaggaagagaaggcagagaaaggcctcatgttgcctccacccccagcactcgaggatgacatggagtcccagctggacggctccctcatctcacggcgggcagtttatgtgtgacctggacacagacagagacagagccaggcccggccctcccgcccccgacctgaccacgccggcctagggttccagactggttggacttgttcgtctggacgacactggagtggaacactgcctcccactttcttgggacttggagggaggtggaacagcacactggacttctcccgtctctagggctgcatggggagcccggggagctgagtagtggggatccagagaggacccccgcccccagagacttggttttggctccagccttcccctggccccgtgacactcaggagttaataaatgccttggaggaaaacatcaaaaaaaaaaaaaaaa

SEQ ID NO: 1819 - protein, 479 aa, Homo sapiens
MARAAALLPSRSPPTPLLWPLLLLLLLETGAQDVRVQVLPEVRGQLGGTVELPCHLLPPVPGLYISLVTWQRPDAPANHQNVAAFHPKMGPSFPSPKPGSERLSFVSAKQSTGQDTEAELQDATLALHGLTVEDEGNYTCEFATFPKGSVRGMTWLRVIAKPKNQAEAQKVTFSQDPTTVALCISKEGRPPARISWLSSLDWEAKETQVSGTLAGTVTVTSRFTLVPSGRADGVTVTCKVEHESFEEPALIPVTLSVRYPPEVSISGYDDNWYLGRTDATLSCDVRSNPEPTGYDWSTTSGTFPTSAVAQGSQLVIHAVDSLFNTTFVCTVTNAVGMGRAEQVIFVRETPRASPRDVGPLVWGAVGGTLLVLLLLAGGSLAFILLRVRRRRKSPGGAGGGASGDGGFYDPKAQVLGNGDPVFWTPVVPGPMEPDGKDEEEEEEEEKAEKGLMLPPPPALEDDMESQLDGSLISRRAVYV

SEQ ID NO: 1820 - DNA, 1281 bp, Homo sapiens
ctcccaaagtgctgggattacaggagtgtgccactgcgcctgaccagctttataaagtttatagggacagtgtcaccactttacagaagagggactgaggctctgaggaggaagttccttgccagggtccgagtgtcgccaccctgagaactccagcacccacctccctactctccctcatggcgtctcccccacctttccacagccagaagttgccaggtgaatacttccggtacaagggcgtccccttccccgtcggcctgtactcgctcgagagcatcagcttggcggagaacacccaagatgtgcgggacgacgacatctttatcatcacctaccccaagtcaggcacgacctggatgatcgagatcatctgcttaatcctgaaggaaggggatccatcctggatccgctccgtgcccatctgggagcgggcaccctggtgtgagaccattgtgggtgccttcagcctcccggaccagtacagcccccgcctcatgagctcccatcttcccatccagatcttcaccaaggccttcttcagctccaaggccaaggtgatctacatgggccgcaacccccgggacgttgtggtctccctctatcattactccaagatcgccgggcagttaaaggacccgggcacacccgaccagttcctgagggacttcctcaaaggcgaagtgcagtttggctcctggttcgaccacattaagggctggcttcggatgaagggcaaagacaacttcctatttatcacctacgaggagctgcagcaggacttacagggctccgtggagcgcatctgtgggttcctgggccgtccgctgggcaaggaggcactgggctccgtcgtggcacactcaaccttcagcgccatgaaggccaacaccatgtccaactacacgctgctgcctcccagcctgctggaccaccgtcgcggggccttcctccggaaaggggtctgcggcgactggaagaaccacttcacggtggcccagagcgaagccttcgatcgtgcctaccgcaagcagatgcgggggatgccgaccttcccctgggatgaagacccggaggaggacggcagcccagatcctgagcccagccctgagcctgagcccaagcccagccttgagcccaacaccagcctggagcgtgagcccagacccaactccagccccagccccagccccggccaggcctctgagaccccgcacccacgaccctcataataaacacgtcgattctgtccaaaaaaaaaaaaaaaaaaaaaaaaaaaaa

SEQ ID NO: 1821 - protein, 350 aa, Homo sapiens
MASPPPFHSQKLPGEYFRYKGVPFPVGLYSLESISLAENTQDVRDDDIFIITYPKSGTTWMIEIICLILKEGDPSWIRSVPIWERAPWCETIVGAFSLPDQYSPRLMSSHLPIQIFTKAFFSSKAKVIYMGRNPRDVVVSLYHYSKIAGQLKDPGTPDQFLRDFLKGEVQFGSWFDHIKGWLRMKGKDNFLFITYEELQQDLQGSVERICGFLGRPLGKEALGSVVAHSTFSAMKANTMSNYTLLPPSLLDHRRGAFLRKGVCGDWKNHFTVAQSEAFDRAYRKQMRGMPTFPWDEDPEEDGSPDPEPSPEPEPKPSLEPNTSLEREPRPNSSPSPSPGQASETPHPRPS

SEQ ID NO: 1822 - DNA, 1228 bp, Homo sapiens
agacgctgtcgctgcgcacacctggcctctgtgccgcctgctccctgctcgtcctcccctccccaccctcacccacctgccatggacgggcccgccgagccccagatcccgggcttgtgggacacctatgaagatgacatctcggaaatcagccagaagttgccaggtgaatacttccggtacaagggcgtccccttccccgtcggcctgtactcgctcgagagcatcagcttggcggagaacacccaagatgtgcgggacgacgacatctttatcatcacctaccccaagtcaggcacgacctggatgatcgagatcatctgcttaatcctgaaggaaggggatccatcctggatccgctccgtgcccatctgggagcgggcaccctggtgtgagaccattgtgggtgccttcagcctcccggaccagtacagcccccgcctcatgagctcccatcttcccatccagatcttcaccaaggccttcttcagctccaaggccaaggtgatctacatgggccgcaacccccgggacgttgtggtctccctctatcattactccaagatcgccgggcagttaaaggacccgggcacacccgaccagttcctgagggacttcctcaaaggcgaagtgcagtttggctcctggttcgaccacattaagggctggcttcggatgaagggcaaagacaacttcctatttatcacctacgaggagctgcagcaggacttacagggctccgtggagcgcatctgtgggttcctgggccgtccgctgggcaaggaggcactgggctccgtcgtggcacactcaaccttcagcgccatgaaggccaacaccatgtccaactacacgctgctgcctcccagcctgctggaccaccgtcgcggggccttcctccggaaaggggtctgcggcgactggaagaaccacttcacggtggcccagagcgaagccttcgatcgtgcctaccgcaagcagatgcgggggatgccgaccttcccctgggatgaagacccggaggaggacggcagcccagatcctgagcccagccctgagcctgagcccaagcccagccttgagcccaacaccagcctggagcgtgagcccagacccaactccagccccagccccagccccggccaggcctctgagaccccgcacccacgaccctcataataaacacgtcgattctgtccaaaaaaaaaaaaaaaaaaaaaaaaaaaaa

SEQ ID NO: 1823 - protein, 365 aa, Homo sapiens
MDGPAEPQIPGLWDTYEDDISEISQKLPGEYFRYKGVPFPVGLYSLESISLAENTQDVRDDDIFIITYPKSGTTWMIEIICLILKEGDPSWIRSVPIWERAPWCETIVGAFSLPDQYSPRLMSSHLPIQIFTKAFFSSKAKVIYMGRNPRDVVVSLYHYSKIAGQLKDPGTPDQFLRDFLKGEVQFGSWFDHIKGWLRMKGKDNFLFITYEELQQDLQGSVERICGFLGRPLGKEALGSVVAHSTFSAMKANTMSNYTLLPPSLLDHRRGAFLRKGVCGDWKNHFTVAQSEAFDRAYRKQMRGMPTFPWDEDPEEDGSPDPEPSPEPEPKPSLEPNTSLEREPRPNSSPSPSPGQASETPHPRPS

SEQ ID NO: 1824 - DNA, 1071 bp, Homo sapiens
atgaatggggtctcggaggggaccagaggctgcagtgacaggcaacctggggtcctgacacgtgatcgctcttgttccaggaagatgaactcttccggatgcctgtctgaggaggtggggtccctccgcccactgactgtggttatcctgtctgcgtccattgtcgtcggagtgctgggcaatgggctggtgctgtggatgactgtcttccgtatggcacgcacggtctccaccgtctgcttcttccacctggcccttgccgatttcatgctctcactgtctctgcccattgccatgtactatattgtctccaggcagtggctcctcggagagtgggcctgcaaactctacatcacctttgtgttcctcagctactttgccagtaactgcctccttgtcttcatctctgtggaccgttgcatctctgtcctctaccccgtctgggccctgaaccaccgcactgtgcagcgggcgagctggctggcctttggggtgtggctcctggccgccgccttgtgctctgcgcacctgaaattccggacaaccagaaaatggaatggctgtacgcactgctacttggcgttcaactctgacaatgagactgcccagatttggattgaaggggtcgtggagggacacattatagggaccattggccacttcctgctgggcttcctggggcccttagcaatcataggcacctgcgcccacctcatccgggccaagctcttgcgggagggctgggtccatgccaaccggcccaagaggctgctgctggtgctggtgagcgctttctttatcttctggtccccgtttaacgtggtgctgttggtccatctgtggcgacgggtgatgctcaaggaaatctaccacccccggatgctgctcatcctccaggctagctttgccttgggctgtgtcaacagcagcctcaaccccttcctctacgtcttcgttggcagagatttccaagaaaagtttttccagtctttgacttctgccctggcgagggcgtttggagaggaggagtttctgtcatcctgtccccgtggcaacgccccccgggaatga

SEQ ID NO: 1825 - protein, 356 aa, Homo sapiens
MNGVSEGTRGCSDRQPGVLTRDRSCSRKMNSSGCLSEEVGSLRPLTVVILSASIVVGVLGNGLVLWMTVFRMARTVSTVCFFHLALADFMLSLSLPIAMYYIVSRQWLLGEWACKLYITFVFLSYFASNCLLVFISVDRCISVLYPVWALNHRTVQRASWLAFGVWLLAAALCSAHLKFRTTRKWNGCTHCYLAFNSDNETAQIWIEGVVEGHIIGTIGHFLLGFLGPLAIIGTCAHLIRAKLLREGWVHANRPKRLLLVLVSAFFIFWSPFNVVLLVHLWRRVMLKEIYHPRMLLILQASFALGCVNSSLNPFLYVFVGRDFQEKFFQSLTSALARAFGEEEFLSSCPRGNAPRE

SEQ ID NO: 1826 - DNA, 3153 bp, Homo sapiens
aatgctgtgtatttacttgaactcatacatcagaagatagtgatcttaacacattatgtttgggaagtttaaaatatctcttccaaatgcttgatgaaaaaggtgggaggatcacttgagccagggagttgaaggctgcagtgagccctgtttttgccaccacactccagcttggagaggtgaggggctgtcctctggatggcaattgatgaaggatgagtctgtgccctgaaggggagatcagtccagcccagctccccactgctgcctcgtgtgtggtggcttctccaggagagaggattgattcctaaagactcatgttacgtgaggaagcagctcagaagaggaaaggaaaggagccaggcatggctcttcctcagggacgcttgactttccgggatgtggctatagaattctcattggcagagtggaaatgcctgaacccttcacagagggctttgtacagggaagtgatgttggagaactacaggaacctggaggctgtggatatctcttccaaatgcatgatgaaggaggtcttgtcaacagggcaaggcaatacagaagtgatccacacagggacattgcaaagacatgaaagtcatcacattggagatttttgcttccaggaaattgagaaagaaattcatgacattgagtttcagtgtcaagaagatgaaagagatggccttgaagcacccatgacaaaaataaaaaagttgactggtagcacagaccaacatgatcacaggcatgctggaaacaagcctattaaagatcagcttggatcaagcttttattcacatctgcctgaactccacatatttcagatcaaaggtgaaattggtaatcaacttgagaagtctactaatgatgctccctcagtttcaacattccaaagaatttcctgtaggccccaaacccagatttctaataactatgggaataatcccctgaattcttcattactcccacaaaaacaggaagtacacatgagagaaaaatctttccaatgtaataagagtggcaaagcctttaattgtagctcactcttaaggaaacaccagataatccatttaggagacaaacaatataaatgtgatgtatgtggcaagctctttaatcacgagcaataccttgcatgccatgatagatgtcacactgttgagaaaccttacaagtgtaaagagtgtggcaagaccttcagtcaggagtcatcccttacctgccatcgtagacttcatactggagtaaaacgttacaattgtaatgagtgtggcaagatctttggtcaaaattcagcccttctaattgataaggcaattgatactggagaaaatccttacaagtgtaatgaatgtgacaaagcttttaatcaacaatcacaactttcacatcatagaattcatactggagagaaaccttacaaatgtgaagaatgtgacaaagtttccagtcggaaatcaaccattgagacacataagagaattcatactggagagaaaccatacagatgtaaggtttgtgacacagctttcacgtggcattcacagctggctcgacatagaagaattcatactgcaaagaaaacttataaatgtaatgagtgtggcaagaccttcagtcacaagtcatcccttgtatgccatcatagacttcatggtggagagaaatcttacaaatgtaaggtttgtgacaaggcttttgtgtggagttcacaactggcaaaacatactagaattgactgtggagaaaaaccttacaagtgtaatgaatgtgggaagacctttggtcaaaattcagatcttttaattcataagtcaattcatactggggagcaaccttacaaatgtgatgaatgtgaaaaggttttcagtcgtaaatcaagccttgagacacataagataggtcatactggagagaaaccatacaaatgtaaggtttgtgacaaggcttttgcgtgtcattcctatctggcaaaacatactagaattcatagtggagagaaaccttacaagtgtaatgagtgcagcaagaccttcagtcacaggtcataccttgtatgccatcatagagttcatagtggtgagaaaccttacaagtgtaatgagtgcagcaagaccttcagtcgcaggtcatcccttcattgccatcgtagacttcatagtggtgagaaaccttacaagtgtaatgagtgtggcaataccttccgtcactgctcatcccttatataccatcgtagacttcatactggagagaaatcttacaaatgtacaatttgtgacaaggctttcgtgcgtaattcactcctgtcaagacataccagaattcacactgcagagaaaccttacaagtgtaatgaatgtgggaaggcttttaatcaacaatcacacctttcacgtcatcatagaattcatactggagagaaaccttagaaatgtgaagcatgtgacaaagtttccatttggaaatcacaccttaaagacataggagaatttatactggagagaaagcttacaaatgtaaggtttctgacaagacttgggagtgattcacacctggaacaacatactggacttcacactggagagaaaccttacaagtgtaatgagtgtggcaaagcctttggcaagcagtcaacacttattcaccatcaggcaattcatggtgtagggaaacttgactaatgtaatgattgtcacaaagtcttcagtaatgctacaacgattacaaatcattggagaatccataatgaagagagatcttacaagtgtaataaatgtggcaaatttttcagagatcgttcacatattgcaggtcatcggtgaactcatactggagagaaaccttacaaatgtcatgactgtgccaaggtcttcagtcaagcttcatcctatgcaaaacataggagaatttatacaggagagaaacctcacaagtgtgatgattgtggcaaagcctttgcttcacgttcacacgtcattagacatcagagaatctatactggacagaaatcttacaaatgtcatcagtgtggcaaggtcttcagtccaagatcactccatgcagaacatcagaaaattcatttttgagataaccgttcccaatgaaatgagtatagcaaaccatcaagcattaattgacattggagtc

SEQ ID NO: 1827 - protein, 705 aa, Homo sapiens
MLREEAAQKRKGKEPGMALPQGRLTFRDVAIEFSLAEWKCLNPSQRALYREVMLENYRNLEAVDISSKCMMKEVLSTGQGNTEVIHTGTLQRHESHHIGDFCFQEIEKEIHDIEFQCQEDERDGLEAPMTKIKKLTGSTDQHDHRHAGNKPIKDQLGSSFYSHLPELHIFQIKGEIGNQLEKSTNDAPSVSTFQRISCRPQTQISNNYGNNPLNSSLLPQKQEVHMREKSFQCNKSGKAFNCSSLLRKHQIIHLGDKQYKCDVCGKLFNHEQYLACHDRCHTVEKPYKCKECGKTFSQESSLTCHRRLHTGVKRYNCNECGKIFGQNSALLIDKAIDTGENPYKCNECDKAFNQQSQLSHHRIHTGEKPYKCEECDKVSSRKSTIETHKRIHTGEKPYRCKVCDTAFTWHSQLARHRRIHTAKKTYKCNECGKTFSHKSSLVCHHRLHGGEKSYKCKVCDKAFVWSSQLAKHTRIDCGEKPYKCNECGKTFGQNSDLLIHKSIHTGEQPYKCDECEKVFSRKSSLETHKIGHTGEKPYKCKVCDKAFACHSYLAKHTRIHSGEKPYKCNECSKTFSHRSYLVCHHRVHSGEKPYKCNECSKTFSRRSSLHCHRRLHSGEKPYKCNECGNTFRHCSSLIYHRRLHTGEKSYKCTICDKAFVRNSLLSRHTRIHTAEKPYKCNECGKAFNQQSHLSRHHRIHTGEKP

SEQ ID NO: 1828 - DNA, 2548 bp, Homo sapiens
gcgcacaaacccggaagcggatcgcgtggagtgaaggtcctaccacggcgcgtgagttttgctctgccttggattaagtctgcacttcccaggtccccggcgcttctgcccctgggacgtgggatccccacggacctggaaattctcgcctgtcttcccttcacccagagcaaattgagacgtcccggattgattcctaaagactcatgttatgtgaagaagcagctcagaagaggaaaggaaaggagccaggcatggctcttcctcagatatctcttccaaacgcatgatgaaggaggtcttgtcaacagggcaaggcaatacagaagtgatccacacagggacattgcaaagatatcaaagttatcacattggagatttttgcttccaggaaattgagaaagaaattcatgatattgagtttcagtgtcaagaagatgaaagaaatggccatgaagcacccatgacaaaaataaaaaagttgactggtagcacagaccaacatgatcacaggcatgctggaaacaagcctattaaagatcagcttggatcaagcttttattcacatctgcctgaactccacataattcagatcaaaggtaaaattggtaatcaatttgagaagtctaccagtgatgctccctcggtttcaacatcccaaagaatttctcctaggccccaaatccatatttctaataactatgggaataattccccgaattcttcactactcccacaaaaacaggaagtatacatgagagaaaaatctttccaatgtaatgagagtggcaaagcctttaattgtagctcactcttaaggaaacaccagataccccatttaggagacaaacaatataaatgtgatgtatgtggcaagctctttaatcacaagcaataccttacatgccatcgtagatgtcacactggagagaaaccttacaagtgtaatgagtgtggaaagtccttcagtcaggtatcatcccttacatgccatcgtagacttcacactgcagtaaaatctcacaagtgtaatgagtgtggcaagatctttggtcaaaattcagcccttgtaattcataaggcaattcatactggagaaaaaccttacaagtgtaatgaatgtgacaaagcttttaatcagcaatcaaaccttgcacgtcatcgtagaattcatactggagagaaaccttacaaatgtgaagaatgtgacaaagttttcagtcggaaatcaacccttgagtcacataagagaattcatactggagagaaaccatacaaatgtaaggtttgtgacacagctttcacatggaattctcagctggcaagacataaaagaattcacactggagagaaaacttacaagtgtaatgagtgtggcaagaccttcagtcacaagtcatcccttgtatgccatcatagacttcatggtggagagaaatcttacaaatgtaaggtctgtgacaaggcttttgcgtggaattcacacctggtaagacatactagaattcatagtggaggaaaaccttacaagtgtaatgaatgtgggaagacctttggtcaaaattcagatcttctaattcataagtcaattcatactggagagcaaccttacaaatatgaagaatgtgaaaaggttttcagttgtggatcaacccttgagacacataagataattcacaccggagagaaaccatacaaatgtaaggtttgtgacaaggcttttgcgtgtcattcctatctggcaaaacatactagaattcatagtggagagaaaccttacaagtgtaatgagtgcagcaagaccttccgtctgaggtcataccttgcaagccatcgcagagttcatagtggtgagaaaccttacaagtgtaatgagtgcagcaagaccttcagtcagaggtcataccttcattgccatcgtagacttcatagtggtgagaaaccttacaagtgtaatgagtgtggcaagaccttcagtcacaagccatcccttgttcaccatcgtagacttcatactggagagaaatcttacaaatgtacggtttgtgacaaggctttcgtgcgtaattcatacctggcaagacataccagaattcacactgcagagaaaccttacaagtgtaatgaatgtgggaaggcttttaatcaacaatcacaactttcacttcatcatagaattcatgctggggagaaactttacaaatgtgaaacatgtgacaaagttttcagtcgcaaatcacaccttaaaagacataggagaattcatcctggaaagaaaccatacaaatgtaaggtttgtgacaagacttttgggagtgattcacacctgaaacaacatactggacttcacactggagagaaaccttacaagtgtaatgagtgtggcaaagcctttagcaagcagtcaacacttattcaccatcaggcagttcatggtgtagggaaacttgactaatgtaatgattgtcacaaagtcttcagtaacgctacaaccattgcaaatcattggagaatctataatgaataaagatctaacaagtgtaataaa

SEQ ID NO: 1829 - protein, 722 aa, Homo sapiens
MMKEVLSTGQGNTEVIHTGTLQRYQSYHIGDFCFQEIEKEIHDIEFQCQEDERNGHEAPMTKIKKLTGSTDQHDHRHAGNKPIKDQLGSSFYSHLPELHIIQIKGKIGNQFEKSTSDAPSVSTSQRISPRPQIHISNNYGNNSPNSSLLPQKQEVYMREKSFQCNESGKAFNCSSLLRKHQIPHLGDKQYKCDVCGKLFNHKQYLTCHRRCHTGEKPYKCNECGKSFSQVSSLTCHRRLHTAVKSHKCNECGKIFGQNSALVIHKAIHTGEKPYKCNECDKAFNQQSNLARHRRIHTGEKPYKCEECDKVFSRKSTLESHKRIHTGEKPYKCKVCDTAFTWNSQLARHKRIHTGEKTYKCNECGKTFSHKSSLVCHHRLHGGEKSYKCKVCDKAFAWNSHLVRHTRIHSGGKPYKCNECGKTFGQNSDLLIHKSIHTGEQPYKYEECEKVFSCGSTLETHKIIHTGEKPYKCKVCDKAFACHSYLAKHTRIHSGEKPYKCNECSKTFRLRSYLASHRRVHSGEKPYKCNECSKTFSQRSYLHCHRRLHSGEKPYKCNECGKTFSHKPSLVHHRRLHTGEKSYKCTVCDKAFVRNSYLARHTRIHTAEKPYKCNECGKAFNQQSQLSLHHRIHAGEKLYKCETCDKVFSRKSHLKRHRRIHPGKKPYKCKVCDKTFGSDSHLKQHTGLHTGEKPYKCNECGKAFSKQSTLIHHQAVHGVGKLD

SEQ ID NO: 1830 - DNA, 752 bp, Homo sapiens
atgtctggatgtcagctctttgtggatgagatcagagaaaccacatatgaaacatatactttaatatgcacagatatctgggcaaggtctctccgcctggggccccgcctctaccccgcccaggtccagccaacctgccccggcctggcttcagtcctgggcgcgcacaaacccggaagcggatcgcgtggagtgaaggtcctaccacggcgcgtgagttttgctctgccttggattaagtctgcacttcccaggtccccggcgcttctgcccctgggacgtgggatccccacggacctggaaattctcgcctgtcttcccttcacccagagcaaattgagacgtcccggcctcgcccctgagctctacaatcctgtgtccagttgtctcctcagctgtctcctgggtcatcaaacaggcatccccaccttcaggtgtccacgagtggctttctaaacccccaaacacatttccttgcagtctgcacatctcagatgagggtgactacgtacttccggaaacggccgaacttgacagcatgtattttaaatttgtgaaataaattactttatttgtaagtgttgtaatttataatataaagagaaacttagatgtatacgtgaaaagagtgagaagatacatcacttccaatttttgtttgtttgtttgtttttttgagaggaattttcactcttgtggctgaggctggagtgcaatgccatgatatcagctcactgcaacctctgactcct

SEQ ID NO: 1831 - protein, 151 aa, Homo sapiens
MSGCQLFVDEIRETTYETYTLICTDIWARSLRLGPRLYPAQVQPTCPGLASVLGAHKPGSGSRGVKVLPRRVSFALPWIKSALPRSPALLPLGRGIPTDLEILACLPFTQSKLRRPGLAPELYNPVSSCLLSCLLGHQTGIPTFRCPRVAF

SEQ ID NO: 1832 - DNA, 1034 bp, Homo sapiens
gtgagaaggaaactgcaagagtggggcagagaaccagagtgtcagagcaaaacctcctctatctgcacatcctggggacgaaccgggcagccggagagctgcggccggcccagtcccgctccgcctttgaagggtaaaacccaaggcggggccttggttctggcagaagggacgctatgaccgcagaattcctctccctgctttgcctcgggctgtgtctgggctacgaagatgagaaaaagaatgagaaaccgcccaagccctccctccacgcctggcccagctcggtggttgaagccgagagcaatgtgaccctgaagtgtcaggctcattcccagaatgtgacatttgtgctgcgcaaggtgaacgactctgggtacaagcaggaacagagctcggcagaaaacgaagctgaattccccttcacggacctgaagcctaaggatgctgggaggtacttttgtgcctacaagacaacagcctcccatgagtggtcagaaagcagtgaacacttgcagctggtggtcacagataaacacgatgaacttgaagctccctcaatgaaaacagacaccagaaccatctttgtcgccatcttcagctgcatctccatccttctcctcttcctctcagtcttcatcatctacagatgcagccagcacagttcatcatctgaggaatccaccaagagaaccagccattccaaacttccggagcaggaggctgccgaggcagatttatccaatatggaaagggtatctctctcgacggcagacccccaaggagtgacctatgctgagctaagcaccagcgccctgtctgaggcagcttcagacaccacccaggagcccccaggatctcatgaatatgcggcactgaaagtgtagcaagaagacagccctggccactaaaggaggggggatcgtgctggccaaggttatcggaaatctggagatgcagatactgtgtttccttgctcttcgtccatatcaataaaattaagtttctcgtcttaaaaagaaaaaaaaaaaaaa

SEQ ID NO: 1833 - protein, 236 aa, Homo sapiens
MTAEFLSLLCLGLCLGYEDEKKNEKPPKPSLHAWPSSVVEAESNVTLKCQAHSQNVTFVLRKVNDSGYKQEQSSAENEAEFPFTDLKPKDAGRYFCAYKTTASHEWSESSEHLQLVVTDKHDELEAPSMKTDTRTIFVAIFSCISILLLFLSVFIIYRCSQHSSSSEESTKRTSHSKLPEQEAAEADLSNMERVSLSTADPQGVTYAELSTSALSEAASDTTQEPPGSHEYAALKV

SEQ ID NO: 1834 - DNA, 348 bp, Homo sapiens
atgttcgctctactgaaggcagggacgccatcacccatccagctgcagagtccagcggggaaggagatagacttctctctggtggacgtgacagccggcgatgctgggaactacagctgcatgtactaccagacaaagtctcccttctgggcctcagaacccagtgatcagcttgagatattggtgacagttcccccaggtaccacatcgagcaactactccctgggtaacttcgtacgactgggtctggctgccgtaattgtggttatcatgggagctttcctggtggaggcctggtacagccggaatgtgtctccaggtgaatcagaggccttcaaaccagagtga

SEQ ID NO: 1835 - protein, 115 aa, Homo sapiens
MFALLKAGTPSPIQLQSPAGKEIDFSLVDVTAGDAGNYSCMYYQTKSPFWASEPSDQLEILVTVPPGTTSSNYSLGNFVRLGLAAVIVVIMGAFLVEAWYSRNVSPGESEAFKPE

SEQ ID NO: 1836 - DNA, 2297 bp, Homo sapiens
ggaggctgtgggaggtgttggcggcggcggcgcgggcgcctgaggaggaggaggagaagcggatgagatcgtggggctcaccagcgtcccccatggcttctgagtagcgtgggagtggagtcagcaccaagccaggctccccgcgcctgccttgccctcacctgctcctgctctctgccagaggcagcatggtccgcagggcaccatggggcccgacagagtgacagcacgagaactgtgcgagaacgacgacctggccaccagcctcgtcctggacccctacctcggtttccgcacccataagatgaacgtcagccctgtgccccccctgcggcgacagcagcacctgcgctcagcgctggaaactttcctgaggcagcgggacctggaggctgcgtaccgggccctgacgctgggaggctggacggcccgctacttccagagccggggcccgcggcaggaggctgccctcaagacccacgtctatcgctacctccgtgccttcctgccggaaagtggctttaccatcctgccctgcacgcgctactccatggagaccaacggggccaagatcgtgtccactcgtgcttggaaaaagaatgagaagctggagctgctggtgggctgcattgcagagctgcgggaggcagatgaggggctgctgagggccggtgagaatgacttcagcatcatgtactcaacccgcaagcggagtgctcagctgtggctgggcccagccgccttcatcaaccatgactgcaaacccaactgcaagtttgtgcctgcagatgggaacgcagcctgcgtgaaggtgctccgggacattgagcctggggacgaggtgacatgcttctacggcgagggcttcttcggcgagaagaatgagcactgtgaatgccacacctgtgagaggaaaggtgaaggagctttccgaaccaggcctagggagcccgcgttgccaccacggcccctggacaagtaccagctgcgtgagaccaagcggcggctgcagcaaggcctggacagtggcagccgacagggcctgctgggccctcgggcctgcgtgcacccatccccgctgcgccgggacccattctgcgccgcctgccagcccctgcgcctgccagcctgcagcgcccgcccagacacctcacccctctggctccagtggctgcctcagccccagccccgagtgcggccccggaagcgccgacgcccccggccccggagggccccagtgctctccacccaccacgctgcccgcgtctccctgcaccgatggggaggctgtggcccccactgccgcctgcgaggagaggccctggtggccctgggccagcccccccacgcccgctgggcccctcagcaggactggcactgggcccggcgctatgggctgccttacgtggtgcgtgtggaccttcgtcgcctggccccagccccaccagctaccccagcccctgctgggaccccaggccccatcctgatcccgaagcaggccctcgccttcgcccccttctccccacccaagcgcctacggctggtggtcagccacggctccatcgacctggatgtcggcggtgaagagctgtgacaggccggacggggaggcccagcagggagagagggtctctctcctagctgctacccaggacctccagaaggagcccttggacctctgggagggagctgacccttgactccagcatagctctgaccctggaatggggttggtttggacacccccagggatctgagccctgaccctttgtgactgctgacccctgagccacccccactcccacagggagccccggccatttgctgccctccccacccctgccccagcctcaggactgcaggagccatccgcccccctcagccccttcctccccagggagcaaagccataaggggcaggggccaccccacggcatctccccagaagtacaggcctcaggaggaggtggaactgatgtagggggtggcactccccagagactgccctcacgaggggactgggttcgctctcagctctgcagctgtctgcggtggggggaaggttggggggtgtctggaggcatgttcccctcaccaccccccgtgggtctcagggaggccgggtgtgacctcatctttctcatggtgctatcctggtgctattggggtggggagttccctcccctcccccacaccagaaaggggtatgttgggggattggaagcacttgaactttttattttattaaaaccttgttataagcagcaaaaaaaaaaaaaaaaaaaaaaaaaaaaaaaa

SEQ ID NO: 1837 - protein, 462 aa, Homo sapiens
MGPDRVTARELCENDDLATSLVLDPYLGFRTHKMNVSPVPPLRRQQHLRSALETFLRQRDLEAAYRALTLGGWTARYFQSRGPRQEAALKTHVYRYLRAFLPESGFTILPCTRYSMETNGAKIVSTRAWKKNEKLELLVGCIAELREADEGLLRAGENDFSIMYSTRKRSAQLWLGPAAFINHDCKPNCKFVPADGNAACVKVLRDIEPGDEVTCFYGEGFFGEKNEHCECHTCERKGEGAFRTRPREPALPPRPLDKYQLRETKRRLQQGLDSGSRQGLLGPRACVHPSPLRRDPFCAACQPLRLPACSARPDTSPLWLQWLPQPQPRVRPRKRRRPRPRRAPVLSTHHAARVSLHRWGGCGPHCRLRGEALVALGQPPHARWAPQQDWHWARRYGLPYVVRVDLRRLAPAPPATPAPAGTPGPILIPKQALAFAPFSPPKRLRLVVSHGSIDLDVGGEEL

SEQ ID NO: 1838 - DNA, 1679 bp, Homo sapiens
gcggtgcacgacggctcccattggctggggctcgggcgtcctagccaatccggccgcggggtgcgtttctcctgacccgggtgggaccgcaccccgcggactcagaagcgagcggcaccccgggaccatcccacagcagatccagtggccgccaacgtcaggctggagttgcctccttcgtggatgttggatgtggaagcccaggagccccccaaggggaaatggtcgacgccgcccttcgacccgcgcttccccagccagaaccagatccgtaactgctaccagaacttcctggactaccaccgctgcctcaagaccaggacccgccgcgggaagagcacgcagccctgcgagtactatttccgcgtgtaccactcgctgtgccccatcagctgggtggagagctggaacgagcagatcaagaacgggattttcgccggcaaaatctgactgccccagcgcggcttcctctgaagatgcagtgatcctgcatctttttgtctcgcggagccccgggtctcggttatccacccctacctcccagtgtctaagccacgaataatgccaccagccttcgagttccttgtttcccttgctctggtctccacgtgtatgatggggttctcaggcccaggcttcgaccagaggaccctctgccaccaccgtttcttcctgtccttgagctaccttggtgaactcatgaccccaggcccctgctccaccaggatgtcccccaggtcctgccagctgggaagtgccagcatgaacgcctccaacttcgtggaagccagggtcccctgcagctgagggacgccaagcagacacacctgccctccccagccagctcctgtctgtatgggcgagatgactgagagcgcccacgtccctaaggctgtcctgaccctccatgctgcgacaaggacagggaatggtcggtcactatgggcctggtgtctcccctcccccaccacccggtgctgcccagctcaagccagaagctgactttggccgccatggggacatcaggcaaggtctggagacatttttggttggggcagaggcatgctcctggcatcgagtgggtggagaccagagaagccgctcaacatcctgcaatgcatgggacaggccctgcctagaaacaccagctcagcatggcagcagtgcggaggccaggaaaccctgatcgccagtttctaacgccctcaccatttttatttttatttttattttttttgagacagagtttcgctcctgtcacccaggctggagtacaatgatgcgatctcagctcactgcaacctctgcctcccgggttcaagtgattctcctgcctcagcctcccgagtagctgggattacaggcatgcaccaccacgcccagcttattttgtatttttagtagagacggggtttctccgtgttggtcaggctggtctcaaactcctgacctcaggcaatctgcccacctcagcctcccaaagtgctgggattacaggcgtgagccactgcacccggctcaccactagtttttagccctttttgttgggggtggggtgggggcagaggagaggcggatacagaaacttgtgagaatgtgatgaacgctctgaaccccctataaaaaatgtgcatgtaaatatatactctcaacatttaaaagaaaaaaaaaaaaaaaaa

SEQ ID NO: 1839 - protein, 88 aa, Homo sapiens
MLDVEAQEPPKGKWSTPPFDPRFPSQNQIRNCYQNFLDYHRCLKTRTRRGKSTQPCEYYFRVYHSLCPISWVESWNEQIKNGIFAGKI

SEQ ID NO: 1840 - DNA, 2282 bp, Homo sapiens
agacccctgctgtccaccctggcagggccatggcggaggcccgagtctcccagcctggggcatctccacgctctgtaacgctgagctccaggcacccgtgaagccccacgggtcaaggctggtgggccggggctgggaggcctgcacgcctgggttctgggtccctaaaccagtacccatccaccacagccaccatgatctggcttcgaaacaggaggtgccttgagccgctccagggcaccccgaagtgggtccctgttctgggggagctgcaaaagaccctccagaagggcgagtacctgcccctccgtccgctgcccatgttcgagagtaactttgttcaggtgacccatcaagggggcccagtgttcgtgaatcacagaaccaaccggctggccatgggcgtggccgcctccctgccaggcctggtgttgcctgacatcttgctgatcggccagcccgccgaggacagggactgctccggcctcgtgctgaccaggatgatccccctggacctcgtccacctctgcgtccatgacctctctgcctggcgcctgaagctgcgcctggtctcgggccgccagtactacctggccctggacgcccctgacaacgaggtgggcttcctgttccactgctgggtccgcctcatcaacctgcttcaggagccggctcccacctggacccccaggaccacgcgcacggcccccctggatatgccgctggccgaagcgcctgcctccacctggcacctgcaggaccagcccatcagcagacatgcagtcagggttgctgagcgcaactttccgcataagacggtggctgctcagagacagaggaaggccaaggcgctcaagcgcagtttcaagtctcaggccgtgggcgactctgtgcccctcatctggtcgcagctggagcatgctgacgtcaggaagaaacctgcagaaaagaactccctggacccgtgcctgtggcatcaggacacggaagacctcatggactctgggggcagcactttgtcgtctgctgcctccgtcccagaagctcccagctgtacctgcttcatcgtggaaacccccacctggattggctcctccccagaaggccccagctgcgtcagctcctccccggaaggccccagctgtacctgctccatcccagaaggccccagccgtacctgctccatcccagaaggccccagccatacctgctccatcccggaaggcctcagctgcgtcagcttctccccgaaaggcctcagccgaattcctggaagagccgtgctggagagaagccagtctggagggaaaccggagccggtggtgacggtgcgcacccaggagacagacgtggtggagatgacgactcaggccaagtccccggagtcgcccttcaccgtgaccaagaaggagtccaaggacatcctgattagccaaaccaaggaggtgaccctggaggccttcaggggccaggggaagttggaggactgggcccactgggcgaagcttgaagagaggtccccggacctgcctggcgtgagatccaaggagttggagcagcggaagagatgggtcaaggccaaggaactggccgtcgagggcccctcccaggagcacagcaggcccttctctgtggaagcgctcaccctcaccaagctcatgatcacggccaactccaaagagcagccctcgaaatccgctttggtctcacttccctcctggctcttggcgactccgcaggcgtcggccacgtcaatgatggcttcagtgccctcccgccccggccagctgtccttactggaggggaagccagtggtggtcagagagcagccagagtcgcacacctgggtgaaggagggcaagcggccatggggcgagatgaaggagcagccatggggcgagatgaaggagccaccctgggaccccaaggggccacccaaggtgccctttcgctccaagcccacctctgccagtctgaagagggaaggaatctcccaggcgcctatccccctgaccgcctcaccgtgggaggacttacggccatcgcccctctcggagaccctcatctcaaagatggaggccacagccagggcgtcccagcagcccaagagggtgtcgcaggagcccatgaggatgccagcccagcaccccctggccactgtggggtcgtcttcagaaattcttttgcccatgctcttagaacttgaaactgtgaggaacacggccaccaaggcagaggagatacaggaggaatcgggcgtcttgaaccttctgcccaggtag

SEQ ID NO: 1841 - protein, 695 aa, Homo sapiens
MIWLRNRRCLEPLQGTPKWVPVLGELQKTLQKGEYLPLRPLPMFESNFVQVTHQGGPVFVNHRTNRLAMGVAASLPGLVLPDILLIGQPAEDRDCSGLVLTRMIPLDLVHLCVHDLSAWRLKLRLVSGRQYYLALDAPDNEVGFLFHCWVRLINLLQEPAPTWTPRTTRTAPLDMPLAEAPASTWHLQDQPISRHAVRVAERNFPHKTVAAQRQRKAKALKRSFKSQAVGDSVPLIWSQLEHADVRKKPAEKNSLDPCLWHQDTEDLMDSGGSTLSSAASVPEAPSCTCFIVETPTWIGSSPEGPSCVSSSPEGPSCTCSIPEGPSRTCSIPEGPSHTCSIPEGLSCVSFSPKGLSRIPGRAVLERSQSGGKPEPVVTVRTQETDVVEMTTQAKSPESPFTVTKKESKDILISQTKEVTLEAFRGQGKLEDWAHWAKLEERSPDLPGVRSKELEQRKRWVKAKELAVEGPSQEHSRPFSVEALTLTKLMITANSKEQPSKSALVSLPSWLLATPQASATSMMASVPSRPGQLSLLEGKPVVVREQPESHTWVKEGKRPWGEMKEQPWGEMKEPPWDPKGPPKVPFRSKPTSASLKREGISQAPIPLTASPWEDLRPSPLSETLISKMEATARASQQPKRVSQEPMRMPAQHPLATVGSSSEILLPMLLELETVRNTATKAEEIQEESGVLNLLPR

SEQ ID NO: 1842 - DNA, 2354 bp, Homo sapiens
gctcagggcacatgcctcccctccccaggccgcggcccagctgaccctcggggctcccccggcagcggacagggaagggttaaaggcccccggctccctgccccctgccctggggaacccctggccctgtggggacatgaactgtgtttgccgcctggtcctggtcgtgctgagcctgtggccagatacagctgtcgcccctgggccaccacctggcccccctcgagtttccccagaccctcgggccgagctggacagcaccgtgctcctgacccgctctctcctggcggacacgcggcagctggctgcacagctgagggacaaattcccagctgacggggaccacaacctggattccctgcccaccctggccatgagtgcgggggcactgggagctctacagctcccaggtgtgctgacaaggctgcgagcggacctactgtcctacctgcggcacgtgcagtggctgcgccgggcaggtggctcttccctgaagaccctggagcccgagctgggcaccctgcaggcccgactggaccggctgctgcgccggctgcagctcctgatgtcccgcctggccctgccccagccacccccggacccgccggcgcccccgctggcgcccccctcctcagcctgggggggcatcagggccgcccacgccatcctgggggggctgcacctgacacttgactgggccgtgaggggactgctgctgctgaagactcggctgtgacccggggcccaaagccaccaccgtccttccaaagccagatcttatttatttatttatttcagtactgggggcgaaacagccaggtgatccccccgccattatctccccctagttagagacagtccttccgtgaggcctggggggcatctgtgccttatttatacttatttatttcaggagcaggggtgggaggcaggtggactcctgggtccccgaggaggaggggactggggtcccggattcttgggtctccaagaagtctgtccacagacttctgccctggctcttccccatctaggcctgggcaggaacatatattatttatttaagcaattacttttcatgttggggtggggacggaggggaaagggaagcctgggtttttgtacaaaaatgtgagaaacctttgtgagacagagaacagggaattaaatgtgtcatacatatccacttgagggcgatttgtctgagagctggggctggatgcttgggtaactggggcagggcaggtggaggggagacctccattcaggtggaggtcccgagtgggcggggcagcgactgggagatgggtcggtcacccagacagctctgtggaggcagggtctgagccttgcctggggccccgcactgcatagggccttttgtttgttttttgagatggagtctcgctctgttgcctaggctggagtgcagtgaggcaatctgaggtcactgcaacctccacctcccgggttcaagcaattctcctgcctcagcctcccgattagctgggatcacaggtgtgcaccaccatgcccagctaattatttatttcttttgtatttttagtagagacagggtttcaccatgttggccaggctggtttcgaactcctgacctcaggtgatcctcctgcctcggcctcccaaagtgctgggattacaggtgtgagccaccacacctgacccataggtcttcaataaatatttaatggaaggttccacaagtcaccctgtgatcaacagtacccgtatgggacaaagctgcaaggtcaagatggttcattatggctgtgttcaccatagcaaactggaaacaatctagatatccaacagtgagggttaagcaacatggtgcatctgtggatagaacgccacccagccgcccggagcagggactgtcattcagggaggctaaggagagaggcttgcttgggatatagaaagatatcctgacattggccaggcatggtggctcacgcctgtaatcctggcactttgggaggacgaagcgagtggatcactgaagtccaagagttcgagaccggcctgcgagacatggcaaaaccctgtctcaaaaaagaaagaatgatgtcctgacatgaaacagcaggctacaaaaccactgcatgctgtgatcccaattttgtgtttttctttctatatatggattaaaacaaaaatcctaaagggaaatacgccaaaatgttgacaatgactgtctccaggtcaaaggagagaggtgggattgtgggtgacttttaatgtgtatgattgtctgtattttacagaatttctgccatgactgtgtattttgcatgacacattttaaaaataataaacactatttttagaat

SEQ ID NO: 1843 - protein, 199 aa, Homo sapiens
MNCVCRLVLVVLSLWPDTAVAPGPPPGPPRVSPDPRAELDSTVLLTRSLLADTRQLAAQLRDKFPADGDHNLDSLPTLAMSAGALGALQLPGVLTRLRADLLSYLRHVQWLRRAGGSSLKTLEPELGTLQARLDRLLRRLQLLMSRLALPQPPPDPPAPPLAPPSSAWGGIRAAHAILGGLHLTLDWAVRGLLLLKTRL

SEQ ID NO: 1844 - DNA, 593 bp, Homo sapiens
ggggtctggggaggtgacatgttgggctgtgggatcccagcgctgggcctgctcctgctgctgcagggctcggcagacggaaatggaatccagggattcttctacccatggagctgtgagggtgacatatgggaccgggagagctgtgggggccaggcggccatcgatagccccaacctctgcctgcgtctccggtgctgctaccgcaatggggtctgctaccaccagcgtccagacgaaaacgtgcggaggaagcacatgtgggcgctggtctggacgtgcagcggcctcctcctcctgagctgcagcatctgcttgttctggtgggccaagcgccgggacgtgctgcatatgcccggtttcctggcgggtccgtgtgacatgtccaagtccgtctcgctgctctccaagcaccgagggaccaagaagacgccgtccacgggcagcgtgccagtcgccctgtccaaagagtccagggatgtggagggaggcaccgagggggaagggacggaggagggtgaggagacagagggcgaggaagaggaggattaggggagtccccgggggactgctcaatacagatacggtggacg

SEQ ID NO: 1845 - protein, 177 aa, Homo sapiens
MLGCGIPALGLLLLLQGSADGNGIQGFFYPWSCEGDIWDRESCGGQAAIDSPNLCLRLRCCYRNGVCYHQRPDENVRRKHMWALVWTCSGLLLLSCSICLFWWAKRRDVLHMPGFLAGPCDMSKSVSLLSKHRGTKKTPSTGSVPVALSKESRDVEGGTEGEGTEEGEETEGEEEED

SEQ ID NO: 1846 - DNA, 2277 bp, Homo sapiens
cgggcgggcacgacaggagttgtcggtccccacctccgaggcggctcgatgatgttcggctgcttccgccgaaaattcgctcaacgctcgggaatattcggaactcttcggttagagggccgagagcgtattccgggaaccgttcggaagttttcgaaactctaccgctggatttccgagtggctccaattcgagaggtcctgggacccatacctcagcgttatctctccagtattgctcacccagcacttgtcactgtgattggcatatgatgggcgctcaacaaacatttgttttatgaatgaactggtgaatgcgtgaactatataagcctagccccggcacctttggatatttccggtcttcgtaagccctcgcggtgatggccaatgagggcgccgaggcccgctcgggtattttcggaaccctccggaaacgctcttgggagaggtgtgtatgttcggaaatactccgtcttcattcggaatccctcggctaatcctggcagccctcttgcagttcgccctccccagggttttcttgaaataaaactcttaaactgtttaagcctggggagaacctacacggaaacttctcgctgactgccaccccaggggagcgcggatgccctctaagggagaattgtttggagggagggagatttgcatgtggcttctcttggctccctttaggattctatagatttgccggtcctcttccctgccctccacctgtgcctccagcctatggtgtgcctgtcacaccccatcagctccctgggaggttatgatccgttgtcagggccaccctaagggggcaggagccttgcctgatatttctctgtgtcctcggcctcacccacgcggcatggtgctggggaggcctcagagactcctactgaacaaaaggaatgagggtgcctgtgtcacctccccagggctccttaacttgcggttacacccgggcactccttggggcaggggcttcgtctggtccataggactatcctccataggacagtcggggttcgcccagcttcctccacgggtgcgctctggacctgatgggtctcgtccgtccttgtgcccgtggcttcattcgctgaacacaggagaccccagaagacacgcgctgagtgaaggaaactcagcttccgcggaacccggagcttcccctcttagatcaccccgactactggttctcgcgtcccagagctccttggtgtctaaaggccttgtctgatctgcactgtctgatctgcacaggcttcgggaggcggacactgagcagaaacaacgccacgcccggctccgagtgtcccatgctgccaccactaaaatgccctgatttttggccatatgtgacctccctgggtggcacgggccctaggcacccgtggctgtgcgcctggctaccaccagctcaggcctctgagcaatagcccctgcacggaaaccacgaccagggtaaccccggccgcgccggttcgcgcccagcccggttcaggtgaccaggcgggagcttggcacacctggcgccgtcccctgaccccgccccggaccgggccgcaccccggaacgctctctctgggcgccagcggcggcggtgcagggccatggcggcggcgccagcggtgtgcgcctcgcaggggagcccgccgggtgcaccgtccgcgccggcggccgcgccagcacccgcggccggcctgggccgctgccggatggcgctgctgctggccgtggcgctggatgtggcgggcatggcggcgctgctgaccggcgtgttcgcgcagctgcaggtgcgcggccgcgacttcggggacctgctcatctactcgggcgcgctgctggtgttcctgagcctgctgggctggatcctctggtacaccggcaacatcgagatctcgcgccaggagctggagcgcgactacggcctgcggccctcggcgctcgcccgcctggcgcgcaagctctcccgccgctggtcggcgcccgccgccgcgggccagcgccccgcgcccggctcccggagagcgcgccgagccgcccgcgcgcccccgccgcccgccgccggctcccgccgcgtgcgcctgcagctcgccacgctcgaggccgggcccggggcggcgggcgcgggcagcgagtgaggcccagacaaccccttggctccagctgtcaggaccagactgagatgtgcagctgcccctacatccgtggccagacggacgctccctgtaccccctccctcctcacttggataaaaagcagatttgcctta

SEQ ID NO: 1847 - protein, 176 aa, Homo sapiens
MAAAPAVCASQGSPPGAPSAPAAAPAPAAGLGRCRMALLLAVALDVAGMAALLTGVFAQLQVRGRDFGDLLIYSGALLVFLSLLGWILWYTGNIEISRQELERDYGLRPSALARLARKLSRRWSAPAAAGQRPAPGSRRARRAARAPPPPAAGSRRVRLQLATLEAGPGAAGAGSE

SEQ ID NO: 1848 - DNA, 4243 bp, Homo sapiens
ctctttccgtctcaggtcgccgctgcgaagggagccgccgccatgtctgcgcatctgcaatggatggtcgtgcggaactgctccagtttcctgatcaagaggaataagcagacctacagcactgagcccaataacttgaaggcccgcaattccttccgctacaacggactgattcaccgcaagactgtgggcgtggagccggcagccgacggcaaaggtgtcgtggtggtcattaagcggagatccggccagcggaagcctgccacctcctatgtgcggaccaccatcaacaagaatgctcgcgccacgctcagcagcatcagacacatgatccgcaagaacaagtaccgccccgacctgcgcatggcagccatccgcagggccagcgccatcctgcgcagccagaagcctgtgatggtgaagaggaagcggacccgccccaccaagagctcctgagccccctgcccccagagcaataaagtcagctggctttctcacctgcctcgactgggcctccctttttgaaacgctctggggagctctggccctgtgtgttgtcattcaggccatgtcatcaaaactctgcatgtcaccttgtccatctggaggtgatgtcaatggctggccatgcaggaggggtggggtagctgccttgtccctggtgagggcaagggtcactgtcttcacagaaaaagtttgctgacttgtgattgagacctactgtcccattgtgaggtggcctgaagaatcccagctggggcagtggcttccattcagaagaagaaaggccttttctagcccagaagggtgcaggctgagggctgggccctgggccctggtgctgtagcacggtttggggacttggggtgttcccaagacctgggggacgacagacatcacgggaggaagatgagatgacttttgcatccagggagtgggtgcagccacatttggaggggatgggctttacttgatgcaacctcatctctgagatgggcaacttggtgggtggtggcttataactgtaagggagatggcagccccagggtacagccagcaggcattgagcagccttagcattgtccccctactcccgtcctccaggtgtccccatccctcccctgtctctttgagctggctcttgtcacttaggtctcatctcagtggccgctcctgggccaccctgtcacccaagctttcctgattgcccagccctcttgtttcctttggcctgtttgctccctagtgtttattacagcttgtgaggccaggagtttgagaccatcctaggcaacataatgagacaccgtctctaaaataaaattagctgggtgtggtggtgcaccgcctgtggtcccagctcctcagaggttgagtagaggctgaggtgagcggagcacttgagccaagagtatgaggctgcagtgagcccatgagccccaccactacactccagcctggaagacaccatgacacacaggcctggatggggaaagagtcctgctgttgatcctcacatgtttcctgggcacctaactctgtcagccactgccagggaccaaggatccagcatccatggcacccctggttcctgccatcctggggtacccgattcaaagaaggactctgctccctgtctgagaccacccccggctctgactgagagtaaggggactgtcagggcctcgacttgccattggttggggtcgtacggggctgggagccctgcgttttgaggcagaccactgcccttccgacctcagtcctgtctgctccagtcttgcccagctcgaaggagagcagatctgaccacttgccagcccctgtctgctgtgaattaccatttcctttgtccttcccttagttgggtctattagctcagattgagaggtgttgccttaaaactgagttgggtgacttggtacctgctcaggaccccccgcactgtcccaatcccactcaggcccacctccagctggcctcactccgctggtgacttcgtacctgctcaggagcccccactgtcccagtcccactcaggcccatctctggctggcctcactgcgctgggactccgccttcataaggagagctcactgctcacgttagtagatggccccttctcgtgaggcctctcccctggcacctgcttcagttgtcctccacagcactgatttgcagcccacaagctggcaggtttatctgtctcatgtttgtcttgtgctggtgggcaaggggtttgtctagcacaccagcatataatgagatgcttgatgaatggtgcatattgaatgtataaagcccaccggtcctgagagtttgctcactggagactttctggagatggagtctcgctctgttgcccaggctggcgagtgcaatggcgcgatcttggctcactgcagcctccacctcctgggttcaagcgattctcctgcctcagcctcccgagtagctgggattacaggtgggtgtcaccacacccagctcagtattgtatttttagcagagatggggtttcaccattttgcccaggctggtttggaactcctgacttcaaattacccacctgcctcagcctcccaaagtgctggcattacaggcgctcgaggctttctgatgtggctgctgctgctcagaaggccttgtccttaaccacctccttgcctgccctggaggcttgtgcctctaggccccaccccctgtggagtcctgctggctttctccatccctatctgaatcctccctgctgtgtggcctcccctggtctcatccgtaacacagcccagcttagtgggcctctgttcctgcgggtggccagcctgtctgtgtggctgggctggggaggccacgtctggtatctgaatgctatcggtgggttggggtggaggaaccaggagagggctggagggagggagatggtctcagccccacagagtttggagtcctcagtgtgctgagcaaacgtggagacaccatttccctcctctagacctcatcttggagagagagatgttggatggggccatctattccagctttattcacacaaatcatgtctgttggcctggaaattggaaaaccagttaaaccaaaaacatgatattaagaaaacaggcaggctcaccatagtaaaaatgctgaaagccaaagacaaaattgggagaacaaaagaaaagcgtcttgtcacatacagaaggtccctgataaagttagtagctgccctcatcagaaaccaggcccaggcagtggggacacatccagagtgctgaaagaacctcccccaggtcatcctatccccaagagtgatgcccggcagcattcccagctcagggctaatggttcacggaagccaggaatcaaactgcctgggttccagtcccagctctgccagttatgcccagctgtggggacttgggcagctcgtttagtagcaccgtgcctcagtttcccatatgtaaaaggccattttgagtgcctttcacagccctgcataaggcaggtgtctcagtgttcactgctgtctctccagctcttagtccagtagctgcatggtgagtgagcgtagggcgcaccctggaaggctgccaagcccaaagttgtgcagagcgctggggactccagactccccacagcagcagagactcgggactgaggcatcctctgttcacaggacatgctggcatctactgggtcagggctctgctgctcggtggctgtgcaaccttgggcaagttcctcaacctctctgtgtcttcgtaccctcatctgtaacatgcgtgtcgatagaccctactactcagggttgatgagaagattaaatgtgcaaaacctgcttgactgtgcccacaaatcctgattgtaggaataaattaatgactttttataaatattttgatcagatggactcagatgatcacagatgtcttcacatgcctatgactaatttgtacacaaactaatgctcgtgtttcccaagcacctggaagacatgccagatccatgtgcagtaatgcctggtggctccaggtctgccccgccgtcctgtggggctgtgagctttcccagcctcctgcccgtgtttgtgaatatcattctgtcctcagctgcatttccagcccaggctgtttggcgctgcccaggaatggtatcaattcccctgtttctcttgtagccagttactagaataaaatcatctactttaaaaaaaaaaaaaaaaaaaaaaaaaaaaaaaaaaaaaaaa

SEQ ID NO: 1849 - protein, 137 aa, Homo sapiens [sequence omitted]

SEQ ID NO: 1850 - DNA, 2722 bp, Homo sapiens
cacagcagcccccgcgcccgccgtgccgccgccgggacgtggggcccttgggccgtcgggccgcctggggagcgccagcccggatccggctgcccagatgcgggcgccactctgcctgctcctgctcgtcgcccacgccgtggacatgctcgccctgaaccgaaggaagaagcaagtgggcactggcctggggggcaactgcacaggctgtatcatctgctcagaggagaacggctgttccacctgccagcagaggctcttcctgttcatccgccgggaaggcatccgccagtacggcaagtgcctgcacgactgtccccctgggtacttcggcatccgcggccaggaggtcaacaggtgcaaaaaatgtggggccacttgtgagagctgcttcagccaggacttctgcatccggtgcaagaggcagttttacttgtacaaggggaagtgtctgcccacctgcccgccgggcactttggcccaccagaacacacgggagtgccagggggagtgtgaactgggtccctggggcggctggagcccctgcacacacaatggaaagacctgcggctcggcttggggcctggagagccgggtacgagaggctggccgggctgggcatgaggaggcagccacctgccaggtgctttctgagtcaaggaaatgtcccatccagaggccctgcccaggagagaggagccccggccagaagaagggcaggaaggaccggcgcccacgcaaggacaggaagctggaccgcaggctggacgtgaggccgcgccagcccggcctgcagccctgaccgccggctctcccgactctctggtcctagtcctcggcccctgcacacctcctcctgctccttctcctcctctcctcttactctttctcctctgtcttctccatttgtcctctctttctttccacccttctatcatttttctgtcagtctaccttccctttctttttcttttttatttcctttatttcttccacctccattctcctctcctttctccctccctccttcccttccttcctcttctttctcacttatcttttatctttccttttctttcttcctgtgtttcttcctgtccttcaccgcatccttctctctctccctcctcttgtctccctctcacacacactttaagagggaccatgagcctgtgccctcccctgcagctttctctatctacaacttaaagaaagcaaacatcttttcccaggcctttccctgaccccatctttgcagagaaagggtttccagagggcaaagctgggacacagcacaggtgaatcctgaaggccctgcttctgctctgggggaggctccaggaccctgagctgtgagcacctggttctctggacagtccccagaggccatttccacagccttcagccaccagccaccccgaggagctggctggacaaggctccagggcttccagaggcctggcttggacacctcccccagctggccgtggagggtcacaacctggcctctgggtgggcagccagccctggagggcatcctctgcaagctgcctgccaccctcatcggcactcccccacaggcctccctctcatgggttccatgcccctttttcccaagccggatcaggtgagctgtcactgctgggggatccacctgcccagcccagaagaggccactgaaacggaaaggaaagctgagattatccagcagctctgttccccacctcagcgcttcctgcccatgtggggaaacaggtctgagaaggaaggggcttgcccagggtcacacaggaagccttcaggctctgcttctgcctgatggctctgctcagcacattcacggtggagaggagaatttgggggtcacttgaggggggaaatgtagggaattgtgggtggggagcaagggaagatccgtgcactcgtccacacccaccaccacactcgctgacacccacccccacacgctgacacccacccccacacttgcccacacccatcaccgcactcgcccacacccaccaccacactgccccacacccaccaccacactcccccacacccaccaccacactcgcccacacccaccaccagtgacttgagcatctgtgcttcgctgtgacgcccctcgccctaggcaggaacgacgctgggaggagtctccaggtcagacccagcttggaagcaagtctgtcctcactgcctatccttctgccatcataacacccccttcctgctctgctccccggaatcctcagaaacgggatttgtatttgccgtgactggttggcctgaacacgtagggctccgtgactgggacaggaatgggcaggagaagcaagagtcggagctccaaggggcccaggggtggcctggggaaggaagatggtcagcaggctgggggagaggctctaggtgatgaaatattacattcccgaccccaagagagcacccaccctcagacctgccctccacctggcagctggggagccctggcctgaacccccccctcccagcaggcccaccctctctctgacttccctgctctcacctccccgagaacagctagagccccctcctccgcctggccaggccaccagcttctcttctgcaaacgtttgtgcctctgaaatgctccgttgttattgtttcaagaccctaacttttttttaaaactttcttaataaagggaaaagaaacttgtaaaaaaaaaaaaaaaaaa

SEQ ID NO: 1851 - protein, 234 aa, Homo sapiens
MRAPLCLLLLVAHAVDMLALNRRKKQVGTGLGGNCTGCIICSEENGCSTCQQRLFLFIRREGIRQYGKCLHDCPPGYFGIRGQEVNRCKKCGATCESCFSQDFCIRCKRQFYLYKGKCLPTCPPGTLAHQNTRECQGECELGPWGGWSPCTHNGKTCGSAWGLESRVREAGRAGHEEAATCQVLSESRKCPIQRPCPGERSPGQKKGRKDRRPRKDRKLDRRLDVRPRQPGLQP

SEQ ID NO: 1852 - DNA, 2536 bp, Homo sapiens
cacagcagcccccgcgcccgccgtgccgccgccgggacgtggggcccttgggccgtcgggccgcctggggagcgccagcccggatccggctgcccagatgcgggcgccactctgcctgctcctgctcgtcgcccacgccgtggacatgctcgccctgaaccgaaggaagaagcaagtgggcactggcctggggggcaactgcacaggctgtatcatctgctcagaggagaacggctgttccacctgccagcagaggctcttcctgttcatccgccgggaaggcatccgccagtacggcaagtgcctgcacgactgtccccctgggtacttcggcatccgcggccaggaggtcaacaggtgcaaaaaatgtggggccacttgtgagagctgcttcagccaggacttctgcatccggtgcaagaggcagttttacttgtacaaggggaagtgtctgcccacctgcccgccgggcactttggcccaccagaacacacgggagtgccaggagaggagccccggccagaagaagggcaggaaggaccggcgcccacgcaaggacaggaagctggaccgcaggctggacgtgaggccgcgccagcccggcctgcagccctgaccgccggctctcccgactctctggtcctagtcctcggcccctgcacacctcctcctgctccttctcctcctctcctcttactctttctcctctgtcttctccatttgtcctctctttctttccacccttctatcatttttctgtcagtctaccttccctttctttttcttttttatttcctttatttcttccacctccattctcctctcctttctccctccctccttcccttccttcctcttctttctcacttatcttttatctttccttttctttcttcctgtgtttcttcctgtccttcaccgcatccttctctctctccctcctcttgtctccctctcacacacactttaagagggaccatgagcctgtgccctcccctgcagctttctctatctacaacttaaagaaagcaaacatcttttcccaggcctttccctgaccccatctttgcagagaaagggtttccagagggcaaagctgggacacagcacaggtgaatcctgaaggccctgcttctgctctgggggaggctccaggaccctgagctgtgagcacctggttctctggacagtccccagaggccatttccacagccttcagccaccagccaccccgaggagctggctggacaaggctccagggcttccagaggcctggcttggacacctcccccagctggccgtggagggtcacaacctggcctctgggtgggcagccagccctggagggcatcctctgcaagctgcctgccaccctcatcggcactcccccacaggcctccctctcatgggttccatgcccctttttcccaagccggatcaggtgagctgtcactgctgggggatccacctgcccagcccagaagaggccactgaaacggaaaggaaagctgagattatccagcagctctgttccccacctcagcgcttcctgcccatgtggggaaacaggtctgagaaggaaggggcttgcccagggtcacacaggaagccttcaggctctgcttctgcctgatggctctgctcagcacattcacggtggagaggagaatttgggggtcacttgaggggggaaatgtagggaattgtgggtggggagcaagggaagatccgtgcactcgtccacacccaccaccacactcgctgacacccacccccacacgctgacacccacccccacacttgcccacacccatcaccgcactcgcccacacccaccaccacactgccccacacccaccaccacactcccccacacccaccaccacactcgcccacacccaccaccagtgacttgagcatctgtgcttcgctgtgacgcccctcgccctaggcaggaacgacgctgggaggagtctccaggtcagacccagcttggaagcaagtctgtcctcactgcctatccttctgccatcataacacccccttcctgctctgctccccggaatcctcagaaacgggatttgtatttgccgtgactggttggcctgaacacgtagggctccgtgactgggacaggaatgggcaggagaagcaagagtcggagctccaaggggcccaggggtggcctggggaaggaagatggtcagcaggctgggggagaggctctaggtgatgaaatattacattcccgaccccaagagagcacccaccctcagacctgccctccacctggcagctggggagccctggcctgaacccccccctcccagcaggcccaccctctctctgacttccctgctctcacctccccgagaacagctagagccccctcctccgcctggccaggccaccagcttctcttctgcaaacgtttgtgcctctgaaatgctccgttgttattgtttcaagaccctaacttttttttaaaactttcttaataaagggaaaagaaacttgtaaaaaaaaaaaaaaaaaa

SEQ ID NO: 1853 - protein, 172 aa, Homo sapiens
MRAPLCLLLLVAHAVDMLALNRRKKQVGTGLGGNCTGCIICSEENGCSTCQQRLFLFIRREGIRQYGKCLHDCPPGYFGIRGQEVNRCKKCGATCESCFSQDFCIRCKRQFYLYKGKCLPTCPPGTLAHQNTRECQERSPGQKKGRKDRRPRKDRKLDRRLDVRPRQPGLQP

SEQ ID NO: 1854 - DNA, 620 bp, Homo sapiens
atggcaactgcaggcagccagcaccgacggcgggaaaacgaggaccggagccgcgttacagccttggccttcgagcagcccagggagagtctctgcgtcctccagcccccgcttcccttcatgtcggaggtcctaagcccgcagcgaagtccgcaaagagctttccccgacgcctacgagaccggaagtgcctgggcccaggtggaggaaggacccgcgtggccgcctccgcgctctccctggggtccgtgccccttccggcgtttctcccgcgtccttcaccatggcaactcgggcgtcgggagcgtgggctgcgagccgagtgggtgggggagccgccgggctctatccgccagcccacgagaagtgacgcaggagcaccattgaaggagaattagacaaactggagtctactgagatgaggctgttgggaatggccctggtaccacatcctgagcagggatggccgatggaatggggagaagactcaggtggggcttgagtgtgtcctctgatgactgaagagccttgggagcaagcatccttcctgctactgtgtgtttgctggttccaatgatacataatttgtgcttttcgtaattaaagtattatcctgtaga

SEQ ID NO: 1855 - protein, 128 aa, Homo sapiens
MATAGSQHRRRENEDRSRVTALAFEQPRESLCVLQPPLPFMSEVLSPQRSPQRAFPDAYETGSAWAQVEEGPAWPPPRSPWGPCPFRRFSRVLHHGNSGVGSVGCEPSGWGSRRALSASPREVTQEHH

SEQ ID NO: 1856 - DNA, 2666 bp, Homo sapiens
cctgccggccgctcgttctgtgccccggcccggccaccgacggccgcgcgttgagatgactttccgcgatctcctgagcgtcagtttcgagggaccccgcccggacagcagcgcagggggctccagcgcgggcggcggcgggggcagcgcgggcggcgcggccccctcggagggcccggcggtgggcggcgtgccggggggcgcgggcggcggcggcggcgtggtgggcgcaggcagcggcgaggacaaccggagctccgcgggggagccggggagcgcgggcgcgggcggcgacgtgaatggcacggcggccgtcgggggactggtggtgagcgcgcagggcgtgggcgtgggcgtcttcctggcagccttcatccttatggccgtggcaggtaacctgcttgtcatcctctcagtggcctgcaaccgccacctgcagaccgtcaccaactatttcatcgtgaacctggccgtggccgacctgctgctgagcgccaccgtactgcccttctcggccaccatggaggttctgggcttctgggcctttggccgcgccttctgcgacgtatgggccgccgtggacgtgctgtgctgcacggcctccatcctcagcctctgcaccatctccgtggaccggtacgtgggcgtgcgccactcactcaagtacccagccatcatgaccgagcgcaaggcggccgccatcctggccctgctctgggtcgtagccctggtggtgtccgtagggcccctgctgggctggaaggagcccgtgccccctgacgagcgcttctgcggtatcaccgaggaggcgggctacgctgtcttctcctccgtgtgctccttctacctgcccatggcggtcatcgtggtcatgtactgccgcgtgtacgtggtcgcgcgcagcaccacgcgcagcctcgaggcgggcgtcaagcgcgagcgaggcaaggcctccgaggtggtgctgcgcatccactgtcgcggcgcggccacgggcgccgacggggcgcacggcatgcgcagcgccaagggccacaccttccgcagctcgctctccgtgcgcctgctcaagttctcccgtgagaagaaagcggccaagactctggccatcgtcgtgggtgtcttcgtgctctgctggttccctttcttctttgtcctgccgctcggctccttgttcccgcagctgaagccatcggagggcgtcttcaaggtcatcttctggctcggctacttcaacagctgcgtgaacccgctcatctacccctgttccagccgcgagttcaagcgcgccttcctccgtctcctgcgctgccagtgccgtcgtcgccggcgccgccgccctctctggcgtgtctacggccaccactggcgggcctccaccagcggcctgcgccaggactgcgccccgagttcgggcgacgcgccccccggagcgccgctggccctcaccgcgctccccgaccccgaccccgaacccccaggcacgcccgagatgcaggctccggtcgccagccgtcgaaagccacccagcgccttccgcgagtggaggctgctggggccgttccggagacccacgacccagctgcgcgccaaagtctccagcctgtcgcacaagatccgcgccgggggcgcgcagcgcgcagaggcagcgtgcgcccagcgctcagaggtggaggctgtgtccctaggcgtcccacacgaggtggccgagggcgccacctgccaggcctacgaattggccgactacagcaacctacgggagaccgatatttaaggaccccagagctaggccgcggagtgtgctgggcttgggggtaagggggaccagagaggcgggctggtgttctaagagcccccgtgcaaatcggagacccggaaactgatcagggcagctgctctgtgacatccctgaggaactgggcagagcttgaggctggagcccttgaaaggtgaaaagtagtggggccccctgctggactcaggtgcccagaactcttttcttagaagggagaggctgcgggctccgtggggccttttgctcccaatccctatttgagaaacactgccccatcctccatgccctgaaccctgagtagacagccccaagcatggccaggaaggcctgcccctcctcttctgggaaataggcacagaagctttggccggctaccccagtgcctcccttagggaaaaagtcagtgggaccagggctcctcagtggacaaatttctccttcttactgccaactggaggaacccagtggacctaccaccacccacaagctttggtggcagattgtatagccgtcatacaagcctgctgtatttatccatgggcccgctgtccgccacccaggctcctccgtgcacaccccatcacctggcccctaccccttattacttcccctcaagggccttactgtttacactctgtacatagctcatcgtgcctgtgcccatcacttcttgctgggattccaagccaccaattggagagctttatttgtcattttgagacatatttattggtaagagtacttctattttgtccaagctgtgcaaactgtccctctttagcccataacccattaaaaaaaaaatactttttcccctaaagtctgtcaagaactaaaggcccgcaacagaatagattgggtctacatttgc

SEQ ID NO: 1857 - protein, 572 aa, Homo sapiens
MTFRDLLSVSFEGPRPDSSAGGSSAGGGGGSAGGAAPSEGPAVGGVPGGAGGGGGVVGAGSGEDNRSSAGEPGSAGAGGDVNGTAAVGGLVVSAQGVGVGVFLAAFILMAVAGNLLVILSVACNRHLQTVTNYFIVNLAVADLLLSATVLPFSATMEVLGFWAFGRAFCDVWAAVDVLCCTASILSLCTISVDRYVGVRHSLKYPAIMTERKAAAILALLWVVALVVSVGPLLGWKEPVPPDERFCGITEEAGYAVFSSVCSFYLPMAVIVVMYCRVYVVARSTTRSLEAGVKRERGKASEVVLRIHCRGAATGADGAHGMRSAKGHTFRSSLSVRLLKFSREKKAAKTLAIVVGVFVLCWFPFFFVLPLGSLFPQLKPSEGVFKVIFWLGYFNSCVNPLIYPCSSREFKRAFLRLLRCQCRRRRRRRPLWRVYGHHWRASTSGLRQDCAPSSGDAPPGAPLALTALPDPDPEPPGTPEMQAPVASRRKPPSAFREWRLLGPFRRPTTQLRAKVSSLSHKIRAGGAQRAEAACAQRSEVEAVSLGVPHEVAEGATCQAYELADYSNLRETDI

SEQ ID NO: 1858 - DNA, 2722 bp, Homo sapiens
gagcaatgggaaagactggagtatctcagtccctctcagtggatgggggttgtgggagagaggcagctgggagacaggcctccctctggagttcatagctgagttgctgtccaaatcagtggtccctagaatctataaaacaaaactgagaacttcagaggtgcatccagagaagccacactccaaaaggaccacttccagacgccatgcggcaaaccctaccgctgctgctgctgacggtgctgcgccccagctgggcagaccctccccaggagaaggtcccgctcttccgggtcactcagcagggcccctgggggagcagtggcagcaacgccaccgactcgccctgcgaggggctgcccgccgcggatgcgacggccttgaccctggcgaaccgcaacctggagcgcctgcccggctgcctaccgcgcacactgcgcagcctcgacgccagccacaacctgctgcgcgccctgagcacttccgagctcggccacctggagcagctgcaggtgctgaccctgcgccacaaccgcatcgccgcgctgcgctggggcccgggtgggccggcggggctgcacaccctggacctcagctacaaccagctggccgctctgctgccgtgcaccgggcccgcgctgagcagcctccgcgccctggcgctcgccgggaatccgctgcgggcgctgcagccccgggccttcgcctgcttccccgcgctgcaactcctcaacctctcctgcaccgcgctgggtcgcggagcccaggggggcatcgccgaggcggcgttcgctggagaggatggcgcgcccctggtcacgctcgaagtcctggatctcagcggcacgttccttgaacgggttgagtcagggtggatcagagacctgccgaagctcacatccctctacctgaggaagatgcctcggctgacgaccctggagggggacattttcaagatgacccccaacctgcagcagctggactgtcaggactccccagcacttgcttctgtcgccacacacatctttcaagatactccacatctacaggtccttctgttccagaactgcaacttgagttccttccctccttggaccctggattcctcccaggtcctatcgatcaacctctttggcaaccccctcacttgcagttgtgacttgtcttggctcctcacggatgcaaagagaactgtcctaagcagggcagcagacactatgtgcgcgccagctgcgggatccagcggccccttctcagcctccctgtcactctcccagctgcccggagtgtgccagtccgaccaaagcaccactctcggggcttcacacccaccttgcttcaaccgctccacctacgcacagggtaccaccgtcgcgcccagcgcagcccccgccacccggcctgcgggagaccagcagagtgtctccaaggcccctaacgtgggctctcgcacgatagctgcatggccgcacagcgatgcacgggaggggactgccccctccacgaccaactctgtagcaggtcacagcaactccagcgttttccccagggctgccagcaccaccaggacccagcaccgaggagaacatgcccccgagcttgtccttgagcctgatatctcagctgcctccaccccactggccagcaagctcctgggccccttccctacctcgtgggaccgcagcataagctcgcctcagcccggccagaggacacacgccacaccccaagcccccaacccgagtctttccgagggcgagattccagtcttgctgctggacgactacagtgaggaggaggaagggaggaaggaggaggtgggaacgcctcaccaggacgtcccctgtgattaccatccctgcaagcacctgcagaccccgtgcgcggagctgcagaggcggtggcggtgccggtgccccggcctcagcggggaagacaccatcccagacccgcccaggctgcagggggtgacggagaccacggacacgtcggcgctggtccactggtgtgcccccaactcggtagtgcatgggtaccagatccgctactctgcggagggctgggcggggaaccagtcggtggtgggggtcatctacgccacggcccggcagcaccctctgtacgggctgtcgccgggcaccacctaccgcgtgtgcgtgctggcggccaacagggcgggcttgagccagccacggtcttcgggctggaggagcccgtgcgccgccttcaccaccaagcccagcttcgcgctcctgctctctgggctgtgcgccgccagcggcctgttgctcgccagcaccgtggtgctgtccgcatgtctctgcaggcggggccagacgctgggcctgcagcgctgcgacacgcacctggtggcctacaaaaacccggcctttgatgattacccgctggggctccagaccgtcagttagcccagcttctgggataacgcgtctcatcgaactggatctgagcgcaaaaaggaagacacagacggtcaaaaacgaccccatccgctcctagggtttctaattcccgtgaagccagaatgccttgagcacacatggaacttgccacactgagtgtctgggtccaaggaactgctgccctcccttccttctacttaactctgttcccagaaacctgatggtcaatgccagatcgctccccactgcaaaaaaaaaaaaaaaaaaaaaaaaaaaaaaaaataaaaaaaaaaaaaaaa

SEQ ID NO: 1859 - protein, 740 aa, Homo sapiens
MRQTLPLLLLTVLRPSWADPPQEKVPLFRVTQQGPWGSSGSNATDSPCEGLPAADATALTLANRNLERLPGCLPRTLRSLDASHNLLRALSTSELGHLEQLQVLTLRHNRIAALRWGPGGPAGLHTLDLSYNQLAALLPCTGPALSSLRALALAGNPLRALQPRAFACFPALQLLNLSCTALGRGAQGGIAEAAFAGEDGAPLVTLEVLDLSGTFLERVESGWIRDLPKLTSLYLRKMPRLTTLEGDIFKMTPNLQQLDCQDSPALASVATHIFQDTPHLQVLLFQNCNLSSFPPWTLDSSQVLSINLFGNPLTCSCDLSWLLTDAKRTVLSRAADTMCAPAAGSSGPFSASLSLSQLPGVCQSDQSTTLGASHPPCFNRSTYAQGTTVAPSAAPATRPAGDQQSVSKAPNVGSRTIAAWPHSDAREGTAPSTTNSVAGHSNSSVFPRAASTTRTQHRGEHAPELVLEPDISAASTPLASKLLGPFPTSWDRSISSPQPGQRTHATPQAPNPSLSEGEIPVLLLDDYSEEEEGRKEEVGTPHQDVPCDYHPCKHLQTPCAELQRRWRCRCPGLSGEDTIPDPPRLQGVTETTDTSALVHWCAPNSVVHGYQIRYSAEGWAGNQSVVGVIYATARQHPLYGLSPGTTYRVCVLAANRAGLSQPRSSGWRSPCAAFTTKPSFALLLSGLCAASGLLLASTVVLSACLCRRGQTLGLQRCDTHLVAYKNPAFDDYPLGLQTVS

SEQ ID NO: 1860 - DNA, 5167 bp, Homo sapiens
ctggagtctcccctggtcgggagcctcagccttctggagactgacaccaccctcttactcagagacgaatcgttttgtcgttgccttcacctccctgaccacaagtgctccggggctctttctgagggaggcagctgttctaggcgggaggctggagtctcctgggcctggacgcaccccggggtgtgagtgatgggtatgcctgaaaggaggggaagtggcgcggctttaatcatctgggctagtccccggcgggcctgggggaacagggaaactggaggcggccttaaagcgtcaggatgagacatcgcaagaggagctgcagatactgagcgtgcgccccgggttctcgccgccttctctccgccgagcagcccttcggccaccctttgcccttaaaaatctgcagactgcgcctcctctccgcgggagcgagacctagcaggcccggggctgggcgtgccctcgcctgccacgctgcgcgctgccctcagccgggccgctggggccgtgcagtgcaccgggcacgccgcgccaggctgggggcaggcaccgagcctccgtgggaggtcccgaggcagcttcgcctgctcgccctggctccagccctcacctgccgcagccttagctgagcagccgccgccactgggcgccccccgctccccacttcgccagcgcccgctcctcggctcggcccggggtagtttgtagggacgcagctctccacgtgcgcgactgcgaggctggacgctacgggctcctggaaaggagacaccagcatttgccacaatgctgtcatccactgactttacatttgcttcctgggagcttgtggtccgcgttgaccatcccaatgaagagcagcagaaagacgtcacactgagagtatctggagaccttcatgttggaggagtgatgctcaagttagtagaacagatcaatatatcccaagactggtcagactttgctctttggtgggaacagaagcattgctggcttctgaaaacccactggaccctggacaaatatggggtccaggcagatgcaaagcttctcttcacccctcagcataaaatgctgcgccttcgtctgccgaatttgaagatggtgaggttgcgagtcagcttctcagctgtggtttttaaagctgtcagtgatatctgcaaaatcctgaatattagaagatcagaagagctttccttgttaaagccgtctggtgactattttaagaagaagaagaaaaaagacaaaaataataaggaacccataattgaagatattctaaacctggagagttctccaacagcttcaggttcatcagtaagtcctggtttatacagtaaaaccatgacccctatatatgaccccatcaatggaacaccagcatcatccaccatgacttggttcagtgacagccctttgacggaacaaaactgcagcatcctcgcattcagccaacccccccagtccccagaagcacttgcggatatgtaccagcctcggtctctggttgataaagccaagctcaatgcaggttggctagactcctcacgctcccttatggaacaaggcatccaagaggatgagcagctgctcttacgatttaaatattattctttcttcgacttgaatcctaaatatgatgctgtccgaataaaccaactctatgagcaagccaggtgggccattctcttagaagaaattgattgcacagaggaagaaatgttgatctttgcagctctacagtaccacattagcaaactgtcgttgtctgctgaaacacaggattttgcaggcgagtccgaggttgatgaaatagaagcggcgctttctaatttggaagtaaccctagaaggtggaaaagcggacagccttttggaggacattactgatatccctaaacttgcagataatctcaaattatttaggcccaagaagttactaccaaaagctttcaaacaatattggtttatctttaaagacacatccatagcatactttaaaaataaggaacttgaacaaggagaaccactagaaaaactaaatcttagaggctgcgaagttgtgcccgatgtaaatgtagcaggaagaaaatttggaatcaagttactaatccctgttgccgatggtatgaatgaaatgtatttgagatgtgaccatgagaatcaatacgcccaatggatggctgcctgcatgttggcatcgaagggcaaaaccatggcagacagctcctaccagccagaggtcctcaacatcctttcatttctgaggatgaaaaacaggaactctgcatctcaggtggcttccagtctcgaaaacatggatatgaacccagaatgttttgtgtcaccacggtgtgcaaaaagacacaaatccaaacagctggccgcccggatcctggaggcgcaccagaacgtggcccagatgcccctggtcgaagccaagctgcggttcatccaggcgtggcagtcactgcctgagtttggcctcacctactaccttgtcagatttaaaggaagcaaaaaagatgacattctgggagtttcatataacaggttgattaaaattgatgcagccaccgggattccagtgacaacatggagattcacaaatatcaaacagtggaatgtaaactgggaaacccggcaggtggtcatcgagtttgaccaaaacgtctttactgctttcacctgcctgagtgcagattgcaagattgtgcacgagtacattggcggctacattttcttgtccacccgctccaaggaccagaatgaaacactcgatgaggacttgttccacaaattgaccggcggtcaggattgaaacaagcacgcgtgctcggctcacaccaacaaggcaagccaaaggcgcccctccccagagggatccctaacgtgcccagcatgtagattctggactaacagacaacatacattcaccgctggtcacccagatcctcattcaaacccactgctggcacatccctttccttactttgccctgtgctaccagccacggaaggagcctctcttgttttttctataaaatgggtaggcaggagaaaagcaggtgccctaagattgctctaaggcccagcatgtggttacagttctctgacttgcagaacctgccaggtgtatggctacaagttatcctcgtgctgatctgtctcattactaagtcaatggagaagacagaaaggtaaaaatcacgtgtagcaagaacaactcttatttcacaaactcaggtatgaaacgaaacgcctgtccttcatggaactgcttttagctcctgtcttttcaaaatggcagagggagttcctacacacactttttccctggaggccaaggtctaggggtagaaaggggaggggtggggctaccaggtagcagttgacaacccaaggtcagaggagtggccctcagtgtcatctgtccacagtgatacctgccaagatgaccactgacccacatctggtcttagtcattggtctcctcagatttctggggccacctgcaagccccattccattcctacagatctctcagccacctgtaagtcctttgtgaagatgtgggtgacacagggggacaggaaaacccatttctcaacccagatccatgtctccactgcttctactctgggttgggattcaggaagacaggcacagtcctctctgttcatagaaacacctgccagtgtcaaggattccagtcaggtgtctatcccaactggtcagggagagaagggcagacccattctcaaagaccaccatgtccaaggtctgacagctccccactggctgcccccacaggggctttaggctggtctgggtcatggggaagcgtccctcttatcgctggtctgtgttctcctggatttggtatctatgttggtacgactcctggccttttatctaaaggactttggcttttgtaaatcacaagccaataatagacttttttctccccctctgttttttgctgtgtcatctctgccttgagactgccttgagacagtgcttgccttgagagagtgagccaattaacagctgcctgaattgtcattttccattttggtttgttagaggtgggaggggtgggttttgagaaggtcaaaagcaataccagaagtaaagggaaatatcagacaatattttattattttttcatagatgttctgccacacaaagaacttggggtgtaaggataaggcaaaagctccaatcccatttttcagttctcctaggatgcacccctcagggagcctggccagagttccgaggcccgtgagcgtcagctgttgctttattttccatcaaagccctctgagaagtgagacctcagcaattccgggagccacatagagacagacttggcaagggaccccctggttctgagccagtagctgccatctggaaattcctcttttagcctctccttagaggtgaatgtgaatgaagcctcccaggcacccgctgaatttctgaggccttgcttaaagctcagaagtggtttaggcatttggaaaatctggttcacatcataaagaacttgatttgaaatgttttctatagaaacaagtgctaagtgtaccgtatatacttgatgttggtcatttctcagtcctatttctcagttctattattttagaacctagtcagttctttaagattataactggtcctacattaaaataatgcttctcgatgtcagattttacctgtttgctgctgagaacatctctgcctaatttaccaaagccagaccttcagttcaacatgcttccttagcttttcatagttgtctgacatttccatgaaaacaaaggaaccaactttgttttaaccaaactttgtttggttacagttttcaggggagcgtttcttccatgacacacagcaacatcccaaagaaataaacaagtgtgacaaaaaaaaaaaaaaacaaacctaaatgctactgttccaaagagcaacttgatggttttttttaatactgagtgcaaaaggtcacccaaattcctatgatgaaattttaaattaatgggcacctttcaacatcatttgcttccttatctacagttgattcagaaatctgcattttttattcttttatatgacttttaagtaaaagatttatatggatttgaaaaaaaaaaaaaaaaa

SEQ ID NO: 1861 - protein, 677 aa, Homo sapiens
MLSSTDFTFASWELVVRVDHPNEEQQKDVTLRVSGDLHVGGVMLKLVEQINISQDWSDFALWWEQKHCWLLKTHWTLDKYGVQADAKLLFTPQHKMLRLRLPNLKMVRLRVSFSAVVFKAVSDICKILNIRRSEELSLLKPSGDYFKKKKKKDKNNKEPIIEDILNLESSPTASGSSVSPGLYSKTMTPIYDPINGTPASSTMTWFSDSPLTEQNCSILAFSQPPQSPEALADMYQPRSLVDKAKLNAGWLDSSRSLMEQGIQEDEQLLLRFKYYSFFDLNPKYDAVRINQLYEQARWAILLEEIDCTEEEMLIFAALQYHISKLSLSAETQDFAGESEVDEIEAALSNLEVTLEGGKADSLLEDITDIPKLADNLKLFRPKKLLPKAFKQYWFIFKDTSIAYFKNKELEQGEPLEKLNLRGCEVVPDVNVAGRKFGIKLLIPVADGMNEMYLRCDHENQYAQWMAACMLASKGKTMADSSYQPEVLNILSFLRMKNRNSASQVASSLENMDMNPECFVSPRCAKRHKSKQLAARILEAHQNVAQMPLVEAKLRFIQAWQSLPEFGLTYYLVRFKGSKKDDILGVSYNRLIKIDAATGIPVTTWRFTNIKQWNVNWETRQVVIEFDQNVFTAFTCLSADCKIVHEYIGGYIFLSTRSKDQNETLDEDLFHKLTGGQD

SEQ ID NO: 1862 - DNA, 518 bp, Homo sapiens
atggcagggattcagaaatctcttgggagagctgtcctaggccctgctggcgtctgggacaagaatgcaagcctgagtgcatatgctacagctctgtctgctggcatgagagtgtacaggtcttcgaggttttgcaggcccgatagctctgggaaagcagaacttggccttttccaaaaattttctgcccttggttttggggatcatttgggcaagcccgaggtgctgtgcatgggggctcctggaatcctgggaagggcagaaagccttggccccagactcatcgtgcagcagctctgagcagtatttcggctgaggagtgacttcagtgaatattcagctgaggagtgacttggccacgtgtcacagccctacttcttgggggcctggtggaagagggtggcgtagaaggttccaaggtcccaaactggaattgtcctgtatgcttggttcacacagtgcgttattttaccttcctctgagctgctaatcgcctgcctctgagctgggtgagataa

SEQ ID NO: 1863 - protein, 99 aa, Homo sapiens
MAGIQKSLGRAVLGPAGVWDKNASLSAYATALSAGMRVYRSSRFCRPDSSGKAELGLFQKFSALGFGDHLGKPEVLCMGAPGILGRAESLGPRLIVQQL

SEQ ID NO: 1864 - DNA, 552 bp, Homo sapiens
atgctatgccaaaatacgctctcccgcccgctcggggatccccggcgagccgcgccgcgaagggggaggtgttcggccgcggccgggagggagccggcaggcggcgtcccctttaaaagccgcgagcgccgcgccacggcgccgccgccgccgtcgccgccgccggagtcctcgccccgccgcgctgcgcccggctcgcgctgcgctagtcgctccgcttcccacaccccgccggggactggcagccgccgccgcacatctgccgccacagcctccgccggctacccgaacgttctcggggccagcgccgagtggatcaccggggaccgcgaggcacccgcgcgccgcagaccccgcgcgggctggagcacccggcagagcgcgccacagcgccgtggcctctgctgcccgggctgcgccagagccgcggacgggcgcgcagagcgccggggactccggagccgatccctagcgccgcgatgcggagcacctactgcaggagatcgggggcctgggacgcgctggccgaggtgtgatcggaccccaggctag

SEQ ID NO: 1865 - protein, 183 aa, Homo sapiens [sequence omitted]

SEQ ID NO: 1866 - DNA, 3150 bp, Homo sapiens
ccacaaagggcacttggccccagggctaggagagcgaggggagagcacagccacccgcctcggcggcccgggactcggctcgactcgccggagaatgcgcccgaggacgacggggcgccagagccgcggtgctttcaactggcgagcgcgaatgggggtgcactggagtaaggcagagtgatgcgggggggcaactcgcctggcaccgagatcgccgccgtgcccttccctggacccggcgtcgcccaggatggctgccccgagccatgggccgcggcggagctagcgcggagcgcccgaccctcgacccccgagtcccggagccggccccgcgcggggccacgcgtccctcgggcgctggttcctaaggaggacgacagcaccagcttctcctttctcccttcccttccctgccccgcactcctccccctgctcgctgttgttgtgtgtcagcacttggctggggacttcttgaacttgcagggagaataacttgcgcaccccactttgcgccggtgcctttgccccagcggagcctgcttcgccatctccgagccccaccgcccctccactcctcggccttgcccgacactgagacgctgttcccagcgtgaaaagagagactgcgcggccggcacccgggagaaggaggaggcaaagaaaaggaacggacattcggtccttgcgccaggtcctttgaccagagtttttccatgtggacgctctttcaatggacgtgtccccgcgtgcttcttagacggactgcggtctcctaaaggtcgaccatggtggccgggacccgctgtcttctagcgttgctgcttccccaggtcctcctgggcggcgcggctggcctcgttccggagctgggccgcaggaagttcgcggcggcgtcgtcgggccgcccctcatcccagccctctgacgaggtcctgagcgagttcgagttgcggctgctcagcatgttcggcctgaaacagagacccacccccagcagggacgccgtggtgcccccctacatgctagacctgtatcgcaggcactcaggtcagccgggctcacccgccccagaccaccggttggagagggcagccagccgagccaacactgtgcgcagcttccaccatgaagaatctttggaagaactaccagaaacgagtgggaaaacaacccggagattcttctttaatttaagttctatccccacggaggagtttatcacctcagcagagcttcaggttttccgagaacagatgcaagatgctttaggaaacaatagcagtttccatcaccgaattaatatttatgaaatcataaaacctgcaacagccaactcgaaattccccgtgaccagacttttggacaccaggttggtgaatcagaatgcaagcaggtgggaaagttttgatgtcacccccgctgtgatgcggtggactgcacagggacacgccaaccatggattcgtggtggaagtggcccacttggaggagaaacaaggtgtctccaagagacatgttaggataagcaggtctttgcaccaagatgaacacagctggtcacagataaggccattgctagtaacttttggccatgatggaaaagggcatcctctccacaaaagagaaaaacgtcaagccaaacacaaacagcggaaacgccttaagtccagctgtaagagacaccctttgtacgtggacttcagtgacgtggggtggaatgactggattgtggctcccccggggtatcacgccttttactgccacggagaatgcccttttcctctggctgatcatctgaactccactaatcatgccattgttcagacgttggtcaactctgttaactctaagattcctaaggcatgctgtgtcccgacagaactcagtgctatctcgatgctgtaccttgacgagaatgaaaaggttgtattaaagaactatcaggacatggttgtggagggttgtgggtgtcgctagtacagcaaaattaaatacataaatatatatatatatatatattttagaaaaaagaaaaaaacaaacaaacaaaaaaaccccaccccagttgacactttaatatttcccaatgaagactttatttatggaatggaatggaaaaaaaaacagctattttgaaaatatatttatatctacgaaaagaagttgggaaaacaaatattttaatcagagaattattccttaaagatttaaaatgtatttagttgtacattttatatgggttcaaccccagcacatgaagtataatggtcagatttattttgtatttatttactattataaccactttttaggaaaaaaatagctaatttgtatttatatgtaatcaaaagaagtatcgggtttgtacataattttccaaaaattgtagttgttttcagttgtgtgtatttaagatgaaaagtctacatggaaggttactctggcaaagtgcttagcacgtttgcttttttgcagtgctactgttgagttcacaagttcaagtccagaaaaaaaaagtggataatccactctgctgactttcaagattattatattattcaattctcaggaatgttgcagagtgattgtccaatccatgagaatttacatccttattaggtggaatatttggataagaaccagacattgctgatctattatagaaactctcctcctgccccttaatttacagaaagaataaagcaggatccatagaaataattaggaaaacgatgaacctgcaggaaagtgaatgatggtttgttgttcttctttcctaaattagtgatcccttcaaaggggctgatctggccaaagtattcaataaaacgtaagatttcttcattattgatattgtggtcatatatatttaaaattgatatctcgtggccctcatcaagggttggaaatttatttgtgttttacctttacctcatctgagagctctttattctccaaagaacccagttttctaactttttgcccaacacgcagcaaaattatgcacatcgtgttttctgcccaccctctgttctctgacctatcagcttgcttttctttccaaggttgtgtgtttgaacacatttctccaaatgttaaacctatttcagataataaatatcaaatctctggcatttcattctataaagtc

SEQ ID NO: 1867 - protein, 396 aa, Homo sapiens
MVAGTRCLLALLLPQVLLGGAAGLVPELGRRKFAAASSGRPSSQPSDEVLSEFELRLLSMFGLKQRPTPSRDAVVPPYMLDLYRRHSGQPGSPAPDHRLERAASRANTVRSFHHEESLEELPETSGKTTRRFFFNLSSIPTEEFITSAELQVFREQMQDALGNNSSFHHRINIYEIIKPATANSKFPVTRLLDTRLVNQNASRWESFDVTPAVMRWTAQGHANHGFVVEVAHLEEKQGVSKRHVRISRSLHQDEHSWSQIRPLLVTFGHDGKGHPLHKREKRQAKHKQRKRLKSSCKRHPLYVDFSDVGWNDWIVAPPGYHAFYCHGECPFPLADHLNSTNHAIVQTLVNSVNSKIPKACCVPTELSAISMLYLDENEKVVLKNYQDMVVEGCGCR

SEQ ID NO: 1868 - DNA, 4655 bp, Homo sapiens
cagtagtagttccccagcgtgcgcccggggagaccgggaacatggcgctgggagcgctgtagcagctgagaaggggctgaggcaccgccgcttcgctgacagccggccaccaggtttctgtctcccagtataatcatatccagccccatggctcttactggggcctctgaaatgtttatcaccaaatctgtgtctgcagttccaacctcttccctgagcatcaaagctgtatttccaactttcgctggatgcttctatctggaaatacactgtggtgaaatgcttccacctcttgctaaaatgaacactgaggaaaaatgaagaagactgacaagcaccagcgaaaagttgcagaatagaaatagccacactcctctggagtctttaattcatccacagccatcatataaaggttttggcatcatgtttgggaagaaaaagaaaaagattgaaatatctggcccgtccaactttgaacacagggttcatactgggtttgatccacaagagcagaagtttaccggccttccccagcagtggcacagcctgttagcagatacggccaacaggccaaagcctatggtggacccttcatgcatcacacccatccagctggctcctatgaagacaatcgttagaggaaacaaaccctgcaaggaaacctccatcaacggcctgctagaggattttgacaacatctcggtgactcgctccaactccctaaggaaagaaagcccacccaccccagatcagggagcctccagccacggtccaggccacgcggaagaaaatggcttcatcaccttctcccagtattccagcgaatccgatactactgctgactacacgaccgaaaagtacagggagaagagtctctatggagatgatctggatccgtattatagaggcagccacgcagccaagcaaaatgggcacgtaatgaaaatgaagcacggggaggcctactattctgaggtgaagcctttgaaatccgattttgccagattttctgccgattatcactcacatttggactcactgagcaaaccaagtgaatacagtgacctcaagtgggagtatcagagagcctcgagtagctcccctctggattattcattccaattcacaccttctagaactgcagggaccagcgggtgctccaaggagagcctggcgtacagtgaaagtgaatggggacccagcctggatgactatgacaggaggccaaagtcttcgtacctgaatcagacaagccctcagcccaccatgcggcagaggtccaggtcaggctcgggactccaggaaccgatgatgccatttggagcaagtgcatttaaaacccatccccaaggacactcctacaactcctacacctaccctcgcttgtccgagcccacaatgtgcattccaaaggtggattacgatcgagcacagatggtcctcagccctccactgtcagggtctgacacctaccccaggggccctgccaaactacctcaaagtcaaagcaaatcgggctattcctcaagcagtcaccagtacccgtctgggtaccacaaagccaccttgtaccatcacccctccctgcagagcagttcgcagtacatctccacggcttcctacctgagctccctcagcctctcatccagcacctacccgccgcccagctggggctcctcctccgaccagcagccctccagggtgtcccatgaacagtttcgggcggccctgcagctggtggtcagcccaggagaccccagggaatacttggccaactttatcaaaatcggggaaggctcaaccggcatcgtatgcatcgccaccgagaaacacacagggaaacaagttgcagtgaagaaaatggacctccggaagcaacagagacgagaactgcttttcaatgaggtcgtgatcatgcgggattaccaccatgacaatgtggttgacatgtacagcagctaccttgtcggcgatgagctctgggtggtcatggagtttctagaaggtggtgccttgacagacattgtgactcacaccagaatgaatgaagaacagatagctactgtctgcctgtcagttctgagagctctctcctaccttcataaccaaggagtgattcacagggacataaaaagtgactccatcctcctgacaagcgatggccggataaagttgtctgattttggtttctgtgctcaagtttccaaagaggtgccgaagaggaaatcattggttggcactccctactggatggcccctgaggtgatttctaggctaccttatgggacagaggtggacatctggtccctcgggatcatggtgatagaaatgattgatggcgagcccccctacttcaatgagcctcccctccaggcgatgcggaggatccgggacagtttacctccaagagtgaaggacctacacaaggtttcttcagtgctccggggattcctagacttgatgttggtgagggagccctctcagagagcaacagcccaggaactcctcggacatccattcttaaaactagcaggtccaccgtcttgcatcgtccccctcatgagacaatacaggcatcactgagcagaggattcgtgtaggtggcaaagctagatgaggacatgagaataattcaggagaacaaaaggaaacacagaacatgcaaaaggcctgtgcattctagaccagccaattggtgggacagcgtgatgaccggcagggttcaacagaccagggcatcttcttgtgtcttaaacaggcatctctccactgacagccggtgtggtcacttggagcacggctttaataagtcattattatatttttcagcccttcatccagcaaatcagaaggactcagtacaaactccgttatgatatatcctagccacatgcagggtaacatgtaggattttctatattgaaagaatacttttctggcaaaaaaaaaaaaaaaagaaagaaaggaaaacaaaaagcacttttttcttaatggtagcagtataatgtattttgcaacgaatttgtaatttttctgtacgatagttttgataatttatagtactttgatgtcatgtagccattgtatcagttgaagtaatacttgtttactagaggagtttgaacaaagcctttcctacttttttatccctttaagagaaccaatgattctttaggaactttgaatactgaatgactctcaatcaccgtcagctttagtaaaatctctttcttatcctaacaagtgtcttatttggtggaagaagaattaagagtgatggtgatggtgtgcacgtttcattaatccaaccaaaaataatgaaataaaatttgagccacagtataccactccttgggataaagttaaatatttttaaagatcacattttccatgaacgcctctagtagcaaaccattcttttgcacaccacaatgtttccctcagtgccctttctcaaatgggtacaatgttcccttgtggccaaatttccctcccagggagcaatttcagtgctaggatcattggattcagttcccaaaatagaatgtttcagtgagaccatgagaattccaggctcacaaagggagaggagagaacagggcaagacgtttggtttcatttgtcaccatttttaaaactctgtatgctagcacaccaaactcttgtctatatttacctttgtaccacagtattaatcgctattgttcatgtatcgtgctggaagtctgaactgactctagaggatgaattagcaagagggtattttaccaggtatgatctgacttcagttgtgcccatgttataatgtgtttccgacataggagagtcgtgctgctgtctagatcttcttgaatgttgataaaaatgaatgactactacaatacattttgtgttgcttgttggatgaatttgcatgttaactgtaggccaatatagatttgcctttaaaactctggaagagctacatagtcatcattagtttctattaattatgcatcagacaaaagccatttgttaccaaactgggaaaacagaggcttttcttaactatttcacatactgtaacaaatatgaatttaaatttgtgatagcgctctggttgctctaagcataattaagaatttttgtaattaataggttgctaattatttatcactgctaaaaaggaaaaaaggcataaaatgaccttctactgattagattttcagttttctttcaaactggaaatgcctccataaatatgatctatgattttgcttcataaaacagcaaatcaatgttttatgtaaaatattaaagcattaatataaatatgtgagaataaaaacaatctaaatccagaaaatggcagtcctaaatgttcatgagacagattgtattaatttaaccaggactatgtagaagtagaaagaaaagaaaaagaaaatcttttttaaaccagaataaacattaaaaactattgcagaaaatagtggattttggattccaaacattttcgacagtgtaatggaaatttttctgtaattttcttaccatcgggtattttttaaagtattcattgagtttaccaaaagttactgtagcttaaaaggttttgtgagcactaactattggcagaaactgcatttgcaaataaaaataaatgtttgcctttt

SEQ ID NO: 1869 - protein, 719 aa, Homo sapiens
MFGKKKKKIEISGPSNFEHRVHTGFDPQEQKFTGLPQQWHSLLADTANRPKPMVDPSCITPIQLAPMKTIVRGNKPCKETSINGLLEDFDNISVTRSNSLRKESPPTPDQGASSHGPGHAEENGFITFSQYSSESDTTADYTTEKYREKSLYGDDLDPYYRGSHAAKQNGHVMKMKHGEAYYSEVKPLKSDFARFSADYHSHLDSLSKPSEYSDLKWEYQRASSSSPLDYSFQFTPSRTAGTSGCSKESLAYSESEWGPSLDDYDRRPKSSYLNQTSPQPTMRQRSRSGSGLQEPMMPFGASAFKTHPQGHSYNSYTYPRLSEPTMCIPKVDYDRAQMVLSPPLSGSDTYPRGPAKLPQSQSKSGYSSSSHQYPSGYHKATLYHHPSLQSSSQYISTASYLSSLSLSSSTYPPPSWGSSSDQQPSRVSHEQFRAALQLVVSPGDPREYLANFIKIGEGSTGIVCIATEKHTGKQVAVKKMDLRKQQRRELLFNEVVIMRDYHHDNVVDMYSSYLVGDELWVVMEFLEGGALTDIVTHTRMNEEQIATVCLSVLRALSYLHNQGVIHRDIKSDSILLTSDGRIKLSDFGFCAQVSKEVPKRKSLVGTPYWMAPEVISRLPYGTEVDIWSLGIMVIEMIDGEPPYFNEPPLQAMRRIRDSLPPRVKDLHKVSSVLRGFLDLMLVREPSQRATAQELLGHPFLKLAGPPSCIVPLMRQYRHH

SEQ ID NO: 1870 - DNA, 4506 bp, Homo sapiens
cagtagtagttccccagcgtgcgcccggggagaccgggaacatggcgctgggagcgctgtagcagctgagaaggggctgaggcaccgccgcttcgctgacagccggccaccagaaatacactgtggtgaaatgcttccacctcttgctaaaatgaacactgaggaaaaatgaagaagactgacaagcaccagcgaaaagttgcagaatagaaatagccacactcctctggagtctttaattcatccacagccatcatataaaggttttggcatcatgtttgggaagaaaaagaaaaagattgaaatatctggcccgtccaactttgaacacagggttcatactgggtttgatccacaagagcagaagtttaccggccttccccagcagtggcacagcctgttagcagatacggccaacaggccaaagcctatggtggacccttcatgcatcacacccatccagctggctcctatgaagacaatcgttagaggaaacaaaccctgcaaggaaacctccatcaacggcctgctagaggattttgacaacatctcggtgactcgctccaactccctaaggaaagaaagcccacccaccccagatcagggagcctccagccacggtccaggccacgcggaagaaaatggcttcatcaccttctcccagtattccagcgaatccgatactactgctgactacacgaccgaaaagtacagggagaagagtctctatggagatgatctggatccgtattatagaggcagccacgcagccaagcaaaatgggcacgtaatgaaaatgaagcacggggaggcctactattctgaggtgaagcctttgaaatccgattttgccagattttctgccgattatcactcacatttggactcactgagcaaaccaagtgaatacagtgacctcaagtgggagtatcagagagcctcgagtagctcccctctggattattcattccaattcacaccttctagaactgcagggaccagcgggtgctccaaggagagcctggcgtacagtgaaagtgaatggggacccagcctggatgactatgacaggaggccaaagtcttcgtacctgaatcagacaagccctcagcccaccatgcggcagaggtccaggtcaggctcgggactccaggaaccgatgatgccatttggagcaagtgcatttaaaacccatccccaaggacactcctacaactcctacacctaccctcgcttgtccgagcccacaatgtgcattccaaaggtggattacgatcgagcacagatggtcctcagccctccactgtcagggtctgacacctaccccaggggccctgccaaactacctcaaagtcaaagcaaatcgggctattcctcaagcagtcaccagtacccgtctgggtaccacaaagccaccttgtaccatcacccctccctgcagagcagttcgcagtacatctccacggcttcctacctgagctccctcagcctctcatccagcacctacccgccgcccagctggggctcctcctccgaccagcagccctccagggtgtcccatgaacagtttcgggcggccctgcagctggtggtcagcccaggagaccccagggaatacttggccaactttatcaaaatcggggaaggctcaaccggcatcgtatgcatcgccaccgagaaacacacagggaaacaagttgcagtgaagaaaatggacctccggaagcaacagagacgagaactgcttttcaatgaggtcgtgatcatgcgggattaccaccatgacaatgtggttgacatgtacagcagctaccttgtcggcgatgagctctgggtggtcatggagtttctagaaggtggtgccttgacagacattgtgactcacaccagaatgaatgaagaacagatagctactgtctgcctgtcagttctgagagctctctcctaccttcataaccaaggagtgattcacagggacataaaaagtgactccatcctcctgacaagcgatggccggataaagttgtctgattttggtttctgtgctcaagtttccaaagaggtgccgaagaggaaatcattggttggcactccctactggatggcccctgaggtgatttctaggctaccttatgggacagaggtggacatctggtccctcgggatcatggtgatagaaatgattgatggcgagcccccctacttcaatgagcctcccctccaggcgatgcggaggatccgggacagtttacctccaagagtgaaggacctacacaaggtttcttcagtgctccggggattcctagacttgatgttggtgagggagccctctcagagagcaacagcccaggaactcctcggacatccattcttaaaactagcaggtccaccgtcttgcatcgtccccctcatgagacaatacaggcatcactgagcagaggattcgtgtaggtggcaaagctagatgaggacatgagaataattcaggagaacaaaaggaaacacagaacatgcaaaaggcctgtgcattctagaccagccaattggtgggacagcgtgatgaccggcagggttcaacagaccagggcatcttcttgtgtcttaaacaggcatctctccactgacagccggtgtggtcacttggagcacggctttaataagtcattattatatttttcagcccttcatccagcaaatcagaaggactcagtacaaactccgttatgatatatcctagccacatgcagggtaacatgtaggattttctatattgaaagaatacttttctggcaaaaaaaaaaaaaaaagaaagaaaggaaaacaaaaagcacttttttcttaatggtagcagtataatgtattttgcaacgaatttgtaatttttctgtacgatagttttgataatttatagtactttgatgtcatgtagccattgtatcagttgaagtaatacttgtttactagaggagtttgaacaaagcctttcctacttttttatccctttaagagaaccaatgattctttaggaactttgaatactgaatgactctcaatcaccgtcagctttagtaaaatctctttcttatcctaacaagtgtcttatttggtggaagaagaattaagagtgatggtgatggtgtgcacgtttcattaatccaaccaaaaataatgaaataaaatttgagccacagtataccactccttgggataaagttaaatatttttaaagatcacattttccatgaacgcctctagtagcaaaccattcttttgcacaccacaatgtttccctcagtgccctttctcaaatgggtacaatgttcccttgtggccaaatttccctcccagggagcaatttcagtgctaggatcattggattcagttcccaaaatagaatgtttcagtgagaccatgagaattccaggctcacaaagggagaggagagaacagggcaagacgtttggtttcatttgtcaccatttttaaaactctgtatgctagcacaccaaactcttgtctatatttacctttgtaccacagtattaatcgctattgttcatgtatcgtgctggaagtctgaactgactctagaggatgaattagcaagagggtattttaccaggtatgatctgacttcagttgtgcccatgttataatgtgtttccgacataggagagtcgtgctgctgtctagatcttcttgaatgttgataaaaatgaatgactactacaatacattttgtgttgcttgttggatgaatttgcatgttaactgtaggccaatatagatttgcctttaaaactctggaagagctacatagtcatcattagtttctattaattatgcatcagacaaaagccatttgttaccaaactgggaaaacagaggcttttcttaactatttcacatactgtaacaaatatgaatttaaatttgtgatagcgctctggttgctctaagcataattaagaatttttgtaattaataggttgctaattatttatcactgctaaaaaggaaaaaaggcataaaatgaccttctactgattagattttcagttttctttcaaactggaaatgcctccataaatatgatctatgattttgcttcataaaacagcaaatcaatgttttatgtaaaatattaaagcattaatataaatatgtgagaataaaaacaatctaaatccagaaaatggcagtcctaaatgttcatgagacagattgtattaatttaaccaggactatgtagaagtagaaagaaaagaaaaagaaaatcttttttaaaccagaataaacattaaaaactattgcagaaaatagtggattttggattccaaacattttcgacagtgtaatggaaatttttctgtaattttcttaccatcgggtattttttaaagtattcattgagtttaccaaaagttactgtagcttaaaaggttttgtgagcactaactattggcagaaactgcatttgcaaataaaaataaatgtttgcctttt

SEQ ID NO: 1871 - protein, 719 aa, Homo sapiens; identical to SEQ ID NO: 1869

SEQ ID NO: 1872 - DNA, 4425 bp, Homo sapiens
actatcgagaagcagatgacaggctcaggccttaccagggatgcacttgccacattttggaaagactacataaaaaacctttaaaaattggagccctttgggcctcaggtatccaaagagcacattttttggaaactcaacactcaggaaggtcgcatagagccagtttatgcagatgtcatccatactgtagggccaatagccaggggccatattaatggttcccacaaggaagaccttgcaaattgctataaatcatctctgaagctcgtgaaagaaaataacatccgatcagttgcatttccctgcatctcaacaggcatttatggctttcccaacgagcctgctgcagtcattgccctcaacaccattaaggaatggcttgccaagaatcaccatgaggtggatcggatcattttctgtgtcttcttagaagttgacttcaaaatctacaaaaagaaaatgaatgagtttttctccgtagacgataataatgaagaagaagaggatgttgaaatgaaagaagattcagatgagaacggtccagaggagaagcaaagtgtggaagaaatggaagagcagagccaagatgcagatggtgtcaacactgtcactgtgcccggccctgcttcagaagaggcagttgaagactgtaaagatgaagattttgcaaaggatgaaaatattacaaaaggcggtgaagtgacagatcattctgtgcgtgaccaagatcatcccgatggacaagagaatgattcaacgaagaatgaaataaaaattgaaacagaatcgcagagctcatatatggaaacagaagaactttcatcaaaccaagaagatgccgtgattgtggagcaaccagaagtgattccattaacagaggaccaagaagaaaaagaaggtgaaaaagctccaggcgaggacacacctaggatgcctgggaaaagtgaaggctccagtgacctagaaaatactccaggtcctgatgttgaaatgaatagtcaggttgacaaggtaaatgacccaacagagagtcaacaagaagatcaactaatagcaggggcacaagatgaagcgaaggaacaaagaaatggaactaaatgacaatcctcagcatcgcaaggcctctcctggctctgggggagctcgggaagatagcagcacacgctgtggaggagggtgggggtggggggaaggcaagtcccatggaaggacggggaatcctttactctaatttctccagctgcattttgttccgtttatctgcagaaaaagaaagaaaaaaaagaaaaaaaaagtttcctttaatttggtggagggacccatgttgacgcatctttcaggcattatccttgtaatttctgtcttttctcttacaactttgccccagggtcacagtggcttgattgaacactcacatgtgtatcctggcccctgtctgctttcttggttatttcacaaagctggtcacacagtggtttattcaaaggaaggggaggaagacagtggtttgataagctgcaggataaattttaggaatcaatgagcccagcagcagtataatccccagacagaggaggcaggatagaaaatgggcaaaagcctcggaaaccacttggaaaaggtctggacaatgaggtgaaaatattttcttcagggttcccaaggcacaatttgttccaagtggctaatgagaaatatggaagctgaattttttccagagcagagtgcagaggcataacagaagggtgggccctggcagccatctgggtctcttccttcctaaccatggtggcaggtgcatccttctttgacactgactttcagcagagcttacttggttcatgaggtcttcacatggagactaccagcaagaggtgactctctgctgcataactgtaaaggatggccctttgctaggtgttacagttaaaagctaagaaaaggggcagtgcatttaggacccaaacatatgcctatgaatatcaaaagctcctcctgaaattgctgtgagttttccataaaagaatatcctgtcttcacccaaggcttgacagcccacagagtggtctcatttgaaattacaggaaattagagcttttgcttgcagttctgccttcctggcctgtgtttaaatgctgtcacttgtttatgccaagttcaaggctgattcaatggttggtcccctcacccagaaaaccctgaaggggaggatacagctctgaaggggggcagcagtactaaaaacccaagatgccagtggtatagtgggcacaagggatggcgaccatgaggatgccaggcatcatcaccaatatctatcctagagccagtataaggccagatgcctacttcccacagcctccccgggttccaaagtcatgtcattgttttcagtggaaacatatcgtttgttgcatatcttcttaaatccatcttccttgtaagggctttagaactaaaacttacttatattgtttttccttaacagagggagaaaaatagtggattattatttctaaaataaaaggatgttctgctttctaaatatcccatcaaaatcttcagttttgcacttttttgatggaaaattcatcttatcttcctatgactttggttttagcctttctgaatttgttaccccttctggatggcttatttgatatactggaatagttaacaagctatacttcagcatatgcactatattctaacaaattttttttaataaaatcaagacatcagcaagaatgacatttacgtgacctcataatgtgggattatggccttctgttgctattccagtttgatatggaagcatctatatcctctattgccgttagatgttgttgcttttcagaaaagtaacgaaaaggctcattttaaagaatccaagaaacgatgtcatccaaatattgacagtttctacatttcatgccatctttataactcaattgaaagttgccgtcattcttgtgaagtatttgacaagtgcaatctgctagaagctcgtttttcttgtgactcccaaatgttagtgctacttagcctcagtaatgagttacagttgaaaaaaacatgagggaaacagagggacagagattttctaatgaacaatgatggaagagacctaatgtccttgctagaaacagccaggatggaaattatccagccctggcattctccttatcatcaatgacagtcattttattcatttatttcaaatgtgggtgggctagaagtggaaggagggaattctctctgcctaaaaattctagaagaatgaaagtaatctttgtatccaggaaactaagagaatgaggaataaatatcttcagcccgactcctgaatttgtttattcttccatctataattagattgtgttttcatttttgctttgtcatgctttttggttgttatttggctatacagttttatgctttaaaacaaatgataaagttaatttccaattcaatagtgaaatattaacaatctaactatagccagatcaaagacacctgaacacagaaaacctttatttgctggtgctgccattgcacaggctgtacaatgaaatagatttgaaaagctgattgattttcccgcacataaattctggatgtcaatttccaaccaaactccaatacagctatgtggcatgaagagttacaggagggagggaggaaaatagccctatgttagtcatgtttgcatacagaggatcaaagtaggccttcaccataatagttctaattaaaatggtcctcgctgtaggagagacaaaggggcttttcctctagctggtaactattcagatgatggacaagtcttctttcataaaagattacaaagaaggcatccgaatcactgtctgtgatactgggtcacatattaatcactgcagctaattgtaaatctttctatgaaacactgaaaagcctctttgtgaattaatacagttctgcttgatgcacttgatttgaaaagacatttctctgtatgtggcgcatgtcggctttgctttgaaaaataacaaagttagcagaatatgttcaatatattttcttggggaatagggtttttattacatgattcattaaggatttgccttaccctgacatttgtgatataaaggaaaatcagaaaaaaagtaattttcttgatcaagatatgtttttacttaatgcaaataaatgtagtctgttgcttgcaaggaaaaaaaaatggcttctgatatctggtataaactgctaaataggataatacgtgcctcttttgttaaaccggcatttaaatgctggactgcttctaaatctgtttgtttcttttcatctgtgccatacactaaaaaacaactgttgccttcatactatatttgttagagcagaatacaaataaaatttgtttgagaggataatgtgaaa

SEQ ID NO: 1873 - protein, 213 aa, Homo sapiens
MNEFFSVDDNNEEEEDVEMKEDSDENGPEEKQSVEEMEEQSQDADGVNTVTVPGPASEEAVEDCKDEDFAKDENITKGGEVTDHSVRDQDHPDGQENDSTKNEIKIETESQSSYMETEELSSNQEDAVIVEQPEVIPLTEDQEEKEGEKAPGEDTPRMPGKSEGSSDLENTPGPDVEMNSQVDKVNDPTESQQEDQLIAGAQDEAKEQRNGTK

SEQ ID NO: 1874 - DNA, 4863 bp, Homo sapiens
gaggcgtgacctagttgacaggctctgaggtgctgctgtggcggcgtccgcggggctgaggcgggtgggagccggagccgagcgcgggctgagggaggagggcggcgactggagagcggcgagcggcgagcagcgcaggacgcagagcctctttcactttttccctgctgagtgccccctcccacccctcccactccacacacaccctgtttgcccgtgagcctggggaacttgcagcttaaagccagccacccccacggcaacatgtaccccagcaacaagaagaaaaaggtgtggagagaggagaaagaacgtttattgaagatgaccttagaagagagacgcaaagaatacctaagagactatattcccctgaacagcattctatcatggaaggaggagatgaagggcaagggccaaaatgatgaagaaaatactcaggaaacatcccaggtgaagaaaagtttgactgaaaaagtttctctctatagaggtgacatcacattgctagaggtagatgctatagtcaatgccgcaaatgccagtcttcttggaggaggaggtgtggatggctgtattcatagagcagccggcccctgtttgctagctgaatgtcgtaacctgaatggctgtgatactggacatgcaaaaatcacatgtggctatgaccttcctgcaaaatatgtcatccatactgtagggccaatagccaggggccatattaatggttcccacaaggaagaccttgcaaattgctataaatcatctctgaagctcgtgaaagaaaataacatccgatcagttgcatttccctgcatctcaacaggcatttatggctttcccaacgagcctgctgcagtcattgccctcaacaccattaaggaatggcttgccaagaatcaccatgaggtggatcggatcattttctgtgtcttcttagaagttgacttcaaaatctacaaaaagaaaatgaatgagtttttctccgtagacgataataatgaagaagaagaggatgttgaaatgaaagaagattcagatgagaacggtccagaggagaagcaaagtgtggaagaaatggaagagcagagccaagatgcagatggtgtcaacactgtcactgtgcccggccctgcttcagaagaggcagttgaagactgtaaagatgaagattttgcaaaggatgaaaatattacaaaaggcggtgaagtgacagatcattctgtgcgtgaccaagatcatcccgatggacaagagaatgattcaacgaagaatgaaataaaaattgaaacagaatcgcagagctcatatatggaaacagaagaactttcatcaaaccaagaagatgccgtgattgtggagcaaccagaagtgattccattaacagaggaccaagaagaaaaagaaggtgaaaaagctccaggcgaggacacacctaggatgcctgggaaaagtgaaggctccagtgacctagaaaatactccaggtcctgatgcaggggcacaagatgaagcgaaggaacaaagaaatggaactaaatgacaatcctcagcatcgcaaggcctctcctggctctgggggagctcgggaagatagcagcacacgctgtggaggagggtgggggtggggggaaggcaagtcccatggaaggacggggaatcctttactctaatttctccagctgcattttgttccgtttatctgcagaaaaagaaagaaaaaaaagaaaaaaaaagtttcctttaatttggtggagggacccatgttgacgcatctttcaggcattatccttgtaatttctgtcttttctcttacaactttgccccagggtcacagtggcttgattgaacactcacatgtgtatcctggcccctgtctgctttcttggttatttcacaaagctggtcacacagtggtttattcaaaggaaggggaggaagacagtggtttgataagctgcaggataaattttaggaatcaatgagcccagcagcagtataatccccagacagaggaggcaggatagaaaatgggcaaaagcctcggaaaccacttggaaaaggtctggacaatgaggtgaaaatattttcttcagggttcccaaggcacaatttgttccaagtggctaatgagaaatatggaagctgaattttttccagagcagagtgcagaggcataacagaagggtgggccctggcagccatctgggtctcttccttcctaaccatggtggcaggtgcatccttctttgacactgactttcagcagagcttacttggttcatgaggtcttcacatggagactaccagcaagaggtgactctctgctgcataactgtaaaggatggccctttgctaggtgttacagttaaaagctaagaaaaggggcagtgcatttaggacccaaacatatgcctatgaatatcaaaagctcctcctgaaattgctgtgagttttccataaaagaatatcctgtcttcacccaaggcttgacagcccacagagtggtctcatttgaaattacaggaaattagagcttttgcttgcagttctgccttcctggcctgtgtttaaatgctgtcacttgtttatgccaagttcaaggctgattcaatggttggtcccctcacccagaaaaccctgaaggggaggatacagctctgaaggggggcagcagtactaaaaacccaagatgccagtggtatagtgggcacaagggatggcgaccatgaggatgccaggcatcatcaccaatatctatcctagagccagtataaggccagatgcctacttcccacagcctccccgggttccaaagtcatgtcattgttttcagtggaaacatatcgtttgttgcatatcttcttaaatccatcttccttgtaagggctttagaactaaaacttacttatattgtttttccttaacagagggagaaaaatagtggattattatttctaaaataaaaggatgttctgctttctaaatatcccatcaaaatcttcagttttgcacttttttgatggaaaattcatcttatcttcctatgactttggttttagcctttctgaatttgttaccccttctggatggcttatttgatatactggaatagttaacaagctatacttcagcatatgcactatattctaacaaattttttttaataaaatcaagacatcagcaagaatgacatttacgtgacctcataatgtgggattatggccttctgttgctattccagtttgatatggaagcatctatatcctctattgccgttagatgttgttgcttttcagaaaagtaacgaaaaggctcattttaaagaatccaagaaacgatgtcatccaaatattgacagtttctacatttcatgccatctttataactcaattgaaagttgccgtcattcttgtgaagtatttgacaagtgcaatctgctagaagctcgtttttcttgtgactcccaaatgttagtgctacttagcctcagtaatgagttacagttgaaaaaaacatgagggaaacagagggacagagattttctaatgaacaatgatggaagagacctaatgtccttgctagaaacagccaggatggaaattatccagccctggcattctccttatcatcaatgacagtcattttattcatttatttcaaatgtgggtgggctagaagtggaaggagggaattctctctgcctaaaaattctagaagaatgaaagtaatctttgtatccaggaaactaagagaatgaggaataaatatcttcagcccgactcctgaatttgtttattcttccatctataattagattgtgttttcatttttgctttgtcatgctttttggttgttatttggctatacagttttatgctttaaaacaaatgataaagttaatttccaattcaatagtgaaatattaacaatctaactatagccagatcaaagacacctgaacacagaaaacctttatttgctggtgctgccattgcacaggctgtacaatgaaatagatttgaaaagctgattgattttcccgcacataaattctggatgtcaatttccaaccaaactccaatacagctatgtggcatgaagagttacaggagggagggaggaaaatagccctatgttagtcatgtttgcatacagaggatcaaagtaggccttcaccataatagttctaattaaaatggtcctcgctgtaggagagacaaaggggcttttcctctagctggtaactattcagatgatggacaagtcttctttcataaaagattacaaagaaggcatccgaatcactgtctgtgatactgggtcacatattaatcactgcagctaattgtaaatctttctatgaaacactgaaaagcctctttgtgaattaatacagttctgcttgatgcacttgatttgaaaagacatttctctgtatgtggcgcatgtcggctttgctttgaaaaataacaaagttagcagaatatgttcaatatattttcttggggaatagggtttttattacatgattcattaaggatttgccttaccctgacatttgtgatataaaggaaaatcagaaaaaaagtaattttcttgatcaagatatgtttttacttaatgcaaataaatgtagtctgttgcttgcaaggaaaaaaaaatggcttctgatatctggtataaactgctaaataggataatacgtgcctcttttgttaaaccggcatttaaatgctggactgcttctaaatctgtttgtttcttttcatctgtgccatacactaaaaaacaactgttgccttcatactatatttgttagagcagaatacaaataaaatttgtttgagaggataatgtgaaa

SEQ ID NO: 1875 - protein, 425 aa, Homo sapiens
MYPSNKKKKVWREEKERLLKMTLEERRKEYLRDYIPLNSILSWKEEMKGKGQNDEENTQETSQVKKSLTEKVSLYRGDITLLEVDAIVNAANASLLGGGGVDGCIHRAAGPCLLAECRNLNGCDTGHAKITCGYDLPAKYVIHTVGPIARGHINGSHKEDLANCYKSSLKLVKENNIRSVAFPCISTGIYGFPNEPAAVIALNTIKEWLAKNHHEVDRIIFCVFLEVDFKIYKKKMNEFFSVDDNNEEEEDVEMKEDSDENGPEEKQSVEEMEEQSQDADGVNTVTVPGPASEEAVEDCKDEDFAKDENITKGGEVTDHSVRDQDHPDGQENDSTKNEIKIETESQSSYMETEELSSNQEDAVIVEQPEVIPLTEDQEEKEGEKAPGEDTPRMPGKSEGSSDLENTPGPDAGAQDEAKEQRNGTK

SEQ ID NO: 1876 - DNA, 6287 bp, Homo sapiens
gcggcggcggcggcggcggcagcagcggggctgggggcggcgagtggcccgcgcgacacgcgccggcctcgaccctatgctttgattcgcgtggcgcaggcgcctactgccccgccggcggggcccgggcttcctgccgcgggatgttctcccgaaggagccacggggatgtgaagaagtccacccagaaggtgctggacccgaagaaggacgtgctgacccgcctgaagcacctgcgggcgctgctggataatgtggatgcaaatgatcttaagcagttttttgagaccaactattctcagatatatttcatcttctatgaaaattttatagcactggaaaatagtttgaaattaaaagggaataataagtcacaaagggaggagctggactccatcctcttcctttttgaaaaaatactgcagtttctacctgaacgaattttctttcgatggcattaccagagtataggctcaactttaaagaagcttctacacactggaaattctattaagataagatgtgaaggaatcaggctgtttcttctgtggcttcaagcacttcagacaaactgtgcagaagagcaggttctgatttttgcttgcctggtgcctggtttcccagcagtcatgtcatccaggggcccttgcacactggagacactcatcaatcccagccctagtgtagctgatgtaaagatatatccagaagaaatcactccactcctaccagccatatcaggggagaagattgctgaggaccaaacctgcttttttcttcaaatactgttgaagtatatggttattcaggctgcgagcttggagtggaagaataaggagaatcaagatactggttttaaatttctttttacattgtttcgaaagtattatcttcctcatttatttccatcatttactaagttaacaaacatctacaaacctgtacttgacatcccccatttgagaccaaagcctgtgtacattactaccactcgagacaatgagaacatttacagtacaaagattccatatatggcagctcgtgttgtttttattaagtggattgtaaccttctttttggaaaaaaagtatctaactgcaacacaaaacactaaaaatggagttgatgtattgcctaaaatcatccagactgttggtggtggtgctgtgcaggagagagcgcctgagctggatggtggtgggcccacggagcaggacaaaagccattctaacagcagcaccttgtcggaccgaagactcagcaactccagcctctgtagcattgaagaagagcaccgaatggtgtatgaaatggtacagcggattctcttgtcaacacgaggttatgtcaacttcgtgaatgaagtatttcaccaggcatttttgttgccttcctgtgagatagctgtaacaagaaaagtagttcaagtgtacagaaagtggattctccaggacaaacctgtgttcatggaggagccagatagaaaagatgttgcccaagaagatgctgaaaaattaggattttccgagactgatagcaaggaggcctcatctgaaagttctggtcataaacgatcttccagttggggacgcacatactccttcacaagtgcaatgagcagagggtgtgtgacagaggaggaaaatacaaatgtgaaagccggcgtccaggctttgttgcaggtatttttgacgaactctgcaaacatctttttgttggaaccatgtgctgaagttcctgtgctcttgaaagaacaagttgatgcttgtaaagctgttttgattatttttaggcgcatgataatggagcttacaatgaataaaaagacatgggaacagatgttgcaaatactactcaggataacagaagctgtcatgcagaagccaaaggataaacaaataaaggacttgtttgcccagagcttggcagggttactatttaggacgctcatggtagcttggatccgagcaaacctctgtgtgtacatttctcgagagctctgggatgactttcttggtgtgctgtcctccctcacggaatgggaggaacttataaacgagtgggccaacattatggactccttgacagcagtgcttgcaagaaccgtttatggagttgagatgacaaacctacctctggataaattaagtgaacaaaaggaaaagaagcaacgaggcaaaggctgtgttctagatcctcagaaaggaaccaccgtggggaggtccttttctctcagctggcggagccacccagatgtgaccgaaccgatgcgatttaggagtgccaccacgtctggagcaccgggagtggaaaaggcaagaaatattgttcgccaaaaagcaactgaagtggaggagtgtcaacagtcagaaaatgcacctgcagccggatctggccatctcacagtgggacagcagcagcaggtccttcggagcagcagcacctccgacatccccgagccgctgtgctcagattcttctcagggtcaaaaggcagaaaacacacagaattcgagttcttcagagcctcagcctattcaagagaataaaggacatgtgaagagagaacatgaaggaataacaatcttagttcgaagaagcagcagccctgctgaattggatttgaaagatgatttgcagcagacacaaggaaaatgtagggaaagacagaagagtgaaagtaccaacagtgacacaactctgggctgtaccaatgaggcagagctgtccatgggcccatggcagacctgtgaggaagacccagaactgaatactcccacagatgttgtggctgatgctgatgcccgtcattggttacaactgagtcccaccgatgcttcaaatttaacagatagcagcgagtgcctcacagatgactgtagtataatcgccggggggagcctcactggttggcacccagactctgctgctgtgttatggcgaagggtcttggggatcctcggagatgtgaataacatccagtcacccaagatccatgccagagttttctgctatctctatgaactctggtacaaactagcaaagatacgggataatctagcaataagcctggataaccagtcttctccatctcctccagttttgatcccaccactcagaatgtttgcatcatggctgtttaaggcggcgacactgccaaatgaatataaggaaggcaaactacaagcctacaggctgatctgtgccatgatgaccagacgccaggacgttctgccaaactcagatttcctggtgcatttttaccttgtgatgcacctgggattaaccagcgaggatcaggatatcttaaatacgatcataaggcactgtccaccccgctttttctccctgggttttcctggcttctcaatgctggtgggggacttcatcacggccgctgccagggtccttagcacagacattttgacggcgcctcgttcagaggctgtcactgtcctcggctctctggtctgctttccaaatacctaccaggagattcctttactgcagtcagtgccagaagtaaatgaggccattacaggaactgaagatgtcaagcattacctcataaatattttactgaagaatgccacagaagaaccaaatgaatatgcaagatgcattgctgtttgctcccttggggtctggatatgtgaagagcttgcacagtgtacaagccaccctcaggtgaaagaggccatcaatgtgataggagtaactctgaagtttcccaacaaaatcgtggcccaggtagcttgcgatgtccttcagttgctggtttcctactgggagaagcttcagatgtttgaaacctctctgcctcggaaaatggcagaaatcctcgtggccacagttgcttttcttttaccaagtgcagagtactcctcagtggaaacagacaagaagtttattgtgtccttgctactctgcctcttggactggtgcatggcattgcccgtgagtgtccttctccaccccgtgtccacagcagtcctagaggagcagcattcggccagagcccccttgctggattatatctacagggttttgcactgctgtgtgtgtggctcaagcacgtacacccaacagagtcactacatactgaccctggctgacttgtcatccacggattatgaccccttcctgccactggcaaatgtgaagagctctgagccagtccagtatcattcatcagcagaattgggtaacctgctgactgttgaagaggagaagaagagaagaagtttggagttgatccctttgactgctcgaatggtgatggcccacctggtgaaccacctggggcactaccccctcagtgggggccctgccatactgcacagccttgtcagcgagaaccatgacaatgcccatgtggaaggctccgagctgtcctttgaggtgttcagaagtccaaacctgcagctgtttgtatttaatgatagcaccctcatctcctaccttcagacacccacagaaggaccggtagggggatcaccagtgggctctctctctgatgtgagagtaattgtgagggatatctcagggaagtactcttgggatggtaaggttttatatggacctttggaaggctgcttagcacccaatggaagaaatccttcatttctgatttcgagctggcatcgtgacacatttggacctcagaaagactcttctcaagttgaggagggggatgatgttcttgacaaattacttgaaaacattggccatacaagtcctgaatgccttttaccgtcacagctaaatctaaatgaaccttccctaaccccatgtggcatgaactatgaccaagagaaggaaatcattgaggtcattttgcgccaaaatgctcaagaggatgagtatatccagagtcataacttcgattctgcaatgaaagtcaccagccaagggcagccctccccagtggagccccgaggacccttttatttctgcaggttattgcttgatgacttgggaatgaattcttgggacagaaggaagaattttcatctattgaagaaaaattcaaaattattgagagagctgaaaaatttggactcccgccagtgccgtgagacacacaaaatcgcagtgttttacattgctgaaggtcaagaagacaagtgttcaatcctctctaatgaaagaggaagccaagcatatgaagactttgttgctggacttggatgggaggtggatctctccacccactgtgggttcatgggtggccttcagcgcaatggcagcaccgggcagacggccccttactatgctacctcaactgtggaagtgattttccatgtttccactcgaatgccgtcagactcagatgattccctcaccaaaaagcttcgtcacttggggaatgacgaggtccatatcgtctggtctgaacactccagagactaccgcaggggtattatcccaactgcctttggagatgtttcaatcattatttacccaatgaagaatcacatgttcttcatcgcgataacgaagaaacctgaggttccattttttgggcctctgtttgatggagccatagtgagtgggaagctgctgccaagccttgtatgtgccacgtgcatcaacgccagcagggctgtgaagtgcctcatcccactctaccagagcttctatgaagagcgagctctgtatctcgaagcaataattcagaaccaccgcgaagtaatgacattcgaggatttcgcagcccaagtcttttctccctctcccagctactccctcagcggaacggattaaaacacgtaaaggtctcatttcaatatttgagcaaggggccctggcctccagtctgagtgctgacctcgaagagcccctgagtgaggaggagacagaacaccctctcctgcctctgccccgagccactaaacccagaatctccaggaaatttcgttgctgtactagtgccctcagcaggtcttcccattagtggacttctgaagcccatggtgaatcccactaccgtgtctcagatgggactcaaactaggctgtatcatcttgtcctgaaacctcacaaaccttggacttccaaagaagaaaagaaaaagtcaccaaaaaccagagatgaacccactgacacgtgggcactggtgtggctgctctgggcagatgacagcaggaaaagattctgcgctttcagggagggggcagagggcagcttgcttctgcaccccaagttgtttcttctcatttatgaacccaagcatgattcacaaaggggctggcaaaacaattgtctaattgaggaatctgatctgca

SEQ ID NO: 1877 - protein, 1873 aa, Homo sapiens
MFSRRSHGDVKKSTQKVLDPKKDVLTRLKHLRALLDNVDANDLKQFFETNYSQIYFIFYENFIALENSLKLKGNNKSQREELDSILFLFEKILQFLPERIFFRWHYQSIGSTLKKLLHTGNSIKIRCEGIRLFLLWLQALQTNCAEEQVLIFACLVPGFPAVMSSRGPCTLETLINPSPSVADVKIYPEEITPLLPAISGEKIAEDQTCFFLQILLKYMVIQAASLEWKNKENQDTGFKFLFTLFRKYYLPHLFPSFTKLTNIYKPVLDIPHLRPKPVYITTTRDNENIYSTKIPYMAARVVFIKWIVTFFLEKKYLTATQNTKNGVDVLPKIIQTVGGGAVQERAPELDGGGPTEQDKSHSNSSTLSDRRLSNSSLCSIEEEHRMVYEMVQRILLSTRGYVNFVNEVFHQAFLLPSCEIAVTRKVVQVYRKWILQDKPVFMEEPDRKDVAQEDAEKLGFSETDSKEASSESSGHKRSSSWGRTYSFTSAMSRGCVTEEENTNVKAGVQALLQVFLTNSANIFLLEPCAEVPVLLKEQVDACKAVLIIFRRMIMELTMNKKTWEQMLQILLRITEAVMQKPKDKQIKDLFAQSLAGLLFRTLMVAWIRANLCVYISRELWDDFLGVLSSLTEWEELINEWANIMDSLTAVLARTVYGVEMTNLPLDKLSEQKEKKQRGKGCVLDPQKGTTVGRSFSLSWRSHPDVTEPMRFRSATTSGAPGVEKARNIVRQKATEVEECQQSENAPAAGSGHLTVGQQQQVLRSSSTSDIPEPLCSDSSQGQKAENTQNSSSSEPQPIQENKGHVKREHEGITILVRRSSSPAELDLKDDLQQTQGKCRERQKSESTNSDTTLGCTNEAELSMGPWQTCEEDPELNTPTDVVADADARHWLQLSPTDASNLTDSSECLTDDCSIIAGGSLTGWHPDSAAVLWRRVLGILGDVNNIQSPKIHARVFCYLYELWYKLAKIRDNLAISLDNQSSPSPPVLIPPLRMFASWLFKAATLPNEYKEGKLQAYRLICAMMTRRQDVLPNSDFLVHFYLVMHLGLTSEDQDILNTIIRHCPPRFFSLGFPGFSMLVGDFITAAARVLSTDILTAPRSEAVTVLGSLVCFPNTYQEIPLLQSVPEVNEAITGTEDVKHYLINILLKNATEEPNEYARCIAVCSLGVWICEELAQCTSHPQVKEAINVIGVTLKFPNKIVAQVACDVLQLLVSYWEKLQMFETSLPRKMAEILVATVAFLLPSAEYSSVETDKKFIVSLLLCLLDWCMALPVSVLLHPVSTAVLEEQHSARAPLLDYIYRVLHCCVCGSSTYTQQSHYILTLADLSSTDYDPFLPLANVKSSEPVQYHSSAELGNLLTVEEEKKRRSLELIPLTARMVMAHLVNHLGHYPLSGGPAILHSLVSENHDNAHVEGSELSFEVFRSPNLQLFVFNDSTLISYLQTPTEGPVGGSPVGSLSDVRVIVRDISGKYSWDGKVLYGPLEGCLAPNGRNPSFLISSWHRDTFGPQKDSSQVEEGDDVLDKLLENIGHTSPECLLPSQLNLNEPSLTPCGMNYDQEKEIIEVILRQNAQEDEYIQSHNFDSAMKVTSQGQPSPVEPRGPFYFCRLLLDDLGMNSWDRRKNFHLLKKNSKLLRELKNLDSRQCRETHKIAVFYIAEGQEDKCSILSNERGSQAYEDFVAGLGWEVDLSTHCGFMGGLQRNGSTGQTAPYYATSTVEVIFHVSTRMPSDSDDSLTKKLRHLGNDEVHIVWSEHSRDYRRGIIPTAFGDVSIIIYPMKNHMFFIAITKKPEVPFFGPLFDGAIVSGKLLPSLVCATCINASRAVKCLIPLYQSFYEERALYLEAIIQNHREVMTFEDFAAQVFSPSPSYSLSGTD

SEQ ID NO: 1878 - DNA, 1267 bp, Homo sapiens
acttttcaggggacattcagaggcatcagccccttcctcctcaccagctcccagagttcccatctccatccccaatcctaaagaaggaaatcgatgccacggtcctcaaggagccctggggacccaggcgccctactcgaagatgtggcccacaatcccagaccccggaggattgcccagcgaggccggaacaccagcaggatggcagaggacacctccccaaacatgaatgacaacatcctgttgcctgtccgcaacaatgaccaagccctaggcctgactcagtgcatgctgggatgtgtgtcctggttcacctgttttgcctgctccctgagaactcaggcccagcaggttctgtttaacacgtgcagatgcaagctgctgtgccagaagctcatggagaagacaggcattctgctcctctgtgctttcggattctggatgttttctattcacttaccatcgaaaatgaaagtctggcaggatgacagcataaatggtccactgcagagcttgaggttgtaccaggagaaggtgcgacatcacagtggggaaatccaggacctccgaggtagcatgaaccagctcattgccaagctccaggagatggaagccatgtccgatgagcaaaaaatggcccagaaaataatgaagatgatacacggagattacatcgaaaagccagactttgccctgaagtctataggggccagcattgactttgagcacacgtcagtcacctataaccatgagaaggcccactcctactggaactggatccagctgtggaactacgcacagcccccagacgtgatccttgagcccaacgtgacacctggcaattgctgggcctttgagggtgaccgcggccaggtgaccatccaattggctcagaaggtttacctgtccaacctcacgctgcagcacatccccaagaccatctcattgtcaggcagcctggacaccgcccccaaggacttcgtcatctatggcatggagggctcccccaaggaggaggtgttcctgggggcatttcagtttcagccagaaaacatcatccagatgttcccactccagaaccagccggcccgggctttcagtgcggtcaaggtgaagatctcaagcaactgggggaacccaggcttcacttgcctgtaccgcgtgcgagtgcatggctctgtggccccgcccagagagcagcctcaccagaacccctaccctaagagagattaaaatttattctttacccccaaaaaaaaaaaaaaaa

SEQ ID NO: 1879 - protein, 379 aa, Homo sapiens
MPRSSRSPGDPGALLEDVAHNPRPRRIAQRGRNTSRMAEDTSPNMNDNILLPVRNNDQALGLTQCMLGCVSWFTCFACSLRTQAQQVLFNTCRCKLLCQKLMEKTGILLLCAFGFWMFSIHLPSKMKVWQDDSINGPLQSLRLYQEKVRHHSGEIQDLRGSMNQLIAKLQEMEAMSDEQKMAQKIMKMIHGDYIEKPDFALKSIGASIDFEHTSVTYNHEKAHSYWNWIQLWNYAQPPDVILEPNVTPGNCWAFEGDRGQVTIQLAQKVYLSNLTLQHIPKTISLSGSLDTAPKDFVIYGMEGSPKEEVFLGAFQFQPENIIQMFPLQNQPARAFSAVKVKISSNWGNPGFTCLYRVRVHGSVAPPREQPHQNPYPKRD

SEQ ID NO: 1880 - DNA, 1897 bp, Homo sapiens
aaacacttgcaaccacaagcaaactcgccgctccctgggtcccttcccagtggactctgcacattgggagccttataaagtagcctctgcatctgcctgcctcgggcagaggagggctaccctggggctgagagttcacctgtctcaggaaccacctgagcccacagatcctgtgggcagcggccagggcagccatggcttgggcaagtaggctgggcctgctgctggcactgctgctgcccgtggtcggtgcctccacgccaggcaccgtggtccgactcaacaaggcagcattgagctacgtgtctgaaattgggaaagcccctctccagcgggccctgcaggtcactgtccctcatttcctggactggagtggagaggcgcttcagcccaccaggatccggattctgaatgtccatgtgccccgcctccacctgaaattcattgctggtttcggagtgcgcctgctggcagcagctaattttactttcaaggtctttcgcgccccagagcccctggagctgacgctgcctgtggaactgctggctgacacccgcgtgacccagagctccatcaggacccctgtggtcagcatctctgcctgctctttattctcgggccacgccaacgagtttgatggcagtaacagcacctcccacgcgctgctggtcctggtgcagaagcacattaaagctgtcttgagtaacaagctgtgcctgagcatctccaacctggtgcagggtgtcaatgtccacctgggcaccttaattggcctcaaccccgtgggtcctgagtcccagatccgctattccatggtcagtgtgcccactgtcaccagtgactacatttccctggaagtcaatgctgttctcttcctgctgggcaagcccatcatcctgcccacggatgccaccccttttgtgttgccaaggcatgtgggtaccgagggctccatggccaccgtgggcctctcccagcagctgtttgactctgcgctcctgctgctgcagaaggccggtgccctcaacctggacatcacagggcagctgaggtcggatgacaacctgctgaacacctctgctctgggccggctcatcccggaggtggcccgccagtttcccgagcccatgcctgtggtgctcaaggtgcggctgggtgccacacctgtggccatgctccacacaaacaacgccaccctgcggctgcagcccttcgtggaggtcctggccacagcctccaactcggctttccagtccctcttctccctggatgtggtagtgaacttgagactccagctctctgtgtccaaggtgaagcttcaggggaccacgtctgtgctgggggatgtccagctcacggtggcctcctccaacgtgggcttcattgatacagatcaggtgcgcacactgatgggcaccgtttttgagaagcccctgctggaccatctcaatgctctcttggccatgggaattgccctccctggtgtggtcaacctccactatgtcgcccctgagatctttgtctatgagggctacgtggtgatatccagtggactcttctaccagagctgaggcaagaccactgggaggcctgagagtgggccagctcgctgctcaggcgaatttctcatttcaagccactggggaaactgaggcaaaaccatacttagtcatcaccaacaagctggactgcttagctgggctgttttatcttccctgagtgcctgggtctccctccctcacttctgccctttcccttcctcctcctcttctcctccctcttccctcatctcccccctccttcctctgccccaccccagcggggagcagactgctcctccaggctgtatagacctgccctcttgcattaaacaacttctcttgagctgcaactttca

SEQ ID NO: 1881 - protein, 458 aa, Homo sapiens
MAWASRLGLLLALLLPVVGASTPGTVVRLNKAALSYVSEIGKAPLQRALQVTVPHFLDWSGEALQPTRIRILNVHVPRLHLKFIAGFGVRLLAAANFTFKVFRAPEPLELTLPVELLADTRVTQSSIRTPVVSISACSLFSGHANEFDGSNSTSHALLVLVQKHIKAVLSNKLCLSISNLVQGVNVHLGTLIGLNPVGPESQIRYSMVSVPTVTSDYISLEVNAVLFLLGKPIILPTDATPFVLPRHVGTEGSMATVGLSQQLFDSALLLLQKAGALNLDITGQLRSDDNLLNTSALGRLIPEVARQFPEPMPVVLKVRLGATPVAMLHTNNATLRLQPFVEVLATASNSAFQSLFSLDVVVNLRLQLSVSKVKLQGTTSVLGDVQLTVASSNVGFIDTDQVRTLMGTVFEKPLLDHLNALLAMGIALPGVVNLHYVAPEIFVYEGYVVISSGLFYQS

SEQ ID NO: 1882 - DNA, 6412 bp, Homo sapiens
gtctggtggcccgacccgcgccgcccgcggctcccttatgtctctcgccgtctccagcctcagtccctctctgtctctctctcagtctctctccctgtcctccccggccgctcctccgagatgacgccggggtcggtgccccgggcctgccctatcccctggctccagggctaggcgggaccgagggctgccccagacagacggacccgcggacccacagaccccgcgcccaggagaggagccgcgccgcccgccgctggcagcccgtcaccatggaccctccatccctcgacacagccatccagcatgccctggcgggcctctatcctcctttcgaggccacagcacccaccgtcctgggtcaggtgttccgtctcctggactctggcttccagggggatgggctgagcttccttctggatttcctgatccctgccaagcgcctgtgtgagcaagtgcgagaagcagcctgtgctccctactcacactgcctcttcttacacgagggctggccactctgtctgagggatgaagttgtggtccacttggcacccctcaaccctctcttattgcgccagggtgacttctacctccaagtggagccccaggaggagcagtctgtctgcatcatgatcaaatgcctctccctggacctctgcacagtggacaagaagcctgttccagagccagcctaccctatacttttcacccaagaatggctggaggccatcaacagtgactttgagggaaatcccctacacaactgcttggtagcatcagaaaatgggattgcccctgtgccttggaccaagataaccagcccagagtttgtggatgacagaccccaagtagtgaatgccctctgccaagcctgggggccccttccattagaggcactggatttgagcagccctcaagagttgcaccaggccagctccccagacaaccaggtgcttcctgcccagagtttggccaagggtaagggcaggacatatgggagcaagtatccaggactcatcaaggtggagcaagcccggtgtggggaggtggctttcaggatggacgaggtggtcagccaggacttcgagggagactatgtggctctcctaggcttttcccaagagagcagaggagagtctcccagtagggaggcaggcacatccagtgggtgtacttctggggcactagaggagatagctggaactaaggaaactcccttatttcaaaagatactgcctctctcagaggccaatgaaggaccttccttgggaaatcgggcttgcacaaagccagaaagctctgaggagaggccctataatttgggcttcaggagaaaggtcaatcttaaagcacccacccacaactcagaaaggccgccccaaggctcctacatgaatgtccttgaggacgcactggactgtgcctctggtctcagggcaggtgtctcacaagagccagctgcctccaagatgcagggacctctaggaaacccagagaatatggtgcagctcaggcctggaccaagacaagcctcctctccccgcctgtccccagcttctcctgcagctgcagcctctgaaacaaagatagaggtgaagaccaaagagagaaatgggagacttcccaagcccatgccctgccctagcagaaacacctcctcccctgagccccccactcctgggctcaaattctcattcttgagagggcagaggcaaccctctgtgaccccggagaaagcctcactccagcacaatgggccctggaaagtcctgtgttccctctactctcctaaacccaaccgagccaaatctttggggaaagctggaacaactcagaccaaaacatctggcccagccactgcccccagcccactgactgaggaaaaggctgccttgccagaagcttctgcaggctccccagaaagaggccccaccctggaggaggagcccccagggcctgagcccaggattggggctctaggtgtcaaggttttccgctccaggatagcatgcctgccaggtggccgggacagggccgggcggcccctgcttctggtgtcaactacagagggggcctgggaggcaccatggtgcacagtttcagaggtcaccaagctactgtcctacctgtgtaccatccccaggcctgaagataaagccaaggggctggcggtcctgattgacgccaggagacagcccccacagcccggtctggtcagcgccctgcaggccacccaggctcaggtcccagcctctatccgggctattctcttcctgggggagaaggaggcggctctccagctgcagacattacctgacgtccaggtggaggtgctgacctcattgaaggccctcagccaccatgtggaccccagccagctgcccgcagtcctggaaggccccttcccctactgccacaccgagtgggttcatttcttccagaagctggaccctttccttgctgacctccaccaggcctcttccctgctacaagcttccatcgaggaattcgagaaggccgacccccctggggggatgcaggaggctaccaggtgcctgagcaagtccaaggagctgatggaggctgtgctgagggaccccggcctactgggcctccagcgggaaggtggagccaccctggccaggctgcagcatgatgccagcaggctggacttcagccctgatgtcaggagccatctggctgcagccactgccttgtacagccttgtggacgagcagcttcatgttctggtcaccgcttccaacagcctcctggggaagctggagctccgtgtccgcctgggccgcctggaagctgccattcaccaggtcagcgactggatggagcaggaaggaaggcggtgcctgcaatcactgacccccaaggatggaagtttggagacagtggagaaagcccacgcagaatttgagaacttcttcctccaggctgcagcccagtaccgccgaggcctggagctgtccaagcaggccgctcagctgggagctacagccagaggggctggggaggcagaacgtgcagagttcccagagctggcagcctttgcctctacccagcgggccttccaggctgagctgacccacttttacatggcggccgagcggcaacgcacggacctcgagacgctgctccacctgcaccgcttctgcaagaggatgacctggttccacatggactgtcaggacctgatggcccagctcaggctggacaagacctcaagggtcagtcctggggaccagcgccgcctccaccgctacctgcagcgactggcatctgagttccctgctgagaagctcgcagccgtggggctgcaggtggcctccctgagccgggcaggcctgggccaggagctatgggaggaggcccggatcaggcatgaggagatccggatgctcctggagaaggcactgacccacagctcttgcccagaggctccagctgctcactcagcgcgcccagaacgaagaggggtggcagccaagggccagggtgtgagtgtagaggtcacttccaaggggaggtgggatcagcctccactagactcactgggcatggaccatttgccaaagtcctattggcctcctgggccccccagaggggaacagaacagaactttccaggcaggctctccaccccaggaagctggccaggctgcagaggctgaagacggcaaaggctcccacaagctgcctgaccctgcccgcgagcatttgcttgccaccaccttcttccggcagcagccccccaggcagagccaggtccctcgcctcactgggggcagcttctcctcagaggggacagactcacagacatcccttgaggactcaccccagacaagtccccttgcctccctctagctgagaggccccttcagtcgcaccagcctccaggagcactgggccagggcccagctggaggggtagctgggagctctggtcagtcccagtgagacgtcaccatggagcactggttttacattctgcctctgctgggaggatgagaactgtcgacctgcccctggctccagaaaactcctggaagacccgatcttcacccatgcagaatagcaagagtgggcgtcagaaccagggcacaataaatggtgtgattggctccatccctccaggctctcattgtggaaagacctgtcggcacagacccctccagaggtctcgctcgcaggcaggcagacacccacctgcagctcaggaacatacacagctctcccctcgggtacgagggccagtgttgcccttaggcagaatcctcggggagattcgggagtgcttccttgtcttggattccaggaaaatggaccctgagatgaggatttaaggatcagtgtgtttggtgctgatccaggaacctctgctgggggagtaggaggcgaatctgcaaagggaataaagagtatgttgtcaagcaaattttcttttttttaatttttaaaacttcattgtattttatgtttagagatggggcctcactacattgcccaggctggtctcaaactcctgggctcaagtgatcctcttgccttggcctgccaaagtgctgggattgccttttccgcccaccccccccgaccccaccagagacagggtctcactctggtgtccaggctggagtgcagtggtgcaatcatagccttaaattcctgggttcaaccaatcctcccacctcagcctcctaagtagctgggactacagttatgcaccaccatgctcagcttattatttatttattttttgtagacatggggtcttgctatgttgcccaggcaggctgatctcaagctcaagtgatcctctggactcagcctcccaaagtgctgggattatacgtatgagccactgtgccccaccctcatacaaatttccatgttggcaactgtagctggatctttctggagatctctgaaagacagcatggaatccttgaacaccccctgaggcgtgaggcatccagagcatttatctgccaaccctcaggagctggcactcgtagacagcacgcacagccagctccattggtcttggcaaagagaattgcctcctggagccagaggccggttcctgtgcttagaaaggaaggacatgtcttctgtgctccctgtctcacaaggcctcttcagcaggcatgggaccttcattctcaagttcaaggaaccctgtggaaccttgtccttgtcctccagagagaatcctctccgccttagaggtccctcctctctctcacctccccaccaagcctccctgaactcaatgtcttctgtccccttccctgcccaacttccacttctctatgcccagcctctgtggcccagtaccattggggttctgtgggcagctgggtcctggtggttggggaccgtgggaaggggcctatctgtcggatcttagatggagcatccagaagccccacccttcatactggccagagtggcccctgccagcgcctctctggagtgtcattaagctgaaagtgtttgccttacctctgcagtaggatgcattactgaagtggcctcttggtcacctagctctgaattttcctggctccagaaagaggctgtggggcacaggtcccccacaatgaggctgtgaaggggagagaggcaggcctgggccaggcacaggaggacaactagggcttctcaggagctgtctcagccaagagtcacacacttgatacctaaaatggcttcaggaatcttccaagactgaagacttccccaggtgtggtctagggcctgcctgcctcagagccatgagcagagccggtcaaaaggcttcctagggaatcctaccccagacattaaaatagactcttggtgctggcaggtggctggaatctgcgtttgtagccaagtgctcttcctgtgtgactcagcaaagtgggggtgcatttggggaacacccggggctggggcctgagtcctccacccaaagccaggtttgattcttgcattcccctccctgccttccatccagacaggcccaaagatgcaagaggcgttgatcagcccatctccatccatgcctgttgcctcagagagggccgacggcttttaaaatgctgttgccatagcaacagcatccagccagtgggtaccacaggcagggagccacagaaactggggtgctgggatggaaactgacttgtgagagaccacagctactgctagaaggaaggggggcaaagcgggcacaggtaatctaagaatacttgggcgggaggagtccccaaggttaccttgtgcatccctctgtccccagaaagaactgtaccccaacaatctctcccctcactgcatcccctggggaagaagggaatgcagaaatgaaatgtcataatgagtaacaatgtataaaaatatcgaataataacagct

SEQ ID NO: 1883 - protein, 1200 aa, Homo sapiens
MDPPSLDTAIQHALAGLYPPFEATAPTVLGQVFRLLDSGFQGDGLSFLLDFLIPAKRLCEQVREAACAPYSHCLFLHEGWPLCLRDEVVVHLAPLNPLLLRQGDFYLQVEPQEEQSVCIMIKCLSLDLCTVDKKPVPEPAYPILFTQEWLEAINSDFEGNPLHNCLVASENGIAPVPWTKITSPEFVDDRPQVVNALCQAWGPLPLEALDLSSPQELHQASSPDNQVLPAQSLAKGKGRTYGSKYPGLIKVEQARCGEVAFRMDEVVSQDFEGDYVALLGFSQESRGESPSREAGTSSGCTSGALEEIAGTKETPLFQKILPLSEANEGPSLGNRACTKPESSEERPYNLGFRRKVNLKAPTHNSERPPQGSYMNVLEDALDCASGLRAGVSQEPAASKMQGPLGNPENMVQLRPGPRQASSPRLSPASPAAAASETKIEVKTKERNGRLPKPMPCPSRNTSSPEPPTPGLKFSFLRGQRQPSVTPEKASLQHNGPWKVLCSLYSPKPNRAKSLGKAGTTQTKTSGPATAPSPLTEEKAALPEASAGSPERGPTLEEEPPGPEPRIGALGVKVFRSRIACLPGGRDRAGRPLLLVSTTEGAWEAPWCTVSEVTKLLSYLCTIPRPEDKAKGLAVLIDARRQPPQPGLVSALQATQAQVPASIRAILFLGEKEAALQLQTLPDVQVEVLTSLKALSHHVDPSQLPAVLEGPFPYCHTEWVHFFQKLDPFLADLHQASSLLQASIEEFEKADPPGGMQEATRCLSKSKELMEAVLRDPGLLGLQREGGATLARLQHDASRLDFSPDVRSHLAAATALYSLVDEQLHVLVTASNSLLGKLELRVRLGRLEAAIHQVSDWMEQEGRRCLQSLTPKDGSLETVEKAHAEFENFFLQAAAQYRRGLELSKQAAQLGATARGAGEAERAEFPELAAFASTQRAFQAELTHFYMAAERQRTDLETLLHLHRFCKRMTWFHMDCQDLMAQLRLDKTSRVSPGDQRRLHRYLQRLASEFPAEKLAAVGLQVASLSRAGLGQELWEEARIRHEEIRMLLEKALTHSSCPEAPAAHSARPERRGVAAKGQGVSVEVTSKGRWDQPPLDSLGMDHLPKSYWPPGPPRGEQNRTFQAGSPPQEAGQAAEAEDGKGSHKLPDPAREHLLATTFFRQQPPRQSQVPRLTGGSFSSEGTDSQTSLEDSPQTSPLASL

SEQ ID NO: 1884 - DNA, 1206 bp, Homo sapiens
ggaaggggacgcgaaccgtcctggtcccatccgagccgccgtagcgcgagtgccgcgggagttcggcagcccaggtcgccaaggcaacgggctccgctgcgggttgcgggctgcgggcgctaggctgccccggggaggcgctgcggaccggcggcccaggcacggagaggcggcgagaccgcagaattcccgtactgattagtcaacagtggaaaatctgaagagatgcaagcaggaaaaagaaattaaaccaggcctgaggagcgatgcgacaggcatgatggaggtcgagtcctcctactcggacttcatctcctgtgaccggacaggccgtcggaatgcggtccctgacatccagggagactcagaggctgtgagcgtgaggaagctggctggagacatgggcgagctggcactcgagggggcagaaggacaggtggagggaagcgccccagacaaggaagctggcaaccagccccagagcagcgatgggaccacctcgtcttgaatctgaccttgtccaagaaggctggacgagagaccttctgtcccctcccagagggggaaccctggcactggcccagcagcctcttctctgagctccatgtcccagataaaccaggccagactgagaaggctccccagaggcctctgtggcctccactccgggaaagccctctgcccacacccacaggcttcacattcccaccaccttcgcaccgtgcccaggtacactttcaagacactgtaaccacaagatgttatttattgagctggcgccgggacttgggcggggcctgccctacagtgagcagcccacacaggaacgctcctctcgcgagcggcccgggcagggaccctgtcccaacaccaacacctcctctccagcccaatcttctgggtccagacctgcttgtcccttttttagaaaacacttttaaactttttaaaaattttaaaccttttttcagcagatatggagagagctgacaatcaattcacattttttaagccattttagctaaactgtcattgtgcatctctgaggttccctcatggagctccacagatccatttttagggaagggattttggctcaaaacgatctgaccacctctgccctgtccaccaggataagtgacacctaggacccaggaaataaatgccgatgatttgtgtgaaaaaaaaaaaaaaaaaaaaaaaaaa

SEQ ID NO: 1885 - protein, 76 aa, Homo sapiens
MMEVESSYSDFISCDRTGRRNAVPDIQGDSEAVSVRKLAGDMGELALEGAEGQVEGSAPDKEAGNQPQSSDGTTSS

SEQ ID NO: 1886 - DNA, 1353 bp, Homo sapiens
ggaaggggacgcgaaccgtcctggtcccatccgagccgccgtagcgcgagtgccgcgggagttcggcagcccaggtcgccaaggcaacgggctccgctgcgggttgcgggctgcgggcgctaggctgccccggggaggcgctgcggaccggcggcccaggcacggagaggcggcgagaccgcaggagacacggggaagagacagagaggagggtaaagtgagaatcctgcccgcaccacaggtctggactgctaaccttgaatcctggtttcttaaattctgcctccgcttctgactgaggaccactggattttgaggaaactttggtcttaattcccgtactgattagtcaacagtggaaaatctgaagagatgcaagcaggaaaaagaaattaaaccaggcctgaggagcgatgcgacaggcatgatggaggtcgagtcctcctactcggacttcatctcctgtgaccggacaggccgtcggaatgcggtccctgacatccagggagactcagaggctgtgagcgtgaggaagctggctggagacatgggcgagctggcactcgagggggcagaaggacaggtggagggaagcgccccagacaaggaagctggcaaccagccccagagcagcgatgggaccacctcgtcttgaatctgaccttgtccaagaaggctggacgagagaccttctgtcccctcccagagggggaaccctggcactggcccagcagcctcttctctgagctccatgtcccagataaaccaggccagactgagaaggctccccagaggcctctgtggcctccactccgggaaagccctctgcccacacccacaggcttcacattcccaccaccttcgcaccgtgcccaggtacactttcaagacactgtaaccacaagatgttatttattgagctggcgccgggacttgggcggggcctgccctacagtgagcagcccacacaggaacgctcctctcgcgagcggcccgggcagggaccctgtcccaacaccaacacctcctctccagcccaatcttctgggtccagacctgcttgtcccttttttagaaaacacttttaaactttttaaaaattttaaaccttttttcagcagatatggagagagctgacaatcaattcacattttttaagccattttagctaaactgtcattgtgcatctctgaggttccctcatggagctccacagatccatttttagggaagggattttggctcaaaacgatctgaccacctctgccctgtccaccaggataagtgacacctaggacccaggaaataaatgccgatgatttgtgtgaaaaaaaaaaaaaaaaaaaaaaaaaa

SEQ ID NO: 1887 - protein, 76 aa, Homo sapiens; identical to SEQ ID NO: 1885

SEQ ID NO: 1888 - DNA, 1458 bp, Homo sapiens
ggaaggggacgcgaaccgtcctggtcccatccgagccgccgtagcgcgagtgccgcgggagttcggcagcccaggtcgccaaggcaacgggctccgctgcgggttgcgggctgcgggcgctaggctgccccggggaggcgctgcggaccggcggcccaggcacggagaggcggcgagaccgcaggagacacggggaagagacagagaggagggtaaagtgagaatcctgcccgcaccacaggtctggactgctaaccttgaatcctggtttcttaaattctgcctccgcttctgactgaggaccactggattttgaggaaactttggtcttgtggtggtgaggaggtgatgttctggaaggaaggtacctagactttgtggtccctgccaggaagtggagagtggaaatgtggaatgcctcacactcctcaactagaattcccgtactgattagtcaacagtggaaaatctgaagagatgcaagcaggaaaaagaaattaaaccaggcctgaggagcgatgcgacaggcatgatggaggtcgagtcctcctactcggacttcatctcctgtgaccggacaggccgtcggaatgcggtccctgacatccagggagactcagaggctgtgagcgtgaggaagctggctggagacatgggcgagctggcactcgagggggcagaaggacaggtggagggaagcgccccagacaaggaagctggcaaccagccccagagcagcgatgggaccacctcgtcttgaatctgaccttgtccaagaaggctggacgagagaccttctgtcccctcccagagggggaaccctggcactggcccagcagcctcttctctgagctccatgtcccagataaaccaggccagactgagaaggctccccagaggcctctgtggcctccactccgggaaagccctctgcccacacccacaggcttcacattcccaccaccttcgcaccgtgcccaggtacactttcaagacactgtaaccacaagatgttatttattgagctggcgccgggacttgggcggggcctgccctacagtgagcagcccacacaggaacgctcctctcgcgagcggcccgggcagggaccctgtcccaacaccaacacctcctctccagcccaatcttctgggtccagacctgcttgtcccttttttagaaaacacttttaaactttttaaaaattttaaaccttttttcagcagatatggagagagctgacaatcaattcacattttttaagccattttagctaaactgtcattgtgcatctctgaggttccctcatggagctccacagatccatttttagggaagggattttggctcaaaacgatctgaccacctctgccctgtccaccaggataagtgacacctaggacccaggaaataaatgccgatgatttgtgtgaaaaaaaaaaaaaaaaaaaaaaaaaa

SEQ ID NO: 1889 - protein, 76 aa, Homo sapiens; identical to SEQ ID NO: 1885

SEQ ID NO: 1890 - DNA, 1566 bp, Homo sapiens
ggcccgttaagaagagcgtggccggccgcggccaccgctggccccagggaaagccgagcggccaccgagccggcagagacccaccgagcggcggcggagggagcagcgccggggcgcacgagggcaccatggcccagacgcccgccttcgacaagcccaaagtagaactgcatgtccacctagacggatccatcaagcctgaaaccatcttatactatggcaggaggagagggatcgccctcccagctaacacagcagaggggctgctgaacgtcattggcatggacaagccgctcacccttccagacttcctggccaagtttgactactacatgcctgctatcgcgggctgccgggaggctatcaaaaggatcgcctatgagtttgtagagatgaaggccaaagagggcgtggtgtatgtggaggtgcggtacagtccgcacctgctggccaactccaaagtggagccaatcccctggaaccaggctgaaggggacctcaccccagacgaggtggtggccctagtgggccagggcctgcaggagggggagcgagacttcggggtcaaggcccggtccatcctgtgctgcatgcgccaccagcccaactggtcccccaaggtggtggagctgtgtaagaagtaccagcagcagaccgtggtagccattgacctggctggagatgagaccatcccaggaagcagcctcttgcctggacatgtccaggcctaccaggaggctgtgaagagcggcattcaccgtactgtccacgccggggaggtgggctcggccgaagtagtaaaagaggctgtggacatactcaagacagagcggctgggacacggctaccacaccctggaagaccaggccctttataacaggctgcggcaggaaaacatgcacttcgagatctgcccctggtccagctacctcactggtgcctggaagccggacacggagcatgcagtcattcggctcaaaaatgaccaggctaactactcgctcaacacagatgacccgctcatcttcaagtccaccctggacactgattaccagatgaccaaacgggacatgggctttactgaagaggagtttaaaaggctgaacatcaatgcggccaaatctagtttcctcccagaagatgaaaagagggagcttctcgacctgctctataaagcctatgggatgccaccttcagcctctgcagggcagaacctctgaagacgccactcctccaagccttcaccctgtggagtcaccccaactctgtggggctgagcaacatttttacatttattccttccaagaagaccatgatctcaatagtcagttactgatgctcctgaaccctatgtgtccatttctgcacacacgtatacctcggcatggccgcgtcacttctctgattatgtgccctggccagggaccagcgcccttgcacatgggcatggttgaatctgaaaccctccttctgtggcaacttgtactgaaaatctggtgctcaataaagaagcccatggctggtggcatgcaaaaaaaaaaaaaaaaaaaaaaaaaaaaaaaaaaa

SEQ ID NO: 1891 - protein, 363 aa, Homo sapiens
MAQTPAFDKPKVELHVHLDGSIKPETILYYGRRRGIALPANTAEGLLNVIGMDKPLTLPDFLAKFDYYMPAIAGCREAIKRIAYEFVEMKAKEGVVYVEVRYSPHLLANSKVEPIPWNQAEGDLTPDEVVALVGQGLQEGERDFGVKARSILCCMRHQPNWSPKVVELCKKYQQQTVVAIDLAGDETIPGSSLLPGHVQAYQEAVKSGIHRTVHAGEVGSAEVVKEAVDILKTERLGHGYHTLEDQALYNRLRQENMHFEICPWSSYLTGAWKPDTEHAVIRLKNDQANYSLNTDDPLIFKSTLDTDYQMTKRDMGFTEEEFKRLNINAAKSSFLPEDEKRELLDLLYKAYGMPPSASAGQNL

SEQ ID NO: 1892 - DNA, 1433 bp, Homo sapiens
tgtgtgtgtgtgtgtgtgagcgcgcgcgcgcgcgcgcgtgtgtactcgtgcgtgtgcctgtgtgtgcctgggagtgacctcacagctgccggaacataaagactcacaggtccgcctcccaggctcaaagctggctctgcaggggacatgagaggcacaccgaagacccacctcctggccttctccctcctctgcctcctctcaaaggtgcgtacccagctgtgcccgacaccatgtacctgcccctggccacctccccgatgcccgctgggagtacccctggtgctggatggctgtggctgctgccgggtatgtgcacggcggctgggggagccctgcgaccaactccacgtctgcgacgccagccagggcctggtctgccagcccggggcaggacccggtggccggggggccctgtgcctcttggcagaggacgacagcagctgtgaggtgaacggccgcctgtatcgggaaggggagaccttccagccccactgcagcatccgctgccgctgcgaggacggcggcttcacctgcgtgccgctgtgcagcgaggatgtgcggctgcccagctgggactgcccccaccccaggagggtcgaggtcctgggcaagtgctgccctgagtgggtgtgcggccaaggagggggactggggacccagccccttccagcccaaggaccccagttttctggccttgtctcttccctgccccctggtgtcccctgcccagaatggagcacggcctggggaccctgctcgaccacctgtgggctgggcatggccacccgggtgtccaaccagaaccgcttctgccgactggagacccagcgccgcctgtgcctgtccaggccctgcccaccctccaggggtcgcagtccacaaaacagtgccttctagagccgggctgggaatggggacacggtgtccaccatccccagctggtggccctgtgcctgggccctgggctgatggaagatggtccgtgcccaggcccttggctgcaggcaacactttagcttgggtccaccatgcagaacaccaatattaacacgctgcctggtctgtctggatcccgaggtatggcagaggtgcaagacctagtcccctttcctctaactcactgcctaggaggctggccaaggtgtccagggtcctctagcccactccctgcctacacacacagcctatatcaaacatgcacacgggcgagctttctctccgacttcccctgggcaagagatgggacaagcagtcccttaatattgaggctgcagcaggtgctgggctggactggccatttttctgggggtaggatgaagagaaggcacacagagattctggatctcctgctgccttttctggagtttgtaaaattgttcctgaatacaagcctatgcgtgaaaaaaaaaaaaaaaaaaaaaaaaaaaaaa

SEQ ID NO: 1893 - protein, 250 aa, Homo sapiens
MRGTPKTHLLAFSLLCLLSKVRTQLCPTPCTCPWPPPRCPLGVPLVLDGCGCCRVCARRLGEPCDQLHVCDASQGLVCQPGAGPGGRGALCLLAEDDSSCEVNGRLYREGETFQPHCSIRCRCEDGGFTCVPLCSEDVRLPSWDCPHPRRVEVLGKCCPEWVCGQGGGLGTQPLPAQGPQFSGLVSSLPPGVPCPEWSTAWGPCSTTCGLGMATRVSNQNRFCRLETQRRLCLSRPCPPSRGRSPQNSAF

SEQ ID NO: 1894 - DNA, 1286 bp, Homo sapiens
ggagcgcgcggtccgggcacacggagcaggttgggaccgcggcgggtaccggggccggggcgccatgcggaggccgagcgtgcgcgcggccgggctggtcctgtgcaccctgtgttacctgctggtgggcgctgctgtcttcgacgcgctcgagtccgaggcggaaagcggccgccagcgactgctggtccagaagcggggcgctctccggaggaagttcggcttctcggccgaggactaccgcgagctggagcgcctggcgctccaggctgagccccaccgcgccggccgccagtggaagttccccggctccttctacttcgccatcaccgtcatcactaccatcgggtacggccacgccgcgccgggtacggactccggcaaggtcttctgcatgttctacgcgctcctgggcatcccgctgacgctggtcactttccagagcctgggcgaacggctgaacgcggtggtgcggcgcctcctgttggcggccaagtgctgcctgggcctgcggtggacgtgcgtgtccacggagaacctggtggtggccgggctgctggcgtgtgccgccaccctggccctcggggccgtcgccttctcgcacttcgagggctggaccttcttccacgcctactactactgcttcatcaccctcaccaccatcggcttcggcgacttcgtggcactgcagagcggcgaggcgctgcagaggaagctcccctacgtggccttcagcttcctctacatcctcctggggctcacggtcattggcgccttcctcaacctggtggtcctgcgcttcctcgttgccagcgccgactggcccgagcgcgctgcccgcccccccagcccgcgccccccgggggcgcccgagagccgtggcctctggctgccccgccgcccggcccgctccgtgggctccgcctctgtcttctgccacgtgcacaagctggagaggtgcgcccgcgacaacctgggcttttcgcccccctcgagcccgggggtcgtgcgtggcgggcaggctcccaggcctggggcccggtggaagtccatctgacaaccccacccaggccagggtcgaatctggaatgggagggtctggcttcagctatcagggcaccctccccagggattggaaacggatgacgggcctctaggcggtcttctgccacgagcagtttctcattactgtctgtggctaagtcccctccctcctttccaaaaatatattacagtcacaccataaaaaaaaaaaaaaaaaaaaaaaaaaaaaaaaaaaaaaaaaa

SEQ ID NO: 1895 - protein, 330 aa, Homo sapiens
MRRPSVRAAGLVLCTLCYLLVGAAVFDALESEAESGRQRLLVQKRGALRRKFGFSAEDYRELERLALQAEPHRAGRQWKFPGSFYFAITVITTIGYGHAAPGTDSGKVFCMFYALLGIPLTLVTFQSLGERLNAVVRRLLLAAKCCLGLRWTCVSTENLVVAGLLACAATLALGAVAFSHFEGWTFFHAYYYCFITLTTIGFGDFVALQSGEALQRKLPYVAFSFLYILLGLTVIGAFLNLVVLRFLVASADWPERAARPPSPRPPGAPESRGLWLPRRPARSVGSASVFCHVHKLERCARDNLGFSPPSSPGVVRGGQAPRPGARWKSI

SEQ ID NO: 1896 - DNA, 5136 bp, Homo sapiens
atggagcgctcgcagagccgcctcagtctgtccgcctccttcgaggcgctcgccatctacttcccgtgcatgaactccttcgacgacgaggacgcaggggacagccggaggctgaagggggccatccagaggagcacggagacgggcctggcagtggagatgcccagccggacactgcgccaggccagccacgagtccattgaggacagcatgaacagctatggctcagagggcaaccttaactatggaggagtttgcctggcgtcggacgcccagttcagtgacttcctgggaagcatggggccggcacagtttgtgggccgccagaccctggccaccacacccatgggggatgtggagatcggtctgcaggagcggaacggtcagttggaggtggacattatccaggctcggggactgacagccaagccaggctccaagacactgccagcggcctacatcaaggcctacctgctagagaatggcatctgcattgccaagaagaagaccaaagtcgctcgcaagtcgctggacccactgtataaccaggtgctgctgtttcctgagagtccccagggcaaagtcctccaggtgatcgtgtgggggaactacgggcggatggagcggaagcagttcatgggtgtggctcgcgtgctgctggaggagctggacttgaccaccctggccgtgggctggtacaagctcttccccacctcctccatggtggacccagccacaggccccctgctccggcaggcatcccagttgtccctcgagagcaccgtggggccctgcggagaacgatcttagtgctggaatggggaggggctccccaagatggcctggagaccacccagccctgacctgggaccccaggcccaggggcacattgaacaggaggacggggctctcccccacagtggggaagcagaacggggagacctgcccccccttgggcccctcctcaccccttctttgcctcctacccccgagacctcccctctcccaacgggattggctacacttttgacttggccggttcttgacctggtggatgtggctgcagtccagagaaaggaaagattgaggtggcagagcagaccactctcccttcccaaactgtccaacttctccccctttttgcctcctcggaagctcgctgcccagagccatgtccagaacccagccggccatctccatggtgccaattaccagcaagtgtctttcctgcggcaccgggttcaggcagctactcctgccccagagatgaaggggcagctttgcaaggatccggagccagctcccaggggcccagagccccccacttgaagaggagcttgagcttccctctgcctgcccgtggaaggagctttgccgcagcctgtccgagtccatccgtccgtcccctcctgcctgcccctcttctggtggctctaggaattggggttcagcagggaccaaaggaaaggaggaggtgccgggggcctggcacagacccctaggtgcctcgctccatgggattgcaacaagctagtttaggaaccgctggcggactagaaagaatgttgtcgtctgtgttccggtggaggagctgtggaacctgagtttccagaaccccaaccctagagagcatttgggggtgctgtattggagggggaggctaaggaaagttgggattgggactggtggtgccaagataagggtttctcaaattggagaacccctccttgttgcatgaggtcaatggtcatcctgtctacccaccctgcctccaggccagggggctggggaggcaaatagagcccccctattttagtctttttaaaaaaaacatcctatactaagggcagaacccactgccccggcctcaattaccttggctgaaggaaagatggcggtaggagagaaaagtgaagaggcgtgagtgtaagaactgggagattccttttccagcaggcctgggtagctgccttcccagcccagccctccctggggcctgcgggagcccttttgcatgcaagggaggatggaggctggcccctctttatagaagcacatttctgccacctcccctgggaggcacccagaagcctgccactctttacctagtccctgctgtgtagggcgtagtccaggttagctaggtagagttagtgctccaagccctggggcctgttcttagctcatgcatagtccttacagagtcccaggaccgggggtggagaggagcctcaagtacattccaggagaccactgtctcctcgctggcctgggcctagatggggcagcctggctcacaggaggccagcccctcctcctccgcccccttccttcccttgtccccgtagggttatagctggagctgcctgttatactcggctgttctgatttattattcttggtactgactttctttatgagggactcctaagggttgtaggaccttggcagagggggcctggtctccattagagggtgttgttttctcctgaggacacccaggctgcctttggtcccaccctgttcctggtcccggtcccggtcccagtcccaccaggcaactccttccacccggaaattcttcccttcccttagcctgtggaaaccctgggtattctttaaagttctggtcaatgtatatcacctccacagagctgcttaccctgcactgggaaggggagatggagacgccccctttacccaggaggtcttcagagtttcctgggaccgcggtgggtggaatcccaaggctgggggtggaaggagcagggctctggagggattcgcattcaaggcacagaattggccccttgcctgtttgtttttctaaccagtgtgatttctctgctgttcgtttattacttaccattggaatattttgagccaggagagcgccttctctctccagccatcaccgctgtggttgttcaggggtagcttttcaaaaacagggcagagcctggctgtcccaaccagggggagcaggggcttggccctgacagcctgagcccttcccctggtgtctgcacagcctttataaagagagagagagctccgaagcaataacaacacctgggggtggtcagtgagggccccctcaatgattttcttgtttgttctgtgaaatcccgctcacctcctggaggggtggagcagctgggggctggagccctgtttctttgtgtcatcgtgagcatgtgccccttcccaggggctgtgaccattgggtgtgggaactacggtctgtcctcaccaagggatgggggtttggggaggagagtgacattttcatcattagcttcggagaagcttcaagcccatcctgtccccgctactgcctggccccttgctgactcaggctgcactgtttgaagaggagcagagaggctggcactaggggccactggggggctggggtctccaggggatgactgttttcaatctctgggccaagatcacatgcaggataccacgggaaggagccatctccactctccttctccagaacccccttgaagggcctttgggaccattagtccatttccattttacagacaaggaaatcaagacccagcttgggggaaaagccacccctggagtcacctgtgtgttcagtggcacccccagcctgggtcccctcctcccaatagaggctgagccggagccagggcagtatgaggtggggctgccactgcccatacctcctcctcccttctttctttgaagcctaatggccccccaaaagatgggcaggacaagctgtagcccatctgagaggttgggaaactgaggcccagaaacaggaagtgactcacacaagacccctcagcaagggtgcaaagggggaagaactaggggctccattgttcttcaggcgacaggagaccgttgctccagtgcatgtctgctgggacaaggattcctggcctcgaagccctgggctgcacagccctactgggctccacctctataaaccagtgacttctctgggcctgggtctgggggagagggttgccagggagactcagctctccttgggggctggcccagctgactgagggtacacaggattgggtctagaccttgatgcctgggtggagggcccttgtaaggggccatagcctcttcaggaccaactggagggagagttaggaaacaccagctcctgcctggggcagtgagggaatgggagcagctgtgggcgcctcatttcaggcaagtcctccccaaaccttcagatgcagtgagacctggccttcctgttgtgcttttcagactttgttttcagaatgcttttatctcgagtgtgcccttcggccctcacaagagcccctggggagtaggtggtggcctgtgccgtcatccccatttcaaagcagggagctgaggtcctgggaggggaaagtgcttgcctgaggtcccactgtgttagtgggtgggcaggactggaactcggttctccaacagcccagagctcactcttttacacccagaggtggagcaggtggcttagggggtggttatgtacttcacaagccaattcccttcagccaggagctcctgggtgcatttccgtgtcagaaacagtaccgagtcccaccccctctggaggcacagctgttgcgtcaggcaaggtcacctgcatttatttattgagcagcagtgctgtgtcaggcccagggaccgagcccctctccctgttcccctatggtgtctccgaggccctctgggagggccccacatctggagcagcacctcagagtggacagaaagcattagcgtccacgagctcacccgacgccgagcctgtgaggtgggctgatggtgcccgtctaacccagcgcttcagggaggtcagaatggagccgaacccagggctgtgagcatcacctctggagccctttcactttatgactgcttcctggacgggtggtgggaaggcaggagcctgggtccttaggctgggggcctctctccatccacccacctttccctcattccctctcttggagcagcagccgcccaggcctttagggagggagggtttctggggcccttgggttggagtggggtcgcgttgcattgtgttcatgaccatgtagctcatgttgaaattaaagtttttggcttttctaa

SEQ ID NO: 1897 - protein, 269 aa, Homo sapiens
MERSQSRLSLSASFEALAIYFPCMNSFDDEDAGDSRRLKGAIQRSTETGLAVEMPSRTLRQASHESIEDSMNSYGSEGNLNYGGVCLASDAQFSDFLGSMGPAQFVGRQTLATTPMGDVEIGLQERNGQLEVDIIQARGLTAKPGSKTLPAAYIKAYLLENGICIAKKKTKVARKSLDPLYNQVLLFPESPQGKVLQVIVWGNYGRMERKQFMGVARVLLEELDLTTLAVGWYKLFPTSSMVDPATGPLLRQASQLSLESTVGPCGERS

SEQ ID NO: 1898 - DNA, 2640 bp, Homo sapiens
actcgccgcagcctgcgcgccttctccagtccgcggtgccatggcccccgcccgtctgttcgcgctgctgctgttcttcgtaggcggagtcgccgagtcgatccgagagactgaggtcatcgacccccaggacctcctagaaggccgatacttctccggagccctaccagacgatgaggatgtagtggggcccgggcaggaatctgatgactttgagctgtctggctctggagatctggatgacttggaagactccatgatcggccctgaagttgtccatcccttggtgcctctagataaccatatccctgagagggcagggtctgggagccaagtccccaccgaacccaagaaactagaggagaatgaggttatccccaagagaatctcacccgttgaagagagtgaggatgtgtccaacaaggtgtcaatgtccagcactgtgcagggcagcaacatctttgagagaacggaggtcctggcagctctgattgtgggtggcatcgtgggcatcctctttgccgtcttcctgatcctactgctcatgtaccgtatgaagaagaaggatgaaggcagctatgacctgggcaagaaacccatctacaagaaagcccccaccaatgagttctacgcgtgaagcttgcttgtgggcactggcttggactttagcggggagggaagccaggggattttgaagggtggacattagggtagggtgaggtcaacctaatactgacttgtcagtatctccagctctgattacctttgaagtgttcagaagagacattgtcttctactgttctgccaggttcttcttgagctttgggcctcagttgccctggcagaaaaatggattcaacttggcctttctgaaggcaagactgggattggatcacttcttaaacttccagttaagaatctaggtccgccctcaagcccatactgaccatgcctcatccagagctcctctgaagccagggggctaacggatgttgtgtggagtcctggctggaggtcctcccccagtggccttcctcccttcctttcacagccggtctctctgccaggaaatgggggaaggaactagaaccacctgcaccttgagatgtttctgtaaatgggtacttgtgatcacactacgggaatctctgtggtatatacctggggccattctaggctctttcaagtgacttttggaaatcaaccttttttatttgggggggaggatggggaaaagagctgagagtttatgctgaaatggatttatagaatatttgtaaatctatttttagtgtttgttcgtttttttaactgttcattcctttgtgcagagtgtatatctctgcctgggcaagagtgtggaggtgccgaggtgtcttcattctctcgcacatttccacagcacctgctaagtttgtatttaatggtttttgtttttgtttttgtttgtttcttgaaaatgagagaagagccggagagatgatttttattaattttttttttttttttttttttttactatttatagctttagatagggcctcccttcccctcttctttctttgttctctttcattaaaccccttccccagttttttttttatactttaaaccccgctcctcatggccttggccctttctgaagctgcttcctcttataaaatagcttttgccgaaacatagtttttttttagcagatcccaaaatataatgaaggggatggtgggatatttgtgtctgtgttcttataatatattattattcttccttggttctagaaaaatagataaatatatttttttcaggaaatagtgtggtgtttccagtttgatgttgctgggtggttgagtgagtgaattttcatgtggctgggtgggtttttgcctttttctcttgccctgttcctggtgccttctgatggggctggaatagttgaggtggatggttctaccctttctgccttctgtttgggacccagctggtgttctttggtttgctttcttcaggctctagggctgtgctatccaatacagtaaccacatgcggctgtttaaagttaagccaattaaaatcacataagattaaaaattccttcctcagttgcactaaccacgtttctagaggcgtcactgtatgtagttcatggctactgtactgacagcgagagcatgtccatctgttggacagcactattctagagaactaaactggcttaacgagtcacagcctcagctgtgctgggacgacccttgtctccctgggtaggggggggggaatgggggagggctgatgaggccccagctggggcctgttgtctgggaccctccctctcctgagaggggaggcctggtggcttagcctgggcaggtcgtgtctcctcctgaccccagtggctgcggtgaggggaaccaccctcccttgctgcaccagtggccattagctcccgtcaccactgcaacccagggtcccagctggctgggtcctcttctgcccccagtgcccttccccttgggctgtgttggagtgagcacctcctctgtaggcacctctcacactgttgtctgttactgattttttttgataaaaagataataaaacctggtactttctaaaaaaaaaaaaaaaaaaaaaaaaaaaaaa

SEQ ID NO: 1899 - protein, 198 aa, Homo sapiens
MAPARLFALLLFFVGGVAESIRETEVIDPQDLLEGRYFSGALPDDEDVVGPGQESDDFELSGSGDLDDLEDSMIGPEVVHPLVPLDNHIPERAGSGSQVPTEPKKLEENEVIPKRISPVEESEDVSNKVSMSSTVQGSNIFERTEVLAALIVGGIVGILFAVFLILLLMYRMKKKDEGSYDLGKKPIYKKAPTNEFYA

SEQ ID NO: 1900 - DNA, 995 bp, Homo sapiens
tgctggctgaactgagaggaacagggttggtgcctggcactggtgttgctccattcatctctgaggtctcacagccccagcatgagtccatcagcaaagaagaggcccaagaacagcagggtttccaagatgcaagatgagaaactgcgggacgagacagagcagcctgtgagcaaagtaattgagcggaaccgtctgagaacggtgttaaaaaacttgtcgctcttgaagctactcaagagctcaaaccgccggatccaagaactgcataagctggccaaaaggtgttggcattcactgctcagtgttccaaagattctccgcatctcctctggggaaaacagtgcctgcaataaaacaaaacaaaataatgaagagttccaggagatcgggtgctccgagaaggaactcaagtccaagaaattagagtccacaggggaccctaagaaaaaagagtacaaggagtggaagtcccaggtgcagtcagggatgaggaacaaggagaaaacgtcattggcggcaatgccacggaaagaaaagcatatagagcctgaggttccaaggacatcgagggatgatagcttgaaccctggagtccaggggaggcaaccactcaccgagggcccccgagtcatcttcattaagccctaccgcaatagaactcccatggggcacatgaagcagctggatgtagccgaccagtggatctggtttgaggggctgcccacacgaatccacctcccggcgcccagggtgatgtgcagatcctccaccctgcgttgggtcaagcgccgctgcacccgcttctgctccgcatcacttgaaatgcctatgtggcatccatacaaggttgatgtgacctggacgagagccagaggtgcgagcagagggtggagatcgcgccatcagctgaaggggaggaatgggtggcgaaattcacgagtctacaaataagatcttccatatggcacctaagacgaaaaaaaaaaaaaaaa

SEQ ID NO: 1901 - protein, 290 aa, Homo sapiens [sequence omitted]

SEQ ID NO: 1902 - DNA, 2228 bp, Homo sapiens
acacgcctttcttattggataccggcttttcatggggccgagcgccgctgggtaggcggaagtagccgcaggcatggcggcggctatgccgcttgctctgctcgtcctgttgctcctggggcccggcggctggtgccttgcagaacccccacgcgacagcctgcgggaggaacttgtcatcaccccgctgccttccggggacgtagccgccacattccagttccgcacgcgctgggattcggagcttcagcgggaaggagtgtcccattacaggctctttcccaaagccctggggcagctgatctccaagtattctctacgggagctgcacctgtcattcacacaaggcttttggaggacccgatactgggggccacccttcctgcaggccccatcaggtgcagagctgtgggtctggttccaagacactgtcactgatgtggataaatcttggaaggagctcagtaatgtcctctcagggatcttctgcgcctctctcaacttcatcgactccaccaacacagtcactcccactgcctccttcaaacccctgggtctggccaatgacactgaccactactttctgcgctatgctgtgctgccgcgggaggtggtctgcaccgaaaacctcaccccctggaagaagctcttgccctgtagttccaaggcaggcctctctgtgctgctgaaggcagatcgcttgttccacaccagctaccactcccaggcagtgcatatccgccctgtttgcagaaatgcacgctgtactagcatctcctgggagctgaggcagaccctgtcagttgtatttgatgccttcatcacggggcagggaaagaaagactggtccctcttccggatgttctcccgaaccctcacggagccctgccccctggcttcagagagccgagtctatgtggacatcaccacctacaaccaggacaacgagacattagaggtgcacccacccccgaccactacatatcaggacgtcatcctaggcactcggaagacctatgccatctatgacttgcttgacaccgccatgatcaacaactctcgaaacctcaacatccagctcaagtggaagagacccccagagaatgaggcccccccagtgcccttcctgcatgcccagcggtacgtgagtggctatgggctgcagaagggggagctgagcacactgctgtacaacacccacccataccgggccttcccggtgctgctgctggacaccgtaccctggtatctgcggctgtatgtgcacaccctcaccatcacctccaagggcaaggagaacaaaccaagttacatccactaccagcctgcccaggaccggctgcaaccccacctcctggagatgctgattcagctgccggccaactcagtcaccaaggtttccatccagtttgagcgggcgctgctgaagtggaccgagtacacgccagatcctaaccatggcttctatgtcagcccatctgtcctcagcgcccttgtgcccagcatggtagcagccaagccagtggactgggaagagagtcccctcttcaacagcctgttcccagtctctgatggctctaactactttgtgcggctctacacggagccgctgctggtgaacctgccgacaccggacttcagcatgccctacaacgtgatctgcctcacgtgcactgtggtggccgtgtgctatggctccttctacaatctcctcacccgaaccttccacatcgaggagccccgcacaggtggcctggccaagcggctggccaaccttatccggcgcgcccgaggtgtccccccactctgattcttgccctttccagcagctgcagctgccgtttctctctggggaggggagcccaagggctgtttctgccacttgctctcctcagagttggcttttgaaccaaagtgccctggaccaggtcagggcctacagctgtgttgtccagtacaggagccacgagccaaatgtggcatttgaatttgaattaacttagaaattcatttcctcacctgtagtggccacctctatattgaggtgctcaataagcaaaagtggtcggtggctgctgtattggacagcacagaaaaagatttccatcaccacagaaaggtcggctggcagcactggccaaggtgatggggtgtgctacacagtgtatgtcactgtgtagtggatggagtttactgtttgtggaataaaaacggctgtttccgtggtt

SEQ ID NO: 1903 - protein, 578 aa, Homo sapiens
MAAAMPLALLVLLLLGPGGWCLAEPPRDSLREELVITPLPSGDVAATFQFRTRWDSELQREGVSHYRLFPKALGQLISKYSLRELHLSFTQGFWRTRYWGPPFLQAPSGAELWVWFQDTVTDVDKSWKELSNVLSGIFCASLNFIDSTNTVTPTASFKPLGLANDTDHYFLRYAVLPREVVCTENLTPWKKLLPCSSKAGLSVLLKADRLFHTSYHSQAVHIRPVCRNARCTSISWELRQTLSVVFDAFITGQGKKDWSLFRMFSRTLTEPCPLASESRVYVDITTYNQDNETLEVHPPPTTTYQDVILGTRKTYAIYDLLDTAMINNSRNLNIQLKWKRPPENEAPPVPFLHAQRYVSGYGLQKGELSTLLYNTHPYRAFPVLLLDTVPWYLRLYVHTLTITSKGKENKPSYIHYQPAQDRLQPHLLEMLIQLPANSVTKVSIQFERALLKWTEYTPDPNHGFYVSPSVLSALVPSMVAAKPVDWEESPLFNSLFPVSDGSNYFVRLYTEPLLVNLPTPDFSMPYNVICLTCTVVAVCYGSFYNLLTRTFHIEEPRTGGLAKRLANLIRRARGVPPL

SEQ ID NO: 1904 - DNA, 2478 bp, Homo sapiens
ggcagcggcaacggcagagacagcaacgtgcccgccgcagtcagcccggcctcgtcggacccgcaccggcccgcccgcccgcccgcaccgcgtcggggcgccctctccactgcgcgcggtacaaggaaatggtagaactagtgatctcacccagcctcactgtaaacagcgattgtctggataaactgaagtttaaccgtgctgacgctgctgtgtggactctgagtgacagacaaggcatcaccaaatcggcccccctgagagtgtcccagctcttctccagatcttgcccacgtgtcctcccccgccagccttccacagccatggcagcctacggccagacgcagtacagtgcggggatccagcaggctaccccctatacagcttacccacctccagcacaagcctatggaatcccttcctacagcatcaagacagaagacagcttgaaccattcccctggccagagtggattcctcagctatggctccagcttcagcacctcacccactggacagagcccatacacctaccagatgcacggcacaacagggttctatcaaggaggaaatggactgggcaacgcagccggtttcgggagtgtgcaccaggactatccttcctaccccggcttcccccagagccagtacccccagtattacggctcatcctacaaccctccctacgtcccggccagcagcatctgcccttcgcccctctccacgtccacctacgtcctccaggaggcatctcacaacgtccccaaccagagttccgagtcacttgctggtgaatacaacacacacaatggaccttccacaccagcgaaagagggagacacagacaggccgcaccgggcctccgacgggaagctccgaggccggtctaagaggagcagtgacccgtccccggcaggggacaatgagattgagcgtgtgttcgtgtgggacttggatgagacaataattatttttcactccttactcacggggacatttgcatccagatacgggaaggacaccacgacgtccgtgcgcattggccttatgatggaagagatgatcttcaaccttgcagatacacatctgttcttcaatgacctggaggattgtgaccagatccacgttgatgacgtctcatcagatgacaatggccaagatttaagcacatacaacttctccgctgacggcttccacagttcggccccaggagccaacctgtgcctgggctctggcgtgcacggcggcgtggactggatgaggaagctggccttccgctaccggcgggtgaaggagatgtacaatacctacaagaacaacgttggtgggttgataggcactcccaaaagggagacctggctacagctccgagctgagctggaagctctcacagacctctggctgacccactccctgaaggcactaaacctcatcaactcccggcccaactgtgtcaatgtgctggtcaccaccactcaactaattcctgccctggccaaagtcctgctatatggcctggggtctgtgtttcctattgagaacatctacagtgcaaccaagacagggaaggagagctgcttcgagaggataatgcagagattcggcagaaaagctgtctacgtggtgatcggtgatggtgtggaagaggagcaaggagcgaaaaagcacaacatgcctttctggcggatatcctgccacgcagacctggaggcactgaggcacgccctggagctggagtatttatagcaggatcagcagcatctccacctgccatctcaccctcagaccccctcgccttccccacctccccaccgagaactccagagacccagatgttggacaccaggaaggggccccacagccgagacgacgtgtccagtgaccatctcagaagccgtccatcagtccaaatgggggttctgagaaggaaagtacccaacattggcttcggagtatttgactttggggaaaagggctggctcggagtctagactcttctgtaagactcacagaacaaaagcaaggaattgctgatttggggggtgcctggtgatgaggaggggatgggtttgtcttgtcttctttttaatttatggactagtctcattactccggaattatgctcttgtacctgtgtggctgggtttcttagtcgttggtttggtttggttttttgaactggtatgtggggtggttcacagttctaatgtaagcactctattctccaagttgtgctttgtggggacaatcattctttgaacattagagaggaaggcagttcaagctgttgaaaagactattgcttatttttgtttttaaagacctacttgacgtcatgtggacagtgcacgtgccttacgctacatcttgttttctaggaagagggggatgctgggaaggaatgggtgctttgtgatggataaaaggcattaaataaaaccacgtttacattttgaaaaaaaaaaaaaaaaaaaaaaaa

SEQ ID NO: 1905 - protein, 538 aa, Homo sapiens
MVELVISPSLTVNSDCLDKLKFNRADAAVWTLSDRQGITKSAPLRVSQLFSRSCPRVLPRQPSTAMAAYGQTQYSAGIQQATPYTAYPPPAQAYGIPSYSIKTEDSLNHSPGQSGFLSYGSSFSTSPTGQSPYTYQMHGTTGFYQGGNGLGNAAGFGSVHQDYPSYPGFPQSQYPQYYGSSYNPPYVPASSICPSPLSTSTYVLQEASHNVPNQSSESLAGEYNTHNGPSTPAKEGDTDRPHRASDGKLRGRSKRSSDPSPAGDNEIERVFVWDLDETIIIFHSLLTGTFASRYGKDTTTSVRIGLMMEEMIFNLADTHLFFNDLEDCDQIHVDDVSSDDNGQDLSTYNFSADGFHSSAPGANLCLGSGVHGGVDWMRKLAFRYRRVKEMYNTYKNNVGGLIGTPKRETWLQLRAELEALTDLWLTHSLKALNLINSRPNCVNVLVTTTQLIPALAKVLLYGLGSVFPIENIYSATKTGKESCFERIMQRFGRKAVYVVIGDGVEEEQGAKKHNMPFWRISCHADLEALRHALELEYL

SEQ ID NO: 1906 - DNA, 2406 bp, Homo sapiens
ggcagcggcaacggcagagacagcaacgtgcccgccgcagtcagcccggcctcgtcggacccgcaccggcccgcccgcccgcccgcaccgcgtcggggcgccctctccactgcgcgcggtacaaggaaatggtagaactagtgatctcacccagcctcactgtaaacagcgattgtctggataaactgaagtttaaccgtgctgacgctgctgtgtggactctgagtgacagacaaggcatcaccaaatcggcccccctgagagtgtcccagctcttctccagatcttgcccacgtgtcctcccccgccagccttccacagccatggcagcctacggccagacgcagtacagtgcggggatccagcaggctaccccctatacagcttacccacctccagcacaagcctatggaatcccttccttcagcacctcacccactggacagagcccatacacctaccagatgcacggcacaacagggttctatcaaggaggaaatggactgggcaacgcagccggtttcgggagtgtgcaccaggactatccttcctaccccggcttcccccagagccagtacccccagtattacggctcatcctacaaccctccctacgtcccggccagcagcatctgcccttcgcccctctccacgtccacctacgtcctccaggaggcatctcacaacgtccccaaccagagttccgagtcacttgctggtgaatacaacacacacaatggaccttccacaccagcgaaagagggagacacagacaggccgcaccgggcctccgacgggaagctccgaggccggtctaagaggagcagtgacccgtccccggcaggggacaatgagattgagcgtgtgttcgtgtgggacttggatgagacaataattatttttcactccttactcacggggacatttgcatccagatacgggaaggacaccacgacgtccgtgcgcattggccttatgatggaagagatgatcttcaaccttgcagatacacatctgttcttcaatgacctggaggattgtgaccagatccacgttgatgacgtctcatcagatgacaatggccaagatttaagcacatacaacttctccgctgacggcttccacagttcggccccaggagccaacctgtgcctgggctctggcgtgcacggcggcgtggactggatgaggaagctggccttccgctaccggcgggtgaaggagatgtacaatacctacaagaacaacgttggtgggttgataggcactcccaaaagggagacctggctacagctccgagctgagctggaagctctcacagacctctggctgacccactccctgaaggcactaaacctcatcaactcccggcccaactgtgtcaatgtgctggtcaccaccactcaactaattcctgccctggccaaagtcctgctatatggcctggggtctgtgtttcctattgagaacatctacagtgcaaccaagacagggaaggagagctgcttcgagaggataatgcagagattcggcagaaaagctgtctacgtggtgatcggtgatggtgtggaagaggagcaaggagcgaaaaagcacaacatgcctttctggcggatatcctgccacgcagacctggaggcactgaggcacgccctggagctggagtatttatagcaggatcagcagcatctccacctgccatctcaccctcagaccccctcgccttccccacctccccaccgagaactccagagacccagatgttggacaccaggaaggggccccacagccgagacgacgtgtccagtgaccatctcagaagccgtccatcagtccaaatgggggttctgagaaggaaagtacccaacattggcttcggagtatttgactttggggaaaagggctggctcggagtctagactcttctgtaagactcacagaacaaaagcaaggaattgctgatttggggggtgcctggtgatgaggaggggatgggtttgtcttgtcttctttttaatttatggactagtctcattactccggaattatgctcttgtacctgtgtggctgggtttcttagtcgttggtttggtttggttttttgaactggtatgtggggtggttcacagttctaatgtaagcactctattctccaagttgtgctttgtggggacaatcattctttgaacattagagaggaaggcagttcaagctgttgaaaagactattgcttatttttgtttttaaagacctacttgacgtcatgtggacagtgcacgtgccttacgctacatcttgttttctaggaagagggggatgctgggaaggaatgggtgctttgtgatggataaaaggcattaaataaaaccacgtttacattttgaaaaaaaaaaaaaaaaaaaaaaaa

SEQ ID NO: 1907 - protein, 514 aa, Homo sapiens
MVELVISPSLTVNSDCLDKLKFNRADAAVWTLSDRQGITKSAPLRVSQLFSRSCPRVLPRQPSTAMAAYGQTQYSAGIQQATPYTAYPPPAQAYGIPSFSTSPTGQSPYTYQMHGTTGFYQGGNGLGNAAGFGSVHQDYPSYPGFPQSQYPQYYGSSYNPPYVPASSICPSPLSTSTYVLQEASHNVPNQSSESLAGEYNTHNGPSTPAKEGDTDRPHRASDGKLRGRSKRSSDPSPAGDNEIERVFVWDLDETIIIFHSLLTGTFASRYGKDTTTSVRIGLMMEEMIFNLADTHLFFNDLEDCDQIHVDDVSSDDNGQDLSTYNFSADGFHSSAPGANLCLGSGVHGGVDWMRKLAFRYRRVKEMYNTYKNNVGGLIGTPKRETWLQLRAELEALTDLWLTHSLKALNLINSRPNCVNVLVTTTQLIPALAKVLLYGLGSVFPIENIYSATKTGKESCFERIMQRFGRKAVYVVIGDGVEEEQGAKKHNMPFWRISCHADLEALRHALELEYL

SEQ ID NO: 1908 - DNA, 2508 bp, Homo sapiens
taaatgaattccatgcttttccttcctttcccttccctgccttcgtgaaagggaagctaagtctttctcctaccccagattccttgaaggctgtctgagttctctcttccttcccctgcatagagaataagctggtctccaatttcaggtacaaggaaatggtagaactagtgatctcacccagcctcactgtaaacagcgattgtctggataaactgaagtttaaccgtgctgacgctgctgtgtggactctgagtgacagacaaggcatcaccaaatcggcccccctgagagtgtcccagctcttctccagatcttgcccacgtgtcctcccccgccagccttccacagccatggcagcctacggccagacgcagtacagtgcggggatccagcaggctaccccctatacagcttacccacctccagcacaagcctatggaatcccttcctacagcatcaagacagaagacagcttgaaccattcccctggccagagtggattcctcagctatggctccagcttcagcacctcacccactggacagagcccatacacctaccagatgcacggcacaacagggttctatcaaggaggaaatggactgggcaacgcagccggtttcgggagtgtgcaccaggactatccttcctaccccggcttcccccagagccagtacccccagtattacggctcatcctacaaccctccctacgtcccggccagcagcatctgcccttcgcccctctccacgtccacctacgtcctccaggaggcatctcacaacgtccccaaccagagttccgagtcacttgctggtgaatacaacacacacaatggaccttccacaccagcgaaagagggagacacagacaggccgcaccgggcctccgacgggaagctccgaggccggtctaagaggagcagtgacccgtccccggcaggggacaatgagattgagcgtgtgttcgtgtgggacttggatgagacaataattatttttcactccttactcacggggacatttgcatccagatacgggaaggacaccacgacgtccgtgcgcattggccttatgatggaagagatgatcttcaaccttgcagatacacatctgttcttcaatgacctggaggattgtgaccagatccacgttgatgacgtctcatcagatgacaatggccaagatttaagcacatacaacttctccgctgacggcttccacagttcggccccaggagccaacctgtgcctgggctctggcgtgcacggcggcgtggactggatgaggaagctggccttccgctaccggcgggtgaaggagatgtacaatacctacaagaacaacgttggtgggttgataggcactcccaaaagggagacctggctacagctccgagctgagctggaagctctcacagacctctggctgacccactccctgaaggcactaaacctcatcaactcccggcccaactgtgtcaatgtgctggtcaccaccactcaactaattcctgccctggccaaagtcctgctatatggcctggggtctgtgtttcctattgagaacatctacagtgcaaccaagacagggaaggagagctgcttcgagaggataatgcagagattcggcagaaaagctgtctacgtggtgatcggtgatggtgtggaagaggagcaaggagcgaaaaagcacaacatgcctttctggcggatatcctgccacgcagacctggaggcactgaggcacgccctggagctggagtatttatagcaggatcagcagcatctccacctgccatctcaccctcagaccccctcgccttccccacctccccaccgagaactccagagacccagatgttggacaccaggaaggggccccacagccgagacgacgtgtccagtgaccatctcagaagccgtccatcagtccaaatgggggttctgagaaggaaagtacccaacattggcttcggagtatttgactttggggaaaagggctggctcggagtctagactcttctgtaagactcacagaacaaaagcaaggaattgctgatttggggggtgcctggtgatgaggaggggatgggtttgtcttgtcttctttttaatttatggactagtctcattactccggaattatgctcttgtacctgtgtggctgggtttcttagtcgttggtttggtttggttttttgaactggtatgtggggtggttcacagttctaatgtaagcactctattctccaagttgtgctttgtggggacaatcattctttgaacattagagaggaaggcagttcaagctgttgaaaagactattgcttatttttgtttttaaagacctacttgacgtcatgtggacagtgcacgtgccttacgctacatcttgttttctaggaagagggggatgctgggaaggaatgggtgctttgtgatggataaaaggcattaaataaaaccacgtttacattttgaaaaaaaaaaaaaaaaaaaaaaaa

SEQ ID NO: 1909 - protein, 538 aa, Homo sapiens; identical to SEQ ID NO: 1905

SEQ ID NO: 1910 - DNA, 2458 bp, Homo sapiens
gcagagctcaactctgcccctcaaaccacaataggaaccagtggtttccgggtgatcctgatgacagtttccagtgtctacctggaatgaaacgaatggtacaaggaaatggtagaactagtgatctcacccagcctcactgtaaacagcgattgtctggataaactgaagtttaaccgtgctgacgctgctgtgtggactctgagtgacagacaaggcatcaccaaatcggcccccctgagagtgtcccagctcttctccagatcttgcccacgtgtcctcccccgccagccttccacagccatggcagcctacggccagacgcagtacagtgcggggatccagcaggctaccccctatacagcttacccacctccagcacaagcctatggaatcccttcctacagcatcaagacagaagacagcttgaaccattcccctggccagagtggattcctcagctatggctccagcttcagcacctcacccactggacagagcccatacacctaccagatgcacggcacaacagggttctatcaaggaggaaatggactgggcaacgcagccggtttcgggagtgtgcaccaggactatccttcctaccccggcttcccccagagccagtacccccagtattacggctcatcctacaaccctccctacgtcccggccagcagcatctgcccttcgcccctctccacgtccacctacgtcctccaggaggcatctcacaacgtccccaaccagagttccgagtcacttgctggtgaatacaacacacacaatggaccttccacaccagcgaaagagggagacacagacaggccgcaccgggcctccgacgggaagctccgaggccggtctaagaggagcagtgacccgtccccggcaggggacaatgagattgagcgtgtgttcgtgtgggacttggatgagacaataattatttttcactccttactcacggggacatttgcatccagatacgggaaggacaccacgacgtccgtgcgcattggccttatgatggaagagatgatcttcaaccttgcagatacacatctgttcttcaatgacctggaggattgtgaccagatccacgttgatgacgtctcatcagatgacaatggccaagatttaagcacatacaacttctccgctgacggcttccacagttcggccccaggagccaacctgtgcctgggctctggcgtgcacggcggcgtggactggatgaggaagctggccttccgctaccggcgggtgaaggagatgtacaatacctacaagaacaacgttggtgggttgataggcactcccaaaagggagacctggctacagctccgagctgagctggaagctctcacagacctctggctgacccactccctgaaggcactaaacctcatcaactcccggcccaactgtgtcaatgtgctggtcaccaccactcaactaattcctgccctggccaaagtcctgctatatggcctggggtctgtgtttcctattgagaacatctacagtgcaaccaagacagggaaggagagctgcttcgagaggataatgcagagattcggcagaaaagctgtctacgtggtgatcggtgatggtgtggaagaggagcaaggagcgaaaaagcacaacatgcctttctggcggatatcctgccacgcagacctggaggcactgaggcacgccctggagctggagtatttatagcaggatcagcagcatctccacctgccatctcaccctcagaccccctcgccttccccacctccccaccgagaactccagagacccagatgttggacaccaggaaggggccccacagccgagacgacgtgtccagtgaccatctcagaagccgtccatcagtccaaatgggggttctgagaaggaaagtacccaacattggcttcggagtatttgactttggggaaaagggctggctcggagtctagactcttctgtaagactcacagaacaaaagcaaggaattgctgatttggggggtgcctggtgatgaggaggggatgggtttgtcttgtcttctttttaatttatggactagtctcattactccggaattatgctcttgtacctgtgtggctgggtttcttagtcgttggtttggtttggttttttgaactggtatgtggggtggttcacagttctaatgtaagcactctattctccaagttgtgctttgtggggacaatcattctttgaacattagagaggaaggcagttcaagctgttgaaaagactattgcttatttttgtttttaaagacctacttgacgtcatgtggacagtgcacgtgccttacgctacatcttgttttctaggaagagggggatgctgggaaggaatgggtgctttgtgatggataaaaggcattaaataaaaccacgtttacattttgaaaaaaaaaaaaaaaaaaaaaaaa

SEQ ID NO: 1911 - protein, 538 aa, Homo sapiens; identical to SEQ ID NO: 1905

SEQ ID NO: 1912 - DNA, 2762 bp, Homo sapiens
tcagtcccagccaagccacgtggactgagagtcatggggagacctagggaaattaaataactcacaaacacctgtaaaaactgttacagtgactggtgtgtgtgatagagggccatgggcctgtgaaagctgcaggagggaaatcgcttactcagggagagcctggggaaatcctgccggaactgaggcctctgcagggtgagcaggagggactggagttccaggcagagggaacagcatgtacaaaggccctgtggcaagagggagtgtggagcgagagaaaggccagcgtgctggaatcagatattggacaaggagaagccagatcaaggctgtgttcggaactctttgctttatcttaagagcaatggaaagccgtcagaggttataagcaaggatgaggtacaaggaaatggtagaactagtgatctcacccagcctcactgtaaacagcgattgtctggataaactgaagtttaaccgtgctgacgctgctgtgtggactctgagtgacagacaaggcatcaccaaatcggcccccctgagagtgtcccagctcttctccagatcttgcccacgtgtcctcccccgccagccttccacagccatggcagcctacggccagacgcagtacagtgcggggatccagcaggctaccccctatacagcttacccacctccagcacaagcctatggaatcccttcctacagcatcaagacagaagacagcttgaaccattcccctggccagagtggattcctcagctatggctccagcttcagcacctcacccactggacagagcccatacacctaccagatgcacggcacaacagggttctatcaaggaggaaatggactgggcaacgcagccggtttcgggagtgtgcaccaggactatccttcctaccccggcttcccccagagccagtacccccagtattacggctcatcctacaaccctccctacgtcccggccagcagcatctgcccttcgcccctctccacgtccacctacgtcctccaggaggcatctcacaacgtccccaaccagagttccgagtcacttgctggtgaatacaacacacacaatggaccttccacaccagcgaaagagggagacacagacaggccgcaccgggcctccgacgggaagctccgaggccggtctaagaggagcagtgacccgtccccggcaggggacaatgagattgagcgtgtgttcgtgtgggacttggatgagacaataattatttttcactccttactcacggggacatttgcatccagatacgggaaggacaccacgacgtccgtgcgcattggccttatgatggaagagatgatcttcaaccttgcagatacacatctgttcttcaatgacctggaggattgtgaccagatccacgttgatgacgtctcatcagatgacaatggccaagatttaagcacatacaacttctccgctgacggcttccacagttcggccccaggagccaacctgtgcctgggctctggcgtgcacggcggcgtggactggatgaggaagctggccttccgctaccggcgggtgaaggagatgtacaatacctacaagaacaacgttggtgggttgataggcactcccaaaagggagacctggctacagctccgagctgagctggaagctctcacagacctctggctgacccactccctgaaggcactaaacctcatcaactcccggcccaactgtgtcaatgtgctggtcaccaccactcaactaattcctgccctggccaaagtcctgctatatggcctggggtctgtgtttcctattgagaacatctacagtgcaaccaagacagggaaggagagctgcttcgagaggataatgcagagattcggcagaaaagctgtctacgtggtgatcggtgatggtgtggaagaggagcaaggagcgaaaaagcacaacatgcctttctggcggatatcctgccacgcagacctggaggcactgaggcacgccctggagctggagtatttatagcaggatcagcagcatctccacctgccatctcaccctcagaccccctcgccttccccacctccccaccgagaactccagagacccagatgttggacaccaggaaggggccccacagccgagacgacgtgtccagtgaccatctcagaagccgtccatcagtccaaatgggggttctgagaaggaaagtacccaacattggcttcggagtatttgactttggggaaaagggctggctcggagtctagactcttctgtaagactcacagaacaaaagcaaggaattgctgatttggggggtgcctggtgatgaggaggggatgggtttgtcttgtcttctttttaatttatggactagtctcattactccggaattatgctcttgtacctgtgtggctgggtttcttagtcgttggtttggtttggttttttgaactggtatgtggggtggttcacagttctaatgtaagcactctattctccaagttgtgctttgtggggacaatcattctttgaacattagagaggaaggcagttcaagctgttgaaaagactattgcttatttttgtttttaaagacctacttgacgtcatgtggacagtgcacgtgccttacgctacatcttgttttctaggaagagggggatgctgggaaggaatgggtgctttgtgatggataaaaggcattaaataaaaccacgtttacattttgaaaaaaaaaaaaaaaaaaaaaaaa

SEQ ID NO: 1913 - protein, 543 aa, Homo sapiens
MRYKEMVELVISPSLTVNSDCLDKLKFNRADAAVWTLSDRQGITKSAPLRVSQLFSRSCPRVLPRQPSTAMAAYGQTQYSAGIQQATPYTAYPPPAQAYGIPSYSIKTEDSLNHSPGQSGFLSYGSSFSTSPTGQSPYTYQMHGTTGFYQGGNGLGNAAGFGSVHQDYPSYPGFPQSQYPQYYGSSYNPPYVPASSICPSPLSTSTYVLQEASHNVPNQSSESLAGEYNTHNGPSTPAKEGDTDRPHRASDGKLRGRSKRSSDPSPAGDNEIERVFVWDLDETIIIFHSLLTGTFASRYGKDTTTSVRIGLMMEEMIFNLADTHLFFNDLEDCDQIHVDDVSSDDNGQDLSTYNFSADGFHSSAPGANLCLGSGVHGGVDWMRKLAFRYRRVKEMYNTYKNNVGGLIGTPKRETWLQLRAELEALTDLWLTHSLKALNLINSRPNCVNVLVTTTQLIPALAKVLLYGLGSVFPIENIYSATKTGKESCFERIMQRFGRKAVYVVIGDGVEEEQGAKKHNMPFWRISCHADLEALRHALELEYL

SEQ ID NO: 1914 - DNA, 3063 bp, Homo sapiens
cgccggcggggaagatgaccgcgggcgccggcgtgctccttctgctgctctcgctctccggcgcgctccgggcccataatgaggatcttacaactagagagacctgcaaggctgggttctctgaagatgattacacggcattaatctcccaaaatattctagaaggggaaaagctacttcaagtcaagttcagcagctgtgtggggaccaaggggacacaatatgagaccaacagcatggacttcaaagttggggcagatgggacagtcttcgccacccgggagctgcaggtcccctccgagcaggtggcgttcacggtgactgcatgggacagccagacagcagagaaatgggacgccgtggtgcggttgctggtggcccagacctcgtccccgcactctggacacaagccgcagaaaggaaagaaggtcgtggctctggacccctctccgcctccgaaggacaccctgctgccgtggccccagcaccagaacgccaacgggctgaggcggcgcaaacgggactgggtcatcccgcccatcaacgtgcccgagaactcgcgcgggcccttcccgcagcagctcgtgaggatccggtccgacaaagacaatgacatccccatccggtacagcatcacgggagtgggcgccgaccagccccccatggaggtcttcagcattgactccatgtccggccggatgtacgtcacaaggcccatggaccgggaggagcacgcctcttaccacctccgagcccacgctgtggacatgaatggcaacaaggtggagaaccccatcgacctgtacatctacgtcatcgacatgaatgacaaccgccctgagttcatcaaccaggtctacaacggctccgtggacgagggctccaagccaggcacctacgtgatgaccgtcacggccaacgatgctgacgacagcaccacggccaacgggatggtgcggtaccggatcgtgacccagaccccacagagcccgtcccagaatatgttcaccatcaacagcgagactggagatatcgtcacagtggcggctggcctggaccgagagaaagttcagcagtacacagtcatcgttcaggccacagatatggaaggaaatctcaactatggcctctcaaacacagccacagccatcatcacggtgacagatgtgaatgacaacccgccagaatttaccgccagcacgtttgcaggggaggtccccgaaaaccgcgtggagaccgtggtcgcaaacctcacggtgatggaccgagatcagccccactctccaaactggaatgccgtttaccgcatcatcagtggggatccatccgggcacttcagcgtccgcacagaccccgtaaccaacgagggcatggtcaccgtggtgaaggcagtcgactacgagctcaacagagctttcatgctgacagtgatggtgtccaaccaggcgcccctggccagcggaatccagatgtccttccagtccacggcaggggtgaccatctccatcatggacatcaacgaggctccctacttcccctcaaaccacaagctgatccgcctggaggagggcgtgccccccggcaccgtgctgaccacgttttcagctgtggaccctgaccggttcatgcagcaggctgtgagatactcaaagctgtcagacccagcgagctggctgcacatcaatgccaccaacggccagatcaccacggcggcagtgctggaccgtgagtccctctacaccaaaaacaacgtctacgaggccaccttcctggcagctgacaatgggatacccccggccagcggcaccgggaccctccagatctatctcattgacatcaacgacaacgcccctgagctgctgcccaaggaggcgcagatctgcgagaagcccaacctgaacgccatcaacatcacggcggccgacgctgacgtcgaccccaacatcggcccctacgtcttcgagctgccctttgtcccggcggccgtgcggaagaactggaccatcacccgcctgaacggtgactatgcccaactcagcttgcgcatcctgtacctggaggccgggatgtatgacgtccccatcatcgtcacagactctggaaaccctcccctgtccaacacgtccatcatcaaagtcaaggtgtgcccatgtgatgacaacggggactgcaccaccattggcgcagtggcagcggctggtctgggcaccggtgccatcgtggccatcctcatctgcatcctcatcctgctgaccatggtcctgctgtttgtcatgtggatgaagcggcgagagaaggagcgccacacgaagcagctgctcattgaccccgaggacgacgtccgcgacaacatcctcaagtatgacgaggaaggcggtggcgaggaggaccaggactacgacctcagccagctgcagcagccggaagccatggggcacgtgccaagcaaagcccctggcgtgcgtcgcgtggatgagcggccggtgggcgctgagccccagtacccgatcaggcccatggtgccgcacccaggcgacatcggtgacttcatcaatgagggactccgcgctgctgacaacgaccccacggcacccccctatgactccctgctggtcttcgactacgaggggagcggctccaccgcaggctccgtcagctccctgaactcatccagttccggggaccaagactacgattacctcaacgactgggggcccagattcaagaagctggcggacatgtatggaggtggtgaagaggattgactgacctcgcatcttcggaccgaagtgagagccgtgctcggacgccggaggagcaggactgagcagaggcggccggtcttcccgactccctgcggctgtgtccttagtgctgttaggaggccccccaatccccacgttgagctgtctagcatgagcacccacccccacagcgccctgcacccggccgctgcccagcaccgcgctggctggcactgaaggacagcaagaggcactctgtcttcacttgaatttcctagaacagaagcactgtttttaaaaaaaaaaaaaaaaaaagaag

SEQ ID NO: 1915 - protein, 916 aa, Homo sapiens
MTAGAGVLLLLLSLSGALRAHNEDLTTRETCKAGFSEDDYTALISQNILEGEKLLQVKFSSCVGTKGTQYETNSMDFKVGADGTVFATRELQVPSEQVAFTVTAWDSQTAEKWDAVVRLLVAQTSSPHSGHKPQKGKKVVALDPSPPPKDTLLPWPQHQNANGLRRRKRDWVIPPINVPENSRGPFPQQLVRIRSDKDNDIPIRYSITGVGADQPPMEVFSIDSMSGRMYVTRPMDREEHASYHLRAHAVDMNGNKVENPIDLYIYVIDMNDNRPEFINQVYNGSVDEGSKPGTYVMTVTANDADDSTTANGMVRYRIVTQTPQSPSQNMFTINSETGDIVTVAAGLDREKVQQYTVIVQATDMEGNLNYGLSNTATAIITVTDVNDNPPEFTASTFAGEVPENRVETVVANLTVMDRDQPHSPNWNAVYRIISGDPSGHFSVRTDPVTNEGMVTVVKAVDYELNRAFMLTVMVSNQAPLASGIQMSFQSTAGVTISIMDINEAPYFPSNHKLIRLEEGVPPGTVLTTFSAVDPDRFMQQAVRYSKLSDPASWLHINATNGQITTAAVLDRESLYTKNNVYEATFLAADNGIPPASGTGTLQIYLIDINDNAPELLPKEAQICEKPNLNAINITAADADVDPNIGPYVFELPFVPAAVRKNWTITRLNGDYAQLSLRILYLEAGMYDVPIIVTDSGNPPLSNTSIIKVKVCPCDDNGDCTTIGAVAAAGLGTGAIVAILICILILLTMVLLFVMWMKRREKERHTKQLLIDPEDDVRDNILKYDEEGGGEEDQDYDLSQLQQPEAMGHVPSKAPGVRRVDERPVGAEPQYPIRPMVPHPGDIGDFINEGLRAADNDPTAPPYDSLLVFDYEGSGSTAGSVSSLNSSSSGDQDYDYLNDWGPRFKKLADMYGGGEED

SEQ ID NO: 1916 - DNA, 4647 bp, Homo sapiens
atggcggcgggctcggatctgctggacgaggtcttcttcaacagcgaggtggacgagaaagtggtgagcgacctggtgggctcgctggagtcgcagctggcggccagcgcggcccaccaccaccacctcgcgccgcgcacgcccgaggtgcgggccgcggccgccggcgcgctcgggaaccatgttgtgagcggcagcccggccggagccgcgggcgcagggccggccgcccccgccgagggcgcgcccggagcggcgccggagccgccccccgcaggtagagcgcggccggggggcggggggccgcagcgcccgggccccccctcaccgcgccgcccccttgtccccgcagggcccgcgccgcccgccgcgaagctgaggccgccgcccgagggcagcgcggggtcctgcgccccggtgcccgccgccgccgccgtcgccgcggggcccgagcccgcccccgccggccccgccaagcccgccggccccgccgcgctggccgcccgcgccggccccggccccgggcccggccccggccccggccccggccctggccctggcaagcccgccggccccggcgccgcgcaaactttgaatgggagcgccgcgctgctgaactcgcaccacgccgccgcacctgctgtcagcctggtcaacaacgggcccgccgcgctgctgccgctgcccaagcccgccgcccccggcactgtcatccagacgccccccttcgtgggcgccgccgcgccccccgcgcccgccgcgccctcgccccccgccgcccccgcgcccgccgcccccgccgccgccccgcccccgccaccccccgcgcccgccactctggcccggccgcccggccaccccgccggacccccgaccgccgcgcccgccgtgccgccccccgccgccgcccagaacgggggcagcgccggggcagcccccgcccccgccccggccgccgggggccccgcgggggtcagcggccaacccgggcccggcgcggcggctgcggcgccggcgccgggggtcaaggccgagtcgcccaagagggtggtgcaggcggcgcccccggcggcgcagaccctggcggccagcggcccggccagcacggcggccagcatggtcatcgggccaactatgcaaggggcgctgcccagcccggccgccgtcccgccgcccgcccccgggacccccaccgggctgcccaaaggcgcggccggcgcagtgacccagagcctgtcccggacgcccacggccaccaccagcgggattcgggccaccctgacgcccaccgtgctggccccccgcttgccgcagccgcctcagaacccgaccaacatccagaacttccagctgcccccaggaatggtcctcgtccgaagtgagaatgggcagttgttaatgattcctcagcaggccttggcccagatgcaggcgcaggcccatgcccagcctcagaccaccatggcgcctcgccctgccacccccacaagtgcccctcccgtccagatctccaccgtacaggcacctggaacacctatcattgcacggcaggtgaccccaactaccataattaagcaagtgtctcaggcccagacaacggtgcagcccagtgcaaccctgcagcgctcgcccggcgtccagcctcagctcgttctgggtggcgctgcccagacggcttcacttgggacggcgacggctgttcagacggggactcctcagcgcacggtaccaggggcgaccaccacttcctcagctgccacggaaactatggaaaacgtgaagaaatgtaaaaatttcctatctacgttaataaaactggcttcatctggcaagcagtctacagagacagcagctaatgtgaaagagctcgtgcagaatttactggatggaaaaatagaagcagaagatttcacaagcaggttataccgagaacttaattcttcacctcaaccttaccttgtgcctttcctgaagaggagcttacccgccttgagacagctgacccccgactccgcggccttcatccagcagagccagcagcagccgccaccgcccacctcgcaggccaccactgcgctcacggccgtggtgctgagtagctcggtccagcgcacggccgggaagacggcggccaccgtgaccagtgccctccagccccctgtgctcagcctcacgcagcccacgcaggtcggcgtcggcaagcaggggcaacccacaccgctggtcatccagcagcctccgaagccaggagccctgatccggcccccgcaggtgacgttgacgcagacacccatggtcgccctgcggcagcctcacaaccggatcatgctcaccacgcctcagcagatccagctgaacccactgcagccagtccctgtggtgaaacccgccgtgttacctggaaccaaagccctttctgctgtctcggcacaagcagctgctgcacagaaaaataaactcaaggagcctgggggaggttcgtttcgggacgatgatgacattaatgatgttgcatcgatggctggagtaaacttgtcagaagaaagtgcaagaatattagccacgaactctgaattggtgggcacgctaacgcggtcctgtaaagatgaaaccttcctcctccaagcgcctttgcagagaagaatattagaaataggtaaaaaacatggtataacggaattacatccagatgtagtaagttatgtatcacatgccacgcaacaaaggctacagaatcttgtagagaaaatatcagaaacagctcagcagaagaacttttcttacaaggatgacgacagatatgagcaggcgagtgacgtccgggcacagctcaagttttttgaacagcttgatcaaatcgaaaagcagaggaaggatgagcaggagcgggagatcctgatgagggcagcaaagtctcggtcaagacaagaagatccagaacagttaaggctgaaacagaaggcaaaggagatgcagcaacaggaactggcacaaatgagacagcgggacgccaacctcacagcactagcagcgatcgggcccaggaaaaagaggaaagtggactgtccggggccgggctcaggagcagaggggtcgggccccggctcagtggtcccaggcagctcgggtgtcggaacccccagacagttcacgcgacaaagaatcacgcgggtcaacctcagggacctcatattttgtttagaaaatgaacgtgagacaagccattcactgctgctctacaaagcattccttaagtgacacaggaggacgcctggggactttttatatatttgcagattacgcctttttgtaacgagcaaatgggatattgtttaaaaaacagccacctctttacaatggaacagttttatattcctgtttctaaatcagctcttcagtgtgaaagaaaacacgtttctgtaacagagagaacacaaaggcctgtggatactcttaaaggacaattaaatcttaactcatcttgattgagtggccttcctgccaaacaagccatatataaagactgatggaatcgttagcaaataattagctgccctctgtcaactcatagcagtttctgcattatttgtgcattttggtttagttctacctaacttactatgtaggtgtatgtctacagccgatgacctcatttcgtttattttatttttgtaatagtcagttggcaaagcaaactgattttttagactatttatcttccttcccttcccctcccaccccgctctcctctctgccccctgccctcccctcccctcccttcccctccactccgctgagaatcctggaggaatacacaattcatcgttgcacccccacctcagagtgtaatcgcatttctgcttggtagaggccgagcccagcaaaggtggctccttctgaatgtgtggtcagcatctgtacaaatgcattttatttgctatagtttgtaaagctgtaaagttaaaagagatgaaaaccttttcagcataaatatattttacttgcactgtgttttttagctaaaagtgaaaacctagattaaataaaatcaaagttgagaagaatcatcaaaagactgtttctcggtgtgaatcaagtgttgaaaaatggttggtgtattttgtcagtaattgtacataacttttggcacatgacatagaaatggctatgtaaactataattattttgctaagagactgtatgcaagccttgggccgactttacagacgtccagagcaaagccccttctttgtacctatttttttattacaaatatactaattggttctttctattttcagaggttattgtatgaaattgtctattgatagtacttttatgactgtaaatactctggctttctccgtgtgaattctcacattagactttaattcgagcgcgtgtgaactgaacgctgatcagtattttttatcaacacctgagaactgttacaccttttattttgtcttttaggaaatccctgtctttccattttttcatgtaaattttgcacagttacttgttcatatgtaaatattttactttcagaaatgaagtttttaattgctattgttttatataggattgaaagaaaattaactcctttattaaaaacaaatttatctgtaaaaaaaaaaaaaaaaaaaa

SEQ ID NO: 1917 - protein, 1085 aa, Homo sapiens
MAAGSDLLDEVFFNSEVDEKVVSDLVGSLESQLAASAAHHHHLAPRTPEVRAAAAGALGNHVVSGSPAGAAGAGPAAPAEGAPGAAPEPPPAGRARPGGGGPQRPGPPSPRRPLVPAGPAPPAAKLRPPPEGSAGSCAPVPAAAAVAAGPEPAPAGPAKPAGPAALAARAGPGPGPGPGPGPGPGPGKPAGPGAAQTLNGSAALLNSHHAAAPAVSLVNNGPAALLPLPKPAAPGTVIQTPPFVGAAAPPAPAAPSPPAAPAPAAPAAAPPPPPPAPATLARPPGHPAGPPTAAPAVPPPAAAQNGGSAGAAPAPAPAAGGPAGVSGQPGPGAAAAAPAPGVKAESPKRVVQAAPPAAQTLAASGPASTAASMVIGPTMQGALPSPAAVPPPAPGTPTGLPKGAAGAVTQSLSRTPTATTSGIRATLTPTVLAPRLPQPPQNPTNIQNFQLPPGMVLVRSENGQLLMIPQQALAQMQAQAHAQPQTTMAPRPATPTSAPPVQISTVQAPGTPIIARQVTPTTIIKQVSQAQTTVQPSATLQRSPGVQPQLVLGGAAQTASLGTATAVQTGTPQRTVPGATTTSSAATETMENVKKCKNFLSTLIKLASSGKQSTETAANVKELVQNLLDGKIEAEDFTSRLYRELNSSPQPYLVPFLKRSLPALRQLTPDSAAFIQQSQQQPPPPTSQATTALTAVVLSSSVQRTAGKTAATVTSALQPPVLSLTQPTQVGVGKQGQPTPLVIQQPPKPGALIRPPQVTLTQTPMVALRQPHNRIMLTTPQQIQLNPLQPVPVVKPAVLPGTKALSAVSAQAAAAQKNKLKEPGGGSFRDDDDINDVASMAGVNLSEESARILATNSELVGTLTRSCKDETFLLQAPLQRRILEIGKKHGITELHPDVVSYVSHATQQRLQNLVEKISETAQQKNFSYKDDDRYEQASDVRAQLKFFEQLDQIEKQRKDEQEREILMRAAKSRSRQEDPEQLRLKQKAKEMQQQELAQMRQRDANLTALAAIGPRKKRKVDCPGPGSGAEGSGPGSVVPGSSGVGTPRQFTRQRITRVNLRDLIFCLENERETSHSLLLYKAFLK

SEQ ID NO: 1918 - DNA, 2618 bp, Homo sapiens
cctctcagagccccagtcgcgcgccccttcttggttcgctcggtgcccgcgcaggcccctcgggcggtggcgaggaggcgcccaggcggaggcggcggcgggcggaggagcgcaggagcgggcggccaggccaccgcgcggcggcggagcgggccgcggcccggcgctccttccccaccgcggcccgacgcaccccggccgccgccatgagcggctcctcaggcaccccgtatctgggcagcaagatcagcctcatctccaaggcgcagatccgctacgagggcattctctacaccatcgacaccgacaactccaccgtggcgctcgccaaagtgaggtcctttggcactgaagaccgtcccacagataggcctgcgccccccagagaggagatttatgagtacatcattttccgaggaagtgacatcaaggatatcactgtgtgtgaacctccgaaagctcagcacacactcccgcaggatcccgccattgttcagtcttccctgggttctgcctccgcctcgcccttccagccgcacgtgccttacagccctttccgagggatggcgccctacggcccgctggcggccagctccctgctcagccagcagtatgccgcctccctgggtctaggagctggttttccatccatcccagtcggcaagagccccatggtggagcaggctgtgcagactggttctgctgacaacctgaatgctaaaaagctgttacctggcaagggcaccacagggacgcagctcaacggtcgtcaggcccagccgagcagcaagacggccagcgatgtagtccagccggcagctgtgcaagctcaagggcaggtgaatgacgagaacagaagacctcagaggaggcgatcaggaaacaggcgaacaaggaatcgctccagagggcaaaaccgtccaactaacgttaaggaaaacacaatcaaatttgagggtgactttgatttcgagagtgcaaatgcccagttcaaccgagaggagcttgacaaagaatttaagaagaaactgaattttaaagatgacaaggctgagaagggggaagagaaggacctggctgtggtgacccagagtgccgaagcgcccgctgaggaagaccttctggggcccaactgctactatgacaaatccaagtcgttcttcgacaacatctcttctgaactcaagaccagctccaggcggacgacgtgggccgaagagaggaagctcaacacagagacctttggggtgtcagggaggtttcttcgtggccgcagttctcggggcggattccgaggaggcaggggcaatgggaccacccgtcgcaaccccacttcccacagggccgggactggcagggtgtgagggtgcagccaaaggctcctactgaagtggcgcataactgacgctgtgtgtgtcaggacgcgaggaaaacgctgcacttacagggagaggtggtcactttgtttacggagtttggaagagacccatactgctacttgtgttttggacttaactgaacttggacatggtctgagttagaaccacttgttttggggaagtattcatgggtaacctctttgaggtctctttatctgtgtttcctttttagttgcgcatagcctaattctaaggttttggtattttgcaaaaaggtttctatagtgaaagctgaatccttactttgtgacttttttttttttttttaatgacaagctttgacttttaaaagtggaaccaaatctgttggcagaggtggcagccaagtacatctctgtaacccagctggcccctggtgctgttggcctggcaccccactgccaagggtggggtctcaggagtcaggcagggccagcacagggtggcgtggggggcaggggtgggtgggtggagggcacggaaggggttttcccatggatcatgttgtataagtgaaccagaccaccctgatggcatccacagtgatgtcaaggttggggctggccaggggtgggtggactagaagcatttgggagtagtggccaggggccctggacgctagccacggagctgctgcacagagcctggtgtccacaagcttccaggttggggttggagcctgggatgagccccggcagcgccttggcccttctgtggtccctgccagcctctgacctgggccggtcagtcattgctggactctggccacacactggcgttctcatccacttggaaacaagccagtcttttctgcaaggtcagttgaccaagagcatatttcccctctgttgtacatcgttgttttgtgtttgtgttgtaacagtgggtggagggagggtggggtctacatttgttgcatgagtcgatgggtcagaactttagtatacgcatgcgtcctctgagtgacagggcattttgtcgaaaataagcaccttggtaactaaacccctctaatagctataaaggctttagttctgtattgattaagttactgtaaaagcttgggtttatttttgtaggacttaatggctaagaattagaacatagcaagggggctcctctgttggagtaatgtaaattgtaattataaataaacatgcaaacctttaaaattttaaaaaaaaaaaaaaaaaaaaaaaa

SEQ ID NO: 1919 - protein, 385 aa, Homo sapiens
MSGSSGTPYLGSKISLISKAQIRYEGILYTIDTDNSTVALAKVRSFGTEDRPTDRPAPPREEIYEYIIFRGSDIKDITVCEPPKAQHTLPQDPAIVQSSLGSASASPFQPHVPYSPFRGMAPYGPLAASSLLSQQYAASLGLGAGFPSIPVGKSPMVEQAVQTGSADNLNAKKLLPGKGTTGTQLNGRQAQPSSKTASDVVQPAAVQAQGQVNDENRRPQRRRSGNRRTRNRSRGQNRPTNVKENTIKFEGDFDFESANAQFNREELDKEFKKKLNFKDDKAEKGEEKDLAVVTQSAEAPAEEDLLGPNCYYDKSKSFFDNISSELKTSSRRTTWAEERKLNTETFGVSGRFLRGRSSRGGFRGGRGNGTTRRNPTSHRAGTGRV

SEQ ID NO: 1920 - DNA, 984 bp, Homo sapiens
cggcgccgagggtggggcgcgggcgtagtggcgccgggagtcgcgggtgcgcgcgggccgtgagtgtgcgcttttgagagtcgcggcggaaggagcccggccgccgcccgccggcatgagctacgaccgcgccatcaccgtcttctcgcccgacggccacctcttccaagtggagtacgcgcaggaggccgtcaagaagggctcgaccgcggttggtgttcgaggaagagacattgttgttcttggtgtggagaagaagtcagtggccaaactgcaggatgaaagaacagtgcggaagatctgtgctttggatgacaacgtctgcatggcctttgcaggcctcaccgccgatgcaaggatagtcatcaacagggcccgggtggagtgccagagccaccggctgactgtggaggacccggtcactgtggagtacatcacccgctacatcgccagtctgaagcagcgttatacgcagagcaatgggcgcaggccgtttggcatctctgccctcatcgtgggtttcgactttgatggcactcctaggctctatcagactgacccctcgggcacataccatgcctggaaggccaatgccataggtcggggtgccaagtcagtgcgcgagttcctggagaagaactatactgacgaagccattgaaacagatgatctgaccattaagctggtgatcaaggcactcctggaagtggttcagtcaggtggcaaaaacattgaacttgctgtcatgaggcgagatcaatccctcaagattttaaatcctgaagaaattgagaagtatgttgctgaaattgaaaaagaaaaagaagaaaacgaaaagaagaaacaaaagaaagcatcatgatgaataaaatgtctttgcttgtaatttttaaattcatatcaatcatggatgagtctcgatgtgtaggcctttccattccatttattcacactgagtgtcctacaataaacttccgtattttt

SEQ ID NO: 1921 - protein, 248 aa, Homo sapiens
MSYDRAITVFSPDGHLFQVEYAQEAVKKGSTAVGVRGRDIVVLGVEKKSVAKLQDERTVRKICALDDNVCMAFAGLTADARIVINRARVECQSHRLTVEDPVTVEYITRYIASLKQRYTQSNGRRPFGISALIVGFDFDGTPRLYQTDPSGTYHAWKANAIGRGAKSVREFLEKNYTDEAIETDDLTIKLVIKALLEVVQSGGKNIELAVMRRDQSLKILNPEEIEKYVAEIEKEKEENEKKKQKKAS

SEQ ID NO: 1922 - DNA, 4566 bp, Homo sapiens
agcgcagccggagtatccacctcgatgaccacgggctgagccccgcgccgccaccatgtccgtggccttcgcgtctgcccggccaagaggcaaaggggaggttacgcagcaaaccatccagaagatgctggacgagaaccaccacctgatccagtgcatcctggagtaccagagcaagggcaagacggccgagtgcacgcagtaccagcagatcctgcaccggaacctggtatacctggccacgatcgcagactccaaccagaacatgcagtccctgcttcctgccccgcccacgcagaacatgaacctgggccctggagccctgactcagagcggctccagccagggcctgcactctcagggcagcctgagtgacgccatcagcacgggcctgccaccctcctccctcctgcagggccagattggcaacgggccgagccacgtgtccatgcagcagacggcgcctaacacgctgcccaccacctccatgagcatctctgggcccggctacagccacgcgggacccgcctcgcagggcgtccccatgcaggggcaaggcaccatcggcaactacgtgtctcggaccaacatcaacatgcagtccaacccagtctccatgatgcagcagcaggcggccacgtcgcactacagctcggcgcagggcggcagccagcactaccagggccagtcgtccatcgccatgatggggcagggcagccaggggagcagcatgatggggcagcggcccatggcgccctaccggccctcccagcaaggctcttcccagcagtacctgggccaggaggagtactatggcgagcagtacagccacagccagggcgccgcggagcccatgggccagcagtactaccccgacggccatggcgattacgcctaccagcagtcatcctacacggagcagagctacgaccggtccttcgaggagtccacgcagcactactatgaggggggaaactcccagtacagccagcagcaggccgggtaccagcagggtgccgcgcagcagcagacgtactcccagcagcagtaccccagccagcagagctaccccgggcagcagcagggctacgggtctgcccagggagccccgtcacagtaccccggctaccagcaaggccaaggccagcagtacggaagctaccgagcaccgcagacagcgccgtctgcccagcagcagcggccctacggctatgaacagggccagtatggaaattaccagcagtaagggacacacattctggctggagcccttgtggtagcgtgttcatccaggggccggatgggctggcggcagctctggtgaattgtgacatgttggttacctgttcgcccagtgccacgtctgcatgtgaagcgtgctcatttcatgctgggtatgacgccgagcgcacaccactggcgtgagacagcgcttggtggtgtgatacttttggtgctgtgtatagtattgtatgtcggtacacggagaggtatcctttttttgtcccccgcccccttctcaatgtttctagctagctttgggggtcattttgtcatcagagcattctgtgcccagggacaggacagatctcgaggacaccacagtccacctgttcccgtcaacagacgttaggtctcattttcctcctcatgcagtgttgtagtgtgggttgtcaacttttctttaactggctacgccacagctggacacacatgcagcccctggagggcagcctcttcctgtgcctcgatggggtgggtgggagggcatcttctgtgcgttgggtcagtttctgttacgtaacgaaaaggataaacatctcccacgggagaggccacagatggccacttccagagcttgcccattgcctgtctctcgccaattccgtttatccaaaaaggtacatgtttttgtattaaaaagtaaacagggatcagtgactgtattccaaataaatatgaatccctaagggccgtggacaaattgcctaacccagggccagcggtattgctgaaggaaaggggcagctctctgggaagtgggccctcagagattactctggctttgacccttgtttagctgatggtcatttctgggattggaatatttaataagcccaattctaagttgataggtaattttaaatattcaaaccaaatcttcccaacagttggcaagttgtttattttatattatttcttccaggacctacttgctcagatctccaagcaagcatttcttttcttttagggatgtctgaaagtcacatccagttacattactgtgttctttctaatgaaaagtaaaggttttatatagagaaacttgagtaatttttacatttctaagacattaaatcccatttaaattctgtgtgaacattaaagacagcacacttgcaaaagtatggtcaaaggaaaaaaatcccacatttcaattaacaagtagcatggacatttgatcaacctttagttggaataataatattcatatttgctatgaatccttttaaaaaaatctttggataaatgctgacagatttccaagaactaccaagaaaatacaagagatatccaatgcttgatatatgaggcctagtaataacgatatttctctttaattgatgttttgttttaaaagttaaaagtaattcttggcgtggtggttcacgcctgtaatcccagcactttgggaggccgaagcgggcggatcacctgaggtcgggagttcgagaccagcctgaccaacatggagaaaccccgtccctactaaaaatacaaaattagccaggtatggtggtgcatacctgtaatcccagctactcgggaacctgaggcaggagaatggcttgaacccaggagacagaggttgtggtggggcaagatcgcaccattgcacccgagcctaggcaacaagagtgaaattccgtctcaaaaaaataaataaataaataaataaataagttaaaattaattctttatccagagtcgggtgctttagaatttataagtcacttatgtgttttgcttgaattaattctgacagcccctatgaggaaatctggaggcaggtaacagttcccattttagagatgaagaactgaggcacagattaaaggacttgcctgtgttgaataccagtcctgttctaggacattctcccctctcctaggagacggatgtcacgcacaaatggggagagaagtgtttattttgtaggcactaagggtttctaaaacccttaacactggtaagggctcaaaaataaacgtatgtgttcatattcgatcaccgaaatgagagttcttaattgctaattgacaaacgcgttagcaatttcagttagggagtcatctcccttgattgtgttcttttcctgtcaattttcatagacctaatttgcaaactcaatcggggactaaaatttcccactgaaaatgttaaacattttagataactgtgaagatagtttatttttattccttgccaatctgggaatatgccttttttgtgtgtttgtgtgtttttttaagtgctgtattaataatactttctgaaagaaaaggacacttaccccaaaacttcaatctgaaatgtcttacattaagaatatcttgaatgttgtgtatatattttaaaaagcactttgcaaaatagtttgtacatttatttcctaatttatacatgatttttggtgttaatatatttaatgattaataacagaatgtttatttaatgtgctgtccatttttatgtaatattatggggaaagtgatgccagcagttccttttcattattctatcttctgtcatatgaatgttgagcaaagcttaggccaacatgaattgtttgtgaagtgtggttgatggtgctttgtttttttctgactacttctatggaaggccagtgaagaagcaaaggaagacatgaaaattgacgctcattcttcttcctattgttccctgacatccagcaaattgtgaatttgaaaaatgatggccagttttcagaagtgctgacaaattcatattggtatgcaaaagctcatcacccattaaggtttgttgttgaatcaacagtactcagcatattaaaacagtacatcagaactcatgccaacagtctttatgatgggattaaggtggacaagatctcctaagatctgtgaatgggattaaggtggacaagatctcctaagatctgaaaagaaaccttaatacgctcatatggttggagtgttaagtgaacctctgattttgtcagggtttttctacgtgtaggcgtgaatagggggcaccccttcaaaactgtacaaagaagacgactgttttccatttccatttaaacatttttagccacttcatttctatttattgaacaggtcaaatttgtcttgttatttgtgagtacagtacatttaaaaaacatccttatcggttatttttttttcagtcggagtttgacgtataaattgtttatgcttttggtgtaatctcttaataaactggttcttcaaaaatcatcctataaagtgagttttcatgaagaaaaaaaaaaaaaaaaaa

SEQ ID NO: 1923 - protein, 396 aa, Homo sapiens
MSVAFASARPRGKGEVTQQTIQKMLDENHHLIQCILEYQSKGKTAECTQYQQILHRNLVYLATIADSNQNMQSLLPAPPTQNMNLGPGALTQSGSSQGLHSQGSLSDAISTGLPPSSLLQGQIGNGPSHVSMQQTAPNTLPTTSMSISGPGYSHAGPASQGVPMQGQGTIGNYVSRTNINMQSNPVSMMQQQAATSHYSSAQGGSQHYQGQSSIAMMGQGSQGSSMMGQRPMAPYRPSQQGSSQQYLGQEEYYGEQYSHSQGAAEPMGQQYYPDGHGDYAYQQSSYTEQSYDRSFEESTQHYYEGGNSQYSQQQAGYQQGAAQQQTYSQQQYPSQQSYPGQQQGYGSAQGAPSQYPGYQQGQGQQYGSYRAPQTAPSAQQQRPYGYEQGQYGNYQQ

SEQ ID NO: 1924 - DNA, 1685 bp, Homo sapiens
ctcccgccgggggctccttgctcggccgggccgcggccatgggagaggccgaggtgggcggcgggggcgccgcaggcgacaagggcccgggggaggcggccaccagcccggcggaggagacagtggtgtggagccccgaggtggaggtgtgcctcttccacgccatgctgggccacaagcccgtcggtgtgaaccgacacttccacatgatttgtattcgggacaagttcagccagaacatcgggcggcaggtcccatccaaggtcatctgggaccatctgagcaccatgtacgacatgcaggcgctgcatgagtctgagattcttccattcccgaatccagagaggaacttcgtccttccagaagagatcattcaggaggtccgagaaggaaaagtgatgatagaagaggagatgaaagaggagatgaaggaagacgtggacccccacaatggggctgacgatgttttttcatcttcagggagtttggggaaagcatcagaaaaatccagcaaagacaaagagaagaactcctcagacttggggtgcaaagaaggcgcagacaagcggaagcgcagccgggtcaccgacaaagtcctgaccgcaaacagcaacccttccagtcccagtgctgccaagcggcgccgcacgtagaccctcagccctggtggcggcagagaagcgggcgaggcactgtggtcgctgagggggttggctgggtctgagtgccacccccaggccacagtgataccatcccagtgccatgagcccacactgcccgccctcaggctctcaggtgaacgtggccgtcagcggggaaacgtgtgtgtcagttggaccatgtgggaccctgatggacctgaaagaccaggatcggtccagctcagatattgagggctctgaagcctagttctgtcttctctggagcagctgtggcttccccgtggctgcttggtgacatggattagcgctacgtgggctgcagcatttgggatccaggctacctagaggggcatcgggccagggaaaacctcggattagcaagcaataaaaacatgacctcactcttcctcaaaggagcccctggtcttccctgtgtgactcagttctttccatctgtttgtcccgctgcaagcctctttctgcgctgactgtgacattggaacgtggccttcctgtcaccccctccgtgccacgcactgaaggccacccccacccacctgggaaactaagaactggatattttgcctcattcacttgtactgtaacaatgtatataatttggttggtatttcactatttaatttttaagaagcctattttactagtgttttatatgaacaaagtactgcagaagttaaacctgtgttgtattttttctgagatgttttgctttaagagatactttttgctcagtttttatatgccagatacagagaatttgtagcggttatttttgtatgatctagtaacttgcaaacagaccaaatggatgagaggcggggaccgtgcagctgtcggctgatgaggaggcggccgccccagtgctgatggagatgccactttcgtgtgactgcgaacattaaagcacaaaaaaaatccaaaaaaaaaaaaaaaaaaaaaaaaaaaaaaaaaaaaaaaaaaaaaaaaaaaaaaaaaaaaaaaaaaaaaaaaaaaaaaaaaaaa

SEQ ID NO: 1925 - protein, 204 aa, Homo sapiens
MGEAEVGGGGAAGDKGPGEAATSPAEETVVWSPEVEVCLFHAMLGHKPVGVNRHFHMICIRDKFSQNIGRQVPSKVIWDHLSTMYDMQALHESEILPFPNPERNFVLPEEIIQEVREGKVMIEEEMKEEMKEDVDPHNGADDVFSSSGSLGKASEKSSKDKEKNSSDLGCKEGADKRKRSRVTDKVLTANSNPSSPSAAKRRRT

SEQ ID NO: 1926 - DNA, 12969 bp, Homo sapiens
agcggagccccgagccgcccgcagagcaagcgcggggaaccaaggagacgctcctggcactgcaggtacgccgacttcagtctcgcgctcccgcccgcctttcctctcttgaacgtggcagggacgccgggggacttcggtgcgagggtcaccgccgggttaactggcgaggcaaggcgggggcagcgcgcacgtggccgtggagcccggcctggtcccgcgcgcgcctgcgggtgccccctggggactcagtggtgtcgcctcgcccgggaccagagattgcgctggatggattcccgcgggcagaggcagggggaaggaggggtgttcgaaacctaatacttgagcttctttgcaaagtttccttggatggttggggacgtacctgtataatggccctggaccagcttccctgttggagtggccagagaagtgtgtaaaacacactagaggggcagggtggaaaaagagactgccttcaaaacttgtatcttttcgatttcattttgaaaaataactacaaatctattttaattttacaaagttagactcatagcattttagatatcaatgtcttcatttaacagaagtgaagatggagcaaacgctcaatcagcgtctgtatttattcgctcctgttgtgccagggtgcgtttttgccgagcggttgcctttctttactcacaaaacccccttgatgtctgtcctccacgttttacgagggagagccggatcttttgaagtttgtatcatctaaagcaggtatattgggatgactatggatagaatttaacctgaaaacactgaagttgacagctgacaaagatataagaatccaaagtatgttaaaaattaaggagctgaggctcacagaagtgaagttacttttccagcatcacacagcagatctaggaccctgtgtgatttgaaaaggccaaggtatctaatgatgctcataatttagtttacattttgtgtcaaatagatgaggtcaagtggacattatgtgtatattccaaagccaaaattactgcttgtaatatccattcatctctccgaagacgtagtgcctcttttatatggctttaacctaatgtataatcgaagtgaattagggcagccagacttttaatcacaggactgatcttttaaaaacgggtatatgtaaagttaattgcttatctatgtgaacagtaatatacactataaaaagttttcaaggcaacttcctgcctgtggtttaatttgatagtcacaatgataggaaattggcagggttaggtggtggtatctacattttgcccatgaggacttgtggctcagagaatttgagttttttctagtaaggtcactaggtccctagtgcacagcctgcttttaggtacggatgtgggatgggggtgtcggcagaccacagggttttgactctcagtttgggctcatttccatgactccttgctgcctccctgatttctgtcaaatgaccaaagcacatttagtaattacttctgctgcaaggactactccttattaggctgtgataagtaagtttcctcacatagtgggtcagctcactctggccacaggacccagcttcctaaccacacacattaagaaagagaaaaattagcactgtctgagacctacaaccacttcaagggagaacagtggtgtttgcacaaatgtctacttttgttttaacctagtcatgtgtaaaaagtgtaattcactggtctttaccaaaaaaaaaaaaaaaaaaacaacaacaaaaaaaaaacaggcatcatagtctgcctgtgctggacgctatgctagacactggagagacaaaggtgagcaggataggcacaaccctacccttacaaacccagaaagttagaggaaaggccatcaggacattgctgtgcaatttgatatcatttcaattttggtaacatagatatttgaactaattagaatgtgctacaaattttgccattctttactttccatatgccaacatggaaaatttgtaaccctcatctttaaatacctcatcttaccagtcctctataaatcaaaaaatctaccccaaaaagccctaggttttaacttttgaaaagtttttttttatcagcttttcaggtcatgactaagatctgccattcaatttaaaggaattctttcattttagagtaatagttactaaaatcctttattcctacctccttgagaatctaatggaaattttatatgctcttcccagaaaatttttgttaatgtgtatcctcacacaccaatttgcattcgatgttagcaggctagagacttccttgaatctcagccatgaccctcttcgggggtccactttcataatcagtattctaaacctagtaggcataaatagcttgaatagaggaaagtggtatgtagactcttgcccttcacttggactgggcacctctatcacttggactgggcaccagctagtgcccttaactagctggtgtctccatttttgatagtcattggctattgcttagctgaagctattgattttaacagccttattgttttgatatcaggctgccactctgcagaagtctaatactggggaaggagcaccggcctgagaaccatggtttgtttctaggaccaactctgcagatttctgtgcctcattttgctcatctctaagatgggtggttgatgggtggcagggactgaaccatttctaaaatcccttacactgatgaaattctgtgattccagtgtaactaccaagctcactttcatatacctcctgagacacagctggtcttagtgaatttatatcctctatgtccaaagtaagtcaaagtaagtaccactataattcactatagaatgtatttttgtctttcactgatcttactggactcaaaactgttacatgtttccttaaattagatagaataaaaaaattgtgaaacactacttttcaaggaaaaatattacaattttaaaagcctctttttatcccacctctcagtagctacaactttcatatacgagtttcacatatatatgaaaaaaattttcttatctcagactcttaaggaaatgcaatgcttttaatatgatcactgctgtgtaattctcatctgccctgaaacacttgttctgtccatcaatcaatgtatttgggtttacaatatgcagagcctcaagcaaaaccagtgcaaaagcacatctatcctcaaataggcacatcatatgtctgagcagttcagcatcctcactcacaagtccaaggctctcagcaatgtggaagaagatgtgattcctaaaattaccacccttacacacagtgacacactcaccagaaagtgaggcttaacatagcttaagtggctgtagtttaaaacagattgtgaatatctgtgctaattctgagaaacaattagcagacatattaaccaattagcacagatcactaatatctgtgctaattgttaggacagattagcacagatattgctaccttgtgtgggtagacagggttaaggcactggcagaaggaaagattagtgaggaatatcaaatagctgatttaatgaaattgtgaggccgatgtttggataaggtgaaacagtgccctacaatgacatttatgccagttctccataaacaagagtgttctacacaaattataagttcctggctgtcttaacaaaatgctatggtcctttatatgctcacacaaataatggttccaagcatgggaaacaggtgccagattgcccaggtaggcatcccagcagcatgctccttagccactgattaaccttgcgcaagttatttcacctgcctgtgcctcaaggcccctgtgtttcaatggggagggtgtgaatactcattcctaaggttgtgaggaggaataactgagttagtatacgtcaaacacttaggtgcttggcacagagggagcctgtgtaagtgtttgctattattttgtttcactagatgatcttgtgtattataagaaatcaatttggaaggtgagatacaaatgcagtctgagaaagtaaagacgttttaaagacattttactgtgtcatgaattttcagagaccacactgacatggtaaaaagttgtttggtttttagaatttttgtttcagaatgcatatccttctccttaaccaaaagaaaaactactaaaatacttctgaaaattatttccaagaaaacattttggtgtaccttttagcagttactttatgacttaaagattaggatgaacaaaataattattttaacttggcttttacctgcttgtagataacctctaatttatataatggttcaattatacagtggtaaatgtatctgggcttgttcttttaaaatagcaagtgtaacatgtgatagatgtagggtacttacaaagtactcaccaagcattgatgactgatgtcattagtatcatggctaacattcactgagccctgattatgaggctggcacccaactaaatgttttgcattgtcacttcatcttcacaaagactttttgaataggttattctttatctccattttcagagaagcaactaagccctaaagaggtttattaacttgccaaataccacacagctagtaacactggtggggtctggaatggaacccaggcaagctgaaaacgacagaacaatgaacactcctacttttcaattcgatttgctaattgttaatatttgccacactggcttatctctctgtatccctacccatctctctctctctctgtctatatctatatgcaaacctggcatctaacttctaaatgcttgagcacggatctcctaagaacaagtacatggttctatgcaatgaaaagacatgattatggcatccaagagtgattttaaaaatcaaggatgaaacttaatttttacccacaagtccagacgatgatttctaccagtattctccagctttactctgtttcttatacttgacagactgagctccaagcctggaatcttctaaaaagggtccactgccaatctggaatgccaacaaatcttattaatatatctccacatttgtaagcttctactaaattctccaagaacctgcatatcagttaagtcctgaaatgctccagtgccaaataaaagcccactgtgcagatagaaatgcttttggtgactctcaaacatttattcaaaggtatttagtgagtatctgtcagctgtatatccagcactgagggaagactcagtctctgccatcacatacacctcagcactaagaagagacacatgaaataattaccatccagtgtgataagtgctctgacagaggatggagtgaggactagtcaccttggggaagacagagaagcagggtcccaccaggagatgagaagccagcctccaggagtgcgctatctgagagggcaagagaaggaaggcaaagaggacgggtccatacttgaacaacttgaagtaggtgtatctagtgcctaagagtgtgtatggtgacatcttgtggagcagtgaacatgaccctcatttggtttgttaaagcattgggtcaaatgccacgggaatgtaacaggtaaatggtctttgccttataacacagggtatcccatccgtgtaagacaatgaatttttaaaaaggcaaaaccaaaccttttgtttacatcatttgccttaaatagttcttagtacacaaattcttccttgcttggggccattatggtgtgtggaagtagaaaaagataaactgtagcttacagaaatagaaaagcaattttttcctatgatagaggcaaacggatacaaaaaacaaacaggtaacacataataagttccaaatgaggcattttgttgaaattcagtgttgagcataaacagtgaactcaaatgcacagaggaggcgtcatggaagggtgacaaaacactccagagcaataacagctaccctattttctgttccctgggagtagggagaaaagacatcaaaatcaaattataaatttaaaaaagtattaaaattctcttatggaaatatattaagaagtttgttaggcaaatggaaaacgttttgtggaaacaagaaataagaaagaatggccatcacttaaagcaacagaatgtatctctcccactagctctcccctccctacccacagctttattcacatttgttctataacatttcagcacagttcagaccttccgctgagccagtgtgaggtcagggtgttgaggaagcgagtccctgcagtcagactccagctggctgtcgtcctgcttctgcttattccacagaatgagtctggtgggggagaggaaattcctaacctgtttttttttacacatcttcatcagaaaagcgaaagcactaattactgtccataataaaactactgggaaggttacttagcttgtaagtaagttccacaaagccatttcagtaaaaacttcctggttctaaaattgggaaaagcaggataatcctctaaggctgacattctttctcttttgtgcatttacaactaaacggtcactgatacacatttccacagtgaccctgcaatatccacattggctttcttctaagacacttcaaaaatacatcacacctttatgtgttaaatatcactattggcatatatctttaaaaacatttattttcttaattctcaaaatacagaaaagaatgttatgctattgtgtgcacaaactgctattttcaataaggagctcttaatttagaaagttgctatttttcaataaagagctctcaattagaaaatatcaagaagtgatgttaagtttttatggaaataaataaagtatcatgacatgaaaagtttataatttttcccccagcaatggcttactcagggaatttttcttatatgtaaagttaatgatctgaaaagtggtaatcttatcattcaccaagatttcaggatataagttattcctacagaacaatccatttttacctttaaagatgagtttgtgtacttcagaagatgtgacgccagttggccaccatctcaatcagtagtaagtcacaccatcaatcccttgttaatgatggaactcatgtgaagtcaagaggaaacataatactctttacctcattccctggtagcagagaagttgactcatctttaatgtcagttattgagatgtaacacagaatcatattctacagaaaatatgtgataaactttacacaaatgaatacactttagaaaggcagtcatttggattttctttttgtcagagaacattgcaagtcttcctgaagaatttctgagaaattaaacactttatatgacattttacagcatgtagagaggttgaaactcagagaactaaaactcagatgatagtctaaatacttaatttgttgctgctttatgctggacatgaaaagtgtgagcttaaattataaataaaaaactattgagctatcaaactatttggggtacatccttatctttcctctaaattactctttattcccattaaaatccacctatcccgggtcctctctcctcagcccttcacctctgctttcaaagatgactaactaacctaataaacacatctaaggtgatgtgtcaacttcaaccccaaccctttttccccagataacttgtctgcatttcaagaacaacctaccagagaccttacctgtcaccttggctctcccacccaatggagatggctctaatggtaaggaattctatcttaagtaaaagggaagggaaacacgctgacagatgcagtttttataaaggcaggtcattggggcaccaagttggcagccgctttcaacttttgattctacctcaaaaggtaaccaagaaatcgttgttattctaaagattatgacaagtccaaagtttcacagaatcctgatttttatacacttgcattaatcactgcttacttccatgatgtaaaccaaaactgcagcggcagaatatagagaatcagaataaattctgatagaaaaggcagatactgtttccacatatacaagtatatgctaattgcttttagcaaactgatccaaataggaatcaacattattccatcttaatgattatgtttttgattggtacacataaatgttaaagtgggaaaatatgcagagaaagttacctaaactaaatcactttaattttcaacaacataattacattccatttcacctactaaaatggctttggacctagaatttgtattgctacatcaatataagatgactttcagtaaaaatagatgtacagttgatttgtaacaacaaattaatagttttaaattatttgtatatttcaaggtaaataaaattagagctatcccacaatcgctttggttatgaaattcgaccactgtaactttttttaaagaaaactttatggtgtgcagttcctttggtatgcaaatattaaatggttggtgctgagaataagcagcaatatagaaatatatataattgtagaagaatataacctatgatttagacataaaatgagatccttacaagataaagagttatggagatggatgataatgatagttgtagaacattatgactaagtgtttaatatagcggacctgtacacttaaaaatggtgaagatgttaaacttacattatgtttacattacatatttcaccacaataaaaaatttttgaaggaaaaccagaactttaatgacaaacttaggacatattatgctctgaatatatagttttgataacgtctttcctggcaaatcaacaaggtaagaataaaaggatattctgaaatctttttttttctttggagacagagtcttgctctgttgcccaggctggagtgcagtggcacaatctcggctcactactaccttctgcctcccaggttcaagtgatcctcctgcctcagcctcctgagtagctgggattataggcgtgcgccaccacgcctagctaatttttttgtatttttagtagagacggggttttaccatgttggtcacgctggtctcaaactcctgacctcatgatccgcccacctcggcctcccaaaatgctaggattacaggcatgagacaccacacccagccagatattcttaaatcttatgctcacactccaccccccccaaaaaaattgtccttcaggaaagcataatttaaggaaaaatttcccaaagtgccaccttcagcttcattcttagcaccagaggaagaattgcctgtcatataatgaaagatccttggtgttatcattaatctagtatacatagtgcttcctcttggtagatttttacctactgtgagaaggaatgattttgatactcagacagtgtgtagtaatttgttaagaacatttaacttggaacctatgctacacagtaaaacttatactgacaatggatatttcatgtggtaggcctaagaagtattgtggagtgaggggactggaagtatatctgcagaactacctagtcaaagaccccagtctaatttctaatatataattcatataaattactcttgcattgctatacattaaacattatgcttgtcacattcttacttggttagcactgtcactactgattgtcaggcctataattgtgtataattcttcccctgccactttaccagctggtggccacaccgattccagaaagaactactttatttcttattacctcatgaaagcaccctctgcccagtgccttggctaatagactggcctttgttgtctatgaccactaattcccactcaggcatatagcaattctgttgttggttgcttagcccagtcaaaaacactggaagtggacatagactccacactgatgaatgaatgaccttctagtcattctaatgtccttaaaagtctactatttttaaattgtagaatatatatatatatatatatatttttttttttttctgggatatttctcctttcttctgttcattaatgtttttcatctatcattgtgttttaaatatgacctaaggttctatagtatatttagacaaacttctcatttctctgcagtgttcggaattcatcatgcctgtatgacaaggttgtgtttgagaacaaaaggggacctgtgtgacatgttttatttcaatatacatttagagtttgaacaaataaaaaaagctattagaatttttaatatatataacacattatcaaaaacactgtcacttttctgagtgctctaatcaggcaattcgtatgtatatttaaaaagagggaaaaagctaattagtatactaaatatatttattttaatacctgtgctcatatgttatctttaaagaacaggaataaaatttatgggtagaatagtatgccagcaatttaccttcaatacaaattaaacacatcttttaagaaaagggcgagttatattggctggggtggcactaacactacattattaatatgtatttattgagcatttactgtgtccaggaccctgtaagggggaaaaaaagtccttgtttttacaatctttattgactgaaattctgtaaaatgaattgaattcctgaagtgacatcatttaacccaaattttttcatcatcaactaattcatctcagaaaacagtaaagtttaaaaaaaaatactatcagtaagaataatatatttccttggtttggaaatttccaaaccacgatattctgccctgtcaaaatatattcactggggaattttttacttcatacgtttcttttgaacttagtcacatttttatatctagctggtttcattattaaataaaagaaaaggtgattcccctcttgtactgcaggagaccacatacttgaatgatactctaacttctaggttctgttatagtaacactgaaatcagaaacctgtgggagaaatgtcactttatctgagagagtaaaatcagactctaaaaggaagtagcaaattcatcttgttcttttttttaatcaaccctctgcctaagacaagtagtttgaaacacagaggactctttaagtcatacttcctttatgtagtcaaaaccaaagccactgggtagtgctttccccaaaggaatctctaaatagtagacggggacattttcagatagattcgtttgtaggcaaacctccattgcttgtatcacatttcctgaaagaataaaggtaaaacttcaactatgtattacagaaagaaaaattcagcctgaaccctacccttataaaacaggttaattgggttttaattttcataaatcataaaggactattttgaacatttgggcctttaattgtctagctcctagatgaagtacaaatcagaaaaaaaaaaaactgtactgtgtcagaatgcaagctttcctctttgcattttggcatttgaaaactccgaagagcggtttttgttttttatttaaagaagatgatacatatgtgtacccgattcaaaactagagaatagaatttaaaacataattttcaaagtcttcaaatatgcctaaaggtaacaatgtcatcttttaattgccaatttctctaccactttcaaaaaattacttccaaggatttaatgagctccttcctttcaacagaaaatggactattttcctttcagatttactatatgctgtcactccagctttataaccgcatgtgcatacacaaacatttctttctctcttgcaggtggcacaaaccaggaaggggaaatctgtggtttaaattctttatgcctcatcctctgagtgctgaaggcttgctgtaggctgtatgctgttaatgctaatcgtgataggggtttttgcctccaactgactcctacatattagcattaacagtgtatgatgcctgttactagcattcacatggaacaaattgctgccgtgggaggatgacaaagaagcatgagtcaccctgctggataaacttagacttcaggctttatcatttttcaatctgttaatcataatctggtcactgggatgttcaaccttaaactaagttttgaaagtaaggttatttaaaagatttatcagtagtatcctaaatgcaaacattttcatttaaatgtcaagcccatgtttgtttttatcattaacagaaaatatattcatgtcattcttaattgcaggttttggcttgttcattataatgttcataaacacctttgattcaactgttagaaatgtgggctaaacacaaatttctataatatttttgtagttaaaaattagaaggactactaacctccagttatatcatggattgtctggcaacgttttttaaaagatttagaaactggtactttcccccaggtaacgattttctgttcaggcaacttcagtttaaaattaatacttttatttgactcttaaagggaaactgaaaggctatgaagctgaatttttttaatgaaatatttttaacagttagcagggtaaataacatctgacagctaatgagatattttttccatacaagataaaaagatttaatcaaaaaatttcatatttgaaatgaagtcccaaatctaggttcaagttcaatagcttagccacataatacggttgtgcgagcagagaatctacctttccacttctaagcctgtttcttcctccatatggggataatactttacaaggttgttgtgaggcttagatgagatagagaattattccataagataatcaagtgctacattaatgttatagttagattaatccaagaactagtcaccctactttattagagaagagaaaagctaatgatttgatttgcagaatatttaaggtttggatttctatgcagtttttctaaataaccatcacttacaaatatgtaaccaaacgtaattgttagtatatttaatgtaaacttgttttaacaactcttctcaacattttgtccaggttattcactgtaaccaaataaatctcatgagtctttagttgattt

SEQ ID NO: 1927 - DNA, 1082 bp, Homo sapiens
ttctcaccgctgctatggaggcgctggccatgggttcccgggcgctgcggctctggctggtcgcacccggtggcgggatcaaatggagatttatagcaacatcgccagcttctcagctgtcaccgacagaattgacagaaatgcggaatgatctctttaataaagagaaagccaggcagttatcattaactccccgaactgagaagatagaagttaagcatgttgggaaaactgaccccggtactgtcttcgtgatgaataaaaacatttcaactccctacagttgtgccatgcatttaagcgagtggtattgcaggaagtccattctggctctggtggatggacagccttgggacatgtataagcctttaacaaagtcctgtgaaattaaatttcttactttcaaagattgtgatccaggagaagtgaataaggcatattggcgttcctgtgctatgatgatgggctgtgtgatagagagggcattcaaagatgaatatatggtcaatttggtcagagctccagaagttcctgtaatttctggtgccttctgttatgacgtagttttggatagcaaacttgatgagtggatgccaacaaaagagaacttacgttccttcacaaaagatgctcatgctttaatttataaagatcttccatttgaaactctggaagttgaagcaaaagtggcattggaaatatttcaacacagcaagtacaaagtagatttcatagaagagaaggcatctcagaaccctgagagaatagtcaagctacacagaataggtgacttcattgatgtgagtgagggccctcttattccaagaacaagtatttgtttccagtatgaagtatcagcagttcacaatcttcaacccacccagccaagtctcatacgaagattccagggcgtgtctttacctgttcacttaagagcacattttacaatatgggataagctattggaaagatctcggaaaatggtaactgaagatcaaagtaaagcaacagaggaatgtacatctacctaataactttctaaaatttaaatatgtataataaaataaatgttttaaatataa

SEQ ID NO: 1928 - protein, 338 aa, Homo sapiens
MEALAMGSRALRLWLVAPGGGIKWRFIATSPASQLSPTELTEMRNDLFNKEKARQLSLTPRTEKIEVKHVGKTDPGTVFVMNKNISTPYSCAMHLSEWYCRKSILALVDGQPWDMYKPLTKSCEIKFLTFKDCDPGEVNKAYWRSCAMMMGCVIERAFKDEYMVNLVRAPEVPVISGAFCYDVVLDSKLDEWMPTKENLRSFTKDAHALIYKDLPFETLEVEAKVALEIFQHSKYKVDFIEEKASQNPERIVKLHRIGDFIDVSEGPLIPRTSICFQYEVSAVHNLQPTQPSLIRRFQGVSLPVHLRAHFTIWDKLLERSRKMVTEDQSKATEECTST

SEQ ID NO: 1929 - DNA, 1171 bp, Homo sapiens
ttctcaccgctgctatggaggcgctggccatgggttcccgggcgctgcggctctggctggtcgcacccggtggcgggatcaaatggagatttatagcaacatcgccagcttctcagctgtcaccgacagaattgacagaaatgcggaatgatctctttaataaagagaaagccaggcagttatcattaactccccgaactgagaagatagaagttaagcatgttgggaaaactgaccccggtactgtcttcgtgatgaataaaaacatttcaactccctacagttgtgccatgcatttaagcgagtggtattgcaggaagtccattctggctctggtggatggacagccttgggacatgtataagcctttaacaaagtcctgtgaaattaaatttcttactttcaaagattgtgatccaggagaagtgaataaggcatattggcgttcctgtgctatgatgatgggctgtgtgatagagagggcattcaaagatgaatatatggtcaatttggtcagagctccagaagttcctgtaatttctggtgccttctgttatgacgtagttttggatagcaaacttgatgagtggatgccaacaaaagagaacttacgttccttcacaaaagatgctcatgctttaatttataaagatcttccatttgaaactctggaagttgaagcaaaagtggcattggaaatatttcaacacagcaagtacaaagtagatttcatagaagagaaggcatctcagaaccctgagagaatagtcaagctacacagaataggtgacttcattgatgtgagtgagggccctcttattccaagaacaagtatttgtttccagtatgaagtatcagcagttcacaatcttcaacccacccagccaagtctcatacgaagattccagggcgtgtctttacctgttcacttaagagcacattttacaatatgggataagctattggaaagatctcggaaaatgactccatttcccattctccttctatttactacgcagtcattcttcactacctcgcctgagtcgtacctcctccatggaacagtctcagagtaactgaagatcaaagtaaagcaacagaggaatgtacatctacctaataactttctaaaatttaaatatgtataataaaataaatgttttaaatataa

SEQ ID NO: 1930 - protein, 353 aa, Homo sapiens
MEALAMGSRALRLWLVAPGGGIKWRFIATSPASQLSPTELTEMRNDLFNKEKARQLSLTPRTEKIEVKHVGKTDPGTVFVMNKNISTPYSCAMHLSEWYCRKSILALVDGQPWDMYKPLTKSCEIKFLTFKDCDPGEVNKAYWRSCAMMMGCVIERAFKDEYMVNLVRAPEVPVISGAFCYDVVLDSKLDEWMPTKENLRSFTKDAHALIYKDLPFETLEVEAKVALEIFQHSKYKVDFIEEKASQNPERIVKLHRIGDFIDVSEGPLIPRTSICFQYEVSAVHNLQPTQPSLIRRFQGVSLPVHLRAHFTIWDKLLERSRKMTPFPILLLFTTQSFFTTSPESYLLHGTVSE

SEQ ID NO: 1931 - DNA, 1721 bp, Homo sapiens
acgaggggaagaaaggagttggggcaaaacaggaggcgtttccctacccgcatacatccccgtccccgagacacccaatccccccacccccagcctgcccgcgcctcccgcccccagctcctcgccctggggacagctggcagccccgcgcggaccagacacaaagccgatcaatcccggaggcgtgggggcggagggacgacccgccggggctttcccgggcgctgctctcctcctgctgccccctcgctaggacccggcggacgcctcgtctggttttcacgccctctagcccctacccccacacccccaaaacagaacagacccccatccctgggctggaggacccgcctcttggcagccagctgagaaggcgccccggggagggggaaactgacatcccatctagagccgtccctcctcttcctcccctcccgactctctgctcctttcccgccccagaagttcaagggcccccggcctcctgcgctcctgccgccgggaccctcgacctcctcagagcagccggctgccgccccgggaagatggcgaggaggagccgccaccgcctcctcctgctgctgctgcgctacctggtggtcgccctgggctatcataaggcctatgggttttctgccccaaaagaccaacaagtagtcacagcagtagagtaccaagaggctattttagcctgcaaaaccccaaagaagactgtttcctccagattagagtggaagaaactgggtcggagtgtctcctttgtctactatcaacagactcttcaaggtgattttaaaaatcgagctgagatgatagatttcaatatccggatcaaaaatgtgacaagaagtgatgcggggaaatatcgttgtgaagttagtgccccatctgagcaaggccaaaacctggaagaggatacagtcactctggaagtattagtggctccagcagttccatcatgtgaagtaccctcttctgctctgagtggaactgtggtagagctacgatgtcaagacaaagaagggaatccagctcctgaatacacatggtttaaggatggcatccgtttgctagaaaatcccagacttggctcccaaagcaccaacagctcatacacaatgaatacaaaaactggaactctgcaatttaatactgtttccaaactggacactggagaatattcctgtgaagcccgcaattctgttggatatcgcaggtgtcctgggaaacgaatgcaagtagatgatctcaacataagtggcatcatagcagccgtagtagttgtggccttagtgatttccgtttgtggccttggtgtatgctatgctcagaggaaaggctacttttcaaaagaaacctccttccagaagagtaattcttcatctaaagccacgacaatgagtgaaaatgatttcaagcacacaaaatcctttataatttaaagactccactttagagatacaccaaagccaccgttgttacacaagttattaaactattataaaactctgctttgtccgacatttgcaaagaggtacacgaggaaatggaattggtatttcattttaattttcatgactactaactcacctgaacttgctattttaaacaaatagttctgtcgacacctaaaatataatctggcttcttgtgtctggactaagttaaaagaattaaaatactttgtaatgtcaaaaaaaaaaaaaaaaaaaaaaaaaaaa

SEQ ID NO: 1932 - protein, 298 aa, Homo sapiens
MARRSRHRLLLLLLRYLVVALGYHKAYGFSAPKDQQVVTAVEYQEAILACKTPKKTVSSRLEWKKLGRSVSFVYYQQTLQGDFKNRAEMIDFNIRIKNVTRSDAGKYRCEVSAPSEQGQNLEEDTVTLEVLVAPAVPSCEVPSSALSGTVVELRCQDKEGNPAPEYTWFKDGIRLLENPRLGSQSTNSSYTMNTKTGTLQFNTVSKLDTGEYSCEARNSVGYRRCPGKRMQVDDLNISGIIAAVVVVALVISVCGLGVCYAQRKGYFSKETSFQKSNSSSKATTMSENDFKHTKSFII

SEQ ID NO: 1933 - DNA, 841 bp, Homo sapiens
tgtgggggaaaaggccccggaacgaggccggcccgcgagggcccgcgctcccctcctccccggcggccgcactcacccactccggaatcggccctgtcgcccccgcccgcactccagagccggctgagaacggcagcggcgagggctccacgtgcagcgtctctccgggtaagacctgcagctcccgcgactagaagtgtgaggtcccagggcccttcccgcggaatcggcgctgagaagccccaacccccctcccgcctcccaggcaccttcgggtccaggactacaactcccggcagggtgcgcaaaacgaccgcccaaggcaacggaggctcacgagaatcagcatgattcttcagaggctcttcaggttctcctctgtcattcggtcagccgtctcagtccatttgcggaggaacattggtgttacagcagtggcatttaataaggaacttgatcctatacagaaactctttgtggacaagattagagaatacaaatctaagcgacagacatctggaggacctgttgatgctagttcagagtatcagcaagagctggagagggagctttttaagctcaagcaaatgtttggtaatgcagacatgaatacatttcccaccttcaaatttgaagatcccaaatttgaagtcatcgaaaaaccccaggcctgaagaaataaagtaaaattaatctggtaatttgtcacggattagttgtacaactagttagaagtttcagaataaacatgcatttcataactgtcaaatgttcttttaattctgagtccaaataaattatttggtgatgttgagtgtgttcttgatgaattgaaaaaaaa

SEQ ID NO: 1934 - protein, 108 aa, Homo sapiens
MILQRLFRFSSVIRSAVSVHLRRNIGVTAVAFNKELDPIQKLFVDKIREYKSKRQTSGGPVDASSEYQQELERELFKLKQMFGNADMNTFPTFKFEDPKFEVIEKPQA

SEQ ID NO: 1935 - DNA, 669 bp, Homo sapiens
tgtgggggaaaaggccccggaacgaggccggcccgcgagggcccgcgctcccctcctccccggcggccgcactcacccactccggaatcggccctgtcgcccccgcccgcactccagagccggctgagaacggcagcggcgagggctccacgtgcagcgtctctccggaatcagcatgattcttcagaggctcttcaggttctcctctgtcattcggtcagccgtctcagtccatttgcggaggaacattggtgttacagcagtggcatttaataaggaacttgatcctatacagaaactctttgtggacaagattagagaatacaaatctaagcgacagacatctggaggacctgttgatgctagttcagagtatcagcaagagctggagagggagctttttaagctcaagcaaatgtttggtaatgcagacatgaatacatttcccaccttcaaatttgaagatcccaaatttgaagtcatcgaaaaaccccaggcctgaagaaataaagtaaaattaatctggtaatttgtcacggattagttgtacaactagttagaagtttcagaataaacatgcatttcataactgtcaaatgttcttttaattctgagtccaaataaattatttggtgatgttgagtgtgttcttgatgaattgaaaaaaaa

SEQ ID NO: 1936 - protein, 108 aa, Homo sapiens; identical to SEQ ID NO: 1934

SEQ ID NO: 1937 - DNA, 1217 bp, Homo sapiens
tgtgggggaaaaggccccggaacgaggccggcccgcgagggcccgcgctcccctcctccccggcggccgcactcacccactccggaatcggccctgtcgcccccgcccgcactccagagccggctgagaacggcagcggcgagggctccacgtgcagcgtctctccgggtaagacctgcagctcccgcgactagaagtgtgaggtcccagggcccttcccgcggaatcggcgctgagaagccccaacccccctcccgcctcccaggcaccttcgggtccaggactacaactcccggcagggtgcgcaaaacgaccgcccaaggcaacggaggctcacgaggtacaaggaagcacaacgccccaatccgctttgttttacacagtctcactttccctgcacctttatacacttcgataaccctaacgaacaggacgctgactcggaggggagcttgaactaggggaaaggccactcaaagagcgcatgcgtacagagcaaggtttcaaggaggggaaaaagaacgggtcaaattaggcgaagaaaagatggcggaggctgtgccaggggacccggaagcacttaccctccacttcctcctcctgtttggcttctgtctcacctagacccgtccggtcgcagactgtctccgagacgcttcctgtccggtgagcgtcgaccgactgaaacggcggcccataatgcattgcgatggcggaatcagcatgattcttcagaggctcttcaggttctcctctgtcattcggtcagccgtctcagtccatttgcggaggaacattggtgttacagcagtggcatttaataaggaacttgatcctatacagaaactctttgtggacaagattagagaatacaaatctaagcgacagacatctggaggacctgttgatgctagttcagagtatcagcaagagctggagagggagctttttaagctcaagcaaatgtttggtaatgcagacatgaatacatttcccaccttcaaatttgaagatcccaaatttgaagtcatcgaaaaaccccaggcctgaagaaataaagtaaaattaatctggtaatttgtcacggattagttgtacaactagttagaagtttcagaataaacatgcatttcataactgtcaaatgttcttttaattctgagtccaaataaattatttggtgatgttgagtgtgttcttgatgaattgaaaaaaaa

SEQ ID NO: 1938 - protein, 116 aa, Homo sapiens
MHCDGGISMILQRLFRFSSVIRSAVSVHLRRNIGVTAVAFNKELDPIQKLFVDKIREYKSKRQTSGGPVDASSEYQQELERELFKLKQMFGNADMNTFPTFKFEDPKFEVIEKPQA

SEQ ID NO: 1939 - DNA, 1303 bp, Homo sapiens
tgtgggggaaaaggccccggaacgaggccggcccgcgagggcccgcgctcccctcctccccggcggccgcactcacccactccggaatcggccctgtcgcccccgcccgcactccagagccggctgagaacggcagcggcgagggctccacgtgcagcgtctctccgggtaagacctgcagctcccgcgactagaagtgtgaggtcccagggcccttcccgcggaatcggcgctgagaagccccaacccccctcccgcctcccaggcaccttcgggtccaggactacaactcccggcagggtgcgcaaaacgaccgcccaaggcaacggaggctcacgaggtacaaggaagcacaacgccccaatccgctttgttttacacagtctcactttccctgcacctttatacacttcgataaccctaacgaacaggacgctgactcggaggggagcttgaactaggggaaaggccactcaaagagcgcatgcgtacagagcaaggtttcaaggaggggaaaaagaacgggtcaaattaggcgaagaaaagatggcggaggctgtgccaggggacccggaagcacttaccctccacttcctcctcctgtttggcttctgtctcacctagacccgtccggtcgcagactgtctccgagacgcttcctgtccggtgagcgtcgaccgactgaaacggcggcccataatgcattgcgatggcgggtaggcgtgtgggggcggagccagggccggaagtagagcggaggtggtggcggcggaggctttggcagctcgggactgagtgcaagaatcagcatgattcttcagaggctcttcaggttctcctctgtcattcggtcagccgtctcagtccatttgcggaggaacattggtgttacagcagtggcatttaataaggaacttgatcctatacagaaactctttgtggacaagattagagaatacaaatctaagcgacagacatctggaggacctgttgatgctagttcagagtatcagcaagagctggagagggagctttttaagctcaagcaaatgtttggtaatgcagacatgaatacatttcccaccttcaaatttgaagatcccaaatttgaagtcatcgaaaaaccccaggcctgaagaaataaagtaaaattaatctggtaatttgtcacggattagttgtacaactagttagaagtttcagaataaacatgcatttcataactgtcaaatgttcttttaattctgagtccaaataaattatttggtgatgttgagtgtgttcttgatgaattgaaaaaaaa

SEQ ID NO: 1940 - protein, 108 aa, Homo sapiens; identical to SEQ ID NO: 1934

SEQ ID NO: 1941 - DNA, 1167 bp, Homo sapiens
tgtgggggaaaaggccccggaacgaggccggcccgcgagggcccgcgctcccctcctccccggcggccgcactcacccactccggaatcggccctgtcgcccccgcccgcactccagagccggctgagaacggcagcggcgagggctccacgtgcagcgtctctccgggtaagacctgcagctcccgcgactagaagtgtgaggtcccagggcccttcccgcggaatcggcgctgagaagccccaacccccctcccgcctcccaggcaccttcgggtccaggactacaactcccggcagggtgcgcaaaacgaccgcccaaggcaacggaggctcacgaggtacaaggaagcacaacgccccaatccgctttgttttacacagtctcactttccctgcacctttatacacttcgataaccctaacgaacaggacgctgactcggaggggagcttgaactaggggaaaggccactcaaagagcgcatgcgtacagagcaaggtttcaaggaggggaaaaagaacgggtcaaattaggcgaagaaaagatggcggaggctgtgccaggggacccggaagcacttaccctccacttcctcctcctgtttggcttctgtctcacctagacccgtccggtcgcagactgtctccgagacgcttcctgtccgaatcagcatgattcttcagaggctcttcaggttctcctctgtcattcggtcagccgtctcagtccatttgcggaggaacattggtgttacagcagtggcatttaataaggaacttgatcctatacagaaactctttgtggacaagattagagaatacaaatctaagcgacagacatctggaggacctgttgatgctagttcagagtatcagcaagagctggagagggagctttttaagctcaagcaaatgtttggtaatgcagacatgaatacatttcccaccttcaaatttgaagatcccaaatttgaagtcatcgaaaaaccccaggcctgaagaaataaagtaaaattaatctggtaatttgtcacggattagttgtacaactagttagaagtttcagaataaacatgcatttcataactgtcaaatgttcttttaattctgagtccaaataaattatttggtgatgttgagtgtgttcttgatgaattgaaaaaaaa

SEQ ID NO: 1942 - protein, 108 aa, Homo sapiens; identical to SEQ ID NO: 1934

SEQ ID NO: 1943 - DNA, 5182 bp, Homo sapiens
cgaccggacgggtctaggtgagacagaagccaaacaggaggaggaagtggagggtaagtgcttccgggtcccctggcacagcctccgccatcttttcttcgcctaatttgacccgttctttttcccctccttgaaaccttgctctgtacgcatgcgctctttgagtggcctttcccctagttcaagctcccctccgagtcagcgtcctgttcgttagggttatcgaagtgtataaaggtgcagggaaagtgagactgtgtaaaacaaagcggattggggcgttgtgcttccttgtacctcgtgagcctccgttgccttgggcggtcgttttgcgcaccctgccgggagttgtagtcctggacccgaaggtgcctgggaggcgggaggggggttggggcttctcagcgccgattccgcgggaagggccctgggacctcacacttctagtcgcgggagctgcaggtcttacccggagagacgctgcacgtggagccctcgccgctgccgttctcagccggctctggagtgcgggcgggggcgacagggccgattccggagtgggactgatcctttgaaatactccagccatgactaaaagagaagcagaggagctgatagaaattgagattgatggaacagagaaagcagagtgcacagaagaaagcattgtagaacaaacctacgcgccagctgaatgtgtaagccaggccatagacatcaatgaaccaataggcaatttaaagaaactgctagaaccaagactacagtgttctttggatgctcatgaaatttgtctgcaagatatccagctggatccagaacgaagtttatttgaccaaggagtaaaaacagatggaactgtacagcttagtgtacaggtaatttcttaccaaggaattgaaccaaagttaaacatccttgaaattgttaaacctgcggacactgttgaggttgttattgatccagatgcccaccatgctgaatcagaagcacatcttgttgaagaagctcaagtgataactcttgatggcacaaaacacatcacaaccatttcagatgaaacttcagaacaagtgacaagatgggctgctgcactggaaggctataggaaagaacaagaacgccttgggataccctatgatcccatacagtggtccacagaccaagtcctgcattgggtggtttgggtaatgaaggaattcagcatgaccgatatagacctcaccacactcaacatttcggggagagaattatgtagtctcaaccaagaagatttttttcagcgggttcctcggggagaaattctctggagtcatctggaacttctccgaaaatatgtattggcaagtcaagaacaacagatgaatgaaatagttacaattgatcaacctgtgcaaattattccagcatcagtgcaatctgctacacctactaccattaaagttataaatagtagtgcgaaagcagccaaagtacaaagagcgccgaggatttcaggagaagatagaagctcacctgggaacagaacaggaaacaatggccaaatccaactatggcagtttttgctagaacttcttactgataaggacgctcgagactgcatttcttgggttggtgatgaaggtgaatttaagctaaatcagcctgaactggttgcacagaaatggggacagcgtaaaaataagcctacgatgaactatgagaaactcagtcgtgcattaagatattattacgatggggacatgatttgtaaagttcaaggcaagagatttgtgtacaagtttgtctgtgacttgaagactcttattggatacagtgcagcggagttgaaccgtttggtcacagaatgtgaacagaagaaacttgcaaagatgcagctccatggaattgcccagccagtcacagcagtagctctggctactgcttctctgcaaacggaaaaggataattgagccccaggacattctgagactccaaagtctttcttaaaatgtttagagcaagtatagctcttacctttattactgaatttgaatcttcttttatttctaggctgtacagtctgatgcatgatttttttataaatatttcatactcttgtgaatttggatctttttactttgagcatatattttagaatatgtgtatgttaaaggatctccacaatgtctgcagtgtgaaggcaggttcattgtggaatagtttaacagtcaggaaggctaaactggtcagtattaatgtgtagccctaccaaaaatagccagtagtatctgaaaatgaaaaataaatgaagtatctctaggaaacagtctggcttaactatttttgaaaatataactgtttcccctctctgctgctttagatgttgctttacatagaaccagaaaatggaatttctcagctaaagcatgtgtgcctgtttcatctaatcaagcagagctaaaatgttcataccgaataaatttatattaataaattactaaactaagagtatcaggttatttatatatttgcaagcaaaggacagtaagaagttgactggcaaaagagcagtgctgaaggaggagatccaggtttaaatctggcttattaactcaagccaattttaaggattttctgtatagattactcatgtcagaccaagaatttaaattattttgagagaggcatttaattctaataaaccagctgttataaaaattataaaatgatctctgtttttcctgtcagagatttaaaaaactgaaaaggtatacctcaacccaaaaataaaggtttgttttggtttgttatggcttccttttttaaaaaattaccctgtagtgccagtttattatgcaaagcagcttatattcctttgtttctgataaaatgaagactttaaatcagtcagtagtactttacctttcaaggcattagtaaattacttgcaaatagttttaaaaggaaaatacgacctttgttataggcagtcttctctttaagacaatacttttccacttgttttccttttccatattatatatgtgtattcatatagctgtatacatattcagttgatcattttataaacatatgaaggcataaagatatacagaagaaaaattattaaacaactcattttaagattcaaattaactaattcctgcatatatgacattccttacataagcgaacactaaacaaaaatggctagaaatgtctttttctttcttttctctctttgttgtttaaggtattaagcacgaattattacatgagactggcagatagctattaatcctcttacagatttgagaaagttgattctcaaatatttatgcaccttctccttcattgttttctttaaatctgtcctcttaaaaagcttcttaagagctcagttaatgcttttgacttaactaggagaaaaaggcatgataatacaggcaagatggcattgttagcaattctggtagtggtttggaatgaatcctaagaggcagggatcttaaggacaaggaagagaagagagagagggagggatctttgatctctttctctggtaatcttaatgcataattttactaaaacatgttctcaattcattcatattattaagctcttcctgcagttgatatctgagcagagtaagatttgtatttccatttttacttttttgaaagagaatatatggacagattattagtacaatttgggcactgtggttttaagaatatctgagtaaaataacaatatgaaataataaacagaagctctaacgtcaggtaacaaatagacagcaagaaaggttttgcaccatcctcttacggcctagagagttgacaagttgcttgtagttttaaaaaaataataaagtatacccttctggtatatcatcaagagcttaagaatcttggctttcatatttaaaatgcttttggggagacatatattaaaattttagccaagatgatagacatgtctcaattatatatgtgtgtgtatgtttttaaagctaaaaacattacttttagatccctagaatgaaaatttttttctcatctatgcaattcccatatggtttttttttaaatcatattttattcattttctccctttagcaattttcattttatttctcataatttgaacagagacagttctcatacatgatcagatgctttttttttcttcttaccatcatttatgcatgacataggtaatgtgactaatttctccagttgattcaagaaactcattactttgcctcaaattatatgtaaaatatttgttttacttaggttacagttatcagaaaggtagtttttttcttctattaaaatataacattgtgaaagaaaataaaatttatgctattctttgctttgtttttataaatgaatttttcatagaatttacagtatattcaaaggaagaaagataaaattattggtcatcatttgtaccttagaagtacaagaatttaagtaaaagaaatgttcatttttgttttaaaatttgttttccatgtgaagtttttattgagccaactttcatacatatcttgctagcctaaagtctaaatatttgtgttggcatcagaaaaacaaatgaggcagaattgctatgtgtggttgatcttcagataaattgactgatcacagttatttttgtatcagtctatgttattaggaaaaattgtttagttgttttctcccctgattaatggtgatattcaagtatgatacaaaaagaattgtaccaccaaatatttttgtgaggtctgctgttttccatattcattttatgctactgcctttaagaaagaactagtgtatccttgaaatagcacaaaaatgttttaaaattcataattgcaaaacaaatctgtgactaacttaatgtcttcagatctaaagggtgtaaaaatattgatacttcaatatttcacttgctgccaggaaaaacaaaattctcaatcttttgtaaatgggaggaggacttttgcatacatttttactctttaaataacgacaacgacacttatactgtcataataacaattatgtatttctttgtggttttaattttttttgtaattttacataaaacagttattttctatttttacgcagataaatatttgtgcataaaatgtaaaaatagtaaaatgagaaaaataaaactattatacagtaaa

SEQ ID NO: 1944 - protein, 454 aa, Homo sapiens
MTKREAEELIEIEIDGTEKAECTEESIVEQTYAPAECVSQAIDINEPIGNLKKLLEPRLQCSLDAHEICLQDIQLDPERSLFDQGVKTDGTVQLSVQVISYQGIEPKLNILEIVKPADTVEVVIDPDAHHAESEAHLVEEAQVITLDGTKHITTISDETSEQVTRWAAALEGYRKEQERLGIPYDPIQWSTDQVLHWVVWVMKEFSMTDIDLTTLNISGRELCSLNQEDFFQRVPRGEILWSHLELLRKYVLASQEQQMNEIVTIDQPVQIIPASVQSATPTTIKVINSSAKAAKVQRAPRISGEDRSSPGNRTGNNGQIQLWQFLLELLTDKDARDCISWVGDEGEFKLNQPELVAQKWGQRKNKPTMNYEKLSRALRYYYDGDMICKVQGKRFVYKFVCDLKTLIGYSAAELNRLVTECEQKKLAKMQLHGIAQPVTAVALATASLQTEKDN

SEQ ID NO: 1945 - DNA, 3094 bp, Homo sapiens
gaaatgtgagcctgggtggccaaggacgccggagtggccgccttccccgcgcctgagcgcagtggggcgagacaaagagacctgggcccccagcgcagcccgtctcgggccacgggcgccccagctccgcggagtcccgcagtcgctggcccgggacgcgcccggcccgggctcccttggaaggctccctaggcaatggccgggtctctgctccacccggctctcaggagcgctgctctctccatctgatcgccctccatcctccccattccctccggttccgggctctcccttcgctccaagcctcaggccaccggcttggatggacgctccgaggctacccgtgcgtccaggggtcttgcttccgaagttggtcctgctctttgtctacgcagatgattgccttgctcagtgtggcaaagattgcaaatcttactgctgtgatggaaccacgccctactgttgctcctactacgcttatattgggaatatcctctcgggcactgcaattgcgggcattgtttttggaatagtatttatcatgggggtcattgctgggattgccatatgcatctgcatgtgcatgaagaaccacagggcgacccgcgtgggcatcctcaggacgactcacatcaacaccgtctcctcctatcctggaccaccaccctacggtcacgaccacgagatggaatactgtgcagacttgcctcctccatactcccccaccccacagggtccagcacagcgttctccaccccctccttatcctggaaacgcaaggaaataatctatctcccagaacagaacatgtgccaatgggcgatcttgcctggaataaaatgcctctactcagaaacaggcaggaaagaattgctccaaggaatactttttggggtcagataatgtgtcaggtggaatatccctgctaggagatataggatttctactctgctcaaagctgaccccatctggagtattaatgtttggttctatggaaccacattttaagagatctgctgatccacctaagcacattcagggaagagtaatgtaattgacaaaatatctgataatcatgttgtttaagggctaggtgaagaaagtttcagtattgatcctggaaaaaaagaagatctaagtaggatgggagaatgatttggcccacacaaggaagcaactttattctatatagctttaaaagtcagaactagaattgttcattctttcattcatcaataaatgtattttgagtgcctaagagtttactatgtgcctagcactgtttgaggtcctgatggaagttacaggacgggtactctggttttagtacaagaaagagcaatgactagattgctttgtgaagctcttggtagagacacgctccagaagggataacaaaatcaaatagtagatgggttcattgggcctcagaagttctgctcgtattttaggtgggtgtgaagtgaatttctatatgtccaggagtgaatacaacagaaagagttggatcttatttatttaattagggagttaaaacaagaccaaaaagactcaacagccgcttgaagccaagaactcttcaatgccagctactgccacctaaaaatcatctggctttatagtggatcagaataaaggttattctaactgtggggagaaaaaaaaaattgtatcaagttccacaggtagcagacacttcacttccaagtaaaagatgagaaatcaattattcccacaggattttaggtcagggagcaaaaatctcagaacttgaccatgaagatacacaacagactcgcaaaaataaagtgggaaatgaagttcagattcccttctgtagatttccttaaaactattatttttttcttcttcgtaaaattttgataatctgttctcttaaaaaagttaatgacacaattaagatactgacatcaaattgttgccttttaccaaaatgcaaattttatgaagtgcctacctttatatgtataaagcatttaataaataattctaatgtgccatattttgctgtgagtgaccttaacatttatatttttatatgaattgtttcatgtatttataaaaattgtatattgaacattggaaatagatgattagatttttgtgtcattttacaattaaatctaaaatgcttaatccaatatcatcatcaaaattcagtgaaatcccaaaacagtgccaagaattttgctgaatgaaacaatcaaacaaagcattttaaggtgtaagttatagtacctgtacttgcagataagaagcttactatatcattattataagtagcatatattactttcaaatacctatattagaaagatattgatctgactgaaatataacctacctgccagtaaggtccaaaggctgaatttgttttgaatgagttccttgatctttaagcactgatgattttcttatatatgaggatgcaaagcattcaagagtttcagcctgttctggtgaggggctccctgacttacataaagttttcagtgcaattttaatagtacatatgctttaatttatttttcttctgcgtgtggtcagacccaattacactgtggctaagactctcaaagtgccagggtttctgtgatgattctgagaatgctgaatacaaatataccttatattctttaaggaaaacggaaaggaaagatcagcagaaatagggttttctcatcttcaccatcaataaacatttattgcgtacctcctatattctgcaaattttccccaaatagaagccagttcagtccacaccatctcttctttgagttgtttatggcctcccttaaggcattttacaaacccataagcctacaatagatgagtatttttactatttgtattaagtgtcataatagcatcaatgtgcacattaccagtatagactgttggagttcactgattgttttcatagatgatgcttcttggggaaaaatagtataggatgtgaaagttttgaattacggttatttaaaaactaacatttgctatggccaaagtgtttacaataagcaataaagtgaaagaacctattataacacagattataaaaaaaaaaaaaaaa

SEQ ID NO: 1946 - protein, 154 aa, Homo sapiens
MDAPRLPVRPGVLLPKLVLLFVYADDCLAQCGKDCKSYCCDGTTPYCCSYYAYIGNILSGTAIAGIVFGIVFIMGVIAGIAICICMCMKNHRATRVGILRTTHINTVSSYPGPPPYGHDHEMEYCADLPPPYSPTPQGPAQRSPPPPYPGNARK

SEQ ID NO: 1947 - DNA, 7385 bp, Homo sapiens
ggcgccgccggaccgcgccccaccccgcgcgcccgagcagggcgactgtcattagcttcctggacgggacccggggcgggatcctggtgtcctgaaaggggcccgggcgaccctaagaggaagaacttttgggggcggggtccccggtcccgcgtcccctgggcagccgctattgtctacgcgcctcgctgggcggcgcggggggcgtgatcgcggcggccccgggctctgggtgcggagacccaggcggggctgggcccagggcggcggcgggagaagccggggaagccgaagagcctggggaggaggagctgcgagcgcgggagacgagcaggagccgcgcgggccgcggcgagcgcgatgccggcggcggcgggggacgggctcctgggggagccggcggcgcctgggggcggcggcggcgcggaggacgcggccaggcccgcggcggcctgcgagggaagtttcctgcctgcctgggtgagcggcgtgccccgcgagcggctccgcgacttccagcaccacaagcgcgtgggcaactacctcatcggcagcaggaagctgggcgagggctcctttgccaaggtgcgcgaggggctgcacgtgctgaccggggagaaggtggccataaaagtcattgataagaagagagccaaaaaggacacctatgtcaccaaaaacctgcggcgagagggtcagatccagcagatgatccgccaccccaatatcactcagctccttgatattttagaaacggaaaacagctactacctggtcatggagctgtgccctgggggcaacctgatgcacaagatctatgagaagaagcggctggaggagtccgaagcccgcagatacatccgacagctcatctctgccgtagagcacctgcaccgggccggggtggtccacagagacttgaagatagagaatttgctactagatgaagacaataatatcaagctgattgactttggtttgagcaactgcgcagggatcctgggttactcggatccgttcagcacacagtgtggcagccctgcctacgctgcacctgaactgctcgccaggaagaaatacggccccaaaatcgatgtctggtccataggtgtgaacatgtatgccatgttgaccgggacgctgcctttcacggtggagcctttcagcctgagggctttgtaccagaagatggtagacaaagaaatgaaccccctccccactcagctctccacaggtgccatcagtttcctgcgctctctcctggaaccggatcctgtgaagaggccaaatattcagcaggcactggcgaatcgctggcttaatgagaattacacgggcaaagtgccctgtaatgtcacctatcccaacaggatttctctggaagatctgagcccgagcgtcgtgctgcacatgaccgagaagctgggttacaagaacagcgacgtgatcaacactgtgctctccaaccgcgcctgccacatcctggccatctacttcctcttaaacaagaaactggagcgctatttgtcagggaaatctgacatccaggacagcctctgctacaagacccggctctaccagatagaaaagtacagggcccccaaggagtcctatgaggcctctctggacacctggacacgagatcttgaattccatgccgtgcaggataaaaagcccaaagaacaagaaaaaagaggggattttcttcatcgaccattctccaagaagttggacaagaacctgccctcgcacaaacagccctcaggctcgcttatgacacagattcagaacaccaaagccctcctgaaggaccggaaggcctccaagtccagcttccccgacaaagattcctttggctgccgcaatattttccgcaaaacctcagattccaattgtgtggcttcttcttccatggagttcatccccgtgccaccgcccaggaccccgaggattgtgaagaaaccggagccccatcagccagggcccggaagcactggcatcccccacaaggaagaccccctgatgctggacatggtgcgctccttcgagtctgtggatcgcgacgaccacgtagaagtgctgtctccctctcatcactacaggattctgaactccccggtcagcttggctcgcagaaattccagcgagaggacgctgtccccgggtctgccatccggaagcatgtcgcctctccatactcctttgcatccaactctggtctcttttgctcacgaagataagaacagccccccaaaagaggagggcctgtgttgcccacctccggttcccagcaatggccccatgcagcctctggggagccccaattgtgtgaaaagccgaggccggttccctatgatgggcatcggacagatgttaaggaagcgccatcagagtctgcagccatctgcagataggcccctggaggccagcctgcccccactgcagcccctagcccctgtgaaccttgcctttgacatggccgatggggtcaagacccagtgctaacttgggccagcggggtttggggtatctctagaaaacagcaactgaacagagctccacacatctgtcagggtgtgagcactccaaggcctcgcgtggagcatccttagtcccacctgtagctgaatccacagacccaaagcctgcacaacccaacctcgcttagggacccccagagatgctggaatcgctaggagggttggctccaggggcagccaattcctatcattcagatcttccttcctcccaagtactcaccaaccccttccacttcccacttcccccaggcttggggggaaaacagggcatgagccttctggggcactcagattatggactgttaccagatctttcttcacgctgtgctacatgtgtgcctctcacagcagttggccacagttacagggagagaacaatatcacagtcattcatccaggccacgtttcctctgcggagtgtagcagccctgcctttcatagcagggattacctgaaggccagcaggagccgggggcaggcccaggatcctcagaggaagatggagaggagcttcggaccaagatcaaaccaaacagtggggaccccaacagaagagaaagactgaaggagacactcatttcccaagcaagattttgatagatttttgttgttgttgttgttgaaacatgctaatgattgaattatcttttccaaagattttttttaaatgtgatgtcggtaaattgaaataacataattttttaaaacttggatggagagatgagaagcaattccaccaaactcatgttttcacaggagggttcagtgtggagagcaaaaaagctgactgtggtgatttgctgagtgctgtggcccacaggcagggcaagtctcggtggccctgtgttcatcctgttgtttaaggcatagccctgatccttctggaaggcatagaacacggttacagctggttctgtagaaagagggaaaagatgattgtgacaattcagagcataactcagatggcgagaaggcagcattatctctgtgcgatgctgatttcaagctgcccacagaactggtgcggctcagagctcggcgagtttgctgggagctgggagcaggcttgcctggcagagaacctgttcagatacaggccagtttcttcttcgaggaaagccaagctcctcaaacagggttcagtccacgttgtgttttcacacctttctccaaggatcgaaccaaagatgtgtctccagtattgtgtctgtgcccctgtgtgtgttttgtggacagccgtgttgtctgactgtatccagctggcacttgacagggtgcagtcattggtgagaagaatcagaaaaagaagacccatcagcacaggttggataggggttagtgtaggagaccagttacagaatggcctggagtcttcaacttttgaccggtgcaggtgtgaccagagaccacctctgtggccacctcagatagtcatctcagtccaaggatcccaaaacacaaatctagaattgcaaagccagcctttatttccctggcaggcagccttgccagaaggcagagaggcagttctgaatcattctctcattcaccagtggtgacatccttcagtccctcacatctctgacagagcgggacagaatggatatttggctgaccttggtgagacctggagctgcctgtttcttccctaggggatcaccacggctctagggcattctaggatgaggtcagaccccttggccattggtgttattttttgtatagcttcagactgggttccagaacttaccattgaaaacagagcttttaggccaggtgtggtggctcacacctgtaatcccagcactttgggaggccgaggcaggtggatcgcttgagctcaggagttcgagagcagcctgggcaacatggtgaaagcccgtctctaccgaaaaatacaaaaaaaaatagctgggtgtggtggtacgtgcctgtagtcccagctacttcggggactgaggtgggaggatcacttgaacctaggaggtcgaggctgcagtgagccaagatcatgctactgcactccagcttaggtggcaaagtgagaccctgtctccaaaaaaagaaaatagagctttataagcagagagaagaaaataatcatctaagaccatctctccattcgacatgaagtgtaccttttctaaagacggtttccagctgcaacggctccactttgcaggcttgcagggtgtatacctgcgcattgggaacttgctggaacccctgatgcattttccttgagagcaggggtacttccgccttgccgttagcttgtggagaacgtgcttcttattcctggcaggcttcaagaacagctgcacatgtgccgctaactgaccgcgttgccattggcgacctggactctgaactcaggtttattctaaacccagtgagaggtgagggggagtgatgaaaggggatcagctgtatttgtgtgtgtgtgtgtgtgtgagcacctgacaaatctatgaaaccgagtgaaaggagaaatgttagattctttattattttattatatttatatggaaagctcgactctccctttggtaagtccgaagcatgttgtctgttcgaccgtgactgtcttcctcagtctgtgcctgtgattccagtcaccctgtagttactgacagaaattgactggactgtcattgtgtgaagtctaggaggaaatgtccattttaattgtatgatttggtcataagtaaggactatatttatgtcaccattattagatatatgtacttttgtaatgactgtgaaatacacttttccctcactacgactgcttctttatttgctgataaatcttaaaacaactaagtacgttgcaaataatagtacaggtaccatcttttatgtgaagttctttttctttttttgagacagggtcttgctctgtcacccaggctggagtgcagtggcacaatcacagttcactgcagcctcaacctctccagattcaagtgatcctcccatctcagcctcccaagtagctgggactacagttgtgcaccacaatgcctagctaattttttttgtattttgtagaaatggggtttcgccatgttgctcaggctgatctcaaactcctgggctccaacgatctgcccaccttggcctcccaaagtgctgagattacaggcgtgagccactgtgcctggccttatgtaaagctcttgacctagcatctgactggaaacaagcgggaattgcattggggggcattttctgggccagtttccctgccttattttacctgcaataggtgtgcctacaaaagtctttctgacatacacactgcaggtggcagttcaagaagaatcaacctttttcatttggggatattaggatcttccttggagactctgaaaatggcacacaaagaatggcagttatgaacgtgacttctagattttgtccttgtaggaggccttggtcatggataggggaagagggatgatgggatggaatgggagggtgggatctagatgacctcttgaaattgtcccagttactgcttccttcataactgttcacaaaacgtttttcatatataccaccttgtttcccctgggaagtgaggggacgaagccttagagggtgacatagctagaaagtggagaagctcactgttcactgtgcaaagccccagtagtcggattccggggaaaagaacaagtatctagttttgatgacaatgttttcttgtaagaatcccaacactttagaatagaaaaggacctaagattctctggctcagccccagcctttctgaagaagggaaaactagggacccagatggtttaaggacaccccagagtccccagatgagctggcatttgagctggtctggagcagagtttctccctcaaagaacacagagaaatcagagagtggctgccatggtcagagggggatgtcaacaacagatcaagccgtcatcacaacaggtatttctgaagttcctgcagggactaggtcttgcatttttaagtccttttcaaaactgtgcagcttcctgaaccttatgctgtttgtcccatccactcttgaagctggggaaagacagctttctttgggaactctgtctttctcagttgacttcccaagtaagcagcaaacccctggatagccttgttatctactttaggtattaagaggctattgggttttactagattaaatcaataaaacatttcctatagagccatatcatacactgaagcaaattcagaaagaatgcaaaactgctatcttttgggggagtctggaagcctgttggttagtgtatttattttctttgtggggtcttctgtgagctacaggcacagtaagaataattcagagcggtactgggagttggttcaatttcatgtcatcacttttcaatgaagggagtgcatttcctgagtagtaaatgagtatattatttgtggcagcttttctgttaagggagctttccagacatctggttgcaaagacaaataggatatatatttgtacttcttctctgtggacatgtttttgtgacacacagttatctctaggagttgacgtctgtgggcactaagggactgaggttgggggagaaagctgaggaggctttggaagagaaggtgaggagcatttcaggatttgcagtccccctccacatgtatccacatctgagctggtggtgttccaataatgaggcatttggggcaaccaattttggaaggatagaatagctttatgtggagcaaacttgaggatcaattggagttgagtggtttaaaacttaaagatggcacaggaagctgtatcatttacaggtgaaaaaaataaatgggtctgacttca

SEQ ID NO: 1948 - protein, 714 aa, Homo sapiens
MPAAAGDGLLGEPAAPGGGGGAEDAARPAAACEGSFLPAWVSGVPRERLRDFQHHKRVGNYLIGSRKLGEGSFAKVREGLHVLTGEKVAIKVIDKKRAKKDTYVTKNLRREGQIQQMIRHPNITQLLDILETENSYYLVMELCPGGNLMHKIYEKKRLEESEARRYIRQLISAVEHLHRAGVVHRDLKIENLLLDEDNNIKLIDFGLSNCAGILGYSDPFSTQCGSPAYAAPELLARKKYGPKIDVWSIGVNMYAMLTGTLPFTVEPFSLRALYQKMVDKEMNPLPTQLSTGAISFLRSLLEPDPVKRPNIQQALANRWLNENYTGKVPCNVTYPNRISLEDLSPSVVLHMTEKLGYKNSDVINTVLSNRACHILAIYFLLNKKLERYLSGKSDIQDSLCYKTRLYQIEKYRAPKESYEASLDTWTRDLEFHAVQDKKPKEQEKRGDFLHRPFSKKLDKNLPSHKQPSGSLMTQIQNTKALLKDRKASKSSFPDKDSFGCRNIFRKTSDSNCVASSSMEFIPVPPPRTPRIVKKPEPHQPGPGSTGIPHKEDPLMLDMVRSFESVDRDDHVEVLSPSHHYRILNSPVSLARRNSSERTLSPGLPSGSMSPLHTPLHPTLVSFAHEDKNSPPKEEGLCCPPPVPSNGPMQPLGSPNCVKSRGRFPMMGIGQMLRKRHQSLQPSADRPLEASLPPLQPLAPVNLAFDMADGVKTQC

SEQ ID NO: 1949 - DNA, 1146 bp, Homo sapiens
ctgtgcgcggagggcgtggcctgtgcggggcgggacttattgcccgcgcggtgagggagcgtggtctcgcgcaagccggcgtgcggtcccgcggcgctgcagttgtgtccagccggtcacggggcggctatggcggccacgttcttcggagaggtggtgaaggcgccgtgccgagctgggactgaggacgaagaggaggaggaggaggggcggagggagacgcccgaggacagggaggtgcgtctgcagctggcgcggaagagggaagtgcggctccttcgaagacaaacaaaaacatctttggaagtttctttgctagaaaaatatccgtgctccaagtttataattgctataggaaataatgcagtagcatttctgtcatcatttgttatgaattcaggagtctgggaggaagttggttgtgctaaactctggaatgaatggtgtagaacaacagacactacacatctgtcctccacagaggctttttgtgtgttttatcatctaaaatccaatccctcggtttttctctgtcagtgcagttgctatgttgcagaagatcaacagtatcagtggctggaaaaggtttttggctcttgtccaaggaagaacatgcagataactattctcacatgtcgacatgttaccgattataaaacctcagaatccaccggcagccttccttctcctttcctgagagccctaaaaacacagaatttcaaagactcggcgtgttgtccattgctagaacaaccgaatatagtacacgaccttcctgcagcagttctaagctactgtcaagtatggaaaatcccagcaattctgtacttgtgttatactgatgtgatgaaattagacctaatcacagtggaagcttttaagcctatactttctaccagaagcttgaagggtttggttaagaatattccccaaagcactgagatactaaagaaattgatgacaacaaatgagattcagagtaacatttatacatgatcttaaacattgttttgtagtgtatattacttgtccattcctttaaggggagcagcctgcactcttttgtagattacttttgggggatatattttgagaatgatgaaacggaataaaattgtaaaaaactaaaaaaaaaaaaaaaaaaaa

SEQ ID NO: 1950 - protein, 288 aa, Homo sapiens
MAATFFGEVVKAPCRAGTEDEEEEEEGRRETPEDREVRLQLARKREVRLLRRQTKTSLEVSLLEKYPCSKFIIAIGNNAVAFLSSFVMNSGVWEEVGCAKLWNEWCRTTDTTHLSSTEAFCVFYHLKSNPSVFLCQCSCYVAEDQQYQWLEKVFGSCPRKNMQITILTCRHVTDYKTSESTGSLPSPFLRALKTQNFKDSACCPLLEQPNIVHDLPAAVLSYCQVWKIPAILYLCYTDVMKLDLITVEAFKPILSTRSLKGLVKNIPQSTEILKKLMTTNEIQSNIYT

SEQ ID NO: 1951 - DNA, 1083 bp, Homo sapiens
ctgtgcgcggagggcgtggcctgtgcggggcgggacttattgcccgcgcggtgagggagcgtggtctcgcgcaagccggcgtgcggtcccgcggcgctgcagttgtgtccagccggtcacggggcggctatggcggccacgttcttcggagaggtggtgaaggcgccgtgccgagctgggactgaggacgaagaggaggaggaggaggggcggagggagacgcccgaggacagggaggtgcgtctgcagctggcgcggaagagggaagtgcggctccttcgaagacaaacaaaaacatctttggaagtttctttgctagaaaaatatccgtgctccaagtttataattgctataggaaataatgcagtagcatttctgtcatcatttgttatgaattcaggagtctgggaggaagttggttgtgctaaactctggaatgaatggtgtagaacaacagacactacacatctgtcctccacagaggctttttgtgtgttttatcatctaaaatccaatccctcggtttttggctcttgtccaaggaagaacatgcagataactattctcacatgtcgacatgttaccgattataaaacctcagaatccaccggcagccttccttctcctttcctgagagccctaaaaacacagaatttcaaagactcggcgtgttgtccattgctagaacaaccgaatatagtacacgaccttcctgcagcagttctaagctactgtcaagtatggaaaatcccagcaattctgtacttgtgttatactgatgtgatgaaattagacctaatcacagtggaagcttttaagcctatactttctaccagaagcttgaagggtttggttaagaatattccccaaagcactgagatactaaagaaattgatgacaacaaatgagattcagagtaacatttatacatgatcttaaacattgttttgtagtgtatattacttgtccattcctttaaggggagcagcctgcactcttttgtagattacttttgggggatatattttgagaatgatgaaacggaataaaattgtaaaaaactaaaaaaaaaaaaaaaaaaaa

SEQ ID NO: 1952 - protein, 267 aa, Homo sapiens
MAATFFGEVVKAPCRAGTEDEEEEEEGRRETPEDREVRLQLARKREVRLLRRQTKTSLEVSLLEKYPCSKFIIAIGNNAVAFLSSFVMNSGVWEEVGCAKLWNEWCRTTDTTHLSSTEAFCVFYHLKSNPSVFGSCPRKNMQITILTCRHVTDYKTSESTGSLPSPFLRALKTQNFKDSACCPLLEQPNIVHDLPAAVLSYCQVWKIPAILYLCYTDVMKLDLITVEAFKPILSTRSLKGLVKNIPQSTEILKKLMTTNEIQSNIYT

SEQ ID NO: 1953 - DNA, 2488 bp, Homo sapiens
gcggcgcgcacggtatggcggcggcggcggcggcggcggcgcgcgcctgagaagaggggacgccagcccggtcaggcctcggcgcggcctacacgctccgctcgctcgctcgctcccgcctcccgccccgcgcccggccatggcggagccgtcgtccgcccgacgcccggtgcctctcatcgagtcggagctgtacttccttatcgcccggtacctatcggcgggcccgtgtcggagagcggcccaggtgctggtgcaggagctggagcagtaccagttgttgccgaagagattggactgggagggcaacgagcacaacaggagctacgaggagttggtcttgtccaataagcatgtggctcctgatcatcttttgcaaatctgccagcgcatcggtcctatgttggataaagaaattccacccagtatttcaagagtcacttctttacttggtgcaggaaggcagtctttgctacgtacagcaaaaggtaccttaatttgaagaagtgttctgctttgtattaatagcctaataattattataattgtgaagtaatgtaagcattgtggaagaaaggtgataatgtaactataaatcatgctgtggactataaaattctctgcatttagcatagaacattgaattttattacataagtgtttaatgggtccttctgcattaaaaagttgataaagatatagatgttaagctaaaaagcttgaatttattctgagatgttgtttgaggttttatcaatgtgagttcttaattttccattttgtagctcactcataacttcattgaatgtaattgtatgtgtctaataaactctttaaatgctagaggtatttcatttgatatttagcttctgaaagccctttgttataaagggaagtgattttctaaatttggtagcagcttgaaaacaagcaccacaaatgtaaaattgcatggttctttttttactaatttaatttttttgccaagttatgtgctagcaaaatgtttgaaattgctattctttttctgttagcttggtatatatgacttagactaagtatatgtatgtgatataatatatgtgtacatgtggctaaactgctaatgggcaaagattgttggttcttctgatgctgagtatacatcaagttcatcccatgattattttttattacgagctattgctgatgtgatgctactcttagctgcaccaccagtataaagcttaactgagaaagaacacccctccctcttagttccgtgccagactggtttgttagctttagttgtttcttagtgctctagccatgtcaccctgtggcactaatcaggacactgtttatattcttcctcttctgtgtccctattcactttgtaattattctattttagctggttatatggtagttaattggtagcctgttttcctttgttttctttacttgtgtcaagctccatgtcgttgttttgtgatgagcagtgatttagaactggccagaccttagaagagtcttcagcaagctgccctagggtaggggcgtattctctgtttgttttgtactggtaccccaggaggatgccttgtaactgctctttggtcatgatagtggtaatgaatccattcatgtaaaatgcaatatgtctgttagtttggggcacccgaggctcagtagaggtttagtatgatgccttccctttcttctttgagttatgaagaaactaatttctggcacagtgtgactgcttcaaacctatgttctgctgctatctcctatagaggagggcagacttttttttcttagtgcatttgctggtaggtcaaggagggatggactttgaattagtgttcagagtcacagatcctacgtatgtgctcttcagtagaggattttctgtgatcctacaatgaagggaaagctatataatttattggtacttcctaaagatagagactaaagtcatggtagtattggccaaattaattttaaaactgaacaagtcatgaattttcatataaatcaaagaactttttccttataaaagcttccatttttgaaaagttggatcagttgtaagacctttcatctttagtattgtatgatataattctacattgaaaaataaacacttggcattaaatgggacttggagtcaaaagatctggttttatggtccatcttttaccaatcatttgctgtggatctctttaaaggtcctggaacctttgagcctcagttacctcacttgtaaattggcaaaaatacctacctcacagggttgttgtgaggattcaatgagctaatgtatgttgaaagcactttgtgaattgtaaagtgctacacaaatgttagttgttgttgctgctgtatctgagatgtcttaattttctttttcttcagaaatagtctaataaacctccagggcttttctgttaaagtatactagttggtaaaatgttgaataaacagtttattacaataaaaaaaa

SEQ ID NO: 1954 - protein, 120 aa, Homo sapiens
MAEPSSARRPVPLIESELYFLIARYLSAGPCRRAAQVLVQELEQYQLLPKRLDWEGNEHNRSYEELVLSNKHVAPDHLLQICQRIGPMLDKEIPPSISRVTSLLGAGRQSLLRTAKGTLI

SEQ ID NO: 1955 - DNA, 8670 bp, Homo sapiens
gcggcgcgcacggtatggcggcggcggcggcggcggcggcgcgcgcctgagaagaggggacgccagcccggtcaggcctcggcgcggcctacacgctccgctcgctcgctcgctcccgcctcccgccccgcgcccggccatggcggagccgtcgtccgcccgacgcccggtgcctctcatcgagtcggagctgtacttccttatcgcccggtacctatcggcgggcccgtgtcggagagcggcccaggtgctggtgcaggagctggagcagtaccagttgttgccgaagagattggactgggagggcaacgagcacaacaggagctacgaggagttggtcttgtccaataagcatgtggctcctgatcatcttttgcaaatctgccagcgcatcggtcctatgttggataaagaaattccacccagtatttcaagagtcacttctttacttggtgcaggaaggcagtctttgctacgtacagcaaaagactgcaggcacacagtttggaagggctctgcctttgctgctcttcatagaggaagacctcctgaaatgccagtgaattatggttccccaccaaatcttgtggagatacatcgaggaaaacaactcacagggtgttccacttttagtacagcatttccaggaactatgtatcagcatataaaaatgcacagaaggattctcggacatctatctgctgtttactgtgtagcatttgataggacaggacatagaatctttacaggttcagatgactgtttggtaaagatttggtcaacacataatggccgcttgttatctacattaagaggtcattctgcagaaatttcagatatggcagtaaactatgagaatacaatgattgctgcggggagctgtgataaaattattagagtgtggtgcttgagaacttgtgccccagttgctgtgctccaaggacacacaggatcaattacatctttacagtttagcccgatggccaaaggctctcaaagatacatggtttccactggtgctgatgggacagtttgcttttggcaatgggatttagaatccttaaaatttagcccacgtcccctgaagttcactgaaaagcctaggccaggcgttcaaatgctttgttcttcttttagtgttggtggtatgtttttagccacaggtagtactgatcatgtaatcagaatgtattttttgggttttgaagcacccgaaaaaatcgcagaacttgaaagccacactgataaagtagatagtatccaattttgtaacaatggtgatcggttcctaagtggtagcagagatggaacagcacggatttggagatttgagcagttagaatggaggagcattttattggatatggctaccagaatctcaggggacttatcttccgaagaggaaaggtttatgaaacctaaagtaacaatgatagcttggaatcaaaatgatagcattgttgtcacagctgtgaatgatcatgtcctcaaagtgtggaattcttacactggacaactgcttcataacttaatgggacatgctgatgaagtatttgttctggagacacatccctttgattccagaattatgttatctgcaggacatgatggcagcatatttatatgggatattacaaaaggtaccaagatgaaacattattttaatatgattgaaggacaaggacatggagctgtgtttgactgtaagttttcacaggatggacagcattttgcctgtacagattctcatgggcaccttctgatatttggttttggatgcagcaaaccatatgaaaagattcctgatcagatgttcttccatactgactatcgaccacttattagagattctaataattatgtcttagatgagcaaactcagcaggctcctcatcttatgcctccaccattcttggtagatgtagatggaaatcctcatccaaccaagtatcagagattagtaccaggccgagaaaattctgcagatgaacatttgattccacagctgggctatgtggcaacaagtgatggagaggtgattgaacaaattataagcctgcaaaccaatgataatgatgaacgcagcccagaatcgagtattcttgatggaatgataagacagttgcagcagcagcaagatcagagaatgggagcagatcaggatactattccaagaggactttcaaatggtgaagaaacaccccggagaggttttagaaggctgagcttagacattcagtcccctccaaatattggtctgcgtcgtagtggacaagttgaaggtgttcgtcagatgcatcaaaacgctccacgcagtcagattgctacagaacgtgacctgcaggcttggaaacgaagagtggttgtaccagaggtaccactaggcatatttaggaagctggaagacttccgattagagaaaggtgaagaggaaagaaatctttatataataggaagaaaaagaaagactcttcagctctcacataagtcggattcagtggttttggtatcacagtctagacaaaggacatgtaggcgtaaatatccaaattatggtagaagaaatcgtagctggcgtgagttatcttctggaaatgagtcttcaagctctgtaagacatgagacttcctgtgatcagagtgaaggttctggttcttcagaagaggatgaatggagaagtgacagaaaaagtgagagttacagcgaaagttcaagtgactcttcatctagatattccgattggacagctgatgcgggcatcaatttgcagcctcctttaagaacatcatgtcgtcgacgaattactcgattttgtagtagttcagaagatgaaatatctactgagaatttatctcctccaaaaagaagacgaaagagaaagaaagaaaataagcctaagaaggagaatttgcggaggatgactccagcagagcttgcaaatatggagcatttatatgaatttcaccctccagtttggattactgacaccacacttagaaaatctccttttgttcctcaaatgggtgatgaggtaatatattttcgacagggtcatgaagcttatattgaggctgtaagaagaaataatatttatgaactgaaccctaataaggagccatggagaaaaatggatcttagggatcaagaattggttaaaatagttggaatacgatatgaagttgggccccctacactctgttgcctaaaactagcatttatagatccagcaactggaaaacttatggacaaatctttctctattagatatcatgatatgccagatgttattgactttcttgtattgcgtcaattttatgatgaagcaagacagaggaattggcagtcttgtgacagattccgctctattattgatgatgcttggtggtttggaacagtgttaagtcaagagccatatcaaccacagtatcctgatagtcatttccagtgttatattgttaggtgggataatactgaaattgaaaaacttagcccatgggacatggaaccaattcctgataatgttgatccacctgaagaattaggagctagtatttctgtcacaacagatgagctagagaaattgctctataaaccacaagctggtgaatggggtcagaaatcaagagatgaagaatgtgatagaattatcagtggtatagatcaacttttgaatcttgatatagcagcagcttttgcaggccctgttgatttgtgtacatacccgaagtactgtactgtagtagcttatccaaccgatctttacacaattcgaatgagacttgttaatcgattttacaggaggctgtctgcgttagtttgggaagtcagatatatagaacataatgccagaacatttaacgaacctgagagtgtaattgcaagatcagctaaaaagataactgaccaacttttaaaatttatcaagaatcaacactgtacaaatatctcagaactttctaacacatctgaaaatgatgagcaaaatgctgaggatttggatgatagtgatcttcctaaaacatcttctggaaggaggagagtccatgatgggaaaaaaagcatcagagctacgaactatgttgaaagcaactggaagaaacagtgtaaggaactagtgaacttaatttttcagtgtgaagattctgaaccatttagacaacctgttgatttggttgaatatccagactacagagatattatagataccccaatggattttggaacagtaagggaaactctagatgcgggaaattatgacagccctttggagttttgcaaagacatccggctgatatttagcaatgcaaaagcgtatacaccaaacaaaagatcaaagatttatagtatgaccttgagattatctgccttatttgaagaaaaaatgaagaaaatctcttctgattttaaaattggtcaaaaattcaatgaaaaacttcgaagaagccagaggttcaagcaacggcaaaattgtaaaggtgacagtcagcctaacaaaagtatcagaaacctcaagccgaagaggttaaaatctcagacaaaaataattcctgagttggtaggttctcctacccagtctacctcaagtaggacagcttatcttggaacccacaagacaagtgctggtatctcttcaggtgttacttctggtgactcttcagattcagcagaatcatcagaaaggaggaaaagaaatagacctataacaaatggttctacattatctgaaagtgaagtggaagattctttagctacctctttgtcatcgtcagcttccagtagttctgaggaaagcaaagagagttccagagctcgtgaatcctcctcacgcagtgggctatccagaagcagcaatctcagggtaaccagaactagagctgctcaaagaaaaactggtcccgtttcattagcaaatggatgtggcagaaaagccactcgaaagagagtctatttaagtgattctgataacaattcattggagactggtgaaattctaaaagccagagctggaaataaccgaaaagtcttaaggaagtgtgctgctgtggctgccaataaaataaagctaatgagtgatgtagaagagaattctagctctgaaagtgtctgttctggtcggaagctgcctcaccgcaatgcttctgctgtagctagaaaaaagttattacataattctgaagatgaacagagcttaaagtcagaaattgaagaagaggagctaaaagatgaaaatcaactattaccagtgtccagttctcacactgcccagagcaatgttgatgaatctgaaaacagagactcagagtcagaaagtgatttgcgggtagcccggaaaaattggcatgctaatggttacaagtcccatactccagcaccttcaaagacaaaatttcttaaaatagagtcttctgaggaagactctaaaagtcatgattcagatcatgcatgtaacagaactgctggcccatcaacgtctgtgcagaaacttaaggcagagagcatctcagaggaagcagattctgaaccaggaagatctggtggtaggaaatacaatacatttcacaagaatgcgagtttctttaaaaaaaccaagattctgagtgactcagaagactctgaatctgaagagcaagatagagaagatgggaaatgtcataaaatggaaatgaacccaatttcaggaaatctgaactgtgaccctattgctatgtcccagtgttcctcagatcatggatgtgaaactgatttagattcagatgatgacaaaatagaaaaaccaaacaattttatgaaagattctgcatcacaagacaatggactaagcagaaaaatttccaggaaaagggtctgttccagtgactcagacagtagtttacaggtggttaagaaatcatcaaaagccagaacaggtctcctgaggattactcgaagatgtgcagctacggctgccaataagatcaagctcatgagtgatgtagaagatgtcagtttagaaaatgtgcacactagaagcaaaaatggaaggaaaaaacctctccatcttgcttgtactacagctaagaagaaattgagtgattgtgaaggaagtgtacattgtgaagtaccaagtgaacagtatgcctgtgaaggcaagccacctgatcctgactccgaaggtagtacaaaagtgcttagtcaggctctaaatggagactcagactctgaagatatgttgaattcagaacacaagcacaggcataccaatattcacaaaatagatgcaccttctaaaagaaaaagttcctctgttacatcttcaggagaagattcaaaaagtcatattccagggagtgagactgataggacattttcttcagagtcaaccttggcacaaaaagctactgcagagaataattttgaagtggaactgaattatgggctgcgcaggtggaatggcagaagactcaggacctatggaaaggctccttttagtaagacaaaagtgattcatgattcacaggaaacagcagagaaggaagtaaaaaggaagagatcgcatcctgaattggaaaatgtgaaaatctctgaaacaactgggaattcaaagtttagacctgatactagttccaaatcatcagatttgggatctgtaactgaatcagatattgactgtactgataatacaaaaaccaaaaggaggaaaacgaaaggaaaagcaaaagtagttagaaaagaatttgttcctagagacagagaacccaatacaaaagtgagaacatgtatgcataatcagaaggatgcagtgcagatgcctagtgaaactctgaaagcaaaaatggtacctgagaaagttccccgcagatgtgctactgttgctgcaaataaaataaagataatgagtaatctaaaagaaacgatctcaggaccagaaaatgtctggattaggaagagtagcagaaaactgccccatcgaaatgcttctgctgcggctaagaaaaaattactgaatgtttataaagaggatgatacaaccataaattctgaaagtgaaaaagagctagaagatattaatagaaaaatgctttttttaagggggttcagatcctggaaagaaaatgcacaatagtgactatgagaatgtagaagtggcatctgaaaacaattggtacacaagtaaactggcagttacattctgctcccagctctaaaattactcccttattggcatctttggaggaattttctaaaagccataatccagtgggttcctcccagtcagctcttgtacagacatgtgctctggggaattctgaggaggaaataaattgcagagtctgtaggtggagaggtggaaagaaaagacaaatggcctgctataagactactattcctttccagaatgcaaggccttgaagacatgattccttagaggaagaatataatgggaagtgtacaggctaggaagaacttgaagtgaacaaatttcaaaatcttaacctgatgctaattttcagggttctccattacagtgtaaaaattcagaccacgacaactatggtgtcatgaggaaaaaaaatcaggcatttttccaaaggaagtgctaatgggcctatttgacttctgagtgaagcaaaaactacccagatccattccctacaattcacatccccaaaggtcaaaaacaaactaggaggacctgggaatttcagctggagatactgattattgagttctgaagtagagtgttggaaataggcaattagagaaagtccattgatgtcattttgtttataatattgcagttcatactgaatgaccacttgatatgactaattcagggaatatatatttttctatgaaagctatgaatgttactatcacggcttttccttatttttacttgtatgtagcagcatttacagaaatgccaaaaatgtgcctcattaagaggcaggtcttaatcagttagataaaaataaaatgtatagcttaagatcaaaacagtcatatttttagatacagtgaaatcttttatgtttctctacagcaccttaaaaattagaacttgaatactttgagtaaacttactacaatctcatcccaacaaactttaatggtagcatgtttggcctatttcattgtggcctgtactaggattagaaaatttggtcgtggtataacaaagaagtgtatttacaataggatttaatttgttgttaatatgtatttgttgaaattaaaattgccagattaaatgaatatactgtcgcatctttttaacatagtaacgtgttactggaaaaattaagttgttgaaagtaagttgttttcccatttaaaaatatctgaatatatgatttgcatgtgtaaatctgaaaaactaaactacagaaacctagggttttctatttcttttttaagtcaaatgcatttttttttttttgttatacagatgaaccaagtgtctaaaatacttgagaaatttgtggttgcatgtctgttttaaaaaaaaggctttttgttttttagcataagccagaatattctaacctactaagtctgtgtcctttgctccttttgtagtatactttcatctaaattactgatccccaatatgttgatacacaggtgagaaagggaagaattcctaataaactgctattacttttaggtgaaaaaaaaaaaaaaaaaaaa

SEQ ID NO: 1956 - protein, 2320 aa, Homo sapiens
MAEPSSARRPVPLIESELYFLIARYLSAGPCRRAAQVLVQELEQYQLLPKRLDWEGNEHNRSYEELVLSNKHVAPDHLLQICQRIGPMLDKEIPPSISRVTSLLGAGRQSLLRTAKDCRHTVWKGSAFAALHRGRPPEMPVNYGSPPNLVEIHRGKQLTGCSTFSTAFPGTMYQHIKMHRRILGHLSAVYCVAFDRTGHRIFTGSDDCLVKIWSTHNGRLLSTLRGHSAEISDMAVNYENTMIAAGSCDKIIRVWCLRTCAPVAVLQGHTGSITSLQFSPMAKGSQRYMVSTGADGTVCFWQWDLESLKFSPRPLKFTEKPRPGVQMLCSSFSVGGMFLATGSTDHVIRMYFLGFEAPEKIAELESHTDKVDSIQFCNNGDRFLSGSRDGTARIWRFEQLEWRSILLDMATRISGDLSSEEERFMKPKVTMIAWNQNDSIVVTAVNDHVLKVWNSYTGQLLHNLMGHADEVFVLETHPFDSRIMLSAGHDGSIFIWDITKGTKMKHYFNMIEGQGHGAVFDCKFSQDGQHFACTDSHGHLLIFGFGCSKPYEKIPDQMFFHTDYRPLIRDSNNYVLDEQTQQAPHLMPPPFLVDVDGNPHPTKYQRLVPGRENSADEHLIPQLGYVATSDGEVIEQIISLQTNDNDERSPESSILDGMIRQLQQQQDQRMGADQDTIPRGLSNGEETPRRGFRRLSLDIQSPPNIGLRRSGQVEGVRQMHQNAPRSQIATERDLQAWKRRVVVPEVPLGIFRKLEDFRLEKGEEERNLYIIGRKRKTLQLSHKSDSVVLVSQSRQRTCRRKYPNYGRRNRSWRELSSGNESSSSVRHETSCDQSEGSGSSEEDEWRSDRKSESYSESSSDSSSRYSDWTADAGINLQPPLRTSCRRRITRFCSSSEDEISTENLSPPKRRRKRKKENKPKKENLRRMTPAELANMEHLYEFHPPVWITDTTLRKSPFVPQMGDEVIYFRQGHEAYIEAVRRNNIYELNPNKEPWRKMDLRDQELVKIVGIRYEVGPPTLCCLKLAFIDPATGKLMDKSFSIRYHDMPDVIDFLVLRQFYDEARQRNWQSCDRFRSIIDDAWWFGTVLSQEPYQPQYPDSHFQCYIVRWDNTEIEKLSPWDMEPIPDNVDPPEELGASISVTTDELEKLLYKPQAGEWGQKSRDEECDRIISGIDQLLNLDIAAAFAGPVDLCTYPKYCTVVAYPTDLYTIRMRLVNRFYRRLSALVWEVRYIEHNARTFNEPESVIARSAKKITDQLLKFIKNQHCTNISELSNTSENDEQNAEDLDDSDLPKTSSGRRRVHDGKKSIRATNYVESNWKKQCKELVNLIFQCEDSEPFRQPVDLVEYPDYRDIIDTPMDFGTVRETLDAGNYDSPLEFCKDIRLIFSNAKAYTPNKRSKIYSMTLRLSALFEEKMKKISSDFKIGQKFNEKLRRSQRFKQRQNCKGDSQPNKSIRNLKPKRLKSQTKIIPELVGSPTQSTSSRTAYLGTHKTSAGISSGVTSGDSSDSAESSERRKRNRPITNGSTLSESEVEDSLATSLSSSASSSSEESKESSRARESSSRSGLSRSSNLRVTRTRAAQRKTGPVSLANGCGRKATRKRVYLSDSDNNSLETGEILKARAGNNRKVLRKCAAVAANKIKLMSDVEENSSSESVCSGRKLPHRNASAVARKKLLHNSEDEQSLKSEIEEEELKDENQLLPVSSSHTAQSNVDESENRDSESESDLRVARKNWHANGYKSHTPAPSKTKFLKIESSEEDSKSHDSDHACNRTAGPSTSVQKLKAESISEEADSEPGRSGGRKYNTFHKNASFFKKTKILSDSEDSESEEQDREDGKCHKMEMNPISGNLNCDPIAMSQCSSDHGCETDLDSDDDKIEKPNNFMKDSASQDNGLSRKISRKRVCSSDSDSSLQVVKKSSKARTGLLRITRRCAATAANKIKLMSDVEDVSLENVHTRSKNGRKKPLHLACTTAKKKLSDCEGSVHCEVPSEQYACEGKPPDPDSEGSTKVLSQALNGDSDSEDMLNSEHKHRHTNIHKIDAPSKRKSSSVTSSGEDSKSHIPGSETDRTFSSESTLAQKATAENNFEVELNYGLRRWNGRRLRTYGKAPFSKTKVIHDSQETAEKEVKRKRSHPELENVKISETTGNSKFRPDTSSKSSDLGSVTESDIDCTDNTKTKRRKTKGKAKVVRKEFVPRDREPNTKVRTCMHNQKDAVQMPSETLKAKMVPEKVPRRCATVAANKIKIMSNLKETISGPENVWIRKSSRKLPHRNASAAAKKKLLNVYKEDDTTINSESEKELEDINRKMLFLRGFRSWKENAQ

SEQ ID NO: 1957 - DNA, 13003 bp, Homo sapiens
gcggcgcgcacggtatggcggcggcggcggcggcggcggcgcgcgcctgagaagaggggacgccagcccggtcaggcctcggcgcggcctacacgctccgctcgctcgctcgctcccgcctcccgccccgcgcccggccatggcggagccgtcgtccgcccgacgcccggtgcctctcatcgagtcggagctgtacttccttatcgcccggtacctatcggcgggcccgtgtcggagagcggcccaggtgctggtgcaggagctggagcagtaccagttgttgccgaagagattggactgggagggcaacgagcacaacaggagctacgaggagttggtcttgtccaataagcatgtggctcctgatcatcttttgcaaatctgccagcgcatcggtcctatgttggataaagaaattccacccagtatttcaagagtcacttctttacttggtgcaggaaggcagtctttgctacgtacagcaaaagactgcaggcacacagtttggaagggctctgcctttgctgctcttcatagaggaagacctcctgaaatgccagtgaattatggttccccaccaaatcttgtggagatacatcgaggaaaacaactcacagggtgttccacttttagtacagcatttccaggaactatgtatcagcatataaaaatgcacagaaggattctcggacatctatctgctgtttactgtgtagcatttgataggacaggacatagaatctttacaggttcagatgactgtttggtaaagatttggtcaacacataatggccgcttgttatctacattaagaggtcattctgcagaaatttcagatatggcagtaaactatgagaatacaatgattgctgcggggagctgtgataaaattattagagtgtggtgcttgagaacttgtgccccagttgctgtgctccaaggacacacaggatcaattacatctttacagtttagcccgatggccaaaggctctcaaagatacatggtttccactggtgctgatgggacagtttgcttttggcaatgggatttagaatccttaaaatttagcccacgtcccctgaagttcactgaaaagcctaggccaggcgttcaaatgctttgttcttcttttagtgttggtggtatgtttttagccacaggtagtactgatcatgtaatcagaatgtattttttgggttttgaagcacccgaaaaaatcgcagaacttgaaagccacactgataaagtagatagtatccaattttgtaacaatggtgatcggttcctaagtggtagcagagatggaacagcacggatttggagatttgagcagttagaatggaggagcattttattggatatggctaccagaatctcaggggacttatcttccgaagaggaaaggtttatgaaacctaaagtaacaatgatagcttggaatcaaaatgatagcattgttgtcacagctgtgaatgatcatgtcctcaaagtgtggaattcttacactggacaactgcttcataacttaatgggacatgctgatgaagtatttgttctggagacacatccctttgattccagaattatgttatctgcaggacatgatggcagcatatttatatgggatattacaaaaggtaccaagatgaaacattattttaatatgattgaaggacaaggacatggagctgtgtttgactgtaagttttcacaggatggacagcattttgcctgtacagattctcatgggcaccttctgatatttggttttggatgcagcaaaccatatgaaaagattcctgatcagatgttcttccatactgactatcgaccacttattagagattctaataattatgtcttagatgagcaaactcagcaggctcctcatcttatgcctccaccattcttggtagatgtagatggaaatcctcatccaaccaagtatcagagattagtaccaggccgagaaaattctgcagatgaacatttgattccacagctgggctatgtggcaacaagtgatggagaggtgattgaacaaattataagcctgcaaaccaatgataatgatgaacgcagcccagaatcgagtattcttgatggaatgataagacagttgcagcagcagcaagatcagagaatgggagcagatcaggatactattccaagaggactttcaaatggtgaagaaacaccccggagaggttttagaaggctgagcttagacattcagtcccctccaaatattggtctgcgtcgtagtggacaagttgaaggtgttcgtcagatgcatcaaaacgctccacgcagtcagattgctacagaacgtgacctgcaggcttggaaacgaagagtggttgtaccagaggtaccactaggcatatttaggaagctggaagacttccgattagagaaaggtgaagaggaaagaaatctttatataataggaagaaaaagaaagactcttcagctctcacataagtcggattcagtggttttggtatcacagtctagacaaaggacatgtaggcgtaaatatccaaattatggtagaagaaatcgtagctggcgtgagttatcttctggaaatgagtcttcaagctctgtaagacatgagacttcctgtgatcagagtgaaggttctggttcttcagaagaggatgaatggagaagtgacagaaaaagtgagagttacagcgaaagttcaagtgactcttcatctagatattccgattggacagctgatgcgggcatcaatttgcagcctcctttaagaacatcatgtcgtcgacgaattactcgattttgtagtagttcagaagatgaaatatctactgagaatttatctcctccaaaaagaagacgaaagagaaagaaagaaaataagcctaagaaggagaatttgcggaggatgactccagcagagcttgcaaatatggagcatttatatgaatttcaccctccagtttggattactgacaccacacttagaaaatctccttttgttcctcaaatgggtgatgaggtaatatattttcgacagggtcatgaagcttatattgaggctgtaagaagaaataatatttatgaactgaaccctaataaggagccatggagaaaaatggatcttagggatcaagaattggttaaaatagttggaatacgatatgaagttgggccccctacactctgttgcctaaaactagcatttatagatccagcaactggaaaacttatggacaaatctttctctattagatatcatgatatgccagatgttattgactttcttgtattgcgtcaattttatgatgaagcaagacagaggaattggcagtcttgtgacagattccgctctattattgatgatgcttggtggtttggaacagtgttaagtcaagagccatatcaaccacagtatcctgatagtcatttccagtgttatattgttaggtgggataatactgaaattgaaaaacttagcccatgggacatggaaccaattcctgataatgttgatccacctgaagaattaggagctagtatttctgtcacaacagatgagctagagaaattgctctataaaccacaagctggtgaatggggtcagaaatcaagagatgaagaatgtgatagaattatcagtggtatagatcaacttttgaatcttgatatagcagcagcttttgcaggccctgttgatttgtgtacatacccgaagtactgtactgtagtagcttatccaaccgatctttacacaattcgaatgagacttgttaatcgattttacaggaggctgtctgcgttagtttgggaagtcagatatatagaacataatgccagaacatttaacgaacctgagagtgtaattgcaagatcagctaaaaagataactgaccaacttttaaaatttatcaagaatcaacactgtacaaatatctcagaactttctaacacatctgaaaatgatgagcaaaatgctgaggatttggatgatagtgatcttcctaaaacatcttctggaaggaggagagtccatgatgggaaaaaaagcatcagagctacgaactatgttgaaagcaactggaagaaacagtgtaaggaactagtgaacttaatttttcagtgtgaagattctgaaccatttagacaacctgttgatttggttgaatatccagactacagagatattatagataccccaatggattttggaacagtaagggaaactctagatgcgggaaattatgacagccctttggagttttgcaaagacatccggctgatatttagcaatgcaaaagcgtatacaccaaacaaaagatcaaagatttatagtatgaccttgagattatctgccttatttgaagaaaaaatgaagaaaatctcttctgattttaaaattggtcaaaaattcaatgaaaaacttcgaagaagccagaggttcaagcaacggcaaaattgtaaaggtgacagtcagcctaacaaaagtatcagaaacctcaagccgaagaggttaaaatctcagacaaaaataattcctgagttggtaggttctcctacccagtctacctcaagtaggacagcttatcttggaacccacaagacaagtgctggtatctcttcaggtgttacttctggtgactcttcagattcagcagaatcatcagaaaggaggaaaagaaatagacctataacaaatggttctacattatctgaaagtgaagtggaagattctttagctacctctttgtcatcgtcagcttccagtagttctgaggaaagcaaagagagttccagagctcgtgaatcctcctcacgcagtgggctatccagaagcagcaatctcagggtaaccagaactagagctgctcaaagaaaaactggtcccgtttcattagcaaatggatgtggcagaaaagccactcgaaagagagtctatttaagtgattctgataacaattcattggagactggtgaaattctaaaagccagagctggaaataaccgaaaagtcttaaggaagtgtgctgctgtggctgccaataaaataaagctaatgagtgatgtagaagagaattctagctctgaaagtgtctgttctggtcggaagctgcctcaccgcaatgcttctgctgtagctagaaaaaagttattacataattctgaagatgaacagagcttaaagtcagaaattgaagaagaggagctaaaagatgaaaatcaactattaccagtgtccagttctcacactgcccagagcaatgttgatgaatctgaaaacagagactcagagtcagaaagtgatttgcgggtagcccggaaaaattggcatgctaatggttacaagtcccatactccagcaccttcaaagacaaaatttcttaaaatagagtcttctgaggaagactctaaaagtcatgattcagatcatgcatgtaacagaactgctggcccatcaacgtctgtgcagaaacttaaggcagagagcatctcagaggaagcagattctgaaccaggaagatctggtggtaggaaatacaatacatttcacaagaatgcgagtttctttaaaaaaaccaagattctgagtgactcagaagactctgaatctgaagagcaagatagagaagatgggaaatgtcataaaatggaaatgaacccaatttcaggaaatctgaactgtgaccctattgctatgtcccagtgttcctcagatcatggatgtgaaactgatttagattcagatgatgacaaaatagaaaaaccaaacaattttatgaaagattctgcatcacaagacaatggactaagcagaaaaatttccaggaaaagggtctgttccagtgactcagacagtagtttacaggtggttaagaaatcatcaaaagccagaacaggtctcctgaggattactcgaagatgtgcagctacggctgccaataagatcaagctcatgagtgatgtagaagatgtcagtttagaaaatgtgcacactagaagcaaaaatggaaggaaaaaacctctccatcttgcttgtactacagctaagaagaaattgagtgattgtgaaggaagtgtacattgtgaagtaccaagtgaacagtatgcctgtgaaggcaagccacctgatcctgactccgaaggtagtacaaaagtgcttagtcaggctctaaatggagactcagactctgaagatatgttgaattcagaacacaagcacaggcataccaatattcacaaaatagatgcaccttctaaaagaaaaagttcctctgttacatcttcaggagaagattcaaaaagtcatattccagggagtgagactgataggacattttcttcagagtcaaccttggcacaaaaagctactgcagagaataattttgaagtggaactgaattatgggctgcgcaggtggaatggcagaagactcaggacctatggaaaggctccttttagtaagacaaaagtgattcatgattcacaggaaacagcagagaaggaagtaaaaaggaagagatcgcatcctgaattggaaaatgtgaaaatctctgaaacaactgggaattcaaagtttagacctgatactagttccaaatcatcagatttgggatctgtaactgaatcagatattgactgtactgataatacaaaaaccaaaaggaggaaaacgaaaggaaaagcaaaagtagttagaaaaggtaaaacttttacagctaacatatctaaaactgtgagacgtcaaagacaaagcaaacgccctaggttaagtgtggatgataatgactgggaggatttggactatgcaaaatctaaaagagttcttcgacgttcaaaaataaaaacgagaaatcagggtagaaggactgtgagataccatgatggggatgatgacagaagtttagaaaatgtgttagatttcaatggttgcaccttatgaccttgagggaaagccagttcatttaagaggaaatggactggcatttatggtgaaagctggctgttaaaattatttttttgtcttacaattcagggaatatatttatatttttctatgaaaagttatgaatgtgactaaatcatgactgttatttttatttgcacttgctggtctttgtagcagcattcagcacaggtgccaaaatatgcttcattttgggggcagatctattttgacagtatttgactacatatagcaagagtttgaaatatgttaaacactagacatcctggttatcaaaaccaatgagcattactttcatggcagcaagtgtcatgcagttattttctgaatttgtcaaagaggcagtagtttctaacccctgttctatagtagttacaacaatttcacaacctatgtttacagattcttcataaatacatgcatactgacactataatcatgggaggtgtaaccatgattagtaggcgaggtacctaccacttttttttttttcttcccctggctacttgagtagaatgcattataccagatctggtcactttcattgaaatggtttctaattttcttcccaagtgctgttgggtttttttcttcttaaggaaaacgttgtcacttttatgttataaacttgaatttataaagtgctggtaaattatttttaatgatttgagtgcatgttttaaacctctaggaccagagcatagtcagagcattttcttttaaattgtgcactaacaaaatgctatataatctgtcttctgtccaagatctcctggtttccattgtaagggatttaaccaaaatcttgctcttccataatcttactctgtgaaatagaggaattcgtgtgccttagatttagaagtgtgttctttaatagagtgtacagggctaaaagagtatttaagttaatatgtaggtttcccccatctgtattccaattgtagaggtgagttttgttaagagtacaattgcaaatcttatctatataggaaaatagctaaatgtcattctccatctctttgttttagtttactgcttccatgtgcaatcctaagcattctttgctggggcaactaaatgtatctttattagtgacttctagtccaaatataagaaactgtcatgttttgtgggaaaataattttataatccatttaaagtgaaagtttatcacacaaatagtacacttattttctaaccaaatacttgataggttatgctactccagtgtagatggccattcctaacttgtttgtgcctgaagatggacttgattcaaatggtttacatatttagtgggtaagggatatgttacagtaccccacctgtaagttatttattagccctaattgtgtttgatttcagacaaaattaacccttttctcctgtgtatctttgaagtggcagataaggtgaagcatcagactggtatcaatattagacaatgttatttattagccctaattgtgtttggtttcagacaaaaccttttctcctgtgtatctttgaagtggcagacaaggcgaagcatcagactggtattaatgttagagaatgttctgaagtgttcctattttgtagttatctattccatttgacatagtagaaggtacattttctttctactctgatgcatggggaaggatgtttttggacattatcaactgagataggtgggaaacctcctctcatttgtggcttagagagctatcaccatttcagaactatgatgcttttcttctcagaacttgtgttaagtagatagtaaacagattgattcatgataattgtccttgactaagactgaaaagactaatgggatgccttttactttgctaattttaaaaactggtgatagatgtcaaatccattaatttatttaaactcttcttaaccttctcttttataatctgttctcaggttttaactccatgtttaccatcatttgcaaaaaggtaccaaaaaaatccataaataaatatggaatacattcataagtacatacattcttttggtataaaacaatattttgacagtttaggcttcattaatagaactattctgattatttggactgcattaattggtcattgactggccatccaattaccattttttctttcagtccaaaatagttagacccttgcatacagaagtggtattttggtttttaatcagatttggtttcatcagaagcagcaagaatggacctgatgtctttaaaagcatagccgacaatggtagcttctcaagttatgaaataaaactgagagataatggagaaaataatttttatgggtttttttggttatggtgctattcctaaggttaactttgaatatgtgacacacacactcctaagtacctttaaggaaaattaataaatcattaatagttaaaatgtttacattgagcactagaacatgtttggccttttttttctacgttatgcaaaatgcccagggatttaatgcacaggtgtactttaatgtttagggtcagtttgtagtattcttgagaaaaagataaagggttataatttgaatgtgaactgatccagaaataagtgctgtacctttccactgcacttgaagttcaacttaatggtgtatgtgaaaaacaaaaactactttggttgtgtatgtccaaagtcctatggttttattcatttatggttttacaggctttgaagtactcagatttgatttttgctttcttggaaagactcactttaccaagcatataaaggaaaaatgatttcaaacattgacaagatagatgagtgttaacaaagctttcttttttcgtgtcctccttatttaaaaaggtatacttacaatgtgaagtaacttatgaataaaaggaaaagtttatcccatattcaaataattcctaaggtcagcctccctttttgtaagtggcaaatatctgattaaatcatttctcagtttattaatccttggaaacaatgatatagcagttactcacagcttgtaaattacaacagaaaggttcctttcaaatagtagagctgcacctaaagaggaaattgggtttataagaaaatggaggcaaagaacttaagttttaagaaaaagcacttcaaaacagaagggcaaatggaaaaggggaatataaaacaaaccaataaaaataccatctgagggtgttactgtccaaaagtaaagaataagatgcatcactaagccctttgcactcgttatgacctcgtaagtaaaaattatcacttagaataaggggtgcacactacattccctctgtcttctagacttttttttttgtagaagaatcagaaaacaatttactaacctccctgtttgatattaaaaataggaagaattttaatattttctgttagtacaagttgaacttgattgtgccaactgaaaccccagaggtttgtatatcagtagaatgcaagaacattgttaaaggtgcttacgatcttttttgttttcctttccactccattgtatcaattttttgagtaacttttaaatggctagaaaatggtctttttgctttgcccttttaaagctgaaataaccagctccattcttttcatgaatagtaagttgatatatttatttatcaggtatcttgcagttgtcaccaaatactgtagttttcttatgttgtatggaaattatagttcaattattttaatgtgatagagtgcaacaagtcattgtagaacttttcacctgttaatgttgaagttatacctctgaatttctgctgtggatatcaaggaaataataaagcagaaaccccaagaaatttgcaacttaacagtttgagactgtctcttatcctagtatttgggaagagaaggaataaatttgtcaaaactaggtgagaaaatagagcattgtgggaaaaactgagtccaactagattagcaaatgttaattcctagctcaaactgtgaatagtaaggattgaaaagtaaagtatgtaatgctaagggctgtgttgtcttttcttacgattttaagttttaaaggctgttaaattacagagatgttgcccaaggatacatggggattctcaaaagtaagagatttttacctttttcataatctgccaagctggttcctaatatattgttaaattggtagaaaaatatctttaaattggtgtctgctcaagaattgcttttctagatttgatggagggagggggagagtcacatcatttggattctaccaatctgcaggctctatctttggcaacatgtaaataattagactatacatctgtttctcaagtatggcaagaccaatagtttgaatttaattatcaatgctatggtatactttctggtcatattttagttatgtcagttttaaggtaagttttttcatttattaaagcccttaaatgagattttagactgccaaagagaagaggcagtccaattgacctaactgaaatgagatgaccagtatatagagcctagatggactgtagcagctctacccctttgttttacaaggtaaatcattttaaaaattaccttttttgatcagtgggtaaaagttaaagggatctttaatttttgatatattcaagttaattttctaaatgtgaatcagtccttggactgcaactatatattcacctacaaaatcccaatcaaaaaattacatgagcctgtcaagcagatctttagttttccacttcacataagatcgttaatgttctaaattaatctattcatttagatgatttttgtcagttcttaaatgggatataataaatttagcattttcatcttaacaagcaaaagagttaaaaaacaaaacaaaacactactccaagccaaatacattctagctggttaattccagacttgtcccaagtggttccccaacctcttttccactggtaatttcttttcatgcaggcagaatataggggtgcgagcgctgtgagttttacatatgagcttggataggggaactgaagcgagtcaggagccctgctggaaaaggggtttgccattggattgtctgtggcctggtttctttccagtagtacagtaatagggtagattgaaaacaagtatttacttctgattctgcctgcatttagtgtgaaatgctcttaaggtattgcttctaaaaagcaaattaagcagttaagtataaagtccctgcacgaggatttcaaaataaggcttttatgagatttttattaaaaattgcaatagccatcacaaatctgagtttttctaggggtgagagaaaactgtattgtgatgagctagattagttgtagttccagaataagaacaaaaattcagagttgtgtggtgcccatcattgagtaaatgaaccctaaaaatgaataagctaatgaactagttcatggaattatttctgatggtcttttgacctgatgctgccatactgcagtgttaccagctccccctagaaaacggaactgtttaaaaacacagcaagttacagaaaccattttattctacagccattggggtacttcagtttatgggatgtttttggaaacttctgctttgggagggatgaagatcattgataaatgttatttgctttctgagttttggggtcatttcattgcttatcaatgaagggcagacagaggagagaatatctcaagtcttttctgataaaaggcttgcttgagggagcttataacttgcacctagagggtttacccactttgtggatttgatttatccaccaaccacagcaaccaataatgtcaagattctaggagtttatgaaagaggctagtatgttttcattttgagtcagacattcttttctcattctcaaatctgttttaaatgctccaattttaaaaatgccaatgaaaattttataatgcttctgtagtaaccatatgcagtttactttgaatttaggaaaacagttttgtatgatgaaatattgtgcagaatctgtaaataaggtagcttaaaaattaaaaaaaagtctaattaaaaaaaaaaaaaaaaaa

SEQ ID NO: 1958 - protein, 2269 aa, Homo sapiens
MAEPSSARRPVPLIESELYFLIARYLSAGPCRRAAQVLVQELEQYQLLPKRLDWEGNEHNRSYEELVLSNKHVAPDHLLQICQRIGPMLDKEIPPSISRVTSLLGAGRQSLLRTAKDCRHTVWKGSAFAALHRGRPPEMPVNYGSPPNLVEIHRGKQLTGCSTFSTAFPGTMYQHIKMHRRILGHLSAVYCVAFDRTGHRIFTGSDDCLVKIWSTHNGRLLSTLRGHSAEISDMAVNYENTMIAAGSCDKIIRVWCLRTCAPVAVLQGHTGSITSLQFSPMAKGSQRYMVSTGADGTVCFWQWDLESLKFSPRPLKFTEKPRPGVQMLCSSFSVGGMFLATGSTDHVIRMYFLGFEAPEKIAELESHTDKVDSIQFCNNGDRFLSGSRDGTARIWRFEQLEWRSILLDMATRISGDLSSEEERFMKPKVTMIAWNQNDSIVVTAVNDHVLKVWNSYTGQLLHNLMGHADEVFVLETHPFDSRIMLSAGHDGSIFIWDITKGTKMKHYFNMIEGQGHGAVFDCKFSQDGQHFACTDSHGHLLIFGFGCSKPYEKIPDQMFFHTDYRPLIRDSNNYVLDEQTQQAPHLMPPPFLVDVDGNPHPTKYQRLVPGRENSADEHLIPQLGYVATSDGEVIEQIISLQTNDNDERSPESSILDGMIRQLQQQQDQRMGADQDTIPRGLSNGEETPRRGFRRLSLDIQSPPNIGLRRSGQVEGVRQMHQNAPRSQIATERDLQAWKRRVVVPEVPLGIFRKLEDFRLEKGEEERNLYIIGRKRKTLQLSHKSDSVVLVSQSRQRTCRRKYPNYGRRNRSWRELSSGNESSSSVRHETSCDQSEGSGSSEEDEWRSDRKSESYSESSSDSSSRYSDWTADAGINLQPPLRTSCRRRITRFCSSSEDEISTENLSPPKRRRKRKKENKPKKENLRRMTPAELANMEHLYEFHPPVWITDTTLRKSPFVPQMGDEVIYFRQGHEAYIEAVRRNNIYELNPNKEPWRKMDLRDQELVKIVGIRYEVGPPTLCCLKLAFIDPATGKLMDKSFSIRYHDMPDVIDFLVLRQFYDEARQRNWQSCDRFRSIIDDAWWFGTVLSQEPYQPQYPDSHFQCYIVRWDNTEIEKLSPWDMEPIPDNVDPPEELGASISVTTDELEKLLYKPQAGEWGQKSRDEECDRIISGIDQLLNLDIAAAFAGPVDLCTYPKYCTVVAYPTDLYTIRMRLVNRFYRRLSALVWEVRYIEHNARTFNEPESVIARSAKKITDQLLKFIKNQHCTNISELSNTSENDEQNAEDLDDSDLPKTSSGRRRVHDGKKSIRATNYVESNWKKQCKELVNLIFQCEDSEPFRQPVDLVEYPDYRDIIDTPMDFGTVRETLDAGNYDSPLEFCKDIRLIFSNAKAYTPNKRSKIYSMTLRLSALFEEKMKKISSDFKIGQKFNEKLRRSQRFKQRQNCKGDSQPNKSIRNLKPKRLKSQTKIIPELVGSPTQSTSSRTAYLGTHKTSAGISSGVTSGDSSDSAESSERRKRNRPITNGSTLSESEVEDSLATSLSSSASSSSEESKESSRARESSSRSGLSRSSNLRVTRTRAAQRKTGPVSLANGCGRKATRKRVYLSDSDNNSLETGEILKARAGNNRKVLRKCAAVAANKIKLMSDVEENSSSESVCSGRKLPHRNASAVARKKLLHNSEDEQSLKSEIEEEELKDENQLLPVSSSHTAQSNVDESENRDSESESDLRVARKNWHANGYKSHTPAPSKTKFLKIESSEEDSKSHDSDHACNRTAGPSTSVQKLKAESISEEADSEPGRSGGRKYNTFHKNASFFKKTKILSDSEDSESEEQDREDGKCHKMEMNPISGNLNCDPIAMSQCSSDHGCETDLDSDDDKIEKPNNFMKDSASQDNGLSRKISRKRVCSSDSDSSLQVVKKSSKARTGLLRITRRCAATAANKIKLMSDVEDVSLENVHTRSKNGRKKPLHLACTTAKKKLSDCEGSVHCEVPSEQYACEGKPPDPDSEGSTKVLSQALNGDSDSEDMLNSEHKHRHTNIHKIDAPSKRKSSSVTSSGEDSKSHIPGSETDRTFSSESTLAQKATAENNFEVELNYGLRRWNGRRLRTYGKAPFSKTKVIHDSQETAEKEVKRKRSHPELENVKISETTGNSKFRPDTSSKSSDLGSVTESDIDCTDNTKTKRRKTKGKAKVVRKGKTFTANISKTVRRQRQSKRPRLSVDDNDWEDLDYAKSKRVLRRSKIKTRNQGRRTVRYHDGDDDRSLENVLDFNGCTL

SEQ ID NO: 1959 - DNA, 5936 bp, Homo sapiens
gctgtcctggccgcgcccctgtcccgccgcctcccgctcctcgcctggcggatgtaggttgttggcctgaggggagctacgtagccgaggtttgcgctgccgccgccaggcccggtccggttccagcctctgcccggacgctagccggcctggccatggctgaccgcgggtgcccgctggaggcggcgccgctgcctgccgaggtgcgggagagcctggctgagctggagctggagctgtcggaaggtgacatcactcaaaaaggatatgaaaagaaaagggcaaagctgcttgcacgttatataccgcttattcaaggaatagacccatctctgcaagcagagaatagaattcctgggccctcacaaaccacggccgctgcacccaagcagcagaagtctcggcccaccgcctcgagggatgagcgcttccggtcagatgtccacactgaagccgtgcaagcagctttggccaaatacaaagagaggaagatgcctatgccttcgaagagacgttctgtccttgtgcattcgtctgtggaaacctacacccctccagacacgtcgtctgcctcagaagatgagggctctttacggcgacccgggcgactcacctccactccgctccagagccattccagcgtcgagccctggctcgaccgggtcattcagggctcgtccacctcatcctctgcatcctccacctcatctcacccgggagggagacccaccactgctcccagtgctgcagccacgccgggggccgccgctaccactgcactcgcaggcctcgaggcccacacccacatagatctgcattctgcccctcctgatgtcaccacgggcctcgtggagcattcgtactttgagcgtccacaggtggcttctgtgagaagtgttcctcgggggtgcagcgggagcatgctggaaacagcagatggtgtccctgtgaacagcagagtgtcctccaaaatccagcagcttctgaacaccctgaagaggccaaagcgccctccactgaaggagttctttgtggatgattttgaggaattgttggaagttcagcaaccagatccaaatcagccaaagcctgagggaagcgagacgagtgtgctgagaggggagcctctcactgcaggtgtcccccgaccgccgtcgctgttggccaccttgcagcgctggggcacaacacagcccaaatccccctgtctgactgccttggatacaactgggaaagccgtctacactctcacctatggtaaactttggagtcggagtttaaaactagcttatactctacttaataaactgacaagtaagaatgaacctctacttaaacctggagacagagtggcgctcgtgtttccgaatagtgaccctgtgatgttcatggttgcattttatgggtgtctcctggcagagctggttcctgtccccatagaagtgccattaacaagaaaggatgcaggcagccagcaggttgggtttctgctgggcagctgtggagtcttcttggccctgaccacagacgcttgtcagaaaggcctccccaaggcacagacaggagaggtggcagctttcaaaggttggcccccgctctcctggctagtgattgatgggaagcatctagccaagcccccaaaggactggcaccctctggcccaggacacagggactgggactgcctacattgagtataaaaccagcaaagaaggcagtacggtgggggtcacagtgtcccacgcatccctgctggcacagtgccgggctctgacccaggcgtgcgggtactcagaagctgaaacattaacaaacgtgctggatttcaaaagggatgctggtctgtggcatggcgtgttaacaagcgtcatgaacaggatgcacgtggtcagcgtcccctacgcgctgatgaaggcgaacccactctcctggatccagaaagtgtgcttctataaagctcgggccgcgctggtgaagtcgcgagacatgcactggtctctcctagctcagcggggccagagggacgtcagcctcagctcactgcgcatgctgattgtggccgatggtgccaacccgtggtcgatctcctcctgtgacgccttcctcaacgtcttccagtccagaggtctgaggccagaggtcatctgtccttgtgcaagttctcctgaggcgctgactgtcgccatccgcaggccacctgatctgggaggaccacctccaagaaaagcagtcctgtcgatgaacggtctaagttatggtgttatcagagtggatactgaagaaaagttgtcagtccttactgttcaggacgttggtcaggtgatgcctggagctaatgtatgtgttgtgaagttagaaggtaccccttatctttgtaaaactgatgaagtgggagaaatatgcgtcagttccagtgcaactggcacagcgtactatggattgcttggaatcacgaagaatgtgtttgaggcagttccggtcaccacaggaggagcacccatctttgacaggccattcaccaggacaggcctgctgggcttcatcgggcctgacaacctggtcttcatcgtgggcaaactggacgggctgatggtcactggagttcgcagacacaatgcagatgacgttgtggccaccgcactggccgtggagcccatgaagtttgtctacagaggcaggatcgctgtgttctctgtgaccgtgctgcacgacgaccggattgtcctggtggctgagcagcggccggatgcctcggaggaggacagcttccagtggatgagccgtgtgctgcaggccattgatagcatccaccaggtgggcgtgtactgtctggccctggttcctgccaacaccttgcccaaggctcctctcggagggattcacatttctgaaaccaaacagcgctttctggaagggacgctgcacccgtgtaatgtgctgatgtgccctcacacctgtgttaccaacctccccaaacctcgtcagaaacaaccagaggttggaccagcctcaatgatcgtggggaacctggttgctgggaagagaatcgctcaggcttccgggagagagctcgcccacctggaggacagcgaccaggcacggaagttcctgttcctggctgacgtgctgcagtggcgtgcccacaccactcctgaccacccgctgttcttgctgctgaacgccaagggcaccgtcacaagcactgcaacctgtgtccagctgcacaaaagggctgagagagtggccgcggctctgatggagaagggaagactgagtgttggggaccatgtggctctggtctacccaccaggggtggacctcattgccgcgttctatggctgcttgtactgtggctgcgtgcctgtcaccgtgcggcccccgcaccctcagaacctcggcaccacactgcccaccgtcaagatgatcgtggaggtcagcaagtctgcatgcgtcctcaccacgcaggctgtcacacggctgctcaggtccaaggaggctgctgctgccgtggacatcaggacctggcccaccatcctagacacagatgacatcccaaaaaagaagatagcaagcgttttcaggcccccctcccccgatgtcctcgcatacttggacttcagcgtgtcaaccactgggatattagcgggagtgaagatgtcgcacgcggccacaagcgccttatgccgctccataaagctgcagtgtgagctgtacccctcgcggcagatcgccatctgcctcgacccctactgtggccttggttttgccctgtggtgtctgtgcagtgtctactcgggacaccaatcagtgctggtgcccccgctggagctggagagcaacgtgtccctgtggctgtcggccgtcagccagtacaaggcccgcgtcaccttctgctcctactctgtgatggagatgtgcaccaagggcctaggcgcacagacgggtgtcctcaggatgaagggggtgaacctgtcatgtgtgcgcacgtgcatggtggtcgccgaggagcggcccaggattgcgctgacccagtccttctccaagctcttcaaggacctgggcctgccggcccgcgccgtaagcaccacgttcgggtgcagggtcaacgtggccatctgcctccagggcacagctggcccggaccccacaaccgtctacgtggacatgcgggcactgcgccatgacagggttcgtttggtagaacggggttctccgcacagcctgccattgatggagtctggaaagatcctccccggcgtgaaggtcatcatcgcacacaccgagaccaaaggacccttgggagactcacacctgggagagatctgggtaagcagcccccacaatgccaccgggtactacaccgtttacggggaggaggcgcttcatgccgaccacttcagtgcccggctgagttttggagacacacagaccatctgggcaaggaccggctaccttggcttccttcggcgaacagagctcactgatgccagtggagggcggcacgatgcactgtatgtggttgggtctctggatgaaactctggagctcagaggcatgcggtaccaccccatcgacattgagacctctgtcatccgagcacacaggagcatcgctgagtgtgccgtattcacctggaccaacctgctggtggtggtggtggagctggatgggctagagcaggatgccctggacctggtggccctggtgaccaacgtggtgctggaggagcactacctggtcgtgggagtggtggtcatcgtggacccaggggtgatccctatcaactctcggggtgagaagcagcgcatgcacctgcgggacggcttcctggctgaccagctggaccccatctatgtcgcctacaacatgtgagcgcagcacaccggcccaggtgccggagatgaatgagccccagcagtccaaggtgtgatgtgggaagacaccgcagagctcactcaccgggactcgcccttcctgtgctcttacagatccctctcaacaatccccgcatctccttttagaaagcacttcctgaattatttaaagaaatattttgaatctgccaagtacatttacaaaaacacggatgctggtattttaacagatggagagacaaggaaaggaaaggaaaggcctggcatgggcattgtgaggaatcacaggcaccgaggttgttctctgctgtactgcaagtttgcactttctttaggctaaaaatatagttcctgatttttaaaattcagttatttattcccacttcaaatgacaagttcatatatagaatttacgggagaaacttgagaccatttacggggagaaacttgattctgggaagatagcagagtacaaaccagctgcctcacttctgtttcacagggaggctgatggaaaaaggaagcaagctggacccatcctccctgctcacagagggcactgtggtcacacacagtgcctcctctgccagttcctttattgaaagaggtgtgctggctggccacggtggcttacacctgtaatcccagcactttgggaggccgaggcgagcagatcacgaggtcaggagaccgagaccatcctggctaacatggtgaaaccctgtctctactaaaaatacaaaaaattagccgggtgtggtggtgggcgcctgtagtcccagctacttgggaggctgaggcaggagaatggtatgaaccagggaggcggagcttgcagtgagccgagatcacgctactgcactccagcctgggtgacagcacgagatgccgtcttaaaaaaacaaaaaagaggtgtgctgcttgtcagcatgtattgtcacggacactcaataagtgccattttggactgtcaaatttagatgctttgtttcagaaagataagccagcatttagttttaaatcactttcctggtttgtaacttgatgctgtttagttaaattg

SEQ ID NO: 1960 - protein, 1571 aa, Homo sapiens
MADRGCPLEAAPLPAEVRESLAELELELSEGDITQKGYEKKRAKLLARYIPLIQGIDPSLQAENRIPGPSQTTAAAPKQQKSRPTASRDERFRSDVHTEAVQAALAKYKERKMPMPSKRRSVLVHSSVETYTPPDTSSASEDEGSLRRPGRLTSTPLQSHSSVEPWLDRVIQGSSTSSSASSTSSHPGGRPTTAPSAAATPGAAATTALAGLEAHTHIDLHSAPPDVTTGLVEHSYFERPQVASVRSVPRGCSGSMLETADGVPVNSRVSSKIQQLLNTLKRPKRPPLKEFFVDDFEELLEVQQPDPNQPKPEGSETSVLRGEPLTAGVPRPPSLLATLQRWGTTQPKSPCLTALDTTGKAVYTLTYGKLWSRSLKLAYTLLNKLTSKNEPLLKPGDRVALVFPNSDPVMFMVAFYGCLLAELVPVPIEVPLTRKDAGSQQVGFLLGSCGVFLALTTDACQKGLPKAQTGEVAAFKGWPPLSWLVIDGKHLAKPPKDWHPLAQDTGTGTAYIEYKTSKEGSTVGVTVSHASLLAQCRALTQACGYSEAETLTNVLDFKRDAGLWHGVLTSVMNRMHVVSVPYALMKANPLSWIQKVCFYKARAALVKSRDMHWSLLAQRGQRDVSLSSLRMLIVADGANPWSISSCDAFLNVFQSRGLRPEVICPCASSPEALTVAIRRPPDLGGPPPRKAVLSMNGLSYGVIRVDTEEKLSVLTVQDVGQVMPGANVCVVKLEGTPYLCKTDEVGEICVSSSATGTAYYGLLGITKNVFEAVPVTTGGAPIFDRPFTRTGLLGFIGPDNLVFIVGKLDGLMVTGVRRHNADDVVATALAVEPMKFVYRGRIAVFSVTVLHDDRIVLVAEQRPDASEEDSFQWMSRVLQAIDSIHQVGVYCLALVPANTLPKAPLGGIHISETKQRFLEGTLHPCNVLMCPHTCVTNLPKPRQKQPEVGPASMIVGNLVAGKRIAQASGRELAHLEDSDQARKFLFLADVLQWRAHTTPDHPLFLLLNAKGTVTSTATCVQLHKRAERVAAALMEKGRLSVGDHVALVYPPGVDLIAAFYGCLYCGCVPVTVRPPHPQNLGTTLPTVKMIVEVSKSACVLTTQAVTRLLRSKEAAAAVDIRTWPTILDTDDIPKKKIASVFRPPSPDVLAYLDFSVSTTGILAGVKMSHAATSALCRSIKLQCELYPSRQIAICLDPYCGLGFALWCLCSVYSGHQSVLVPPLELESNVSLWLSAVSQYKARVTFCSYSVMEMCTKGLGAQTGVLRMKGVNLSCVRTCMVVAEERPRIALTQSFSKLFKDLGLPARAVSTTFGCRVNVAICLQGTAGPDPTTVYVDMRALRHDRVRLVERGSPHSLPLMESGKILPGVKVIIAHTETKGPLGDSHLGEIWVSSPHNATGYYTVYGEEALHADHFSARLSFGDTQTIWARTGYLGFLRRTELTDASGGRHDALYVVGSLDETLELRGMRYHPIDIETSVIRAHRSIAECAVFTWTNLLVVVVELDGLEQDALDLVALVTNVVLEEHYLVVGVVVIVDPGVIPINSRGEKQRMHLRDGFLADQLDPIYVAYNM

SEQ ID NO: 1961 - DNA, 3042 bp, Homo sapiens
gctgtcctggccgcgcccctgtcccgccgcctcccgctcctcgcctggcggatgtaggttgttggcctgaggggagctacgtagccgaggtttgcgctgccgccgccaggcccggtccggttccagcctctgcccggacgctagccggcctggccatggctgaccgcgggtgcccgctggaggcggcgccgctgcctgccgaggtgcgggagagcctggctgagctggagctggagctgtcggaaggtgacatcactcaaaaaggatatgaaaagaaaagggcaaagctgcttgcacgttatataccgcttattcaaggaatagacccatctctgcaagcagagaatagaattcctgggccctcacaaaccacggccgctgcacccaagcagcagaagtctcggcccaccgcctcgagggatgagcgcttccggtcagatgtccacactgaagccgtgcaagcagctttggccaaatacaaagagaggaagatgcctatgccttcgaagagacgttctgtccttgtgcattcgtctgtggaaacctacacccctccagacacgtcgtctgcctcagaagatgagggctctttacggcgacccgggcgactcacctccactccgctccagagccattccagcgtcgagccctggctcgaccgggtcattcagggctcgtccacctcatcctctgcatcctccacctcatctcacccgggagggagacccaccactgctcccagtgctgcagccacgccgggggccgccgctaccactgcactcgcaggcctcgaggcccacacccacatagatctgcattctgcccctcctgatgtcaccacgggcctcgtggagcattcgtactttgagcgtccacaggtggcttctgtgagaagtgttcctcgggggtgcagcgggagcatgctggaaacagcagatggtgtccctgtgaacagcagagtgtcctccaaaatccagcagcttctgaacaccctgaagaggccaaagcgccctccactgaaggagttctttgtggatgattttgaggaattgttggaagttcagcaaccagatccaaatcagccaaagcctgagggaagcgagacgagtgtgctgagaggggagcctctcactgcaggtgtcccccgaccgccgtcgctgttggccaccttgcagcgctggggcacaacacagcccaaatccccctgtctgactgccttggatacaactgggaaagccgtctacactctcacctatggtaaactttggagtcggagtttaaaactagcttatactctacttaataaactgacaagtaagaatgaacctctacttaaacctggagacagagtggcgctcgtgtttccgaatagtgaccctgtgatgttcatggttgcattttatgggtgtctcctggcagagctggttcctgtccccatagaagtgccattaacaagaaaggatgcaggcagccagcaggttgggtttctgctgggcagctgtggagtcttcttggccctgaccacagacgcttgtcagaaaggcctccccaaggcacagacaggagaggtggcagctttcaaaggttggcccccgctctcctggctagtgattgatgggaagcatctagccaagcccccaaaggactggcaccctctggcccaggacacagggactgggactgcctacattgagtataaaaccagcaaagaaggcagtacggtgggggtcacagtgtcccacgcatccctgctggcacagtgccgggctctgacccaggcgtgcgggtactcagaagctgaaacattaacaaacgtgctggatttcaaaagggatgctggtctgtggcatggcgtgttaacaagcgtcatgaacaggatgcacgtggtcagcgtcccctacgcgctgatgaaggcgaacccactctcctggatccagaaagtgtgcttctataaagctcgggccgcgctggtgaagtcgcgagacatgcactggtctctcctagctcagcggggccagagggacgtcagcctcagctcactgcgcatgctgattgtggccgatggtgccaacccgtggtcgatctcctcctgtgacgccttcctcaacgtcttccagtccagaggtctgaggccagaggtcatctgtccttgtgcaagttctcctgaggcgctgactgtcgccatccgcaggccacctgatctgggaggaccacctccaagaaaagcagtcctgtcgatgaacggtctaagttatggtgttatcagagtggatactgaagaaaagttgtcagtccttactgttcaggacgttggtcaggtgatgcctggagctaatgtatgtgttgtgaagttagaaggtaccccttatctttgtaaaactgatgaagtgggagaaatatgcgtcagttccagtgcaactggcacagcgtactatggattgcttggaatcacgaagaatgtgtttgaggcagttccggtcaccacaggaggagcacccatctttgacaggccattcaccaggacaggcctgctgggcttcatcgggcctgacaacctggtcttcatcgtgggcaaactggacgggctgatggtcactggagttcgcagacacaatgcagatgacgttgtggccaccgcactggccgtggagcccatgaagtttgtctacagaggcaggatcgctgtgttctctgtgaccgtgctgcacgacgaccggattgtcctggtggctgagcagcggccggatgcctcggaggaggacagcttccagtggatgagccgtgtgctgcaggtgggcgccccggcacggcctatggttcggtgaatctcccaagctggcacccccactccactccaagtgccaagtggttggcttgtcccgcccggtcctccctggctccagctttgtttatctgtatttttcattgcaaattgacaaattacagctgtatgtatttacgggatacaaagtgatgttataatttatgaatacaatatagaataattaatatatccaaaaaaaaaaaaaaaaaaaaaaaaaa

SEQ ID NO: 1962 - protein, 889 aa, Homo sapiens
MADRGCPLEAAPLPAEVRESLAELELELSEGDITQKGYEKKRAKLLARYIPLIQGIDPSLQAENRIPGPSQTTAAAPKQQKSRPTASRDERFRSDVHTEAVQAALAKYKERKMPMPSKRRSVLVHSSVETYTPPDTSSASEDEGSLRRPGRLTSTPLQSHSSVEPWLDRVIQGSSTSSSASSTSSHPGGRPTTAPSAAATPGAAATTALAGLEAHTHIDLHSAPPDVTTGLVEHSYFERPQVASVRSVPRGCSGSMLETADGVPVNSRVSSKIQQLLNTLKRPKRPPLKEFFVDDFEELLEVQQPDPNQPKPEGSETSVLRGEPLTAGVPRPPSLLATLQRWGTTQPKSPCLTALDTTGKAVYTLTYGKLWSRSLKLAYTLLNKLTSKNEPLLKPGDRVALVFPNSDPVMFMVAFYGCLLAELVPVPIEVPLTRKDAGSQQVGFLLGSCGVFLALTTDACQKGLPKAQTGEVAAFKGWPPLSWLVIDGKHLAKPPKDWHPLAQDTGTGTAYIEYKTSKEGSTVGVTVSHASLLAQCRALTQACGYSEAETLTNVLDFKRDAGLWHGVLTSVMNRMHVVSVPYALMKANPLSWIQKVCFYKARAALVKSRDMHWSLLAQRGQRDVSLSSLRMLIVADGANPWSISSCDAFLNVFQSRGLRPEVICPCASSPEALTVAIRRPPDLGGPPPRKAVLSMNGLSYGVIRVDTEEKLSVLTVQDVGQVMPGANVCVVKLEGTPYLCKTDEVGEICVSSSATGTAYYGLLGITKNVFEAVPVTTGGAPIFDRPFTRTGLLGFIGPDNLVFIVGKLDGLMVTGVRRHNADDVVATALAVEPMKFVYRGRIAVFSVTVLHDDRIVLVAEQRPDASEEDSFQWMSRVLQVGAPARPMVR

SEQ ID NO: 1963 - DNA, 2859 bp, Homo sapiens
gctgtcctggccgcgcccctgtcccgccgcctcccgctcctcgcctggcggatgtaggttgttggcctgaggggagctacgtagccgaggtttgcgctgccgccgccaggcccggtccggttccagcctctgcccggacgctagccggcctggccatggctgaccgcgggtgcccgctggaggcggcgccgctgcctgccgaggtgcgggagagcctggctgagctggagctggagctgtcggaaggtgacatcactcaaaaaggatatgaaaagaaaagggcaaagctgcttgcacgttatataccgcttattcaaggaatagacccatctctgcaagcagagaatagaattcctgggccctcacaaaccacggccgctgcacccaagcagcagaagtctcggcccaccgcctcgagggatgagcgcttccggtcagatgtccacactgaagccgtgcaagcagctttggccaaatacaaagagaggaagatgcctatgccttcgaagagacgttctgtccttgtgcattcgtctgtggaaacctacacccctccagacacgtcgtctgcctcagaagatgagggctctttacggcgacccgggcgactcacctccactccgctccagagccattccagcgtcgagccctggctcgaccgggtcattcagggctcgtccacctcatcctctgcatcctccacctcatctcacccgggagggagacccaccactgctcccagtgctgcagccacgccgggggccgccgctaccactgcactcgcaggcctcgaggcccacacccacatagatctgcattctgcccctcctgatgtcaccacgggcctcgtggagcattcgtactttgagcgtccacaggtggcttctgtgagaagtgttcctcgggggtgcagcgggagcatgctggaaacagcagatggtgtccctgtgaacagcagagtgtcctccaaaatccagcagcttctgaacaccctgaagaggccaaagcgccctccactgaaggagttctttgtggatgattttgaggaattgttggaagttcagcaaccagatccaaatcagccaaagcctgagggaagcgagacgagtgtgctgagaggggagcctctcactgcaggtgtcccccgaccgccgtcgctgttggccaccttgcagcgctggggcacaacacagcccaaatccccctgtctgactgccttggatacaactgggaaagccgtctacactctcacctatggtaaactttggagtcggagtttaaaactagcttatactctacttaataaactgacaagtaagaatgaacctctacttaaacctggagacagagtggcgctcgtgtttccgaatagtgaccctgtgatgttcatggttgcattttatgggtgtctcctggcagagctggttcctgtccccatagaagtgccattaacaagaaaggatgcaggcagccagcaggttgggtttctgctgggcagctgtggagtcttcttggccctgaccacagacgcttgtcagaaaggcctccccaaggcacagacaggagaggtggcagctttcaaaggttggcccccgctctcctggctagtgattgatgggaagcatctagccaagcccccaaaggactggcaccctctggcccaggacacagggactgggactgcctacattgagtataaaaccagcaaagaaggcagtacggtgggggtcacagtgtcccacgcatccctgctggcacagtgccgggctctgacccaggcgtgcgggtactcagaagctgaaacattaacaaacgtgctggatttcaaaagggatgctggtctgtggcatggcgtgttaacaagcgtcatgaacaggatgcacgtggtcagcgtcccctacgcgctgatgaaggcgaacccactctcctggatccagaaagtgtgcttctataaagctcgggccgcgctggtgaagtcgcgagacatgcactggtctctcctagctcagcggggccagagggacgtcagcctcagctcactgcgcatgctgattgtggccgatggtgccaacccgtggtcgatctcctcctgtgacgccttcctcaacgtcttccagtccagaggtctgaggccagaggtcatctgtccttgtgcaagttctcctgaggcgctgactgtcgccatccgcaggccacctgatctgggaggaccacctccaagaaaagcagtcctgtcgatgaacggtctaagttatggtgttatcagagtggatactgaagaaaagttgtcagtccttactgttcaggacgttggtcaggtgatgcctggagctaatgtatgtgttgtgaagttagaaggtaccccttatctttgtaaaactgatgaagtgggagaaatatgcgtcagttccagtgcaactggcacagcgtactatggattgcttggaatcacgaagaatgtgtttgaggcagttccggtcaccacaggaggagcacccatctttgacaggccattcaccaggacaggcctgctgggcttcatcgggcctgacaacctggtcttcatcgtgggcaaactggacgggctgatggtcactggagttcgcagacacaatgcagatgacgttgtggccaccgcactggccgtggagcccatgaagtttgtctacagaggcaggtgatgcgctgcggacccccacgccgggagtagattccttcatttgcagctcgggaagtctttgtgcagtagatggaaagcccagcaaacttgaattcacaaagcctaaaaattgttgtacatcagaaaactcctaaagtaaaaggaaaatatttgcagcaatgaaaaaaaaaaaaaaaaaa

SEQ ID NO: 1964 - protein, 841 aa, Homo sapiens
MADRGCPLEAAPLPAEVRESLAELELELSEGDITQKGYEKKRAKLLARYIPLIQGIDPSLQAENRIPGPSQTTAAAPKQQKSRPTASRDERFRSDVHTEAVQAALAKYKERKMPMPSKRRSVLVHSSVETYTPPDTSSASEDEGSLRRPGRLTSTPLQSHSSVEPWLDRVIQGSSTSSSASSTSSHPGGRPTTAPSAAATPGAAATTALAGLEAHTHIDLHSAPPDVTTGLVEHSYFERPQVASVRSVPRGCSGSMLETADGVPVNSRVSSKIQQLLNTLKRPKRPPLKEFFVDDFEELLEVQQPDPNQPKPEGSETSVLRGEPLTAGVPRPPSLLATLQRWGTTQPKSPCLTALDTTGKAVYTLTYGKLWSRSLKLAYTLLNKLTSKNEPLLKPGDRVALVFPNSDPVMFMVAFYGCLLAELVPVPIEVPLTRKDAGSQQVGFLLGSCGVFLALTTDACQKGLPKAQTGEVAAFKGWPPLSWLVIDGKHLAKPPKDWHPLAQDTGTGTAYIEYKTSKEGSTVGVTVSHASLLAQCRALTQACGYSEAETLTNVLDFKRDAGLWHGVLTSVMNRMHVVSVPYALMKANPLSWIQKVCFYKARAALVKSRDMHWSLLAQRGQRDVSLSSLRMLIVADGANPWSISSCDAFLNVFQSRGLRPEVICPCASSPEALTVAIRRPPDLGGPPPRKAVLSMNGLSYGVIRVDTEEKLSVLTVQDVGQVMPGANVCVVKLEGTPYLCKTDEVGEICVSSSATGTAYYGLLGITKNVFEAVPVTTGGAPIFDRPFTRTGLLGFIGPDNLVFIVGKLDGLMVTGVRRHNADDVVATALAVEPMKFVYRGR

SEQ ID NO: 1965 - DNA, 2909 bp, Homo sapiens
gctgtcctggccgcgcccctgtcccgccgcctcccgctcctcgcctggcggatgtaggttgttggcctgaggggagctacgtagccgaggtttgcgctgccgccgccaggcccggtccggttccagcctctgcccggacgctagccggcctggccatggctgaccgcgggtgcccgctggaggcggcgccgctgcctgccgaggtgcgggagagcctggctgagctggagctggagctgtcggaaggtgacatcactcaaaaaggatatgaaaagaaaagggcaaagctgcttgcacgttatataccgcttattcaaggaatagacccatctctgcaagcagagaatagaattcctgggccctcacaaaccacggccgctgcacccaagcagcagaagtctcggcccaccgcctcgagggatgagcgcttccggtcagatgtccacactgaagccgtgcaagcagctttggccaaatacaaagagaggaagatgcctatgccttcgaagagacgttctgtccttgtgcattcgtctgtggaaacctacacccctccagacacgtcgtctgcctcagaagatgagggctctttacggcgacccgggcgactcacctccactccgctccagagccattccagcgtcgagccctggctcgaccgggtcattcagggctcgtccacctcatcctctgcatcctccacctcatctcacccgggagggagacccaccactgctcccagtgctgcagccacgccgggggccgccgctaccactgcactcgcaggcctcgaggcccacacccacatagatctgcattctgcccctcctgatgtcaccacgggcctcgtggagcattcgtactttgagcgtccacaggtggcttctgtgagaagtgttcctcgggggtgcagcgggagcatgctggaaacagcagatggtgtccctgtgaacagcagagtgtcctccaaaatccagcagcttctgaacaccctgaagaggccaaagcgccctccactgaaggagttctttgtggatgattttgaggaattgttggaagttcagcaaccagatccaaatcagccaaagcctgagggaagcgagacgagtgtgctgagaggggagcctctcactgcaggtgtcccccgaccgccgtcgctgttggccaccttgcagcgctggggcacaacacagcccaaatccccctgtctgactgccttggatacaactgggaaagccgtctacactctcacctatggtaaactttggagtcggagtttaaaactagcttatactctacttaataaactgacaagtaagaatgaacctctacttaaacctggagacagagtggcgctcgtgtttccgaatagtgaccctgtgatgttcatggttgcattttatgggtgtctcctggcagagctggttcctgtccccatagaagtgccattaacaagaaaggatgcaggcagccagcaggttgggtttctgctgggcagctgtggagtcttcttggccctgaccacagacgcttgtcagaaaggcctccccaaggcacagacaggagaggtggcagctttcaaaggttggcccccgctctcctggctagtgattgatgggaagcatctagccaagcccccaaaggactggcaccctctggcccaggacacagggactgggactgcctacattgagtataaaaccagcaaagaaggcagtacggtgggggtcacagtgtcccacgcatccctgctggcacagtgccgggctctgacccaggcgtgcgggtactcagaagctgaaacattaacaaacgtgctggatttcaaaagggatgctggtctgtggcatggcgtgttaacaagcgtcatgaacaggatgcacgtggtcagcgtcccctacgcgctgatgaaggcgaacccactctcctggatccagaaagtgtgcttctataaagctcgggccgcgctggtgaagtcgcgagacatgcactggtctctcctagctcagcggggccagagggacgtcagcctcagctcactgcgcatgctgattgtggccgatggtgccaacccgtggtcgatctcctcctgtgacgccttcctcaacgtcttccagtccagaggtctgaggccagaggtcatctgtccttgtgcaagttctcctgaggcgctgactgtcgccatccgcaggccacctgatctgggaggaccacctccaagaaaagcagtcctgtcgatgaacggtctaagttatggtgttatcagagtggatactgaagaaaagttgtcagtccttactgttcaggacgttggtcaggtgatgcctggagctaatgtatgtgttgtgaagttagaaggtaccccttatctttgtaaaactgatgaagtgggagaaatatgcgtcagttccagtgcaactggcacagcgtactatggattgcttggaatcacgaagaatgtgtttgaggcagttccggtcaccacaggaggagcacccatctttgacaggccattcaccaggacaggcctgctgggcttcatcgggcctgtgagtatgtcctcctgtaccagcactggcagtcagagaaggtagggggtgtggctaagggacacctcgttgcagccccacccttgtcctggccgttcctgacctcccatgtggccttggtcggtggcgctgacctccctgcccatcaccctacctgtgtgcagggccatccacacctccgagactggtgcacagtcctgcacacaggcctgagtcgggggtccccggggtggatgaggatgttttgctttttatatggagtggcaggtttgtgagtattcattatatcattctttaccattttggatgtctaaactattcaaaaataaatgcttctatttgtaaaaaaaaaaaaaaaaa

SEQ ID NO: 1966 - protein, 812 aa, Homo sapiens
MADRGCPLEAAPLPAEVRESLAELELELSEGDITQKGYEKKRAKLLARYIPLIQGIDPSLQAENRIPGPSQTTAAAPKQQKSRPTASRDERFRSDVHTEAVQAALAKYKERKMPMPSKRRSVLVHSSVETYTPPDTSSASEDEGSLRRPGRLTSTPLQSHSSVEPWLDRVIQGSSTSSSASSTSSHPGGRPTTAPSAAATPGAAATTALAGLEAHTHIDLHSAPPDVTTGLVEHSYFERPQVASVRSVPRGCSGSMLETADGVPVNSRVSSKIQQLLNTLKRPKRPPLKEFFVDDFEELLEVQQPDPNQPKPEGSETSVLRGEPLTAGVPRPPSLLATLQRWGTTQPKSPCLTALDTTGKAVYTLTYGKLWSRSLKLAYTLLNKLTSKNEPLLKPGDRVALVFPNSDPVMFMVAFYGCLLAELVPVPIEVPLTRKDAGSQQVGFLLGSCGVFLALTTDACQKGLPKAQTGEVAAFKGWPPLSWLVIDGKHLAKPPKDWHPLAQDTGTGTAYIEYKTSKEGSTVGVTVSHASLLAQCRALTQACGYSEAETLTNVLDFKRDAGLWHGVLTSVMNRMHVVSVPYALMKANPLSWIQKVCFYKARAALVKSRDMHWSLLAQRGQRDVSLSSLRMLIVADGANPWSISSCDAFLNVFQSRGLRPEVICPCASSPEALTVAIRRPPDLGGPPPRKAVLSMNGLSYGVIRVDTEEKLSVLTVQDVGQVMPGANVCVVKLEGTPYLCKTDEVGEICVSSSATGTAYYGLLGITKNVFEAVPVTTGGAPIFDRPFTRTGLLGFIGPVSMSSCTSTGSQRR

SEQ ID NO: 1967 - DNA, 1135 bp, Homo sapiens
gggcagagggaataagaggctgcctctgcccaccagtcctgccgcccaggacccgcagcagagacgacgcctgcagcaaggagaccaggaaggggtgagacaaggaagaggatgtctgagctggagaaggccatggtggccctcatcgacgttttccaccaatattctggaagggagggagacaagcacaagctgaagaaatccgaactgaaggagctcatcaacaatgagctttcccatttcttagaggaaatcaaagagcaggaggttgtggacaaagtcatggaaacactggacaatgatggagacggcgaatgtgacttccaggaattcatggcctttgttgccatggttactactgcctgccacgagttctttgaacatgagtgagattagaaagcagccaaacctttcctgtaacagagacggtcatgcaagaaagcagacagcaagggcttgcagcctagtaggagctgagctttccagccgtgttgtagctaattaggaagcttgatttgctttgtgattgaaaaattgaaaacctctttccaaaggctgttttaacggcctgcatcattctttctgctatattaggcctgtgtgtaagctgactggccccagggactcttgttaacagtaacttaggagtcaggtctcagtgataaagcgtgcaccgtgcagcccgccatggccgtgtagaccctaacccggagggaaccctgactacagaaattaccccggggcacccttaaaacttccactacctttaaaaaacaaagccttatccagcattatttgaaaacactgctgttctttaaatgcgttcctcatccatgcagataacagctggttggccggtgtggccctgcaagggcgtggtggcttcggcctgcttcccgggatgcgcctgatcaccaggtgaacgctcagcgctggcagcgctcctggaaaaagcaactccatcagaactcgcaatccgagccagctctgggggctccagcgtggcctccgtgacccatgcgattcaagtcgcggctgcaggatccttgcctccaacgtgcctccagcacatgcggcttccgagggcactaccgggggctctgagccaccgcgagggcctgcgttcaataaaaag

SEQ ID NO: 1968 - protein, 92 aa, Homo sapiens
MSELEKAMVALIDVFHQYSGREGDKHKLKKSELKELINNELSHFLEEIKEQEVVDKVMETLDNDGDGECDFQEFMAFVAMVTTACHEFFEHE

SEQ ID NO: 1969 - DNA, 4504 bp, Homo sapiens
ggggcggggcggcgcggcgcggagccgagcaggacggccgccatcttgcgcgcagctggagtcggtgcctgaggttgcagccgagagtgtgcgccagcccgcggcccagccgaagctctttcccgccgcctctccgcgcctcgcccaggttcagctccgcctgaccctccgcttggcacggtcccctgaccctcagtccggcctggtccggccttccagccgccccggggacgatgaacggaggataaatggtgcccaaggcagacagcggcgccttcctgctgctcttcctgctcgtgctcactgtcaccgagccgctgcggccagagctgcggtgcaaccctgggcagtttgcgtgtcgcagcggcaccatccagtgcatccccctcccctggcagtgtgacggctgggcgacttgcgaggatgagagcgacgaagccaactgtccagaagtgaccggggaggtgcgtcctcatcatgggaaggaggctgtggatccgcggcaggggcgggccagaggaggcgacccttcgcacttccacgcggtgaacgtggcgcagcccgttcgcttcagcagtttcctagggaagtgcccgacagggtggcaccactacgaaggcacggccagctgctaccgggtctacctgagcggggagaactactgggatgccgcgcagacctgccagcgcctgaatggctctctcgccaccttctccactgaccaggagctgcgctttgtcctggcccaggaatgggaccagcccgagcggagctttggttggaaggaccagcgcaagttgtgggttggctatcagtatgttatcactggccggaaccgctccttggaaggtcgctgggaggtggcattcaaaggctcttcagaggtgttcctgcccccagaccccatctttgcctcggccatgtctgagaacgacaacgtgttctgtgcccagcttcagtgcttccatttccccaccctgcggcaccacgacctccacagctggcacgccgagagctgctacgagaagtcttcatttctgtgtaaaagaagtcaaacatgtgttgacatcaaggacaacgtggtggatgaagggttctacttcacccctaagggggacgacccatgcctgagctgcacctgccatggaggggagcctgagatgtgtgtggctgctctctgtgagaggccccagggctgccaacagtaccgcaaggaccccaaagagtgctgcaagttcatgtgtctggacccagatggcaacagtctgtttgactccatggccagcgggatgcgcctggtcgtcagctgcatctcctccttcctcatcctgtcactgctgctcttcatggtccaccggctgcgccagcggcgccgggagcgcatcgagtccctgattggagcaaacttgcaccacttcaacctcggccgcaggatccctggctttgattacggcccagacgggtttggcacgggcctcacgccgctgcatctttctgacgacggagagggtgggactttccatttccacgaccctccacctccctacacggcatacaagtacccggacatcggccagcccgacgaccctccgccgccctacgaggcctccatccacccggacagtgtgttctatgaccctgcagacgatgatgcttttgagcctgtggaggtcagcctgccagcccctggggatggtgggagtgaaggtgcattactccggcgcctggagcagcctctgcccactgcgggggcctctctggcagacctggaagactctgccgacagcagcagcgccctgctcgtgccccctgaccctgcccagagcgggagcaccccagctgcagaggcactgccagggggtggccgccacagccgcagctccctcaatactgtggtgtagacggcctggcctgtaccccaacggtctgggagcacctgtctgttgtagaaaacaccggtccctggggagacttgaaaggcccctgtcccagcctggacgccacgcactgccgcacgtcactggcgggctcgcgtgtgtacatagagaccacagcccgccttctgccaaaagaagtgatggcctgcaccgagcttccttgagggcttcagaaacatgcatagctttggatcactgtcttctcctttataaatggcagaagagtgacaaaattcattcagaccgcacatgttagaggcagggaatgaagaaggtactgtgggccatggccacacctgatgcgtttttggtgggcttacttggtgcagtgtgctgtccagagagacctgctgacccagtctgggacaggcacagtgggagctgccacagtgccccttgctggccgccctcaggagggggcctctggaccgtcagtgtggcgtaggcagtgggtctgcttcagggaggcagcctcttgactttgtcacaacggttgcactgaagatggcccccacaagcccagttgtgaatatcaaggtgaccctgcccctggctgggagctcccctggggctctggaacctgaagccctgagaaggagagcttggaaggaggttgagctcttcactgtgtctttccatctgggctctgcagcccagctctgtggcaggaggcctgaccccaccccatcagtccctctcccagcattgctgtgcatggctccctcaggaagaagctctggagtggggccgaggccccagatgctctgctggggtctggggactgagctgcctcctgtctctccactctggagccctgggctcttgcctcctgttgaattgcccctgggcctgcccccggccccatttgtgccataaagggttgcttcattgcaggaggggtggctgaaaccaccatcctgggctgcatctatctccttaaagtccactccttacatcaccgccactactgcagctcagtgcccagcggccgcatgcacacctcccggcccctcctcagcagcgcaggggctgggggcccttcctggcacccttttgcctgacggaccctgttgcctgctcctgggcagtggttttgttgcctgacacagggcctttaacatttctgaggtttggagattaagcgggttctgtgcgatttttagcacatccatatcttttctacgttgaatgtctggatctttcctttgtatgtttgtgtctctgtgtgtgtatgtggccaagcgtctgcaggtgagggtggcacatggaacttcacgggtcactgggggcccactcttccagggtcatcgatgcatcctgggctgtgctgaggcagtgctgtctcgctcagtctttccagaccagcggggcagcacctgggaggcctgtctgaagcatgcagttctgtggtgctgctcggggatggactccatgcacagtccacttcttgacacattctcacactgtggctggagacccattttttccatcccatgtggaatgagaatcttgagttgcccacagacagacttgacctttgtgccagaactgtccagagctgtgagttttgttactgaattgcctgtccctgagcttggcctgctggagcatgatgctggaggctgtgtgcgggcaggcttgtgctccccttggagaagggctgctacttaacaaggaagtcctggccacaggagtcccctactggctgcagaggacgaagcaggaagcatgccgtggatcccacatgcactggggcagggcagccaggttccagagcagcaggcatgtgcattatgggtgccaggtggccagtgagggcccgaggaccacgcagcagagtcccccacgggcctgagcctgagagctcagaggattcctgccaggcctcagaactgtgtgtgcgggacagggtggctggcacgagatgtgtgggactgggacgcttcctttggggaccagaggaacattaggggccggtcagacacgtagggggcagtgaggaaacggggtaaagtggaccatgcaggctgcagagggtgggccttgggctggccggggttgctgggtggccccttccccatgggcctccacaagcactcaggccactggcacgttgggccaggcagaaggtccacatggcagggctgcctggaacaccgctgccactgtggctccaggaggcccttgggagcatgaggagagctggactcgctcatctgttcttgcaccaccatccagaatgccccctttgcaaggcctgctgcagtccccagtctgaccagcaagtcccggggtcacccttgctgaaccttgtgctccaggggtcctcctcctctaggaccagcttgccacggtttctcagagcccaggtgccctctgacctgccatgcggaggtgggatttgatactgtacattgtcttgatgcctgtttttttatgttttcattaagggtttttagtttttggttgggttgacactaacttttcttaagatgctgtgagaatcatttcatccaaatgccaaataaacttgtgttccggaagaggaaaaaaaaaaaaaaaaaaaa

SEQ ID NO: 1970 - protein, 550 aa, Homo sapiens
MVPKADSGAFLLLFLLVLTVTEPLRPELRCNPGQFACRSGTIQCIPLPWQCDGWATCEDESDEANCPEVTGEVRPHHGKEAVDPRQGRARGGDPSHFHAVNVAQPVRFSSFLGKCPTGWHHYEGTASCYRVYLSGENYWDAAQTCQRLNGSLATFSTDQELRFVLAQEWDQPERSFGWKDQRKLWVGYQYVITGRNRSLEGRWEVAFKGSSEVFLPPDPIFASAMSENDNVFCAQLQCFHFPTLRHHDLHSWHAESCYEKSSFLCKRSQTCVDIKDNVVDEGFYFTPKGDDPCLSCTCHGGEPEMCVAALCERPQGCQQYRKDPKECCKFMCLDPDGNSLFDSMASGMRLVVSCISSFLILSLLLFMVHRLRQRRRERIESLIGANLHHFNLGRRIPGFDYGPDGFGTGLTPLHLSDDGEGGTFHFHDPPPPYTAYKYPDIGQPDDPPPPYEASIHPDSVFYDPADDDAFEPVEVSLPAPGDGGSEGALLRRLEQPLPTAGASLADLEDSADSSSALLVPPDPAQSGSTPAAEALPGGGRHSRSSLNTVV

SEQ ID NO: 1971 - DNA, 1363 bp, Homo sapiens
gagtcgaagcccagcccagggcagcccagccagacgcctccggtagtgtaaatgaggacaatgcctgctggcccacatgacggggggatgtagacggcagcggcgccagtcgctcctggcaccatggacgatgccacagtcctaaggaagaagggttacatcgtaggcatcaatcttggcaagggttcctacgcaaaagtcaaatctgcctactctgagcgcctcaagttcaatgtggctgtcaagatcatcgaccgcaagaaaacacctactgactttgtggagagattccttcctcgggagatggacatcctggcaactgtcaaccacggctccatcatcaagacttacgagatctttgagacctctgacggacggatctacatcatcatggagcttggcgtccagggcgacctcctcgagttcatcaagtgccagggagccctgcatgaggacgtggcacgcaagatgttccgacagctctcctccgccgtcaagtactgccacgacctggacatcgtccaccgggacctcaagtgcgagaaccttctcctcgacaaggacttcaacatcaagctgtctgactttggcttctccaagcgctgcctgcgggacagcaatgggcgcatcatcctcagcaagaccttctgcgggtcggcagcatatgcagcccccgaggtgctgcagagcatcccctaccagcccaaggtgtatgacatctggagcctgggcgtgatcctgtacatcatggtctgcggctccatgccctatgacgactccgacatcaggaagatgctgcgtatccagaaggagcaccgtgtggacttcccgcgctccaagaacctgacctgcgagtgcaaggacctcatctaccgcatgctgcagcccgacgtcagccagcggctccacatcgatgagatcctcagccactcgtggctgcagccccccaagcccaaagccacgtcttctgcctccttcaagagggagggggagggcaagtaccgcgctgagtgcaaactggacaccaagacagacttgaggcccgaccaccggcccgaccacaagcttggagccaaaacccagcaccggctgctggtggtgcccgagaacgagaacaggatggaggacaggctggccgagacctccagggccaaagaccatcacatctccggagctgaggtggggaaagcaagcacctagcatgacaatggccccgttgtgtgtggtgggggtcggggttggggggcatggtgcagtcggccttcacgtaaactaagtaggcaggtaggatctgaagaaggcacaggtgcaagtaaaattcgtcaattaaaccactattttgattacaaaaaaaaaaaaaaaa

SEQ ID NO: 1972 - protein, 358 aa, Homo sapiens
MDDATVLRKKGYIVGINLGKGSYAKVKSAYSERLKFNVAVKIIDRKKTPTDFVERFLPREMDILATVNHGSIIKTYEIFETSDGRIYIIMELGVQGDLLEFIKCQGALHEDVARKMFRQLSSAVKYCHDLDIVHRDLKCENLLLDKDFNIKLSDFGFSKRCLRDSNGRIILSKTFCGSAAYAAPEVLQSIPYQPKVYDIWSLGVILYIMVCGSMPYDDSDIRKMLRIQKEHRVDFPRSKNLTCECKDLIYRMLQPDVSQRLHIDEILSHSWLQPPKPKATSSASFKREGEGKYRAECKLDTKTDLRPDHRPDHKLGAKTQHRLLVVPENENRMEDRLAETSRAKDHHISGAEVGKAST

SEQ ID NO: 1973 - DNA, 5405 bp, Homo sapiens
cgcgcctgctgggcccgagctttttcctgggatagcgatggagacgccgggcgcatcagcgtcgtccttgttgcttcccgccgcgtccaggcccccgaggaagcgcgaggcgggagaggctggggctgcgacgagcaagcagcgggtcctggacgaggaagagtatatcgagggcctccagacggtcatccaaagggatttctttcctgatgtggagaagctccaggcacagaaggagtacctggaagccgaggagaatggagacttggaacggatgcgccagattgccatcaagtttggctctgccttgggcaagatgtcccgggagcccccgccaccctatgtgactccagccacatttgaaacccctgaggtgcatgcaggcactggagtggtgggcaacaagcccaggccccgcggccgaggcctggaggatggagaggctggagaggaggaggagaaggagccgctgcccagcctagatgtcttcctgagccgctacacgagtgaggacaatgcctccttccaggagatcatggaggtggccaaggagagaagccgggcacgccacgcttggctctaccaggctgaggaagagtttgagaagaggcagaaagataatctcgaactcccgtcagcagagcaccaggccatcgagagcagccaggccagtgtggagacctggaagtacaaggccaagaattccctcatgtactatccagagggtgtccctgacgaggagcagctgtttaagaagccccggcaggtggtacataagaacacgcgcttccttagggaccccttcagccaagccctgagcaggtgccagctccagcaggcagccgccctcaatgcccagcacaaacagggcaaggtgggccccgatggcaaggagctgatcccccaggagtcccctcgagtgggtggatttggatttgttgccactccttcccctgcccctggtgtgaacgagtccccgatgatgacctggggggaggttgagaacacacccttgagagttgaagggtcggaaacgccctacgtggacaggacacccggcccagcttttaagatcctggagccaggccgcagggagcggctgggtctgaagatggccaacgaggccgctgccaagaaccgggccaagaagcaggaagccttgcggagagtgacggagaatctggccagcctcacccccaaaggcctgagcccagccatgtcgccagccctacagcgccttgtgagcaggacggccagcaagtacacagaccgggccctgcgggccagctacacaccatccccagcacgctccacccacctcaagaccccggccagtgggctgcagacccccacaagcacaccggcgcctggctctgccacacgcacccctctcacacaggacccggcctccatcacggacaacctgctgcagctccctgcccggcgcaaagcttcggacttcttttagagccaggcctgggctgggctcatagacgcttcacagagcctgcagggcagctgtacacccagcagaggactccagccttctcggggcccaggcctgggccagaagctgttgaccataccaggagtcactggagaaaggggctgtgctggggccagactggcacaaggcactcgtgcccacaccacaccccagggccttgccaagctgtttgctgtttaattggccccttgaactgtcattaaagaacacctaggtacagtctggggggttgcctctccatcttgctccccacacgagccctagccttgccctggggcctgcatcacgtctcaggactgcggggcttgaagcgaggggccccccaggtgaggaagctgcaggtggggcggctgtgggagcaccgggtgactggcgttgctttctgcggcactcggaacctgtgttctgagttgagctcacatcctgcagtgctttctgcttctctggggggatatgaaggagaaacggagcccttggaagttgtacccttaggttcccctgcggttctgggcccaggtctgcagcctccactctgggcttgccggctgtgaggtgcgctggttataggactgtgtgggggctgcatatcaggtgatctcagctatcaccttctcccagcacctggcttccagctcatggggtgggactatcccactcacccctctgctataggcactgcccatcttatgctgctggccctggcctcacctggtcacttccaccaacaggagctcccagataacagtgggttgctggacagatcaggctgggactcttaaggggtgggggacgtggggccttcagtgctttatcccctaggaaagggtgcacgttatcccaagggagcccccaggaagtggggagggaggggggaggagcatgtctaggtgctgaccacctggagcacttggccagcaagtgggccgcatgctttgggagcaatgggtgacccagcaggaagcacaaaagaccggccagtgtgccatcatcaagggctgctgagcagcttgaagagccactgggtggggagggcacacggggaggtctcagctggggctgcccctggaggacagggcagggaacttgagggctgaggacagaaatctcacatgactccaggaaatagaggaagaggaggatgctgagcgagggattgtgagggagtgggggtaggtcagagggggctgaactgcaggaagccagggggagtcgtggaccactggagctggccagccccagggcattggggacaaggccaggtcagagggagacagtgtgggcctggtgggtggaccctggcagaggccctcttgtcccccacaaggccaggccacactgtgattctgcctgtacctgagcatctgtcctgtgctcctaggccggagaccactgtgtgtcaggtggggcggttggctgagtcccagagaaaaacactcctcactgggcactcttgatgcttgcacacaccctgtggtttatttggtggtcagtaaggaacgtctttgctgctaagtggaagaaagctaatggaacgtaatcaaaatagtggtttaattgacgaattttacttgcacctgtgccttcttcagatcctacctgcctacttagtttacgtgaaggccgactgcaccatgccccccaaccccgacccccaccacacacaacggggccattgtcatgctaggtgcttgctttccccacctcagctccggagatgtgatggtctttggccctggaggtctcggccagcctgtcctccatcctgttctcgttctcgggcaccaccagcagccggtgctgggttttggctccaagcttgtggtcgggccggtggtcgggcctcaagcctgtcttggtgtccagtttgcactcagcgcggtacttgccctccccctccctcttgaaggaggcagaagacgtggctttgggcttggggggctgcagccacgagtggctgaggatctcatcgatgtggagccgctggctgacgtcgggctgcagcatgcggtagatgaggtccttgcactcgcaggtcaggttcttggagcgcgggaagtccacacggtgctccttctggatacgcagcatcttcctgatgtcggagtcgtcatagggcatggagccgcagaccatgatgtacaggatcacgcccaggctccagatgtcatacaccttgggctggtaggggatgctctgcagcacctcgggggctgcatatgctgccgacccgcagaaggtcttgctgaggatgatgcgcccattgctgtcccgcaggcagcgcttggagaagccaaagtcagacagcttgatgttgaagtccttgtcgaggagaaggttctcgcacttgaggtcccggtggacgatgtccaggtcgtggcagtacttgacggcggaggagagctgtcggaacatcttgcgtgccacgtcctcatgcagggctccctggcacttgatgaactcgaggaggtcgccctggacgccaagctccatgatgatgtagatccgtccgtcagaggtctcaaagatctcgtaagtcttgatgatggagccgtggttgacagttgccaggatgtccatctcccgaggaaggaatctctccacaaagtcagtaggtgttttcttgcggtcgatgatcttgacagccacattgaacttgaggcgctcagagtaggcagatttgacttttgcgtaggaacccttgccaagattgatgcctacgatgtaacccttcttccttaggactgtggcatcgtccatggtgccaggagcgactggcgccgctgccgtctacatccccccgtcatgtgggccagcaggcattgtcctcatttacactaccggaggcgtctggctgggctgccctgggctgggcttcgactcaggggtggaacactcagcattgtctccgggtgacttcagccaatgaactcataaagccaaggagtgggggcggggactgggctgagggagaacagggtctctggaaccgtggaagccaggctggtctggcaggagcacccactccccgcccgctggaaggaagcctgtccccaggacaggactctggtggccctgctgctgctgcattggtttccctgtcacaagtcaagctggaggggaggcggcccacgtccagcctgtttgcatcacctggctgtggggactgaccctgcattggtctttgtcccactagggtgggtttcctgcagcttctttggctatgaagaaaagcacccccagggctgtgtccttggtgtggtaggacagttgtccctgacagtcacccagacaggcctgcatagcaccccagttacacagacagatttccacagcactgccttaccattgagcacatagttaaatctagggaaatcagtgcccagacatcaaagctagaaatgaaacatggtcagcaggagccttgcatgggcttctcttttgctggagcaagccaaaataataggaacggttttacattcctagtgccaggacccatctcgggtcgacaaaatctgaagacaagttaagggaacaggcagctgtttgaatagatcaattggatagtctaaggcagctctctggaccaagctgtaaaggagatacaatcgaaataatcactccggtaccacagtagacaggccttgaaggcactgggccccttttaatcggacttagcaagcattttttttgcctctgaccttctccttggaacaaaattagttaccagtagacttaggtgattgctgtactgcatgtaggcacataaccccaacctatataaacagtaagaaaattgtagcactttgagttggtctgctggaattatctccagccttctccctgtatccagttacagtgataaactcccttctttcctaaaaaaaaaaaaaaaaaaaaa

SEQ ID NO: 1974 - protein, 476 aa, Homo sapiens
METPGASASSLLLPAASRPPRKREAGEAGAATSKQRVLDEEEYIEGLQTVIQRDFFPDVEKLQAQKEYLEAEENGDLERMRQIAIKFGSALGKMSREPPPPYVTPATFETPEVHAGTGVVGNKPRPRGRGLEDGEAGEEEEKEPLPSLDVFLSRYTSEDNASFQEIMEVAKERSRARHAWLYQAEEEFEKRQKDNLELPSAEHQAIESSQASVETWKYKAKNSLMYYPEGVPDEEQLFKKPRQVVHKNTRFLRDPFSQALSRCQLQQAAALNAQHKQGKVGPDGKELIPQESPRVGGFGFVATPSPAPGVNESPMMTWGEVENTPLRVEGSETPYVDRTPGPAFKILEPGRRERLGLKMANEAAAKNRAKKQEALRRVTENLASLTPKGLSPAMSPALQRLVSRTASKYTDRALRASYTPSPARSTHLKTPASGLQTPTSTPAPGSATRTPLTQDPASITDNLLQLPARRKASDFF

SEQ ID NO: 1975 - DNA, 618 bp, Homo sapiens
atggcggcagcggctgggggcgcggcgagccgccggggtgccgggcggccctgccccttctccatcgagcacatcctctccagcctgcccgagcggagcctcccggcccgggccgcctgcccaccgcagcccgccggtcgccagagccccgcgaagccagaggagcccggggcgcccgaggctgcgccctgcgcctgctgctgctgctgcggcccccgcgcggcgccctgcgggcccccagaggcggccgccgggctgggcgctcgtctggcgtggccgctgaggctgggaccggcggtgcccttgtctctgggtgcgccagccggaggttccggggcgctcccgggcgcggtcggcccgggttcgcagcggcgcacgaggcgccaccgcaccatcttcagcgaagagcagctgcaggcgctcgaggcgcttttcgtgcagaaccagtatcctgacgtgagtacgcgcgagcgcctggccggccgcatccgccttcgcgaggagcgcgtggaggtctggttcaagaaccgccgggccaaatggcgacaccagaagcgcgcgtcggcttccgcgaggctcctgcccggcgtcaagaagtccccgaaggggagctgctga

SEQ ID NO: 1976 - protein, 205 aa, Homo sapiens
MAAAAGGAASRRGAGRPCPFSIEHILSSLPERSLPARAACPPQPAGRQSPAKPEEPGAPEAAPCACCCCCGPRAAPCGPPEAAAGLGARLAWPLRLGPAVPLSLGAPAGGSGALPGAVGPGSQRRTRRHRTIFSEEQLQALEALFVQNQYPDVSTRERLAGRIRLREERVEVWFKNRRAKWRHQKRASASARLLPGVKKSPKGSC

SEQ ID NO: 1977 - DNA, 4175 bp, Homo sapiens
gcgcgcgggcagctcacttccgcccggcaggtgacagccgcggggctccgagccgccggcagcccggacgcaccgggagagcgagaggtggaggccgcggacattttggtgccaagccgaaccgagccggggcgccgggagctattgggacctgcggaagcctggctacagataagggaccaaaatgactgactcaaaatatttcaccacgaccaagaaaggggagatcttcgagctgaaggcagagctcaacagtgacaagaaggagaagaagaaggaggcagtgaagaaagtgattgcatcgatgaccgtgggcaaagatgtcagtgccctcttccccgatgtggtcaactgcatgcagacggacaacctggagctgaagaagctagtatacctctacttgatgaattacgccaagagtcagcctgacatggccattatggccgtcaacacctttgtgaaggactgtgaggaccccaaccccctcatccgagccctggcagtgcggaccatgggctgcatccgcgttgacaagatcacagagtacctgtgcgagccactccggaagtgcctgaaggacgaggatccatatgtgcgcaagacagcagctgtgtgcgtggccaagctccacgacatcaacgcccagctggtggaggaccagggcttcctggacacccttaaagacctcatctccgactctaaccccatggtggtggccaatgcagtggcagcgctctcagaaattgccgagtctcaccccagcagcaacctgctcgatctgaacccacagtccatcaacaagctgctgacagccctcaatgagtgcaccgagtggggccagatcttcatcctggactgcctcgccaactatatgcccaaggacgaccgcgaggcccagagcatctgtgagcgggtcacccccaggctctcccatgccaactccgctgtggtgctctctgctgtgaaggtgctgatgaagttcatggagatgttgtctaaggacttggactactacggcacactgctcaagaagctggccccacccctggtcacactgctgtcagccgagccagagctgcagtatgtggccctgcgcaacatcaatctcatcgtgcagaaaaggcctgagatcctgaagcatgagatgaaggtgttcttcgtgaagtacaacgaccctatctacgtgaagctggagaagctggacatcatgatccgcctggcctctcaggccaacatcgcccaggtgttggcagagctgaaagagtacgcaacagaagtggatgtggactttgtacggaaggctgtgcgtgctattggccgctgcgccatcaaggtggagcaatctgcggagcgctgtgtgagcacgctgctcgacctcatccagaccaaggtcaactatgtggtccaggaggccatcgtggtcatcaaggacatcttccgcaagtaccccaacaagtatgagagtgtgattgccacactgtgtgagaatctggactccctggatgagcctgaggcccgggctgccatgatctggattgtgggcgagtacgcggaacggatcgacaacgcagatgagctgctggagagcttcctcgagggcttccatgacgagagcacacaggtccagctgcagctgctgacagccattgtgaaactctttctaaagaagccaacagagacccaggagctggtgcagcaggtcctcagtttggccactcaggactcagataacccagacctgcgggaccgtggctacatctactggcgcctgctgtccacggacccggtggcagccaaggaggtggtgttggctgagaagccactcatctctgaagagacggacctcatcgagcccacactgttagacgagcttatctgctacatcggcacgctggcttccgtctaccataagcctcccagtgcctttgtggaggggggccggggcgtcgtgcacaagagcctgccacctcgcacggcctcgagtgagagcgcagagagccctgagacagcccctactggagcacctcctggggagcagccagatgtcatccccgcccagggcgacctgctgggtgacctcctcaacctggacctcggccccccagtgagcggcccacccctggccacctcctcggtgcagatgggagctgtggaccttcttggcggtggccttgacagcctgatgggggatgagcctgaagggattgggggcaccaacttcgtggcacctccaacagcagcagtaccagccaatcttggagcacccatcggcagtggcctgagtgacctctttgacctgaccagtggcgtgggcaccctgtcaggatcatatgtggcccccaaagcagtctggctcccagccatgaaggctaaggggctggagatctcaggcaccttcacccgccaggtgggctccatctccatggacctgcagctgaccaacaaggccttgcaggtcatgaccgactttgccatccagttcaaccgcaacagctttggcctggcccccgccacccccctccaggtccacgcgccactcagccccaaccagacagtggagatctccctgcctctcagcacggtgggctcggtcatgaagatggagcctctgaacaacctccaggtggccgtgaagaacaacatcgatgtcttctacttcagcaccttgtacccactgcacatcctctttgtggaggacgggaagatggaccggcagatgttcctggccacatggaaggatattcccaatgagaatgaggcccagttccagatcagagactgccccctcaatgcagaggctgcgagcagcaagctgcagagcagcaacatcttcactgtcgccaagaggaacgtggagggccaggacatgctctaccagtccctgaagctgaccaacggcatctgggtgctggcggagctgcggatccagccgggcaaccccagctgcacggacttagagctgtccctgaagtgtcgagcaccagaggtgtcccagcacgtgtaccaggcctacgagaccatcctcaagaactgagaccccggccagcgcccaccccagccttctgcccgccccatcgaggaggcccctcgggggcagcacatcttcctcctcgcaggagggaccaggcggggctccaggccactcagtgggctccctggtcctgatggcagaacccacccgatccctggggtagggcaccaccccctcctggggtgagagcgcagtgcactcccgtgctctgggacacccctgctcctgtggctgtgatgtggggttaagtgaggtggggaccaaaggaaacagagccagagcagccacagaagctgtgcctgaagggtgagtgtggagcttgcccctccggctcacagccccggcagcccctggctccttggtctctccggttggtgttaaagggccctccactgccacctctcatgggatggaccctgccaacctggcctgggtgtgcagggaggggttccccttggtaccaggagagctgctcacttagggcctggggctcaaggagctgtaggtgccggcagaggggcagagctaggctgggaggagcccagggcctgcaccacccacttgcaaccaccaggctggtgccctgcagctgtgccagttgggccacagcctcccgagtgctgacccacatggtcaagaccaggcagaagctcccagagcccctgtctcgggctccccaccgactggcagctgcactatccccaactccccacttctgccccaagggtggtcactgcctgtgatacattcctcagtgtcgcctctgagcccaggcctcctgccacaaagactgggccgagagatggggctgggtaagcgggtgcgcctcctgtttgggtttcttcggggtttctctgtagtgtctgctgccctcctcctggcctcccaggtttcagttgtgtctgacagagcattaggttttcctgttactgctgtgtaataataaagaaagattcggcttttggcaatcacggacacttttttcccctccaccgaatgtcaggattgaaagctgcctccgagtggttggggatggttttctgaccctacggtaactagatctaatatatatcatcagaaaatatatattgtatgtttactcttattttcagaaagagaaaatgaataaaaatgatgacatcaa

SEQ ID NO: 1978 - protein, 949 aa, Homo sapiens
MTDSKYFTTTKKGEIFELKAELNSDKKEKKKEAVKKVIASMTVGKDVSALFPDVVNCMQTDNLELKKLVYLYLMNYAKSQPDMAIMAVNTFVKDCEDPNPLIRALAVRTMGCIRVDKITEYLCEPLRKCLKDEDPYVRKTAAVCVAKLHDINAQLVEDQGFLDTLKDLISDSNPMVVANAVAALSEIAESHPSSNLLDLNPQSINKLLTALNECTEWGQIFILDCLANYMPKDDREAQSICERVTPRLSHANSAVVLSAVKVLMKFMEMLSKDLDYYGTLLKKLAPPLVTLLSAEPELQYVALRNINLIVQKRPEILKHEMKVFFVKYNDPIYVKLEKLDIMIRLASQANIAQVLAELKEYATEVDVDFVRKAVRAIGRCAIKVEQSAERCVSTLLDLIQTKVNYVVQEAIVVIKDIFRKYPNKYESVIATLCENLDSLDEPEARAAMIWIVGEYAERIDNADELLESFLEGFHDESTQVQLQLLTAIVKLFLKKPTETQELVQQVLSLATQDSDNPDLRDRGYIYWRLLSTDPVAAKEVVLAEKPLISEETDLIEPTLLDELICYIGTLASVYHKPPSAFVEGGRGVVHKSLPPRTASSESAESPETAPTGAPPGEQPDVIPAQGDLLGDLLNLDLGPPVSGPPLATSSVQMGAVDLLGGGLDSLMGDEPEGIGGTNFVAPPTAAVPANLGAPIGSGLSDLFDLTSGVGTLSGSYVAPKAVWLPAMKAKGLEISGTFTRQVGSISMDLQLTNKALQVMTDFAIQFNRNSFGLAPATPLQVHAPLSPNQTVEISLPLSTVGSVMKMEPLNNLQVAVKNNIDVFYFSTLYPLHILFVEDGKMDRQMFLATWKDIPNENEAQFQIRDCPLNAEAASSKLQSSNIFTVAKRNVEGQDMLYQSLKLTNGIWVLAELRIQPGNPSCTDLELSLKCRAPEVSQHVYQAYETILKN

SEQ ID NO: 1979 - DNA, 4154 bp, Homo sapiens
gcgcgcgggcagctcacttccgcccggcaggtgacagccgcggggctccgagccgccggcagcccggacgcaccgggagagcgagaggtggaggccgcggacattttggtgccaagccgaaccgagccggggcgccgggagctattgggacctgcggaagcctggctacagataagggaccaaaatgactgactcaaaatatttcaccacgaccaagaaaggggagatcttcgagctgaaggcagagctcaacagtgacaagaaggagaagaagaaggaggcagtgaagaaagtgattgcatcgatgaccgtgggcaaagatgtcagtgccctcttccccgatgtggtcaactgcatgcagacggacaacctggagctgaagaagctagtatacctctacttgatgaattacgccaagagtcagcctgacatggccattatggccgtcaacacctttgtgaaggactgtgaggaccccaaccccctcatccgagccctggcagtgcggaccatgggctgcatccgcgttgacaagatcacagagtacctgtgcgagccactccggaagtgcctgaaggacgaggatccatatgtgcgcaagacagcagctgtgtgcgtggccaagctccacgacatcaacgcccagctggtggaggaccagggcttcctggacacccttaaagacctcatctccgactctaaccccatggtggtggccaatgcagtggcagcgctctcagaaattgccgagtctcaccccagcagcaacctgctcgatctgaacccacagtccatcaacaagctgctgacagccctcaatgagtgcaccgagtggggccagatcttcatcctggactgcctcgccaactatatgcccaaggacgaccgcgaggcccagagcatctgtgagcgggtcacccccaggctctcccatgccaactccgctgtggtgctctctgctgtgaaggtgctgatgaagttcatggagatgttgtctaaggacttggactactacggcacactgctcaagaagctggccccacccctggtcacactgctgtcagccgagccagagctgcagtatgtggccctgcgcaacatcaatctcatcgtgcagaaaaggcctgagatcctgaagcatgagatgaaggtgttcttcgtgaagtacaacgaccctatctacgtgaagctggagaagctggacatcatgatccgcctggcctctcaggccaacatcgcccaggtgttggcagagctgaaagagtacgcaacagaagtggatgtggactttgtacggaaggctgtgcgtgctattggccgctgcgccatcaaggtggagcaatctgcggagcgctgtgtgagcacgctgctcgacctcatccagaccaaggtcaactatgtggtccaggaggccatcgtggtcatcaaggacatcttccgcaagtaccccaacaagtatgagagtgtgattgccacactgtgtgagaatctggactccctggatgagcctgaggcccgggctgccatgatctggattgtgggcgagtacgcggaacggatcgacaacgcagatgagctgctggagagcttcctcgagggcttccatgacgagagcacacaggtccagctgcagctgctgacagccattgtgaaactctttctaaagaagccaacagagacccaggagctggtgcagcaggtcctcagtttggccactcaggactcagataacccagacctgcgggaccgtggctacatctactggcgcctgctgtccacggacccggtggcagccaaggaggtggtgttggctgagaagccactcatctctgaagagacggacctcatcgagcccacactgttagacgagcttatctgctacatcggcacgctggcttccgtctaccataagcctcccagtgcctttgtggaggggggccggggcgtcgtgcacaagagcctgccacctcgcacggcctcgagtgagagcgcagagagccctgagacagcccctactggagcacctcctggggagcagccagatgtcatccccgcccagggcgacctgctgggtgacctcctcaacctggacctcggccccccagtgagcggcccacccctggccacctcctcggtgcagatgggagctgtggaccttcttggcggtggccttgacagcctgattgggggcaccaacttcgtggcacctccaacagcagcagtaccagccaatcttggagcacccatcggcagtggcctgagtgacctctttgacctgaccagtggcgtgggcaccctgtcaggatcatatgtggcccccaaagcagtctggctcccagccatgaaggctaaggggctggagatctcaggcaccttcacccgccaggtgggctccatctccatggacctgcagctgaccaacaaggccttgcaggtcatgaccgactttgccatccagttcaaccgcaacagctttggcctggcccccgccacccccctccaggtccacgcgccactcagccccaaccagacagtggagatctccctgcctctcagcacggtgggctcggtcatgaagatggagcctctgaacaacctccaggtggccgtgaagaacaacatcgatgtcttctacttcagcaccttgtacccactgcacatcctctttgtggaggacgggaagatggaccggcagatgttcctggccacatggaaggatattcccaatgagaatgaggcccagttccagatcagagactgccccctcaatgcagaggctgcgagcagcaagctgcagagcagcaacatcttcactgtcgccaagaggaacgtggagggccaggacatgctctaccagtccctgaagctgaccaacggcatctgggtgctggcggagctgcggatccagccgggcaaccccagctgcacggacttagagctgtccctgaagtgtcgagcaccagaggtgtcccagcacgtgtaccaggcctacgagaccatcctcaagaactgagaccccggccagcgcccaccccagccttctgcccgccccatcgaggaggcccctcgggggcagcacatcttcctcctcgcaggagggaccaggcggggctccaggccactcagtgggctccctggtcctgatggcagaacccacccgatccctggggtagggcaccaccccctcctggggtgagagcgcagtgcactcccgtgctctgggacacccctgctcctgtggctgtgatgtggggttaagtgaggtggggaccaaaggaaacagagccagagcagccacagaagctgtgcctgaagggtgagtgtggagcttgcccctccggctcacagccccggcagcccctggctccttggtctctccggttggtgttaaagggccctccactgccacctctcatgggatggaccctgccaacctggcctgggtgtgcagggaggggttccccttggtaccaggagagctgctcacttagggcctggggctcaaggagctgtaggtgccggcagaggggcagagctaggctgggaggagcccagggcctgcaccacccacttgcaaccaccaggctggtgccctgcagctgtgccagttgggccacagcctcccgagtgctgacccacatggtcaagaccaggcagaagctcccagagcccctgtctcgggctccccaccgactggcagctgcactatccccaactccccacttctgccccaagggtggtcactgcctgtgatacattcctcagtgtcgcctctgagcccaggcctcctgccacaaagactgggccgagagatggggctgggtaagcgggtgcgcctcctgtttgggtttcttcggggtttctctgtagtgtctgctgccctcctcctggcctcccaggtttcagttgtgtctgacagagcattaggttttcctgttactgctgtgtaataataaagaaagattcggcttttggcaatcacggacacttttttcccctccaccgaatgtcaggattgaaagctgcctccgagtggttggggatggttttctgaccctacggtaactagatctaatatatatcatcagaaaatatatattgtatgtttactcttattttcagaaagagaaaatgaataaaaatgatgacatcaa

SEQ ID NO: 1980 - protein, 942 aa, Homo sapiens
MTDSKYFTTTKKGEIFELKAELNSDKKEKKKEAVKKVIASMTVGKDVSALFPDVVNCMQTDNLELKKLVYLYLMNYAKSQPDMAIMAVNTFVKDCEDPNPLIRALAVRTMGCIRVDKITEYLCEPLRKCLKDEDPYVRKTAAVCVAKLHDINAQLVEDQGFLDTLKDLISDSNPMVVANAVAALSEIAESHPSSNLLDLNPQSINKLLTALNECTEWGQIFILDCLANYMPKDDREAQSICERVTPRLSHANSAVVLSAVKVLMKFMEMLSKDLDYYGTLLKKLAPPLVTLLSAEPELQYVALRNINLIVQKRPEILKHEMKVFFVKYNDPIYVKLEKLDIMIRLASQANIAQVLAELKEYATEVDVDFVRKAVRAIGRCAIKVEQSAERCVSTLLDLIQTKVNYVVQEAIVVIKDIFRKYPNKYESVIATLCENLDSLDEPEARAAMIWIVGEYAERIDNADELLESFLEGFHDESTQVQLQLLTAIVKLFLKKPTETQELVQQVLSLATQDSDNPDLRDRGYIYWRLLSTDPVAAKEVVLAEKPLISEETDLIEPTLLDELICYIGTLASVYHKPPSAFVEGGRGVVHKSLPPRTASSESAESPETAPTGAPPGEQPDVIPAQGDLLGDLLNLDLGPPVSGPPLATSSVQMGAVDLLGGGLDSLIGGTNFVAPPTAAVPANLGAPIGSGLSDLFDLTSGVGTLSGSYVAPKAVWLPAMKAKGLEISGTFTRQVGSISMDLQLTNKALQVMTDFAIQFNRNSFGLAPATPLQVHAPLSPNQTVEISLPLSTVGSVMKMEPLNNLQVAVKNNIDVFYFSTLYPLHILFVEDGKMDRQMFLATWKDIPNENEAQFQIRDCPLNAEAASSKLQSSNIFTVAKRNVEGQDMLYQSLKLTNGIWVLAELRIQPGNPSCTDLELSLKCRAPEVSQHVYQAYETILKN

SEQ ID NO: 1981 - DNA, 5112 bp, Homo sapiens
tgggggcttatttggcctccccaggatggactggagcatcagtagtgcccgggtttatcacaggacagatactcaagacactcttatcaccattaggtggacttggaggagcaaaaaacaagtgcagtggctcctcagcagagacactcctgaatgtatagacatgggaaccaccttcagcatcaaaaaaggaaacgttctgcatgcccatatccagaaaaatccccactcgctgtaacttgcggtctacgaagaggaaagtcagcggcaccgtgctggcagagaggcggcttccatccctcaaactcacagtccagaatccacgctctgtggtcagatggatcctccctttgcggtgaacagattctctgcagactcccaggtcccattctgtgcttgttcccacgtccacctcccagtagtggcggccacaggtaaagcgaggggagcccaggatgcaaatggacacgtcaaatctctcggcaaggtcttgccgattctgtgtgatgcacccacttcggacgctcctgaggtcgtcagaaatgaggaggaagttgttggctgtgtcggcatccaaggtcatatccactgtgaaaaggaaaaaaagttgatcagaaaatggacagaagccaaccccatgcctctcctctacttcaaaggcccaaatatctcttgactttggtttctttaattctcttcttcccccaaaatcaaaacttttcatgaggcaacttccctgactagttcaaattctcataggtatgctttgtggcaatacccaactcttattcacagtagcaattattttactttatgtcacgtgtttgcttcattggacttttcttcatttagagtggagggtctctgaaggcagacaccatgaccccctttctaccaccttgatgcatgaaaaaatgaatgataattaagacaatgcaaatggtcgatgttaaatatgtttctgcttccatcttgtattgctcaactcagtatatagagcatgattccaggcctttgttttccatgtttgtaagcaaattaattgtgcatggttctgacagcaggtagggtatctctgcagctgacaatgtgatgacagaggtgccggtcctggacattaggaggctccaaggccaggaggaagaggggggccttagatgaaagaatgttttccatcctacatgggaggtgaaaccttaagcaaaacaatggtaaattttggagtgaagagaaaggtatttgaaagttgtttgttggctgagcgcggtggctcacacctgtaatcccagcactttgggaggccgagacgggtggatcacgaggtcaggagatcgagaccatcctggctaacacgtgaaaccctgtctctactaaaaaacatacaaaaaaattagccggacatggtggcgggtgcctgtagtcctagctacttggtagactgaggcaggagaatggcatgaacccaggaggcggagcttgcaatgagcagagatcatgccactgcacctccagcctaggcggcagagcgagactccatctcaaaaaataaaaaaaaaaagaaagttgttcgtcataactgactgatcgtagagaataagggcagtaaatacaaaggtcaataatttaatgcattgggtatgtggttgataggtgaagctgccaattctcatggaggaggcagtgtgatctggcctaaagaaaattaattgtccagagcattctgaaaaaaaaatctacagaacatatgatccttcaagtcaaaaaactgatgatcaccaatatagattttatagattacagtaagacttgaggagactgattgctgtttgatggtgaattagggaatgaaatgagatgagtggacatggacaaggaaggaggaagagggttccaaacatgacttaggcagggtgaatctgtcctccatatttcagcagagacacagtcaggtatgggtaggtggatgagtagagatcatgggtgtcagggcagaagccaccaccatttataggtgtaattctttgcccaggctgaccataacctcttcatttaaatgtccctattccccagagttatggagagtgatagtatttcctgtagccaggacccctgttgaagtccatggcacaccgatgaggagaccagcgtctgcaactcgccccactcacagaaacaaacaccataggtgctccattccaaactcttcccaaccctggggtgaggttgtttggtacagtgggtgccaatactcactgtgcattagaattaccaggcccatttaaatgtcagagtcctgggaacctttgctagagagaaattcaaattaagttgctctgtgtttttgctactcagcaaagtccccaagccagcgggatcaatcctgagacttcccagttcagcatctgcattttaacaagatccccaggtaatctgagcacactaagtttagagaatcccttgtctaacccatgacatagacatcaggtttttttttttgagacggagtctcactctgtcacccaggctggagtgcagtggtgcaatcttggctcactgcaagctccgccccccccaggttaacgccattctcctgcctcaacccccaagtagctgggactacaggcacccaccaccaagcctggctaattttttgtatttttagtagagacagggtttcaccgtgttatccaggatggtcccgatctcctgacctcgtgatccacccgcctcggcctcccaaagtgctgacattacaggcatgagccaccatgcccagccagccttttttttggagatcaccaggtgattctgtatgttgtcagggctgagaatctgatgatgaagaagcatctcaattttaggtgccagacagcagctaatccccatatggaatgaggggccagttgcacagatgatttttcctggtctggtcgtaggaagggggcagtgtatacagatccctcaccttggaacttccgcatccttgggttcatctgcagaatcttcttcagcttgggctccagttccttgatgtgggaagccagcctctctagctgccaactgggcctgattttgttcttctgagagaccatggaacagcaacagcaaagtagatcctccccatggggctccttctgcagtgaattgatgcacttgaagcagacagcgcatccacactccagggacattggtttctctagatagtctgagcagacgggacagctgcttgcttcttggaagagtgcagccatgtccactgccaggggaaaagtgcacaagggaagaaaatttccgtgaggtgaaagcctgttagttgtgacaagtgacaaccttttcatgcataaaggtattgcgtcccagctttgtcacttctagaacaagaccatgagtacaaacactcaagcacatccccccaccccccgtcttcagagatttgaagttctattgggaaagaaagtcacgaatcatcactgtgctctgaactgaggtggaggaagggtccattctactggtgacccagcaactgagcctgagccagtgacacggcagcacccatgtgaggaacagcgagctggggtcatttcacctcctcctaggggaaccccagcaagagattgattgatgaacataagaattaggggctgggaggccgggcgtggtggctcaggcctataatcccagcactttgggaggctgacgtgagtggatcatctgaggtcgtcaaaagttcgagaccagcctgatgggtgaaaccccatctctactgaaaatacaaaagaattagccaggcgtggtggcacacgcctgtaatcccagatacttgggaggctgaggcaggagaattgcttgaacctgggaggcaaaggttgcagtgagccaagatccagccattgcactccggcctggacaacagagtgagacaccatctcaaaaaaaaaaaaaaaaaaaaagagagggactggatgcagtagctcacatctgtaatcccagcactttgcgaggccaaggctggaagatcccttgagccaaggatttgagatcagcctgggcaacacaggaagaccccctctctacaaataatagaaaaattagcagtgagcagagatcacaccaggtcactccaacctggacaacagagttaagaccctgtctcaccaaaaaaaaaaaaaaaaaaatcacatccttctccagccttggaaatgaataccaaattgactgccaccactcctagactggagatctggggatccagggtgactggttttcaactctgaggcagcactcagacagcctttgttgaattcattaattacgaatttctctcattcatcccccaaggcataacccccatttctaggcatctaaggaggaaaaacacacacacaggcatgggctcacctcttctgctggaagctcctctgtcctccagctgcttccactgggcgctcaggtcttgtgcggaaggggcacatgagggcgttttattggtgagattcccacctcccactgggtcatgcccttccacaccctctaacctaatgaggctttgatttaattataacagggaattaggtttttactggtgatatatctccagttaattgtaactttagtaaatccttcatcctgacagtgtatttttctttcatatgaagataagattaaattgcctttatattaaattaggcttaatgtactaacttcaaaagcttattttagagatgtttccatcagttgtcagtaaagataattcctgtaatatgttgtaggcttcaagctttgcttggaaacctgaagtattaagtatgattggatttgcaattttacaaaatggtttaaattcatatacatcagactcaaaggtaataggggcatgcattccattgaggaaattctagggaatttttatttattttcattggtttatttctggttttgaaaaaatttcataattcataggaaaaaattggataattactattttgacaaatgaccattaagcttcttggaccttgagtacttcacacagtgttaagataaaagtcacaatttaaaaaaaaaagatgattttcttgtgaaacttgtgttctcaaataaaaattgttacccgtg

SEQ ID NO: 1982 - DNA, 1496 bp, Homo sapiens
gccgtgtcactggctcaggctcagttgctgggtcaccagtagaatggacccttcctccacctcagttcagagcacagtgatgattcgtgactttctttcccaatagaacttcaaatctctgaagacggggggtggggggatgtgcttgagtgtttgtactcatggtcttgttctagaagtgacaaagctgggacacaatacctttatgcatgaaaaggttgtcacttgtcacaactaacaggctttcacctcacggaaattttcttcccttgtgcacttttcccctggcagtggacatggctgcactcttccaagaagcaagcagctgtcccgtctgctcagactatctagagaaaccaatgtccctggagtgtggatgcgctgtctgcttcaagtgcatcaattcactgcagaaggagccccatggggaggatctactttgctgttgctgttccatggtctctcagaagaacaaaatcaggcccagttggcagctagagaggctggcttcccacatcaaggaactggagcccaagctgaagaagattctgcagatgaacccaaggatgcggaagttccaagtggatatgaccttggatgccgacacagccaacaacttcctcctcatttctgacgacctcaggagcgtccgaagtgggtgcatcacacagaatcggcaagaccttgccgagagatttgacgtgtccatttgcatcctgggctcccctcgctttacctgtggccgccactactgggaggtggacgtgggaacaagcacagaatgggacctgggagtctgcagagaatctgttcaccgcaaagggaggatccatctgaccacagagcgtggattctggactgtgagtttgagggatggaagccgcctctctgccagcacggtgccgctgactttcctcttcgtagaccgcaagttacagcgagtggggatttttctggatatgggcatgcagaacgtttccttttttgatgctgaaggtggttcccatgtctatacattcaggagtgtctctgctgaggagccactgcacttgttttttgctcctccaagtccacctaatggtgataagagtgtcttgagtatctgtcctgtgataaacccgggcactactgatgctccagtccatcctggggaggccaaataagcccccactgcaaaaaaacaaaaaacaggttaagaaaattacttgggtgggcagacttaggaacgctctactcggtaaaagcgttatacaaagtcataggagaaaaatatgggacaattcatgattatacttaatctaatttgattagtttataaattgagtcctaagtattaattattgccaccatccaactcattgagtcttatggttcacatcttgtttcctatagaaatattctgtattctgggatcaatttccaaatgcttttttatttctgtaagttcaaattaatgtattatagaagttatgagttaaataaacattggaatatca

SEQ ID NO: 1983 - protein, 317 aa, Homo sapiens
MKRLSLVTTNRLSPHGNFLPLCTFPLAVDMAALFQEASSCPVCSDYLEKPMSLECGCAVCFKCINSLQKEPHGEDLLCCCCSMVSQKNKIRPSWQLERLASHIKELEPKLKKILQMNPRMRKFQVDMTLDADTANNFLLISDDLRSVRSGCITQNRQDLAERFDVSICILGSPRFTCGRHYWEVDVGTSTEWDLGVCRESVHRKGRIHLTTERGFWTVSLRDGSRLSASTVPLTFLFVDRKLQRVGIFLDMGMQNVSFFDAEGGSHVYTFRSVSAEEPLHLFFAPPSPPNGDKSVLSICPVINPGTTDAPVHPGEAK

SEQ ID NO: 1984 - DNA, 3695 bp, Homo sapiens
gccccgtcccggcctcgcgcacctgctcaggccatgatgagcttcggcggcgcggacgcgctgctgggcgccccgttcgcgccgctgcatggcggcggcagcctccactacgcgctagcccgaaagggtggcgcaggcgggacgcgctccgccgctggctcctccagcggcttccactcgtggacacggacgtccgtgagctccgtgtccgcctcgcccagccgcttccgtggcgcaggcgccgcctcaagcaccgactcgctggacacgctgagcaacgggccggagggctgcatggtggcggtggccacctcacgcagtgagaaggagcagctgcaggcgctgaacgaccgcttcgccgggtacatcgacaaggtgcggcagctggaggcgcacaaccgcagcctggagggcgaggctgcggcgctgcggcagcagcaggcgggccgctccgctatgggcgagctgtacgagcgcgaggtccgcgagatgcgcggcgcggtgctgcgcctgggcgcggcgcgcggtcagctacgcctggagcaggagcacctgctcgaggacatcgcgcacgtgcgccagcgcctagacgacgaggcccggcagcgagaggaggccgaggcggcggcccgcgcgctggcgcgcttcgcgcaggaggccgaggcggcgcgcgtggacctgcagaagaaggcgcaggcgctgcaggaggagtgcggctacctgcggcgccaccaccaggaagaggtgggcgagctgctcggccagatccagggctccggcgccgcgcaggcgcagatgcaggccgagacgcgcgacgccctgaagtgcgacgtgacgtcggcgctgcgcgagattcgcgcgcagcttgaaggccacgcggtgcagagcacgctgcagtccgaggagtggttccgagtgaggctggaccgactgtcggaggcagccaaggtgaacacagacgctatgcgctcagcgcaggaggagataactgagtaccggcgtcagctgcaggccaggaccacagagctggaggcactgaaaagcaccaaggactcactggagaggcagcgctctgagctggaggaccgtcatcaggccgacattgcctcctaccaggaagccattcagcagctggacgctgagctgaggaacaccaagtgggagatggccgcccagctgcgagaataccaggacctgctcaatgtcaagatggctctggatatagagatagccgcttacagaaaactcctggaaggtgaagagtgtcggattggctttggcccaattcctttctcgcttccagaaggactccccaaaattccctctgtgtccactcacataaaggtgaaaagcgaagagaagatcaaagtggtggagaagtctgagaaagaaactgtgattgtggaggaacagacagaggagacccaagtgactgaagaagtgactgaagaagaggagaaagaggccaaagaggaggagggcaaggaggaagaagggggtgaagaagaggaggcagaagggggagaagaagaaacaaagtctcccccagcagaagaggctgcatccccagagaaggaagccaagtcaccagtaaaggaagaggcaaagtcaccggctgaggccaagtccccagagaaggaggaagcaaaatccccagccgaagtcaagtcccctgagaaggccaagtctccagcaaaggaagaggcaaagtcaccgcctgaggccaagtccccagagaaggaggaagcaaaatctccagctgaggtcaagtcccccgagaaggccaagtccccagcaaaggaagaggcaaagtcaccggctgaggccaagtctccagagaaggccaagtccccagtgaaggaagaagcaaagtcaccggctgaggccaagtccccagtgaaggaagaagcaaaatctccagctgaggtcaagtccccggaaaaggccaagtctccaacgaaggaggaagcaaagtcccctgagaaggccaagtccccagagaaggaagaggccaagtcccctgagaaggccaagtccccagtgaaggcagaagcaaagtcccctgagaaggccaagtccccagtgaaggcagaagcaaagtcccctgagaaggccaagtccccagtgaaggaagaagcaaagtcccctgagaaggccaagtccccagtgaaggaagaagcaaagtcccctgagaaggccaagtccccagtgaaggaagaagcaaagacccccgagaaggccaagtccccagtgaaggaagaagccaagtccccagagaaggccaagtccccagagaaggccaagactcttgatgtgaagtctccagaagccaagactccagcgaaggaggaagcaaggtcccctgcagacaaattccctgaaaaggccaaaagccctgtcaaggaggaggtcaagtccccagagaaggcgaaatctcccctgaaggaggatgccaaggcccctgagaaggagatcccaaaaaaggaagaggtgaagtccccagtgaaggaggaggagaagccccaggaggtgaaagtcaaagagcccccaaagaaggcagaggaagagaaagcccctgccacaccaaaaacagaggagaagaaggacagcaagaaagaggaggcacccaagaaggaggctccaaagcccaaggtggaggagaagaaggaacctgctgtcgaaaagcccaaagaatccaaagttgaagccaagaaggaagaggctgaagataagaaaaaagtccccaccccagagaaggaggctcctgccaaggtggaggtgaaggaagacgctaaacccaaagaaaagacagaggtagccaagaaggaaccagatgatgccaaggccaaggaacccagcaaaccagcagagaagaaggaggcagcaccggagaaaaaagacaccaaggaggagaaggccaagaagcctgaggagaaacccaagacagaggccaaagccaaggaagatgacaagaccctctcaaaagagcctagcaagcctaaggcagaaaaggctgaaaaatcctccagcacagaccaaaaagacagcaagcctccagagaaggccacagaagacaaggccgccaaggggaagtaaggcagggagaaaggaacatccggaacagccaaagaaactcagaagagtcccggagctcaaggatcagagtaacacaattttcactttttctgtctttatgtaagaagaaactgcttagatgacggggcctccttcttcaaacaggaatttctgttagcaatatgttagcaagagagggcactcccaggcccctgcccccaggccctccccaggcgatggacaattatgatagcttatgtagctgaatgtgatacatgccgaatgccacacgtaaacacttgactataaaaactgcccccctcctttccaaataagtgcatttattgcctctatgtgcaactgacagatgaccgcaataatgaatgagcagttagaaatacattatgcttgagatgtcttaacctattcccaaatgccttctgttttccaaaggagtggtcaagcccttgcccagagctctctattctggaagagcggtccaggtggggccggggactggccactgaattatgccagggcgcactttccactggagttcactttcaattgcttctgtgcaataaaaccaagtgcttataaaatgaaaaaaaaaaaaaaaa

SEQ ID NO: 1985 - protein, 1020 aa, Homo sapiens
MMSFGGADALLGAPFAPLHGGGSLHYALARKGGAGGTRSAAGSSSGFHSWTRTSVSSVSASPSRFRGAGAASSTDSLDTLSNGPEGCMVAVATSRSEKEQLQALNDRFAGYIDKVRQLEAHNRSLEGEAAALRQQQAGRSAMGELYEREVREMRGAVLRLGAARGQLRLEQEHLLEDIAHVRQRLDDEARQREEAEAAARALARFAQEAEAARVDLQKKAQALQEECGYLRRHHQEEVGELLGQIQGSGAAQAQMQAETRDALKCDVTSALREIRAQLEGHAVQSTLQSEEWFRVRLDRLSEAAKVNTDAMRSAQEEITEYRRQLQARTTELEALKSTKDSLERQRSELEDRHQADIASYQEAIQQLDAELRNTKWEMAAQLREYQDLLNVKMALDIEIAAYRKLLEGEECRIGFGPIPFSLPEGLPKIPSVSTHIKVKSEEKIKVVEKSEKETVIVEEQTEETQVTEEVTEEEEKEAKEEEGKEEEGGEEEEAEGGEEETKSPPAEEAASPEKEAKSPVKEEAKSPAEAKSPEKEEAKSPAEVKSPEKAKSPAKEEAKSPPEAKSPEKEEAKSPAEVKSPEKAKSPAKEEAKSPAEAKSPEKAKSPVKEEAKSPAEAKSPVKEEAKSPAEVKSPEKAKSPTKEEAKSPEKAKSPEKEEAKSPEKAKSPVKAEAKSPEKAKSPVKAEAKSPEKAKSPVKEEAKSPEKAKSPVKEEAKSPEKAKSPVKEEAKTPEKAKSPVKEEAKSPEKAKSPEKAKTLDVKSPEAKTPAKEEARSPADKFPEKAKSPVKEEVKSPEKAKSPLKEDAKAPEKEIPKKEEVKSPVKEEEKPQEVKVKEPPKKAEEEKAPATPKTEEKKDSKKEEAPKKEAPKPKVEEKKEPAVEKPKESKVEAKKEEAEDKKKVPTPEKEAPAKVEVKEDAKPKEKTEVAKKEPDDAKAKEPSKPAEKKEAAPEKKDTKEEKAKKPEEKPKTEAKAKEDDKTLSKEPSKPKAEKAEKSSSTDQKDSKPPEKATEDKAAKGK

SEQ ID NO: 1986 - DNA, 2563 bp, Homo sapiens
ctctatggtgcgcgggcaagctttgctccgcctccggcagtggcttactcccggtgccaggttcttggagctgtgaggtgttcagcattatttaagatcacctatgcatcatctgaagccacagtcccaggtcatcttcatcaccttccccagtggaatgcctcctgtgttaaagcccacaacaacccctgtggaggaacaaccatgtcatcagaatcgagcaaaaaacggaagcccaaagtgatccgaagcgatggagccccagctgaaggaaagcggaatcgatctgacaccgagcaggaaggtaaatactacagtgaggaggccgaggtggatctgcgggaccctggcagagactatgagttatacaagtacacctgccaggagctacagaggctgatggctgagatccaagacctgaagagcaggggtggcaaggatgtggcaatagaaatagaagaacggaggatccagagctgtgtgcatttcatgactctaaagaagcttaaccgattagcccacatcaggttgaagaaaggaagagatcagacccacgaggctaagcagaaagtagatgcctatcatctgcagctccagaacctgttgtatgaggtgatgcacctacagaaggagatcaccaaatgtttggagtttaagtcaaagcatgaagaaattgatctggtcagtttagaggagttttataaggaggctccaccagatatcagcaaggccgaagtcaccatgggagaccctcaccagcaaacactggcacgtctggactgggagctggagcagcggaaaaggctggcagagaagtaccgagagtgcctatctaacaaggagaagattctcaaggagattgaggtgaagaaggagtacctgagcagcctccagccccgcctcaacagcatcatgcaggcttcccttccggtgcaggagtacctgtttatgccattcgaccaggctcacaagcagtatgagacagccagacacctgccgcctcccctctatgtcctctttgttcaggccactgcgtatgggcaggcctgtgataagacgttatctgtggcaatcgaaggcagtgtggatgaagccaaggctctgttcaaacctccagaggactcccaagatgacgagagtgactcagatgccgaggaggagcagactacgaagcgccggagacccacactgggggttcagttggacgacaaacgcaaggagatgctgaagaggcacccactgtctgtcatgctcgacctgaagtgcaaagatgacagtgtgcttcacctgactttctactacctcatgaacctcaacatcatgacagtaaaagccaaagtgacaactgccatggagctgatcacccccatcagtgcaggtgacttgctgtctcctgactcagtcctgagttgcttgtatcctggggatcatggaaagaaaactccgaatccagccaatcagtatcagtttgataaagttggcatcctgactttgagcgactatgtacttgagctaggtcacccctatttgtgggtgcagaagctgggtggcctccacttccccaaagagcagccccagcaaacagtgattgctgaccactcgctgagcgccagccacatggagaccaccatgaaacttctgaagaccagggtgcagtcccgcctggccctccacaaacagtttgcatccctagaacatggcattgtgccagttaccagtgattgccagtacctcttccctgccaaggttgtctctcgcctggtgaaatgggtgacagttgcccatgaggattacatggagctgcacttcaccaaagacattgtggatgcgggactggctggggacaccaatctctactacatggcgctcatcgaaaggggcacagccaaactgcaggccgctgtggtgttgaaccctggctactcctccatcccacctgttttccagctctgtttgaactggaaaggggagaaaaccaacagcaacgatgacaacattcgggccatggagggcgaagtcaatgtgtgctacaaggagctgtgtggcccttggcccagccaccagctgttgaccaaccagctgcagcggctgtgtgtgctgctggatgtttacctggagaccgagagccatgacgacagtgtggaggggcccaaggaatttccccaggagaagatgtgtctgcggctcttcaggggtcctagcaggatgaagccatttaaatacaaccatcctcagggattcttcagccatcgctgatctcccgcgcagaccgttgtttcccccaaggcctcaccctgagcactgggcttctgctttctgctctggcccacatgtgactcttgatattctccaaagacaccagccaattaaaaagcgtcacctgaccagtggcctttgtctgtggttcctggcaaggtggctttgcagtctggaagggcaggtgggagctgtgacacagtgtgaaaaagcatttgtagagagactttttctcagcagccaataaaagcagagtggaaaaagattccaattctgcagagagatgctcaaaaaaaaaaaaaaaaaa

SEQ ID NO: 1987 - protein, 683 aa, Homo sapiens
MSSESSKKRKPKVIRSDGAPAEGKRNRSDTEQEGKYYSEEAEVDLRDPGRDYELYKYTCQELQRLMAEIQDLKSRGGKDVAIEIEERRIQSCVHFMTLKKLNRLAHIRLKKGRDQTHEAKQKVDAYHLQLQNLLYEVMHLQKEITKCLEFKSKHEEIDLVSLEEFYKEAPPDISKAEVTMGDPHQQTLARLDWELEQRKRLAEKYRECLSNKEKILKEIEVKKEYLSSLQPRLNSIMQASLPVQEYLFMPFDQAHKQYETARHLPPPLYVLFVQATAYGQACDKTLSVAIEGSVDEAKALFKPPEDSQDDESDSDAEEEQTTKRRRPTLGVQLDDKRKEMLKRHPLSVMLDLKCKDDSVLHLTFYYLMNLNIMTVKAKVTTAMELITPISAGDLLSPDSVLSCLYPGDHGKKTPNPANQYQFDKVGILTLSDYVLELGHPYLWVQKLGGLHFPKEQPQQTVIADHSLSASHMETTMKLLKTRVQSRLALHKQFASLEHGIVPVTSDCQYLFPAKVVSRLVKWVTVAHEDYMELHFTKDIVDAGLAGDTNLYYMALIERGTAKLQAAVVLNPGYSSIPPVFQLCLNWKGEKTNSNDDNIRAMEGEVNVCYKELCGPWPSHQLLTNQLQRLCVLLDVYLETESHDDSVEGPKEFPQEKMCLRLFRGPSRMKPFKYNHPQGFFSHR

SEQ ID NO: 1988 - DNA, 2694 bp, Homo sapiens
gggcagtggggctgggagatggggcggggctgggcgctccgggactgaggtgctgatcgcccaaagggcgcccctgggctggggtctgacccggcttctcctccctcactacccgcggtccccggcctctcggcgctgcgctgttacctcatccgaaaagtgttcgctgcagcatcctcaggcttcacgttggagcctcttgattgtggtgttcagcattatttaagatcacctatgcatcatctgaagccacagtcccaggtcatcttcatcaccttccccagtggaatgcctcctgtgttaaagcccacaacaacccctgtggaggaacaaccatgtcatcagaatcgagcaaaaaacggaagcccaaagtgatccgaagcgatggagccccagctgaaggaaagcggaatcgatctgacaccgagcaggaaggtaaatactacagtgaggaggccgaggtggatctgcgggaccctggcagagactatgagttatacaagtacacctgccaggagctacagaggctgatggctgagatccaagacctgaagagcaggggtggcaaggatgtggcaatagaaatagaagaacggaggatccagagctgtgtgcatttcatgactctaaagaagcttaaccgattagcccacatcaggttgaagaaaggaagagatcagacccacgaggctaagcagaaagtagatgcctatcatctgcagctccagaacctgttgtatgaggtgatgcacctacagaaggagatcaccaaatgtttggagtttaagtcaaagcatgaagaaattgatctggtcagtttagaggagttttataaggaggctccaccagatatcagcaaggccgaagtcaccatgggagaccctcaccagcaaacactggcacgtctggactgggagctggagcagcggaaaaggctggcagagaagtaccgagagtgcctatctaacaaggagaagattctcaaggagattgaggtgaagaaggagtacctgagcagcctccagccccgcctcaacagcatcatgcaggcttcccttccggtgcaggagtacctgtttatgccattcgaccaggctcacaagcagtatgagacagccagacacctgccgcctcccctctatgtcctctttgttcaggccactgcgtatgggcaggcctgtgataagacgttatctgtggcaatcgaaggcagtgtggatgaagccaaggctctgttcaaacctccagaggactcccaagatgacgagagtgactcagatgccgaggaggagcagactacgaagcgccggagacccacactgggggttcagttggacgacaaacgcaaggagatgctgaagaggcacccactgtctgtcatgctcgacctgaagtgcaaagatgacagtgtgcttcacctgactttctactacctcatgaacctcaacatcatgacagtaaaagccaaagtgacaactgccatggagctgatcacccccatcagtgcaggtgacttgctgtctcctgactcagtcctgagttgcttgtatcctggggatcatggaaagaaaactccgaatccagccaatcagtatcagtttgataaagttggcatcctgactttgagcgactatgtacttgagctaggtcacccctatttgtgggtgcagaagctgggtggcctccacttccccaaagagcagccccagcaaacagtgattgctgaccactcgctgagcgccagccacatggagaccaccatgaaacttctgaagaccagggtgcagtcccgcctggccctccacaaacagtttgcatccctagaacatggcattgtgccagttaccagtgattgccagtacctcttccctgccaaggttgtctctcgcctggtgaaatgggtgacagttgcccatgaggattacatggagctgcacttcaccaaagacattgtggatgcgggactggctggggacaccaatctctactacatggcgctcatcgaaaggggcacagccaaactgcaggccgctgtggtgttgaaccctggctactcctccatcccacctgttttccagctctgtttgaactggaaaggggagaaaaccaacagcaacgatgacaacattcgggccatggagggcgaagtcaatgtgtgctacaaggagctgtgtggcccttggcccagccaccagctgttgaccaaccagctgcagcggctgtgtgtgctgctggatgtttacctggagaccgagagccatgacgacagtgtggaggggcccaaggaatttccccaggagaagatgtgtctgcggctcttcaggggtcctagcaggatgaagccatttaaatacaaccatcctcagggattcttcagccatcgctgatctcccgcgcagaccgttgtttcccccaaggcctcaccctgagcactgggcttctgctttctgctctggcccacatgtgactcttgatattctccaaagacaccagccaattaaaaagcgtcacctgaccagtggcctttgtctgtggttcctggcaaggtggctttgcagtctggaagggcaggtgggagctgtgacacagtgtgaaaaagcatttgtagagagactttttctcagcagccaataaaagcagagtggaaaaagattccaattctgcagagagatgctcaaaaaaaaaaaaaaaaaa

SEQ ID NO: 1989 - protein, 683 aa, Homo sapiens; identical to SEQ ID NO: 1987

SEQ ID NO: 1990 - DNA, 2578 bp, Homo sapiens
gggcagtggggctgggagatggggcggggctgggcgctccgggactgaggtgctgatcgcccaaagggcgcccctgggctggggtctgacccggcttctcctccctcactacccgcggtccccggcctctcggcgctgcgctgttacctcatccgaaaagtgttcgctgcagcatcctcaggcttcacgttggagcctcttgattgtggaggaacaaccatgtcatcagaatcgagcaaaaaacggaagcccaaagtgatccgaagcgatggagccccagctgaaggaaagcggaatcgatctgacaccgagcaggaaggtaaatactacagtgaggaggccgaggtggatctgcgggaccctggcagagactatgagttatacaagtacacctgccaggagctacagaggctgatggctgagatccaagacctgaagagcaggggtggcaaggatgtggcaatagaaatagaagaacggaggatccagagctgtgtgcatttcatgactctaaagaagcttaaccgattagcccacatcaggttgaagaaaggaagagatcagacccacgaggctaagcagaaagtagatgcctatcatctgcagctccagaacctgttgtatgaggtgatgcacctacagaaggagatcaccaaatgtttggagtttaagtcaaagcatgaagaaattgatctggtcagtttagaggagttttataaggaggctccaccagatatcagcaaggccgaagtcaccatgggagaccctcaccagcaaacactggcacgtctggactgggagctggagcagcggaaaaggctggcagagaagtaccgagagtgcctatctaacaaggagaagattctcaaggagattgaggtgaagaaggagtacctgagcagcctccagccccgcctcaacagcatcatgcaggcttcccttccggtgcaggagtacctgtttatgccattcgaccaggctcacaagcagtatgagacagccagacacctgccgcctcccctctatgtcctctttgttcaggccactgcgtatgggcaggcctgtgataagacgttatctgtggcaatcgaaggcagtgtggatgaagccaaggctctgttcaaacctccagaggactcccaagatgacgagagtgactcagatgccgaggaggagcagactacgaagcgccggagacccacactgggggttcagttggacgacaaacgcaaggagatgctgaagaggcacccactgtctgtcatgctcgacctgaagtgcaaagatgacagtgtgcttcacctgactttctactacctcatgaacctcaacatcatgacagtaaaagccaaagtgacaactgccatggagctgatcacccccatcagtgcaggtgacttgctgtctcctgactcagtcctgagttgcttgtatcctggggatcatggaaagaaaactccgaatccagccaatcagtatcagtttgataaagttggcatcctgactttgagcgactatgtacttgagctaggtcacccctatttgtgggtgcagaagctgggtggcctccacttccccaaagagcagccccagcaaacagtgattgctgaccactcgctgagcgccagccacatggagaccaccatgaaacttctgaagaccagggtgcagtcccgcctggccctccacaaacagtttgcatccctagaacatggcattgtgccagttaccagtgattgccagtacctcttccctgccaaggttgtctctcgcctggtgaaatgggtgacagttgcccatgaggattacatggagctgcacttcaccaaagacattgtggatgcgggactggctggggacaccaatctctactacatggcgctcatcgaaaggggcacagccaaactgcaggccgctgtggtgttgaaccctggctactcctccatcccacctgttttccagctctgtttgaactggaaaggggagaaaaccaacagcaacgatgacaacattcgggccatggagggcgaagtcaatgtgtgctacaaggagctgtgtggcccttggcccagccaccagctgttgaccaaccagctgcagcggctgtgtgtgctgctggatgtttacctggagaccgagagccatgacgacagtgtggaggggcccaaggaatttccccaggagaagatgtgtctgcggctcttcaggggtcctagcaggatgaagccatttaaatacaaccatcctcagggattcttcagccatcgctgatctcccgcgcagaccgttgtttcccccaaggcctcaccctgagcactgggcttctgctttctgctctggcccacatgtgactcttgatattctccaaagacaccagccaattaaaaagcgtcacctgaccagtggcctttgtctgtggttcctggcaaggtggctttgcagtctggaagggcaggtgggagctgtgacacagtgtgaaaaagcatttgtagagagactttttctcagcagccaataaaagcagagtggaaaaagattccaattctgcagagagatgctcaaaaaaaaaaaaaaaaaa

SEQ ID NO: 1991 - protein, 683 aa, Homo sapiens; identical to SEQ ID NO: 1987

SEQ ID NO: 1992 - DNA, 2447 bp, Homo sapiens
ctctatggtgcgcgggcaagctttgctccgcctccggcagtggcttactcccggtgccaggttcttggagctgtgaggaggaacaaccatgtcatcagaatcgagcaaaaaacggaagcccaaagtgatccgaagcgatggagccccagctgaaggaaagcggaatcgatctgacaccgagcaggaaggtaaatactacagtgaggaggccgaggtggatctgcgggaccctggcagagactatgagttatacaagtacacctgccaggagctacagaggctgatggctgagatccaagacctgaagagcaggggtggcaaggatgtggcaatagaaatagaagaacggaggatccagagctgtgtgcatttcatgactctaaagaagcttaaccgattagcccacatcaggttgaagaaaggaagagatcagacccacgaggctaagcagaaagtagatgcctatcatctgcagctccagaacctgttgtatgaggtgatgcacctacagaaggagatcaccaaatgtttggagtttaagtcaaagcatgaagaaattgatctggtcagtttagaggagttttataaggaggctccaccagatatcagcaaggccgaagtcaccatgggagaccctcaccagcaaacactggcacgtctggactgggagctggagcagcggaaaaggctggcagagaagtaccgagagtgcctatctaacaaggagaagattctcaaggagattgaggtgaagaaggagtacctgagcagcctccagccccgcctcaacagcatcatgcaggcttcccttccggtgcaggagtacctgtttatgccattcgaccaggctcacaagcagtatgagacagccagacacctgccgcctcccctctatgtcctctttgttcaggccactgcgtatgggcaggcctgtgataagacgttatctgtggcaatcgaaggcagtgtggatgaagccaaggctctgttcaaacctccagaggactcccaagatgacgagagtgactcagatgccgaggaggagcagactacgaagcgccggagacccacactgggggttcagttggacgacaaacgcaaggagatgctgaagaggcacccactgtctgtcatgctcgacctgaagtgcaaagatgacagtgtgcttcacctgactttctactacctcatgaacctcaacatcatgacagtaaaagccaaagtgacaactgccatggagctgatcacccccatcagtgcaggtgacttgctgtctcctgactcagtcctgagttgcttgtatcctggggatcatggaaagaaaactccgaatccagccaatcagtatcagtttgataaagttggcatcctgactttgagcgactatgtacttgagctaggtcacccctatttgtgggtgcagaagctgggtggcctccacttccccaaagagcagccccagcaaacagtgattgctgaccactcgctgagcgccagccacatggagaccaccatgaaacttctgaagaccagggtgcagtcccgcctggccctccacaaacagtttgcatccctagaacatggcattgtgccagttaccagtgattgccagtacctcttccctgccaaggttgtctctcgcctggtgaaatgggtgacagttgcccatgaggattacatggagctgcacttcaccaaagacattgtggatgcgggactggctggggacaccaatctctactacatggcgctcatcgaaaggggcacagccaaactgcaggccgctgtggtgttgaaccctggctactcctccatcccacctgttttccagctctgtttgaactggaaaggggagaaaaccaacagcaacgatgacaacattcgggccatggagggcgaagtcaatgtgtgctacaaggagctgtgtggcccttggcccagccaccagctgttgaccaaccagctgcagcggctgtgtgtgctgctggatgtttacctggagaccgagagccatgacgacagtgtggaggggcccaaggaatttccccaggagaagatgtgtctgcggctcttcaggggtcctagcaggatgaagccatttaaatacaaccatcctcagggattcttcagccatcgctgatctcccgcgcagaccgttgtttcccccaaggcctcaccctgagcactgggcttctgctttctgctctggcccacatgtgactcttgatattctccaaagacaccagccaattaaaaagcgtcacctgaccagtggcctttgtctgtggttcctggcaaggtggctttgcagtctggaagggcaggtgggagctgtgacacagtgtgaaaaagcatttgtagagagactttttctcagcagccaataaaagcagagtggaaaaagattccaattctgcagagagatgctcaaaaaaaaaaaaaaaaaa

SEQ ID NO: 1993 - protein, 683 aa, Homo sapiens; identical to SEQ ID NO: 1987

SEQ ID NO: 1994 - DNA, 1214 bp, Homo sapiens
cggcagcagcgagtggacatggctgcactcttccaagaagcaagcagctgtcccgtctgctcagactatctggaaaaaccaatgtccctggagtgtggatgcaccgtctgcctcaagtgcatcaattcgctgcagaaggagccccatggggaggatctgctttgctgttgctgttccatggtctctcagaggaacaaaatcaggcccaatcggcagctagagaggctggtttcccacatcaaggaactggagcccaagctgaagaagattctacagatgaacccaaggatgcggaagttccaagtggatatgaccttggatgccgacacagccaacaacttcctcctcatttctgacgacctcaggagcgtccgaagtgggctcatcacacagaatcggcaagaccttgccgagagatttgacgtgtccgtttgcatcctgggctcccctcgctttacctgtggccgccactactgggaggtggacgtgggaacaagcacagaatgggacctgggagtctgcagagaatctgttcactgcaaagggaagatccagctgaccacagagcttggattctggactgtgagtttgagggatggaagccgcctctctgccagcacggtgccgctgactttcctcttagtagaccgcaagttacagcgagtggggatttttctggatatgggcatgcagaacgtttccttttttgatgctgaaagtggttcccatgtctatacattcaggagcgtctctgctgaggagccactgcgcccatttttggctccttcaattccacctaatggtgatcaaggtgtcttgagcatctgtcctttgatgaactcaggcactactgatgctccagtccgtcctggggaggccaaataagccgccactgcaaaaaaaaacagggtcagaaaattacttgggtgggtagacttaggaattttctacttggtaaaagcattatacagtcataggagaaagatatgggacatttctataatctatattctaatttgattcgattattgagtcgtaagtattaattattgccaccatccaactcattgagtcttatggttcacatcttgtttcctatagaaatgttctgtattctcggatcaatttccaaatgctttactttttcatttctgtaagttcaaatcaatgtttaaattatagaagttatgaggtaaataaacatttggatatca

SEQ ID NO: 1995 - protein, 288 aa, Homo sapiens
MAALFQEASSCPVCSDYLEKPMSLECGCTVCLKCINSLQKEPHGEDLLCCCCSMVSQRNKIRPNRQLERLVSHIKELEPKLKKILQMNPRMRKFQVDMTLDADTANNFLLISDDLRSVRSGLITQNRQDLAERFDVSVCILGSPRFTCGRHYWEVDVGTSTEWDLGVCRESVHCKGKIQLTTELGFWTVSLRDGSRLSASTVPLTFLLVDRKLQRVGIFLDMGMQNVSFFDAESGSHVYTFRSVSAEEPLRPFLAPSIPPNGDQGVLSICPLMNSGTTDAPVRPGEAK

SEQ ID NO: 1996 - DNA, 1115 bp, Homo sapiens
caaagttcatagcaggttgaacatgcttgctgtcattttcacagattctggtctttcttatggggaacctgagttcctgcattaaagttcccccagaagatcaatggaaggtggattccaaagagtgggcaagtgaggaccccttctctgttaccaaggtgaccccaaggaacacagtaaatgtggcggcttatttggcctccccaggacggactggagcatcagtagtgcctgagttcatcaaaggacagatgctcaagacaccctgatcaccattaggtggaattgaaggagccaaaaatgggcgcagtggctcctcagcagagacgctcctgaatgtatagacatgggaaccactttcagcatcaaaaaaggaaacgttctgcatgcccatatccagaaaaatccccactcgctgtaacttgcggtctactaagaggaaagtcagcggcaccgtgctggcagagaggcggcttccatccctcaaactcacagtccagaatccaagctctgtggtcagctggatcttccctttgcagtgaacagattctctgcagactcccaggtcccattctgtgcttgttcccacgtccacctcccagtagtggcggccacaggtaaagcgaggggagcccaggatgcaaacggacacgtcaaatctctcggcaaggtcttgccgattctgtgtgatgagcccacttcggacgctcctgaggtcgtcagaaatgaggaggaagttgttggctgtgtcggcatccaaggtcatatccactgtgaaaaggaaaacaagttgctcagcaagtggacagaagccaaccccatgcctctcttctacttcaaaggcccaaatatctcctgactttagtttctttaattctgtttcttcctccaaaatcaaaacttttcatgaggaaacttccctatttcaaattttcataggtatgctttgtggcaatacgtgactcttattcacagtagcaattcttattttactttacgtcacgtgtttgcttcactgaacttttcttcatttagagtggagggtctctgaaggcagacaccatgcccccctttctaccaccttgatgtgtgaacaaataaatgataattaagac

SEQ ID NO: 1997 - DNA, 1357 bp, Homo sapiens
tgagacgttgatgatgctcctatcaccatggttatgtgattgggtatatcttgccctcggtcctaactgccactgtctgtgctgagtttttcaaagttcatagcaggttgaacatgcttgctgtcattttcacagactctggtctttcttatggggaacctgagttcctgcattaaagttcccccagaagatcaatggaaggtggattccaaagagtgggcaagtgaggaccccttctctgttaccaaggtgaccccaaggaacacagtaaatgaaattttaagaagatatagcctctacaccaagaggcacatgacacaacctggactctgggcaaaccaccgggtgcactcacatgaagtggcggcttatttggcctccccaggacggactggagcatcagtagtgcctgagttcatcaaaggacagatgctcaagacaccttgatcaccattaggtggaattgaaggagccaaaaatgggcgcagtggctcctcagcagagacgctcctgaatgtatagacatgggaaccactttcagcatcaaaaaaggaaacgttctgcatgcccatatccagaaaaatccccactcgctgtaacttgcggtctactaagaggaaagtcagcggcaccgtgctggcagagaggcggcttccatccctcaaactcacagtccagaatccaagctctgtggtcagctggatcttccctttgcagtgaacagattctctgcagactcccaggtcccattctgtgcttgttcccacgtccacctcccagtagtggcggccacaggtaaagcgaggggagcccaggatgcaaacggacacgtcaaatctctcggcaaggtcttgccgattctgtgtgatgagcccacttcggacgctcctgaggtcgtcagaaatgaggaggaagttgttggctgtgtcggcatccaaggtcatatccactgtgaaaaggaaaacaagttgctcagcaagtggacagaagccaaccccatgcctctcttctacttcaaaggcccaaatatctcctgactttagtttctttaattctgtttcttcctccaaaatcaaaacttttcatgaggaaacttccctatttcaaattttcataggtatgctttgtggcaatacgtgactcttattcacagtagcaattcttattttactttacgtcacgtgtttgcttcactgaacttttcttcatttagagtggagggtctctgaaggcagacaccatgcccccctttctaccaccttgatgtgtgaacaaataaatgataattaagacaaaaaaaaaaaaaaaaaaaaaaaaaaaaaaaaaaaaaaaaaaaaaaaaaaaaaaaaaaaaaaaa

SEQ ID NO: 1998 - DNA, 2052 bp, Homo sapiens
ggtcttcttggaaggcggtgctctgagaagccggactacgcggcagcggctcttcaaagcggagccgggagtttttgctacagttttcgccaccatgagtcgcagctataatgatgagctgcagttcttggagaagatcaataaaaactgctggaggatcaagaagggcttcgtgcccaacatgcaggttgaaggtgttttctatgtgaatgatgctctggagaaattgatgtttgaggaattaaggaatgcctgtcgaggtggtggtgttggtggcttcctgccagccatgaaacagattggcaatgtggcagccctgcctggaattgttcatcgatctattgggcttcctgatgtccattcaggatatgggtttgctattgggaacatggcagcctttgatatgaatgaccctgaagcagtagtatccccaggtggtgtcgggtttgacatcaactgtggtgtccgcttgctaagaaccaatttagatgaaagtgatgtccagcctgtgaaggagcaacttgcccaagctatgtttgaccacattcctgttggggtggggtcaaaaggtgtcatcccaatgaatgccaaagacttggaggaggccttggagatgggggtggactggtccttaagagaagggtatgcctgggctgaagacaaggagcactgcgaggagtacggaaggatgctgcaggctgaccccaataaagtttctgcaagggcgaagaaaagaggccttcctcagttggggaccctgggagcaggcaaccattatgcagaaatccaggttgtggatgagattttcaatgagtatgctgctaaaaaaatgggcatcgaccataagggacaggtgtgtgtgatgatccacagtggaagcagaggcttgggccaccaagtagccacagatgcgctggtagctatggagaaggccatgaagagagacaagattatagtcaatgatcggcagttggcttgtgctcgaatcgcttccccagagggtcaagactatctgaagggaatggcagctgctgggaactatgcctgggtcaaccgctcttccatgaccttcttaacccgtcaggctttcgccaaggtcttcaacacaacccctgatgacttggacctacatgtgatttatgatgtttctcacaacattgccaaagtggagcagcatgtggtggacggaaaggaacggacactgttagtacacaggaagggatccacccgcgctttccctcctcaccatcccctcattgctgttgattaccaactcactggacagccagtgctcattggtggcaccatgggaacctgtagttatgttcttactggcactgaacagggcatgactgagacctttggaacaacctgtcatggagcgggccgtgcattgtcccgagcaaaatctcgacgtaatttagatttccaggatgtcttagacaaattggcagatatgggaattgcgatccgtgttgcctcacccaaactggttatggaagaggctcctgagtcctataagaatgtgacagatgtggtaaatacctgccatgatgctggaatcagcaagaaagccattaaactgagaccaattgctgtgatcaaaggatagaaccttggacagcagggctgcctgacaccaccaaccctctctgaagtggaagtggactgacatgctcttctgacatcagactcaaggcgggacaagttgcaaagtgtgcagctgtaactgctcacgccaaaatggctgatggggaggctgctgctttcaggggcccgtgcttgtaaaataaccttccaggaagaggcacattgcccacctttggaaagggaggaatatgccttctccttggttgttccacagagttttaggaaaatctgttagggatgggtagatgtcaaactgccttacgcagtcatactgatctttagccatcagattgatcttcttcacaccaagctctgtttacattccgagaggtgtcatgaagaaagttctgttcaataaggttttggaatgttataaaaaaaaaaaaaaaaaaaaaaaaaaaa

SEQ ID NO: 1999 - protein, 505 aa, Homo sapiens
MSRSYNDELQFLEKINKNCWRIKKGFVPNMQVEGVFYVNDALEKLMFEELRNACRGGGVGGFLPAMKQIGNVAALPGIVHRSIGLPDVHSGYGFAIGNMAAFDMNDPEAVVSPGGVGFDINCGVRLLRTNLDESDVQPVKEQLAQAMFDHIPVGVGSKGVIPMNAKDLEEALEMGVDWSLREGYAWAEDKEHCEEYGRMLQADPNKVSARAKKRGLPQLGTLGAGNHYAEIQVVDEIFNEYAAKKMGIDHKGQVCVMIHSGSRGLGHQVATDALVAMEKAMKRDKIIVNDRQLACARIASPEGQDYLKGMAAAGNYAWVNRSSMTFLTRQAFAKVFNTTPDDLDLHVIYDVSHNIAKVEQHVVDGKERTLLVHRKGSTRAFPPHHPLIAVDYQLTGQPVLIGGTMGTCSYVLTGTEQGMTETFGTTCHGAGRALSRAKSRRNLDFQDVLDKLADMGIAIRVASPKLVMEEAPESYKNVTDVVNTCHDAGISKKAIKLRPIAVIKG

SEQ ID NO: 2000 - DNA, 1524 bp, Homo sapiens
atgtgtacaaagacaatcccagtcctctggggatgtttcctcctgtggaatctctatgtctcatcctctcagaccatttaccctggaatcaaggcaaggattactcagagggcacttgactatggtgttcaagctggaatgaagatgattgagcaaatgctaaaagaaaagaaactcccagatttaagcggttctgagtctcttgaatttctaaaagttgattatgtaaactacaatttttcaaatataaaaatcagtgccttttcatttccaaatacctcattggcttttgtgcctggagtgggaatcaaagcgctaaccaaccatggcactgccaacatcagcacagactgggggttcgagtctccacttttccaagacacaggaggggctgatctgtttctctccggagtctactttaccggtatcattatcctaacccgaaatgactttggtcatcctaccctgaagctccaagattgctacgcccaactgagccatgcccacgtctcattttccggagaactcagtgttctgtataactcctttgctgagcccatggagaaacccattttaaagaacttaaatgaaatgctctgtcccattattgcaagtgaagtcaaagcgctaaatgccaacctcagcacactggaggttttaaccaagattgacaactacactctgctggattactccctaatcagttctccagaaattactgagaactaccttgacctgaacttgaagggtgtattctacccactggaaaacctcaccgacccccccttctcaccagttccttttgtgctcccagaacgcagcaactccatgctctacattggaatcgccgagtatttctttaaatctgcgtcctttgctcatttcacagctggggttttcaatgtcactctctccaccgaagagatttccaaccattttgttcaaaactctcaaggccttggcaacgtgctctcccggattgcagagatctacatcttgtcccagcccttcatggtgaggatcatggccacagagcctcccataatcaatctacaaccaggcaatttcaccctggacatccctgcctccatcatgatgctcacccaacccaagaactccacagttgaaaccatcgtttccatggacttcgttgctagtaccagtgttggcctggttattttgggacaaagactggtctgctccttgtctctgaacagattccgccttgctttgccagagtccaatcgcagcaacattgaggtcttgaggtttgaaaatattctatcgtccattcttcactttggagtcctcccactggccaatgcaaaattgcagcaaggatttcctctgtccaatccacacaaattcttattcgtcaattcagatattgaagttcttgagggtttccttttgatttccaccgacctgaagtatgaaacatcctcaaagcagcagccaagtttccacgtatgggaaggtctgaacctgataagcagacagtggagggggaagtcagccccttga

SEQ ID NO: 2001 - protein, 507 aa, Homo sapiens
MCTKTIPVLWGCFLLWNLYVSSSQTIYPGIKARITQRALDYGVQAGMKMIEQMLKEKKLPDLSGSESLEFLKVDYVNYNFSNIKISAFSFPNTSLAFVPGVGIKALTNHGTANISTDWGFESPLFQDTGGADLFLSGVYFTGIIILTRNDFGHPTLKLQDCYAQLSHAHVSFSGELSVLYNSFAEPMEKPILKNLNEMLCPIIASEVKALNANLSTLEVLTKIDNYTLLDYSLISSPEITENYLDLNLKGVFYPLENLTDPPFSPVPFVLPERSNSMLYIGIAEYFFKSASFAHFTAGVFNVTLSTEEISNHFVQNSQGLGNVLSRIAEIYILSQPFMVRIMATEPPIINLQPGNFTLDIPASIMMLTQPKNSTVETIVSMDFVASTSVGLVILGQRLVCSLSLNRFRLALPESNRSNIEVLRFENILSSILHFGVLPLANAKLQQGFPLSNPHKFLFVNSDIEVLEGFLLISTDLKYETSSKQQPSFHVWEGLNLISRQWRGKSAP

SEQ ID NO: 2002 - DNA, 2918 bp, Homo sapiens
tgggtaggagccagtcatctccatccatccacagccatgaatttcctccggcgacgtctctctgacagcagcttcatggccaacctgcctaatggctatatgacggacctgcaacgcccagatagctccaccagctcacctgcttcccccgccatggagaggaggcacccccagcccctggctgcctccttctcctctccaggatccagcctttttagctccctctccagtgccatgaagcaggcccctcaggccacctcaggactgatggagcctccaggtccctccacgcccattgttcaaagacccaggatcctgttggtgatcgatgatgcccatacagactggtcgaagtatttccatgggaagaaggtgaatggagagattgagatccgagtggagcaggctgaattctcagagttgaacctagctgcctatgtgaccgggggctgcatggtggacatgcaggtcgtgagaaatgggaccaaagtggtgagcagatccttcaagccagacttcatcctggtccgccagcatgcctacagcatggccctgggggaagactaccgcagcctggtcatcggcctgcagtatggagggctgcctgctgtcaactctctctactccgtctacaacttctgcagcaagccctgggtgttctctcagctcattaagatcttccattccctgggtcctgagaagttcccgcttgtggagcaaacatttttccccaaccataagccaatggtcacagccccacacttcccggtggtagtcaagctgggacatgcccacgctggaatgggaaagatcaaagtggaaaaccagcttgacttccaggacatcaccagcgtggtcgccatggccaaaacctacgccaccaccgaggccttcatcgactccaagtacgacatccgcatccagaaaattggatccaactacaaggcttacaggagaacctccatctctgggaactggaaggccaacacaggctctgccatgctggagcaggtggccatgacagagaggtacaggctgtgggtggacagctgctcggaaatgtttggcggcctggacatctgtgccgtcaaggctgtccacagcaaggatggcagagattacatcatcgaggtaatggacagctcaatgccgctgattggagagcatgtggaagaggacagacagctgatggccgaccttgttgtctccaaaatgagccagctcccgatgccaggaggcacagcgccctcccccctcagaccttgggctccacagattaaatcagcgaaatccccagggcaagcccagctggggcctcagctaggccagccccagccacgcccacctccgcaaggaggccctcgccaagctcagtctcctcagccccagagatctggaagcccctcccaacagaggctctccccacaaggccagcagcccctgagcccccagtccggatctccacagcagcaaaggtcaccaggctctccgcagctatcccgggcatccagtggcagctccccaaaccaggcctccaagccaggtgccaccctcgcctcacagccccggccccctgtgcagggccgtagtacctcccagcagggtgaagagtccaagaagccagcaccaccccatccgcatctcaacaaatctcagtccctgactaacagcctcagcacatccgacacctcccagcgtgggaccccaagtgaagacgaggccaaggctgaaaccatccgcaacctgaggaagtcttttgccagcctgttctctgactaacgccatccaggctgggaggggaagagtgctctgctacactcgtccccctcctgcctcatcttccttctcagccttggttcctgatgggaacagaatggagggcctgagaacatactttctaaatgcctttgacccaggaaccgattatctatatttgttcccattttccttcaccgtgacattccagcattgtctgactgtgaggtgggcctttgagagcctccaggttcctcaaaacaggcctgagcgatgggcatcacaccctctgcctacccacgtgcctgcttacctgccagataaccaagtgagatgtctgcgagtggctagttttcacattcttactagtgtttggctcacctttgggcaaaggccccctctaggccttgccccacctccatcaaacgcagacactgtagtcagacctcagcaatataggaggcaataatcttttaacagtgttttgcaaacaaacaaaaagagaaaaatcccagccaggggaactcgccacctgcccacgctagttccatccacgctcaagacccgcccttagaccaggcaggcaaaggcccccatcacactcggccactagtggggtcctgaggccaagaaagaaaccagaccctgtatgacaagtggggtctttcagaacacgacagaaacaggggggcccttgtaatgccactcatactcagagcattattcttatttggacagccaagggcagatcacaggttattgtaggaataaagactagtttacaaaggagaaagaggccctggacttcccaaggaaagggtcaggttagggctcctgtacccattctgttccaccactgtttgatctctctggcctcccaccaggaatgccgtttcctttttatggatctgttgggaaccagagagaatcaacagatcaatgacataggatccgaagtgcaatgatagtcacttctagtttggcatttcacaaactctgtacagcaaggtattggtaggttactcaatttcaaaagggccccatggccaaatatgtttaggaaccgctgtttgtatttctttttttggagacgcattgtatataatatatgtcaaaggctttcggaattcctgcaggaaagaaatcagctttgttaaatccaa

SEQ ID NO: 2003 - protein, 580 aa, Homo sapiens
MNFLRRRLSDSSFMANLPNGYMTDLQRPDSSTSSPASPAMERRHPQPLAASFSSPGSSLFSSLSSAMKQAPQATSGLMEPPGPSTPIVQRPRILLVIDDAHTDWSKYFHGKKVNGEIEIRVEQAEFSELNLAAYVTGGCMVDMQVVRNGTKVVSRSFKPDFILVRQHAYSMALGEDYRSLVIGLQYGGLPAVNSLYSVYNFCSKPWVFSQLIKIFHSLGPEKFPLVEQTFFPNHKPMVTAPHFPVVVKLGHAHAGMGKIKVENQLDFQDITSVVAMAKTYATTEAFIDSKYDIRIQKIGSNYKAYRRTSISGNWKANTGSAMLEQVAMTERYRLWVDSCSEMFGGLDICAVKAVHSKDGRDYIIEVMDSSMPLIGEHVEEDRQLMADLVVSKMSQLPMPGGTAPSPLRPWAPQIKSAKSPGQAQLGPQLGQPQPRPPPQGGPRQAQSPQPQRSGSPSQQRLSPQGQQPLSPQSGSPQQQRSPGSPQLSRASSGSSPNQASKPGATLASQPRPPVQGRSTSQQGEESKKPAPPHPHLNKSQSLTNSLSTSDTSQRGTPSEDEAKAETIRNLRKSFASLFSD

SEQ ID NO: 2004 - DNA, 2626 bp, Homo sapiens
tgggtaggagccagtcatctccatccatccacagccatgaatttcctccggcgacgtctctctgacagcagcttcatggccaacctgcctaatggctatatgacggacctgcaacgcccagatagctccaccagctcacctgcttcccccgccatggagaggaggcacccccagcccctggctgcctccttctcctctccaggatccagcctttttagctccctctccagtgccatgaagcaggcccctcaggccacctcaggactgatggagcctccaggtccctccacgcccattgttcaaagacccaggatcctgttggtgatcgatgatgcccatacagactggtcgaagtatttccatgggaagaaggtgaatggagagattgagatccgagtggagcaggctgaattctcagagttgaacctagctgcctatgtgaccgggggctgcatggtggacatgcaggtcgtgagaaatgggaccaaagtggtgagcagatccttcaagccagacttcatcctggtccgccagcatgcctacagcatggccctgggggaagactaccgcagcctggtcatcggcctgcagtatggagggctgcctgctgtcaactctctctactccgtctacaacttctgcagcaagccctgggtgttctctcagctcattaagatcttccattccctgggtcctgagaagttcccgcttgtggagcaaacatttttccccaaccataagccaatggtcacagccccacacttcccggtggtagtcaagctgggacatgcccacgctggaatgggaaagatcaaagtggaaaaccagcttgacttccaggacatcaccagcgtggtcgccatggccaaaacctacgccaccaccgaggccttcatcgactccaagtacgacatccgcatccagaaaattggatccaactacaaggcttacaggagaacctccatctctgggaactggaaggccaacacaggctctgccatgctggagcaggtggccatgacagagaggtacaggctgtgggtggacagctgctcggaaatgtttggcggcctggacatctgtgccgtcaaggctgtccacagcaaggatggcagagattacatcatcgaggtaatggacagctcaatgccgctgattggagagcatgtggaagaggacagacagctgatggccgaccttgttgtctccaaaatgagccagctcccgatgccaggaggcacagcgccctcccccctcagaccttgggctccacagattaaatcagcgaaatccccagggcaagcccagctggggcctcagctaggccagccccagccacgcccacctccgcaagcaaatctcagtccctgactaacagcctcagcacatccgacacctcccagcgtgggaccccaagtgaagacgaggccaaggctgaaaccatccgcaacctgaggaagtcttttgccagcctgttctctgactaacgccatccaggctgggaggggaagagtgctctgctacactcgtccccctcctgcctcatcttccttctcagccttggttcctgatgggaacagaatggagggcctgagaacatactttctaaatgcctttgacccaggaaccgattatctatatttgttcccattttccttcaccgtgacattccagcattgtctgactgtgaggtgggcctttgagagcctccaggttcctcaaaacaggcctgagcgatgggcatcacaccctctgcctacccacgtgcctgcttacctgccagataaccaagtgagatgtctgcgagtggctagttttcacattcttactagtgtttggctcacctttgggcaaaggccccctctaggccttgccccacctccatcaaacgcagacactgtagtcagacctcagcaatataggaggcaataatcttttaacagtgttttgcaaacaaacaaaaagagaaaaatcccagccaggggaactcgccacctgcccacgctagttccatccacgctcaagacccgcccttagaccaggcaggcaaaggcccccatcacactcggccactagtggggtcctgaggccaagaaagaaaccagaccctgtatgacaagtggggtctttcagaacacgacagaaacaggggggcccttgtaatgccactcatactcagagcattattcttatttggacagccaagggcagatcacaggttattgtaggaataaagactagtttacaaaggagaaagaggccctggacttcccaaggaaagggtcaggttagggctcctgtacccattctgttccaccactgtttgatctctctggcctcccaccaggaatgccgtttcctttttatggatctgttgggaaccagagagaatcaacagatcaatgacataggatccgaagtgcaatgatagtcacttctagtttggcatttcacaaactctgtacagcaaggtattggtaggttactcaatttcaaaagggccccatggccaaatatgtttaggaaccgctgtttgtatttctttttttggagacgcattgtatataatatatgtcaaaggctttcggaattcctgcaggaaagaaatcagctttgttaaatccaa

SEQ ID NO: 2005 - protein, 444 aa, Homo sapiens
MNFLRRRLSDSSFMANLPNGYMTDLQRPDSSTSSPASPAMERRHPQPLAASFSSPGSSLFSSLSSAMKQAPQATSGLMEPPGPSTPIVQRPRILLVIDDAHTDWSKYFHGKKVNGEIEIRVEQAEFSELNLAAYVTGGCMVDMQVVRNGTKVVSRSFKPDFILVRQHAYSMALGEDYRSLVIGLQYGGLPAVNSLYSVYNFCSKPWVFSQLIKIFHSLGPEKFPLVEQTFFPNHKPMVTAPHFPVVVKLGHAHAGMGKIKVENQLDFQDITSVVAMAKTYATTEAFIDSKYDIRIQKIGSNYKAYRRTSISGNWKANTGSAMLEQVAMTERYRLWVDSCSEMFGGLDICAVKAVHSKDGRDYIIEVMDSSMPLIGEHVEEDRQLMADLVVSKMSQLPMPGGTAPSPLRPWAPQIKSAKSPGQAQLGPQLGQPQPRPPPQANLSP

SEQ ID NO: 2006 - DNA, 4194 bp, Homo sapiens
gcggccgcgctcgtctcgccgggctgttcgcgggcaggccctgccctgaagggacgaatcggcttggagcgcgggaggtggagtcggccccggcggtcgctccctggacccaacccgaggctgacccaggcccctgcccatgcggggcgcccctggctcggaagagtcccccgggccgggagcagctccaggcagcggccccggaggaagaggaagaagggacagtgctcagcttgggggacccggaccctcgccgcggcatttggagccgggggcagtcccgaactctgtgcttggcaccgccgctccgagtagggcagcgcctgccgggaccctgacccggaccccctgcgcctcgtaggcggcggcgccgccgcgccaccctgttcttccgtgtctccctctgcctggcggcagtcacggccaagaacctacattaagaaacgcattcagatgcatcagccgtttgtaaagcacctgtcgtgagccagagagtattatgagggaggccgaggacttcatgctccggacagagaaacggcgctgggattagggattgccacttctgagaggatgctgggaatctgcagggggagacggaaattcttggctgcctcgttgagtcttctctgcatcccagccatcacctggatttacctgttttctgggagcttcgaagatggaaagcccgtgtctctgtcaccgctggagtcccaggcacacagccccaggtacacggcctccagccagcgggagcgcgagagcctggaggtgcgcatgcgcgaggtggaggaggagaaccgcgccctccgcaggcagctcagcctggcccagggccgagccccatcccatcgccgaggcaaccactccaagacctactccatggaggagggcactggagacagcgagaaccttcgggctggcatcgtggcaggcaacagctccgagtgtgggcagcagccggtcgtggagaaatgcgagacaatccacgttgctattgtctgcgccggatacaatgccagccgggatgtcgtcaccctggtcaaatccgtcctgttccatagacggaaccctctgcacttccaccttattgctgactccattgcggagcagatcctggccacgctcttccagacctggatggtgcccgctgtgcgtgtggacttctacaatgcagacgagctcaagtctgaagtttcctggatccccaataaacattactctgggatttatggtctgatgaagcttgtcctgaccaagactcttcctgccaacctggagagagtcatcgtccttgacacggatatcacctttgccactgacattgcagagctgtgggctgtgttccacaagttcaaaggtcagcaagtcctgggcttggtggagaaccagagtgactggtaccttggaaacctgtggaaaaatcaccgcccatggccagcccttggaagaggctacaacacaggggtgatcctgttacttctggataagctgcggaagatgaaatgggagcagatgtggaggctgaccgcagagagggagctcatgggcatgctctctacatccttagctgaccaggatattttcaatgccgtcatcaaacaaaaccccttccttgtgtaccagctcccctgcttctggaatgtgcagctgtcagaccacacccgctccgagcagtgctacagagacgtgtctgatctaaaggtcattcactggaactcccccaagaagctccgggtgaagaacaagcatgtggagttttttcgcaacctctacctgaccttcctggagtatgacggcaatcttctgaggcgggaactgtttggctgccccagtgaggctgatgtcaacagtgaaaacctccagaagcagctgtctgagctggacgaggacgacctgtgctatgagttccggcgagagcgcttcactgtccaccgcacccacctgtacttcctgcactacgagtatgagcctgcagcagacagcacggacgtcaccctggtcgctcagctgtccatggacaggctccagatgctggaggccatctgcaagcactgggaggggcccatcagcctggccctctacctgtcagacgccgaggcccagcagttcctccgctacgcacagggctctgaggtgcttatgagccgccacaacgtgggctaccacatcgtgtacaaggagggccagttctaccccgtgaacctgctgcgcaacgtggccatgaagcacatcagcactccctacatgttcctgtctgacattgacttcctgcccatgtatgggctctatgagtacctcaggaagtctgtcatccagctcgatcttgccaacaccaagaaagcaatgattgtccccgcgttcgagacactgcgctaccggctgtccttccccaagtcaaaagcggagttgctgtcaatgctggacatggggaccctcttcacattcaggtaccacgtctggacgaaaggccacgcacccacaaacttcgccaagtggcggaccgccaccacgccttaccgggttgagtgggaggccgattttgagccgtatgttgttgtgagacgtgactgcccggagtacgaccggaggtttgtaggctttggctggaacaaagtggctcatatcatggagctggatgtgcaggagtatgagttcattgtgctgcccaacgcctacatgatccacatgcctcatgcccccagcttcgacattaccaagttccgttccaacaagcaataccgcatctgtctcaaaaccctcaaggaagagtttcagcaggacatgtcccgccgctacggctttgctgccctgaaatatctcacagccgagaacaacagctagcaccaagaagcccaccactagggggagacatgctgtaggggaagtgccactcgctgtttggggcccggccttcaaattcaaaattgagccatgctttttcggtttgtttttatttatctctttggcccagccaagctgccctcactacagagaccttggacaaggatccagccagtccctctctgccccacaaccctgcattcccagaggttagctatgcagcccacctagatgagtctcttcaagaatgggaaatcaaggggtgacagggagtaaaagggttatcatcttactgcaaagccacaagatcagggcagggctttaggatgttctggatgctttttaataattatgcttcccatcataactggggagaaagggaagtcagggttctaggggttattcgtcccaggaaatagaagtgaaattgtctttattaagtgaaaactttcccctttgccctgcaatgtagctgggcattcaaacggagggcaaaccgatgatctaaaccaaccacttggaaaaacccaatggggacattgtaaccagagggtcctggaggtggggttgatgggtttccttatccccaaagtcactcctgttttgttttgtttttctttgggggttttgtttatttttggggctggcaatccaaaatagaaaatctgatcctttgaggctctaaaggaaaatcagctgcctctaccaaccaccctctatcagcagtggcccaggaaggaggtcaagcatcttcggccgatatttaaacatgggcagcttccttcaggatgatcaccgaggctcccgtgactttgaactccctactctccagaatccaggggctatagcgatggggactgcggaattacgagggctggctgttttacaccggtcacattttctattggcagtgactgattcatgggaaagggctttgaaggaactacttcagtgcacacacaaggtacgaacctctcaggcctttcgaagaactttcataattcatgaaagcccagttctgaagattcacgtatccatctggagacctacaggaagaaagtgattgggttcctctggttcttgcctgcttcactgtggatgggaagaggtgacaacctcagtctccctttgggacctgtccaagggtaggcaaccaccttcaccttcacacagattgaggagacactggactttttacccattttctttaatcttcaatattaatattgtgtttacattgatgagaacaagagttaatgccctaccctctgctgggctgtttgtattgagttgcaatgtgaccagcgaaagctgcatttaataaatgaaagtacagactgtttcttcccc

SEQ ID NO: 2007 - protein, 756 aa, Homo sapiens
MLGICRGRRKFLAASLSLLCIPAITWIYLFSGSFEDGKPVSLSPLESQAHSPRYTASSQRERESLEVRMREVEEENRALRRQLSLAQGRAPSHRRGNHSKTYSMEEGTGDSENLRAGIVAGNSSECGQQPVVEKCETIHVAIVCAGYNASRDVVTLVKSVLFHRRNPLHFHLIADSIAEQILATLFQTWMVPAVRVDFYNADELKSEVSWIPNKHYSGIYGLMKLVLTKTLPANLERVIVLDTDITFATDIAELWAVFHKFKGQQVLGLVENQSDWYLGNLWKNHRPWPALGRGYNTGVILLLLDKLRKMKWEQMWRLTAERELMGMLSTSLADQDIFNAVIKQNPFLVYQLPCFWNVQLSDHTRSEQCYRDVSDLKVIHWNSPKKLRVKNKHVEFFRNLYLTFLEYDGNLLRRELFGCPSEADVNSENLQKQLSELDEDDLCYEFRRERFTVHRTHLYFLHYEYEPAADSTDVTLVAQLSMDRLQMLEAICKHWEGPISLALYLSDAEAQQFLRYAQGSEVLMSRHNVGYHIVYKEGQFYPVNLLRNVAMKHISTPYMFLSDIDFLPMYGLYEYLRKSVIQLDLANTKKAMIVPAFETLRYRLSFPKSKAELLSMLDMGTLFTFRYHVWTKGHAPTNFAKWRTATTPYRVEWEADFEPYVVVRRDCPEYDRRFVGFGWNKVAHIMELDVQEYEFIVLPNAYMIHMPHAPSFDITKFRSNKQYRICLKTLKEEFQQDMSRRYGFAALKYLTAENNS

SEQ ID NO: 2008 - DNA, 4131 bp, Homo sapiens
gcggccgcgctcgtctcgccgggctgttcgcgggcaggccctgccctgaagggacgaatcggcttggagcgcgggaggtggagtcggccccggcggtcgctccctggacccaacccgaggctgacccaggcccctgcccatgcggggcgcccctggctcggaagagtcccccgggccgggagcagctccaggcagcggccccggaggaagaggaagaagggacagtgctcagcttgggggacccggaccctcgccgcggcatttggagccgggggcagtcccgaactctgtgcttggcaccgccgctccgagtagggcagcgcctgccgggaccctgacccggaccccctgcgcctcgtaggcggcggcgccgccgcgccaccctgttcttccgtgtctccctctgcctggcggcagtcacggccaagagagtattatgagggaggccgaggacttcatgctccggacagagaaacggcgctgggattagggattgccacttctgagaggatgctgggaatctgcagggggagacggaaattcttggctgcctcgttgagtcttctctgcatcccagccatcacctggatttacctgttttctgggagcttcgaagatggaaagcccgtgtctctgtcaccgctggagtcccaggcacacagccccaggtacacggcctccagccagcgggagcgcgagagcctggaggtgcgcatgcgcgaggtggaggaggagaaccgcgccctccgcaggcagctcagcctggcccagggccgagccccatcccatcgccgaggcaaccactccaagacctactccatggaggagggcactggagacagcgagaaccttcgggctggcatcgtggcaggcaacagctccgagtgtgggcagcagccggtcgtggagaaatgcgagacaatccacgttgctattgtctgcgccggatacaatgccagccgggatgtcgtcaccctggtcaaatccgtcctgttccatagacggaaccctctgcacttccaccttattgctgactccattgcggagcagatcctggccacgctcttccagacctggatggtgcccgctgtgcgtgtggacttctacaatgcagacgagctcaagtctgaagtttcctggatccccaataaacattactctgggatttatggtctgatgaagcttgtcctgaccaagactcttcctgccaacctggagagagtcatcgtccttgacacggatatcacctttgccactgacattgcagagctgtgggctgtgttccacaagttcaaaggtcagcaagtcctgggcttggtggagaaccagagtgactggtaccttggaaacctgtggaaaaatcaccgcccatggccagcccttggaagaggctacaacacaggggtgatcctgttacttctggataagctgcggaagatgaaatgggagcagatgtggaggctgaccgcagagagggagctcatgggcatgctctctacatccttagctgaccaggatattttcaatgccgtcatcaaacaaaaccccttccttgtgtaccagctcccctgcttctggaatgtgcagctgtcagaccacacccgctccgagcagtgctacagagacgtgtctgatctaaaggtcattcactggaactcccccaagaagctccgggtgaagaacaagcatgtggagttttttcgcaacctctacctgaccttcctggagtatgacggcaatcttctgaggcgggaactgtttggctgccccagtgaggctgatgtcaacagtgaaaacctccagaagcagctgtctgagctggacgaggacgacctgtgctatgagttccggcgagagcgcttcactgtccaccgcacccacctgtacttcctgcactacgagtatgagcctgcagcagacagcacggacgtcaccctggtcgctcagctgtccatggacaggctccagatgctggaggccatctgcaagcactgggaggggcccatcagcctggccctctacctgtcagacgccgaggcccagcagttcctccgctacgcacagggctctgaggtgcttatgagccgccacaacgtgggctaccacatcgtgtacaaggagggccagttctaccccgtgaacctgctgcgcaacgtggccatgaagcacatcagcactccctacatgttcctgtctgacattgacttcctgcccatgtatgggctctatgagtacctcaggaagtctgtcatccagctcgatcttgccaacaccaagaaagcaatgattgtccccgcgttcgagacactgcgctaccggctgtccttccccaagtcaaaagcggagttgctgtcaatgctggacatggggaccctcttcacattcaggtaccacgtctggacgaaaggccacgcacccacaaacttcgccaagtggcggaccgccaccacgccttaccgggttgagtgggaggccgattttgagccgtatgttgttgtgagacgtgactgcccggagtacgaccggaggtttgtaggctttggctggaacaaagtggctcatatcatggagctggatgtgcaggagtatgagttcattgtgctgcccaacgcctacatgatccacatgcctcatgcccccagcttcgacattaccaagttccgttccaacaagcaataccgcatctgtctcaaaaccctcaaggaagagtttcagcaggacatgtcccgccgctacggctttgctgccctgaaatatctcacagccgagaacaacagctagcaccaagaagcccaccactagggggagacatgctgtaggggaagtgccactcgctgtttggggcccggccttcaaattcaaaattgagccatgctttttcggtttgtttttatttatctctttggcccagccaagctgccctcactacagagaccttggacaaggatccagccagtccctctctgccccacaaccctgcattcccagaggttagctatgcagcccacctagatgagtctcttcaagaatgggaaatcaaggggtgacagggagtaaaagggttatcatcttactgcaaagccacaagatcagggcagggctttaggatgttctggatgctttttaataattatgcttcccatcataactggggagaaagggaagtcagggttctaggggttattcgtcccaggaaatagaagtgaaattgtctttattaagtgaaaactttcccctttgccctgcaatgtagctgggcattcaaacggagggcaaaccgatgatctaaaccaaccacttggaaaaacccaatggggacattgtaaccagagggtcctggaggtggggttgatgggtttccttatccccaaagtcactcctgttttgttttgtttttctttgggggttttgtttatttttggggctggcaatccaaaatagaaaatctgatcctttgaggctctaaaggaaaatcagctgcctctaccaaccaccctctatcagcagtggcccaggaaggaggtcaagcatcttcggccgatatttaaacatgggcagcttccttcaggatgatcaccgaggctcccgtgactttgaactccctactctccagaatccaggggctatagcgatggggactgcggaattacgagggctggctgttttacaccggtcacattttctattggcagtgactgattcatgggaaagggctttgaaggaactacttcagtgcacacacaaggtacgaacctctcaggcctttcgaagaactttcataattcatgaaagcccagttctgaagattcacgtatccatctggagacctacaggaagaaagtgattgggttcctctggttcttgcctgcttcactgtggatgggaagaggtgacaacctcagtctccctttgggacctgtccaagggtaggcaaccaccttcaccttcacacagattgaggagacactggactttttacccattttctttaatcttcaatattaatattgtgtttacattgatgagaacaagagttaatgccctaccctctgctgggctgtttgtattgagttgcaatgtgaccagcgaaagctgcatttaataaatgaaagtacagactgtttcttcccc

SEQ ID NO: 2009 - protein, 756 aa, Homo sapiens; identical to SEQ ID NO: 2007

SEQ ID NO: 2010 - DNA, 3373 bp, Homo sapiens
ggtggcaacttctcctcctgcggccgggagcggcctgcctgcctccctgcgcacccgcagcctcccccgctgcctccctagggctcccctccggccgccagcgcccatttttcattccctagatagagatactttgcgcgcacacacatacatacgcgcgcaaaaaggaaaaaaaaaaaaaaaagcccaccctccagcctcgctgcaaagagaaaaccggagcagccgcagctcgcagctcgcagctcgcagcccgcagcccgcagaggacgcccagagcggcgagcaggcgggcagacggaccgacggactcgcgccgcgtccacctgtcggccgggcccagccgagcgcgcagcgggcacgccgcgcgcgcggagcagccgtgcccgccgcccgggcccgccgccagggcgcacacgctcccgcccccctacccggcccgggcgggagtttgcacctctccctgcccgggtgctcgagctgccgttgcaaagccaactttggaaaaagttttttgggggagacttgggccttgaggtgcccagctccgcgctttccgattttgggggcctttccagaaaatgttgcaaaaaagctaagccggcgggcagaggaaaacgcctgtagccggcgagtgaagacgaaccatcgactgccgtgttccttttcctcttggaggttggagtcccctgggcgcccccacacggctagacgcctcggctggttcgcgacgcagccccccggccgtggatgctgcactcgggctcgggatccgcccaggtagccggcctcggacccaggtcctgcgcccaggtcctcccctgccccccagcgacggagccggggccgggggcggcggcgccgggggcatgcgggtgagccgcggctgcagaggcctgagcgcctgatcgccgcggacctgagccgagcccacccccctccccagccccccaccctggccgcgggggcggcgcgctcgatctacgcgtccggggccccgcggggccgggcccggagtcggcatgaatcgctgctgggcgctcttcctgtctctctgctgctacctgcgtctggtcagcgccgagggggaccccattcccgaggagctttatgagatgctgagtgaccactcgatccgctcctttgatgatctccaacgcctgctgcacggagaccccggagaggaagatggggccgagttggacctgaacatgacccgctcccactctggaggcgagctggagagcttggctcgtggaagaaggagcctgggttccctgaccattgctgagccggccatgatcgccgagtgcaagacgcgcaccgaggtgttcgagatctcccggcgcctcatagaccgcaccaacgccaacttcctggtgtggccgccctgtgtggaggtgcagcgctgctccggctgctgcaacaaccgcaacgtgcagtgccgccccacccaggtgcagctgcgacctgtccaggtgagaaagatcgagattgtgcggaagaagccaatctttaagaaggccacggtgacgctggaagaccacctggcatgcaagtgtgagacagtggcagctgcacggcctgtgacccgaagcccggggggttcccaggagcagcgagccaaaacgccccaaactcgggtgaccattcggacggtgcgagtccgccggccccccaagggcaagcaccggaaattcaagcacacgcatgacaagacggcactgaaggagacccttggagcctaggggcatcggcaggagagtgtgtgggcagggttatttaatatggtatttgctgtattgcccccatggggtccttggagtgataatattgtttccctcgtccgtctgtctcgatgcctgattcggacggccaatggtgcttcccccacccctccacgtgtccgtccacccttccatcagcgggtctcctcccagcggcctccggtcttgcccagcagctcaaagaagaaaaagaaggactgaactccatcgccatcttcttcccttaactccaagaacttgggataagagtgtgagagagactgatggggtcgctctttgggggaaacgggttccttcccctgcacctggcctgggccacacctgagcgctgtggactgtcctgaggagccctgaggacctctcagcatagcctgcctgatccctgaacccctggccagctctgaggggaggcacctccaggcaggccaggctgcctcggactccatggctaagaccacagacgggcacacagactggagaaaacccctcccacggtgcccaaacaccagtcacctcgtctccctggtgcctctgtgcacagtggcttcttttcgttttcgttttgaagacgtggactcctcttggtgggtgtggccagcacaccaagtggctgggtgccctctcaggtgggttagagatggagtttgctgttgaggtggtgtagatggtgacctgggtatcccctgcctcctgccaccccttcctccccatactccactctgattcacctcttcctctggttcctttcatctctctacctccaccctgcattttcctcttgtcctggcccttcagtctgctccaccaaggggctcttgaaccccttattaaggccccagatgaccccagtcactcctctctagggcagaagactagaggccagggcagcaagggacctgctcatcatattccaacccagccacgactgccatgtaaggttgtgcagggtgtgtactgcacaaggacattgtatgcagggagcactgttcacatcatagataaagctgatttgtatatttattatgacaatttctggcagatgtaggtaaagaggaaaaggatccttttcctaattcacacaaagactccttgtggactggctgtgcccctgatgcagcctgtggctggagtggccaaataggagggagactgtggtaggggcagggaggcaacactgctgtccacatgacctccatttcccaaagtcctctgctccagcaactgcccttccaggtgggtgtgggacacctgggagaaggtctccaagggagggtgcagccctcttgcccgcacccctccctgcttgcacacttccccatctttgatccttctgagctccacctctggtggctcctcctaggaaaccagctcgtgggctgggaatgggggagagaagggaaaagatccccaagaccccctggggtgggatctgagctcccacctcccttcccacctactgcactttcccccttcccgccttccaaaacctgcttccttcagtttgtaaagtcggtgattatatttttgggggctttccttttattttttaaatgtaaaatttatttatattccgtatttaaagttgt

SEQ ID NO: 2011 - protein, 241 aa, Homo sapiens
MNRCWALFLSLCCYLRLVSAEGDPIPEELYEMLSDHSIRSFDDLQRLLHGDPGEEDGAELDLNMTRSHSGGELESLARGRRSLGSLTIAEPAMIAECKTRTEVFEISRRLIDRTNANFLVWPPCVEVQRCSGCCNNRNVQCRPTQVQLRPVQVRKIEIVRKKPIFKKATVTLEDHLACKCETVAAARPVTRSPGGSQEQRAKTPQTRVTIRTVRVRRPPKGKHRKFKHTHDKTALKETLGA

SEQ ID NO: 2012 - DNA, 2378 bp, Homo sapiens
gtgtgtgtgtgtgtgcgcgcgcatctgagagagagagagagagagagagactgactgagcaggaatggtgagatgtttatcatgggcctcggggaccccattcccgaggagctttatgagatgctgagtgaccactcgatccgctcctttgatgatctccaacgcctgctgcacggagaccccggagaggaagatggggccgagttggacctgaacatgacccgctcccactctggaggcgagctggagagcttggctcgtggaagaaggagcctgggttccctgaccattgctgagccggccatgatcgccgagtgcaagacgcgcaccgaggtgttcgagatctcccggcgcctcatagaccgcaccaacgccaacttcctggtgtggccgccctgtgtggaggtgcagcgctgctccggctgctgcaacaaccgcaacgtgcagtgccgccccacccaggtgcagctgcgacctgtccaggtgagaaagatcgagattgtgcggaagaagccaatctttaagaaggccacggtgacgctggaagaccacctggcatgcaagtgtgagacagtggcagctgcacggcctgtgacccgaagcccggggggttcccaggagcagcgagccaaaacgccccaaactcgggtgaccattcggacggtgcgagtccgccggccccccaagggcaagcaccggaaattcaagcacacgcatgacaagacggcactgaaggagacccttggagcctaggggcatcggcaggagagtgtgtgggcagggttatttaatatggtatttgctgtattgcccccatggggtccttggagtgataatattgtttccctcgtccgtctgtctcgatgcctgattcggacggccaatggtgcttcccccacccctccacgtgtccgtccacccttccatcagcgggtctcctcccagcggcctccggtcttgcccagcagctcaaagaagaaaaagaaggactgaactccatcgccatcttcttcccttaactccaagaacttgggataagagtgtgagagagactgatggggtcgctctttgggggaaacgggttccttcccctgcacctggcctgggccacacctgagcgctgtggactgtcctgaggagccctgaggacctctcagcatagcctgcctgatccctgaacccctggccagctctgaggggaggcacctccaggcaggccaggctgcctcggactccatggctaagaccacagacgggcacacagactggagaaaacccctcccacggtgcccaaacaccagtcacctcgtctccctggtgcctctgtgcacagtggcttcttttcgttttcgttttgaagacgtggactcctcttggtgggtgtggccagcacaccaagtggctgggtgccctctcaggtgggttagagatggagtttgctgttgaggtggtgtagatggtgacctgggtatcccctgcctcctgccaccccttcctccccatactccactctgattcacctcttcctctggttcctttcatctctctacctccaccctgcattttcctcttgtcctggcccttcagtctgctccaccaaggggctcttgaaccccttattaaggccccagatgaccccagtcactcctctctagggcagaagactagaggccagggcagcaagggacctgctcatcatattccaacccagccacgactgccatgtaaggttgtgcagggtgtgtactgcacaaggacattgtatgcagggagcactgttcacatcatagataaagctgatttgtatatttattatgacaatttctggcagatgtaggtaaagaggaaaaggatccttttcctaattcacacaaagactccttgtggactggctgtgcccctgatgcagcctgtggctggagtggccaaataggagggagactgtggtaggggcagggaggcaacactgctgtccacatgacctccatttcccaaagtcctctgctccagcaactgcccttccaggtgggtgtgggacacctgggagaaggtctccaagggagggtgcagccctcttgcccgcacccctccctgcttgcacacttccccatctttgatccttctgagctccacctctggtggctcctcctaggaaaccagctcgtgggctgggaatgggggagagaagggaaaagatccccaagaccccctggggtgggatctgagctcccacctcccttcccacctactgcactttcccccttcccgccttccaaaacctgcttccttcagtttgtaaagtcggtgattatatttttgggggctttccttttattttttaaatgtaaaatttatttatattccgtatttaaagttgt

SEQ ID NO: 2013 - protein, 226 aa, Homo sapiens
MFIMGLGDPIPEELYEMLSDHSIRSFDDLQRLLHGDPGEEDGAELDLNMTRSHSGGELESLARGRRSLGSLTIAEPAMIAECKTRTEVFEISRRLIDRTNANFLVWPPCVEVQRCSGCCNNRNVQCRPTQVQLRPVQVRKIEIVRKKPIFKKATVTLEDHLACKCETVAAARPVTRSPGGSQEQRAKTPQTRVTIRTVRVRRPPKGKHRKFKHTHDKTALKETLGA

SEQ ID NO: 2014 - DNA, 1348 bp, Homo sapiens
ccagatttggctttatatagcggacccgtaaggccgaccggcctctaccggcgggatttgatggcgtgatgtctcacagaaagttctccgctcccagacatgggtccctcggcttcctgcctcggaagcgcagcagcaggcatcgtgggaaggtgaagagcttccctaaggatgacccgtccaagccggtccacctcacagccttcctgggatacaaggctggcatgactcacatcgtgcgggaagtcgacaggccgggatccaaggtgaacaagaaggaggtggtggaggctgtgaccattgtagagacaccacccatggtggttgtgggcattgtgggctacgtggaaacccctcgaggcctccggaccttcaagactgtctttgctgagcacatcagtgatgaatgcaagaggcgtttctataagaattggcataaatctaagaagaaggcctttaccaagtactgcaagaaatggcaggatgaggatggcaagaagcagctggagaaggacttcagcagcatgaagaagtactgccaagtcatccgtgtcattgcccacacccagatgcgcctgcttcctctgcgccagaagaaggcccacctgatggagatccaggtgaacggaggcactgtggccgagaagctggactgggcccgcgagaggcttgagcagcaggtacctgtgaaccaagtgtttgggcaggatgagatgatcgacgtcatcggggtgaccaagggcaaaggctacaaaggggtcaccagtcgttggcacaccaagaagctgccccgcaagacccaccgaggcctgcgcaaggtggcctgtattggggcatggcatcctgctcgtgtagccttctctgtggcacgcgctgggcagaaaggctaccatcaccgcactgagatcaacaagaagatttataagattggccagggctaccttatcaaggacggcaagctgatcaagaacaatgcctccactgactatgacctatctgacaagagcatcaaccctctgggtggctttgtccactatggtgaagtgaccaatgactttgtcatgctgaaaggctgtgtggtgggaaccaagaagcgggtgctcaccctccgcaagtccttgctggtgcagacgaagcggcgggctctggagaagattgaccttaagttcattgacaccacctccaagtttggccatggccgcttccagaccatggaggagaagaaagcattcatgggaccactgaagaaagaccgaattgcaaaggaagaaggagcttaatgccaggaacagattttgcagttggtggggtctcaataaaagttattttccactgacaaaaaaaaaaa

SEQ ID NO: 2015 - protein, 403 aa, Homo sapiens
MSHRKFSAPRHGSLGFLPRKRSSRHRGKVKSFPKDDPSKPVHLTAFLGYKAGMTHIVREVDRPGSKVNKKEVVEAVTIVETPPMVVVGIVGYVETPRGLRTFKTVFAEHISDECKRRFYKNWHKSKKKAFTKYCKKWQDEDGKKQLEKDFSSMKKYCQVIRVIAHTQMRLLPLRQKKAHLMEIQVNGGTVAEKLDWARERLEQQVPVNQVFGQDEMIDVIGVTKGKGYKGVTSRWHTKKLPRKTHRGLRKVACIGAWHPARVAFSVARAGQKGYHHRTEINKKIYKIGQGYLIKDGKLIKNNASTDYDLSDKSINPLGGFVHYGEVTNDFVMLKGCVVGTKKRVLTLRKSLLVQTKRRALEKIDLKFIDTTSKFGHGRFQTMEEKKAFMGPLKKDRIAKEEGA

SEQ ID NO: 2016 - DNA, 1201 bp, Homo sapiens
ccagatttggctttatatagcggacccgtaaggccgaccggcctctaccggcgggatttgatggcgtgatgtctcacagaaagttctccgctcccagacatgggtccctcggcttcctgcctcggaagcgcagcagcaggcatcgtgggaaggtgaagagcttccctaaggatgacccgtccaagccggtccacctcacagccttcctgggatacaaggctggcatgactcacatcgtgcgggaagtcgacaggccgggatccaaggtgaacaagaaggaggtggtggaggctgtgaccattgtagagacaccacccatggtggttgtgggcattgtgggctacgtggaaacccctcgaggcctccggaccttcaagactgtctttgctgagcacatcagtgatgaatgcaagaggcgtttctataagaattggcataaatctaagaagaaggcccacctgatggagatccaggtgaacggaggcactgtggccgagaagctggactgggcccgcgagaggcttgagcagcaggtacctgtgaaccaagtgtttgggcaggatgagatgatcgacgtcatcggggtgaccaagggcaaaggctacaaaggggtcaccagtcgttggcacaccaagaagctgccccgcaagacccaccgaggcctgcgcaaggtggcctgtattggggcatggcatcctgctcgtgtagccttctctgtggcacgcgctgggcagaaaggctaccatcaccgcactgagatcaacaagaagatttataagattggccagggctaccttatcaaggacggcaagctgatcaagaacaatgcctccactgactatgacctatctgacaagagcatcaaccctctgggtggctttgtccactatggtgaagtgaccaatgactttgtcatgctgaaaggctgtgtggtgggaaccaagaagcgggtgctcaccctccgcaagtccttgctggtgcagacgaagcggcgggctctggagaagattgaccttaagttcattgacaccacctccaagtttggccatggccgcttccagaccatggaggagaagaaagcattcatgggaccactgaagaaagaccgaattgcaaaggaagaaggagcttaatgccaggaacagattttgcagttggtggggtctcaataaaagttattttccactgacaaaaaaaaaaa

SEQ ID NO: 2017 - protein, 354 aa, Homo sapiens
MSHRKFSAPRHGSLGFLPRKRSSRHRGKVKSFPKDDPSKPVHLTAFLGYKAGMTHIVREVDRPGSKVNKKEVVEAVTIVETPPMVVVGIVGYVETPRGLRTFKTVFAEHISDECKRRFYKNWHKSKKKAHLMEIQVNGGTVAEKLDWARERLEQQVPVNQVFGQDEMIDVIGVTKGKGYKGVTSRWHTKKLPRKTHRGLRKVACIGAWHPARVAFSVARAGQKGYHHRTEINKKIYKIGQGYLIKDGKLIKNNASTDYDLSDKSINPLGGFVHYGEVTNDFVMLKGCVVGTKKRVLTLRKSLLVQTKRRALEKIDLKFIDTTSKFGHGRFQTMEEKKAFMGPLKKDRIAKEEGA

SEQ ID NO: 2018 - DNA, 93 bp, Homo sapiens
gctgttcagtgatgaggcctggaatgtgcgctgggcacagcgcccgagacagactgcggaaccgttccttgttgccttccttctgagaacagc

SEQ ID NO: 2019 - DNA, 95 bp, Homo sapiens
gctgttcgttgatgaggctcagagtgagcgctgggtacagcgcccgaatcggacagtgtagaaccattctctactgccttccttctgagaacagc

SEQ ID NO: 2020 - DNA, 55 bp, Homo sapiens
ggggtgatgaaggcctgcacctggtcccctccccaactctgctctgctcctgaag

SEQ ID NO: 2021 - DNA, 62 bp, Homo sapiens
cacagatgatgaacttattgacgggcggacagaaactgtgtgctgattgtcacgttctgatt

SEQ ID NO: 2022 - DNA, 4447 bp, Homo sapiens
cgcgcacgcgcacgggccggcggcgcgcgccgagcggggggcaccgcgcgggtgcagccacgatggaagggggtgcgtacggagcgggcaaagccgggggcgccttcgacccctacaccctggtccggcagccgcacaccatcctgcgcgtcgtgtcttggctgttctccatagtggtgttcggctccatcgtgaacgagggctacctcaacagcgcctccgagggggaggagttctgcatctacaaccgcaaccccaacgcctgcagctatggcgtggccgtgggcgtgctcgccttcctcacctgcctgctgtacctggccctggacgtgtacttcccgcagatcagcagcgtcaaggaccgcaagaaagccgtcctgtccgacatcggtgtctcggccttctgggctttcctctggttcgtgggattctgctacctggccaaccagtggcaggtctccaagcccaaggacaacccactgaacgaagggacggacgcagcccgggccgccatcgccttctcctttttctccatcttcacctgggcgggccaggctgtgctggccttccagcggtaccagattggcgccgactcggccctcttctcccaggactacatggaccccagccaggactccagcatgccttacgcgccctacgtggagcccactgggccggatcccgccggtatgggcggcacctaccagcagccggccaacaccttcgacaccgagccccagggctaccagtcgcagggctactgagccacagtgaccgcctgcccccgcccctccccatctgtcccctctctccacacccagcccctgctcctgcccaggctgccctgcccagcgcctcatcagcctctgccttgtcccactgaggtccagggtagctcggggcaggggtggggcagtccagtgttggggactgtctacgtatgtgcaagtatatcccagggcatgtgccccgcaggggcctagagggtgggggccaggggtatttgcattcatacattgtgtcatcaagcattccttgagcgcctactgggcatccggcctgtgctgggcatgggtggtgacattggcagaaatggccactggaaaggggagcgatgagctgtggaggaagccctggtggtaccagaggccagaatggtgggaaagacagatccagataatgctgggaagtgtggctacaccgtggcttggtcatagggtgagtgtaaacacccacaggacactgggggctgtcaccctgctctggcagtcctgctaagagtgtcagggccgtctccattttatggttgaggaaactgaggtctagagaggtcaagattacttgcccagaatcactcaggcagctagtgatagaggtggggccaagcccaggctgcccgactgcagaccacgtgctcttccctggccacccacctcctaccatccccacgcttggggcttccctgctcagtgttactgtcattctgggaggccttggggccctcagccccttgagacaccctgattctgctgcatgccaagggcctgttctgccccagctgttcctcctcccctggggacagccccacctccgggtccctccacccacatccccctggtcctacccctggcccttggcctcctccaagagggctcaccccgggtgctgctctgtgctctgcgtgtcccacagacgcttgttccagggggctccagcaaaccccttcgtggtctctcaaaggactgatcactgtccttgcctctaggaggggtcactaagcccttacctagggctgggtggacaacaaggcacagatgagggtgtgactggcccgaggtcacggtgagtgagtggcaaagctggccctgacgcctgggtttcttggccccagctgcccagcaggtgcctcgattccctgcccttgtgacctcccaggaaacagaactgatctgggacactatgtcacctctcctctcatctggggtcagtcagggttcgggggctgcagcagccaagcgcatgagaggtgtttccttggccttccagaaggcccactgtggagccagcctccctatgggaggcagagcggcaaggacagggctttggaatcagccaggtcggctcctgggctgtggccgtggagagacactgcccccaggatgacacaggcaagagcccctgaggcatgggaggcccagggaagaccatgggctgtaggggagagtgtggcaggtgacccaaaggcccaaagagggccgtggggcctgaggaggtcataatctcttctgagtgggggcaggtcgattcttgcacaaggtgggctcttcactgagccataagggacagggaggtatgggagagcgctgggggcccatccccctgtccacccagtgtccactggcctgtccttcagggagcagagcagagcaggtggtggacgggcccagtgctgggtgttttcaccaccatccccccatcccccatctaagaatcctaagaggcaggcgatccctcacctgcttactcactcagcagttacccggcccctgtgctggagataccaagggcatgggtggtccctgcttcgatggccccaaagctgggccagagttaagggaaagaggaggaagtcctaagcagagaagtagcaccattatccccatttaacagaagggaaactgaggctcggcaagcataggcgagttggcagtggaacacggatctaaactcaggtgtgtccaagtcctcccaaaggacagcagtgatggagaggaccccagccagctgtgtgacagctggttgttgctgacttcattttccaatccggagaaggggctctgtccacagtcccccgccgccaggtggcccacatgggaccagcatgggggcaggttatctgttggcctgaagagtgaaacctgtaccaggccaaaggtgagggcgtgagtgagggcaggagtgtttatggcagagtgaagttctgtgcccaccacaagaggctgtgagatgttctgaccctcacccactgtccaccaaaagcctctcctgctgatgggcactaggagacctcagggtactgcccatctgtttctcctcgggtgccagccagctgctggtgatcctcagccggagggcagggtaccaggtaagcttaactccatcttgggtgtttgtgacaggccctgcctgccaccctaggcagggaaagctgtcaagactcctgccaggaatggggggtgctgagtcatctcacgaagaatccctcactcttcccgggttcagcccagaagcccttccaggcatgatcttccccatcaggctgggctctggcagggacctgcccaggatggagatgagagagggtgagagatggagggcgagatttggatgggacccagggctcctgactctgccctggaaggttcatggggaaactcgctccttctgttggcagaggacagcccctggggaaccccaggcccaactctgtccggtatcccttttcctcccagctgccctcccctacttctcccttgctcccaaagctttccttggagaagggccctcctgcagctggaccctgcagggtggctccctcctccccatcaagcacaagagagggcccaggaaaaaaggtttcacataagtgtagagtcgcaaggacgcttagagtcggcagagtctggggtagggagacagcgacttgtccaaggtcaagcacagagggagaggttcaggagtcaggtcttctgccttctgagttggctcatcctgggcagtcacagactgtcctgcctgcacggctcctatccacctgggggtgtcgcagttgaggggctaattcccaggggactgacgttagttccctactccatccttccctggtgattcttgatcttcaaagcctcggggatcccaggtttccccatgtaactgagacaccctgcctgttagccctgggagacccctaaccttggcccaagacccctttgattctctaaggagcacgaaagggggaatgcccctcccaggagtttatgggagaagggactgggccggctgcctcccagcgatgcacttgacctgacactccccatgtcctggtgcgcacagcccttgtcggtgccccggcccctcccgcagcgttactgcctgtgtatagtataaatatatatattttctatatataagatgtataatataaggctccacaaatatatctgtgtgtgtgtgtgcgtgtgtgtgcggtgaagggcggtccccatcctgggcccccactctagacccccccaccacctggttaagtctcgagtgaatccagtggccccgtggcaccctcctttatgacatccatccatctgtggtgaaccaagtgaaggtggtgacttctggtgacatagtaataaagtgaagactcagaacccaccagcgattgcaaaaaaaaaaa

SEQ ID NO: 2023 - protein, 233 aa, Homo sapiens
MEGGAYGAGKAGGAFDPYTLVRQPHTILRVVSWLFSIVVFGSIVNEGYLNSASEGEEFCIYNRNPNACSYGVAVGVLAFLTCLLYLALDVYFPQISSVKDRKKAVLSDIGVSAFWAFLWFVGFCYLANQWQVSKPKDNPLNEGTDAARAAIAFSFFSIFTWAGQAVLAFQRYQIGADSALFSQDYMDPSQDSSMPYAPYVEPTGPDPAGMGGTYQQPANTFDTEPQGYQSQGY

SEQ ID NO: 2024 - DNA, 1341 bp, Homo sapiens
cgcgcacgcgcacgggccggcggcgcgcgccgagcggggggcaccgcgcgggtgcagccacgatggaagggggtgcgtacggagcgggcaaagccgggggcgccttcgacccctacaccctggtccggcagccgcacaccatcctgcgcgtcgtgtcttggctgttctccatagtggtgttcggctccatcgtgaacgagggctacctcaacagcgcctccgagggggaggagttctgcatctacaaccgcaaccccaacgcctgcagctatggcgtggccgtgggcgtgctcgccttcctcacctgcctgctgtacctggccctggacgtgtacttcccgcagatcagcagcgtcaaggaccgcaagaaagccgtcctgtccgacatcggtgtctcggccttctgggctttcctctggttcgtgggattctgctacctggccaaccagtggcaggtctccaagcccaaggacaacccactgaacgaagggacggacgcagcccgggccgccatcgccttctcctttttctccatcttcacctggagcctgaccgcagccctggccgtgcggagattcaaggacctaagcttccaggaggagtacagcacactgttccctgcctcggcacagccgtaggcctccccggcttgcagaggccggcagccctgtatcacccctggcagtgaggtggcaggagcagcctagtgccagaaatgtccaagatgccagggcatgcagggcagtggaaggctggcttgaggaaccaattcaggttctccactgactcattcattccttcaccgcctccttcattgattcttcatgcgttcattcattcagtaaacatttattgagcagctgttttgtgcctagtgatgaattaggtggggtccttggctccaggagcccacaggctggggaggagaaaacaaacacatcaatatctcttccaaatggacagccgtggacagttaccaggtaggtagcggccccatacatgggctgcctagaggcgttcatggtccccattgctgagctgtgggtgcagagcaatagcctctcccttcacagcggtgtgaagagtgacctcactgtccttagggttagcatcctggccgaggatgtcacagggctcctggtctggctctgtcctcatgtgctatgtgaccctgacaaacccgtgcacctctctcagcctcagtccacttacctgaactgaggggtgataatggaccaacctctcaaggctgttgtgccaatgaaacaaaggccagcccagggcttagcacaagcatgctcaataaatgtaagctcttttgttcattcattcattcaaaaa

SEQ ID NO: 2025 - protein, 191 aa, Homo sapiens
MEGGAYGAGKAGGAFDPYTLVRQPHTILRVVSWLFSIVVFGSIVNEGYLNSASEGEEFCIYNRNPNACSYGVAVGVLAFLTCLLYLALDVYFPQISSVKDRKKAVLSDIGVSAFWAFLWFVGFCYLANQWQVSKPKDNPLNEGTDAARAAIAFSFFSIFTWSLTAALAVRRFKDLSFQEEYSTLFPASAQP

SEQ ID NO: 2026 - DNA, 1307 bp, Homo sapiens
ccagcaggcatgcctccttggtctcatgttgaccttagagtttgggattctggaattcgatccttcatggataggcagctggacacagaggtcgtgggtgagctggaggagcaggcccggatgtgagctgttctccatagtggtgttcggctccatcgtgaacgagggctacctcaacagcgcctccgagggggaggagttctgcatctacaaccgcaaccccaacgcctgcagctatggcgtggccgtgggcgtgctcgccttcctcacctgcctgctgtacctggccctggacgtgtacttcccgcagatcagcagcgtcaaggaccgcaagaaagccgtcctgtccgacatcggtgtctcggccttctgggctttcctctggttcgtgggattctgctacctggccaaccagtggcaggtctccaagcccaaggacaacccactgaacgaagggacggacgcagcccgggccgccatcgccttctcctttttctccatcttcacctggagcctgaccgcagccctggccgtgcggagattcaaggacctaagcttccaggaggagtacagcacactgttccctgcctcggcacagccgtaggcctccccggcttgcagaggccggcagccctgtatcacccctggcagtgaggtggcaggagcagcctagtgccagaaatgtccaagatgccagggcatgcagggcagtggaaggctggcttgaggaaccaattcaggttctccactgactcattcattccttcaccgcctccttcattgattcttcatgcgttcattcattcagtaaacatttattgagcagctgttttgtgcctagtgatgaattaggtggggtccttggctccaggagcccacaggctggggaggagaaaacaaacacatcaatatctcttccaaatggacagccgtggacagttaccaggtaggtagcggccccatacatgggctgcctagaggcgttcatggtccccattgctgagctgtgggtgcagagcaatagcctctcccttcacagcggtgtgaagagtgacctcactgtccttagggttagcatcctggccgaggatgtcacagggctcctggtctggctctgtcctcatgtgctatgtgaccctgacaaacccgtgcacctctctcagcctcagtccacttacctgaactgaggggtgataatggaccaacctctcaaggctgttgtgccaatgaaacaaaggccagcccagggcttagcacaagcatgctcaataaatgtaagctcttttgttcattcattcattcaaaaa

SEQ ID NO: 2027 - protein, 192 aa, Homo sapiens
MLTLEFGILEFDPSWIGSWTQRSWVSWRSRPGCELFSIVVFGSIVNEGYLNSASEGEEFCIYNRNPNACSYGVAVGVLAFLTCLLYLALDVYFPQISSVKDRKKAVLSDIGVSAFWAFLWFVGFCYLANQWQVSKPKDNPLNEGTDAARAAIAFSFFSIFTWSLTAALAVRRFKDLSFQEEYSTLFPASAQP

SEQ ID NO: 2028 - DNA, 3240 bp, Homo sapiens
actcgctgctctgcggggaggcgggcgctcccgcaggggttcctccaagatggcggcgcagaggaggagcttgctgcagagtgagcagcagccaagctggacagatgacctgcctctctgccacctctctggggttggctcagcctccaaccgcagctactctgctgatggcaagggcactgagagccacccgccagaggacagctggctcaagttcaggagtgagaacaactgcttcctgtatggggtcttcaacggctatgatggcaaccgagtgaccaacttcgtggcccagcggctgtccgcagagctcctgctgggccagctgaatgccgagcacgccgaggccgatgtgcggcgtgtgctgctgcaggccttcgatgtggtggagaggagcttcctggagtccattgacgacgccttggctgagaaggcaagcctccagtcgcaattgccagagggagtccctcagcaccagctgcctcctcagtatcagaagatccttgagagactcaagacgttagagagggaaatttcgggaggggccatggccgttgtggcggtccttctcaacaacaagctctacgtcgccaatgtcggtacaaaccgtgcacttttatgcaaatcgacagtggatgggttgcaggtgacacagctgaacgtggaccacaccacagagaacgaggatgagctcttccgtctttcgcagctgggcttggatgctggaaagatcaagcaggtggggatcatctgtgggcaggagagcacccggcggatcggggattacaaggttaaatatggctacacggacattgaccttctcagcgctgccaagtccaaaccaatcatcgcagagccagaaatccatggggcacagccgctggatggggtgacgggcttcttggtgctgatgtcggaggggttgtacaaggccctagaggcagcccatgggcctgggcaggccaaccaggagattgctgcgatgattgacactgagtttgccaagcagacctccctggacgcagtggcccaggccgtcgtggaccgggtgaagcgcatccacagcgacaccttcgccagtggtggggagcgtgccaggttctgcccccggcacgaggacatgaccctgctagtgaggaactttggctacccgctgggcgaaatgagccagcccacaccgagcccagccccagctgcaggaggacgagtgtaccctgtgtctgtgccatactccagcgcccagagcaccagcaagaccagcgtgaccctctcccttgtcatgccctcccagggccagatggtcaacggggctcacagtgcttccaccctggacgaagccacccccaccctcaccaaccaaagcccgaccttaaccctgcagtccaccaacacgcacacgcagagcagcagctccagctctgacggaggcctcttccgctcccggcccgcccactcgctcccgcctggcgaggacggtcgtgttgagccctatgtggactttgctgagttttaccgcctctggagcgtggaccatggcgagcagagcgtggtgacagcaccgtagggcagccggagaatgcagcccaagcagggcctggcatggggcaggacagggtccagccttttcctaacatctgcctgtgccacaacggccagcaggtgccccatcctctgcccacagcagactctgtcccatggctctccgggcagtagagtgtgtgagtgcagactggacctgtggttcataccttgtcaccacccgggaagctgaaggccacttcctcccagatggcctcagccaggaccatcgccctttctcagagcagagggccaggtatagaaaccgcagtgggcctgcaagccgcccgagcctccccagcagcctcctacagagcaggaagaggcgccctgtgaaccctgagtgttgcaggcccagcagaccctgctgtcccaagcccacccctcctcccaccatcacctccctcacctcgggacagtagccctccacttctccagcctctcagccctgtgctcctgcatccagagtggaacccaggctggtgtccgcatctgtccctgggccccacccctggacctgccttggttgtgtcatctgttgtaaacgttcaggaggaccagggcagcatctggggcctgggatggccacagaaggggcaggccaggtggaaaggagccagggggaagtggtctaagagacctggaactgccagaggatggcggcctgggcttccccagagccaggcgtgcgggagaggtgaggactggccccggtgggctgaggcaggggccgctgtcgtcaggcctgagccagggtgagctggtgcctgccttgcattttccttctggtgctgtgaagaccataggctggcaggcagctgagatgaactgtctttaccactgatgaggggcctctgccggctgagggtagcaagcaggggttgtgagtcaggctgggggacttgtttgaaagaaagaggagtggaaaatggttccaggagggaagaggttctttgagacacagtaccctgggaggcataggagaagggtcgggccagcccagcccagggcctgagttagactatttcccacatgttctctgccttcagtggggagggggtgccaccagggctgtcggccaggattgccactcctgtttcagaggaagcaggccgagagacttgcaccttggccaagccacacaatcagtggggcagccagagctcagacctgagccattttgtcagtatccaggaccccccggattctccacgccctccccatctcccagtctccctgccccccatgccccagaccggcccaccagggactagccgctgtcgcacagcctctggggtgcttggtctctgcgaagtcaaaggcctgacagctctgtggcctgggaatccattttcctgcggcagagcagggcctggtgtggaaccagggagctgtgggaagccacagcagaaatggaagaaaaacaggtctcagcccagggtcctcgctcactccctcactccccactttgaagccatctctgttctgcaggtgagaggatttaaagtcagtcacaaaggcttgggaacaaaaggaattctcttccaagaatgcctctgtggtgctgtttggtctctagaaacagggtcacttttttaatgtagtaaagaagtaataaatggtggcattacacattgtgatattaaaaaaaaaaaaaaaaaa

SEQ ID NO: 2029 - protein, 504 aa, Homo sapiens
MAAQRRSLLQSEQQPSWTDDLPLCHLSGVGSASNRSYSADGKGTESHPPEDSWLKFRSENNCFLYGVFNGYDGNRVTNFVAQRLSAELLLGQLNAEHAEADVRRVLLQAFDVVERSFLESIDDALAEKASLQSQLPEGVPQHQLPPQYQKILERLKTLEREISGGAMAVVAVLLNNKLYVANVGTNRALLCKSTVDGLQVTQLNVDHTTENEDELFRLSQLGLDAGKIKQVGIICGQESTRRIGDYKVKYGYTDIDLLSAAKSKPIIAEPEIHGAQPLDGVTGFLVLMSEGLYKALEAAHGPGQANQEIAAMIDTEFAKQTSLDAVAQAVVDRVKRIHSDTFASGGERARFCPRHEDMTLLVRNFGYPLGEMSQPTPSPAPAAGGRVYPVSVPYSSAQSTSKTSVTLSLVMPSQGQMVNGAHSASTLDEATPTLTNQSPTLTLQSTNTHTQSSSSSSDGGLFRSRPAHSLPPGEDGRVEPYVDFAEFYRLWSVDHGEQSVVTAP

SEQ ID NO: 2030 - DNA, 1994 bp, Homo sapiens
actcgctgctctgcggggaggcgggcgctcccgcaggggttcctccaagatggcggcgcagaggaggagcttgctgcagagtgagcagcagccaagctggacagatgacctgcctctctgccacctctctggggttggctcagcctccaaccgcagctactctgctgatggcaagggcactgagagccacccgccagaggacagctggctcaagttcaggagtgagaacaactgcttcctgtatggggtcttcaacggctatgatggcaaccgagtgaccaacttcgtggcccagcggctgtccgcagagctcctgctgggccagctgaatgccgagcacgccgaggccgatgtgcggcgtgtgctgctgcaggccttcgatgtggtggagaggagcttcctggagtccattgacgacgccttggctgagaaggcaagcctccagtcgcaattgccagagggagtccctcagcaccagctgcctcctcagtatcagaagatccttgagagactcaagacgttagagagggaaatttcgggaggggccatggccgttgtggcggtccttctcaacaacaagctctacgtcgccaatgtcggtacaaaccgtgcacttttatgcaaatcgacagtggatgggttgcaggtgacacagctgaacgtggaccacaccacagagaacgaggatgagctcttccgtctttcgcagctgggcttggatgctggaaagatcaagcaggtggggatcatctgtgggcaggagagcacccggcggatcggggattacaaggttaaatatggctacacggacattgaccttctcagcgctgccaagtccaaaccaatcatcgcagagccagaaatccatggggcacagccgctggatggggtgacgggcttcttggtgctgatgtcggaggggttgtacaaggccctagaggcagcccatgggcctgggcaggccaaccaggagattgctgcgatgattgacactgagtttgccaagcagacctccctggacgcagtggcccaggccgtcgtggaccgggtgaagcgcatccacagcgacaccttcgccagtggtggggagcgtgccaggttctgcccccggcacgaggacatgaccctgctagtgaggaactttggctacccgctgggcgaaatgagccagcccacaccgagcccagccccagctgcaggaggacgagtgtaccctgtgtctgtgccatactccagcgcccagagcaccagcaagaccagcgtgaccctctcccttgtcatgccctcccagggccagatggtcaacggggctcacagtgcttccaccctggacgaagccacccccaccctcaccaaagacccttccaggcctgcaagcgatttgacagccatccctcagtgccaactaaacctcctgggcagcctgaccccagggtaggaaggaagcgcctacaccaaggggccctctgggagctgagatcatcctggggttttgtcgcctggtctgacttgtgcactgggatcttctcgtgccaggccaggccccgccccctccccgggactgggcagaccccctccctcatgcatctgtgtccactgaggcttccctcacctagaatggcccatccttcaggacccagctcactctcatcttctttccagggacttatcccccaaggctgtcctctgttctggtgagctcagggctcttggaacttggtctgcagtgactctggggttcctggttaggacccatgttctctaggtcccagcaccctgcacggggcagtgtttgtgacactgggcccagctattctgagagaaggactccaaccttccatcaggtgtggcccgagatgtgggtggccctgggcatggggcatggatgcattgtgactttcatgggcctcttctgcaaaaaaaaaattaaaattatactttatgactattggtagaaagataaatatattaatacattaaaatttctctttgag

SEQ ID NO: 2031 - protein, 462 aa, Homo sapiens
MAAQRRSLLQSEQQPSWTDDLPLCHLSGVGSASNRSYSADGKGTESHPPEDSWLKFRSENNCFLYGVFNGYDGNRVTNFVAQRLSAELLLGQLNAEHAEADVRRVLLQAFDVVERSFLESIDDALAEKASLQSQLPEGVPQHQLPPQYQKILERLKTLEREISGGAMAVVAVLLNNKLYVANVGTNRALLCKSTVDGLQVTQLNVDHTTENEDELFRLSQLGLDAGKIKQVGIICGQESTRRIGDYKVKYGYTDIDLLSAAKSKPIIAEPEIHGAQPLDGVTGFLVLMSEGLYKALEAAHGPGQANQEIAAMIDTEFAKQTSLDAVAQAVVDRVKRIHSDTFASGGERARFCPRHEDMTLLVRNFGYPLGEMSQPTPSPAPAAGGRVYPVSVPYSSAQSTSKTSVTLSLVMPSQGQMVNGAHSASTLDEATPTLTKDPSRPASDLTAIPQCQLNLLGSLTPG

SEQ ID NO: 2032 - DNA, 5102 bp, Homo sapiens
gagcggccgcgccgggtccccgggacggggtggaagtgggggtggggggaggggatcggggccgggccggggccgcgctgcctgcgatgccgggcgcccgccgcagccgctgccgccggagcccgggatggggcgagaggctgcggcggacgccagcatctccccgccggggaccccgggggccgcggagccgccgccgccgctgctgccgccgttgctgagacccagcgggcgatgggatgaagatgagacgctacaagctctttctcatgttctgtatggccggcctgtgcctcatctccttcctgcacttcttcaagaccctgtcctatgtcaccttcccccgagaactggcctccctcagccctaacctggtgtccagctttttctggaacaatgccccggtcacgccccaggccagccccgagccaggaggccctgacctgctgcgtaccccactctactcccactcgcccctgctgcagccgctgccgcccagcaaggcggccgaggagctccaccgggtggacttggtgctgcccgaggacaccaccgagtatttcgtgcgcaccaaggccggcggcgtctgcttcaaacccggcaccaagatgctggagaggccgcccccgggacggccggaggagaagcctgagggggccaacggctcctcggcccggcggccaccccggtacctcctgagcgcccgggagcgcacggggggccgaggcgcccggcgcaagtgggtggagtgcgtgtgcctgcccggctggcacggacccagctgcggcgtgcccactgtggtgcagtactccaacctgcccaccaaggagcggctggtgcccagggaggtgccgcgccgcgtcatcaacgccatcaacgtcaaccacgagttcgacctgctggacgtgcgcttccacgagctgggcgacgtggtggacgcctttgtggtgtgcgagtccaacttcacggcttatggggagccgcggccgctcaagttccgggagatgctgaccaatggcaccttcgagtacatccgccacaaggtgctctatgtcttcctggaccacttcccgcccggcggccggcaggacggctggatcgccgacgactacctgcgcaccttcctcacccaggacggcgtctcgcggctgcgcaacctgcggcccgacgacgtcttcatcattgacgatgcggacgagatcccggcccgtgacggcgtccttttcctcaagctctacgatggctggaccgagcccttcgccttccacatgcgcaagtcgctctacggcttcttctggaagcagccgggcaccctggaggtggtgtcaggctgcacggtggacatgctgcaggcagtgtatgggctggacggcatccgcctgcgccgccgccagtactacaccatgcccaacttcagacagtatgagaaccgcaccggccacatcctggtgcagtggtcgctgggcagccccctgcacttcgccggctggcactgctcctggtgcttcacgcccgagggcatctacttcaagctcgtgtccgcccagaatggcgacttcccacgctggggtgactacgaggacaagcgggacctgaactacatccgcggcctgatccgcaccgggggctggttcgacggcacgcagcaggagtacccgcctgcagaccccagcgagcacatgtatgcgcccaagtacctgctgaagaactacgaccggttccactacctgctggacaacccctaccaggagcccaggagcacggcggcgggcgggtggcgccacaggggtcccgagggaaggccgcccgcccggggcaaactggacgaggcggaagtctagagctgcatgatctgatagggtttgtgacagggcgggggtggcggcggcccctagcgctatctccctgcctcctgccggctccttggttcttgaggggaccaggagtgggtggggagtgggggtgggggtagggtttccctactgaagcccttgtgaatcaagggtcaggcctttgagctcagaaaatatccctcctgttgggagagggcgcaggccgtgacgtctgggtggcccttatgactgccaagactgctgtggccaggaggtgccactggagtgtgcgtggtggtccctgggtagcgggggagggtaggcaggattggggaagagagcctgcaggatctcaccaggcagcctctggggggtggccaggccgggaaaaagcccaccatttggcatccctgggccttgggctccgtgtgggagaccggcctgccaggaggacccagggctctgtaagtagatgcatttgggtccaggaggaagcgtggacacctcgtagggaagagatgaaaaagccacatcctaccaagaggaggtgctgagggatgctttgcagtgtagtcagaagtgctgggccagatggagacagaactccaccccctgccgcaaaggacaggacctggctgccctgggatgctggtgcctgagtctgtctctgtgcacccctcaggctgtcgtgagccaacacaggggcctggagaaccctgaggagctttccttttggttctaaacccggcgttgacgttccttctccctttcacattgctgtcttgtggactgtgcactcagtccttgcaaggccaagagtccagttgtaggtgtggccttgagggggaagtggggaggagaagactgacatgagtcctctgcacggatccgtctctccctccccatcaccccttccttctgacacccagtcccagctgtccactgtcccaggtgcagtcactgttgtgcccttccttggggcaggctggctgggggccagaaaggggccatgaggctgtcttgggcccaaaaagggacaataaggccagttgtatgcttcctgttcctcatagcttgccttggtggggatgtctttgttggagttgattctgagctgctgtgattaggagaccctgaaatacagtggtttaagcaagatggaagcttgtttctaattagtctagattgagatggcccagagctggtagggcagctctgcgtttcttcatacgcaccttccaattctgggtacacagcggctgctccagcgcccaccctcctgtgtgcatccaagcctgggggaagcagaaatagacaagagggcacacccactttttgctaaaggcatgagccagaattggcaggctcacctctgctggcctctcattggctgggactcagtcacatggccacaagcagctgctagggaacctgggaagtgtagtcttcagcggggccgccatgtgcctggcctcaccttgggagttatcttattgatggaggagaagagaatggatatgggggaccagtagcatctctgggagagggggagggagcagcaataactcagtcgtcggatccagctctcattgtcagagtttccggaacagcttgctcctgtttccctcactgtgcagcccagggctgggggcagtgaggagcttgcagctctgtgggaaggggaaacaccccctcccctcggcccctcagacgctacccaatgatgccggtttgcagagttggcctgtggaatggctcatgtttgtgcgtgtgtgtgtgtatatttatgggcatgggtgcatgcttggtgtgtatttgtacatgtctgtattgctgtgtccctgtaaatacatgcttgtgtatggatggaagaggccaggcccaggcctggcctcttcctcgggcctgtggccacacctcctgcagctccccaaaatgactgaggcagaaagcccttggggagcctagaaagcaaagctaaaggggatgcagggtctgtctgtctgtctgtctttcagtctgaggaatgagaatcctgacctgagggctgtgcagctgagagcccactacctccccagcccctctcggccccagccgcatcatcccacctgtcccctcccccccacctccagtggggctttctccagatgtcttatggttgggggtttcctgatgggccaggagaggagggcatcttcttgcgacagcactgtctgggttaagtgcccagtgagggcatggtgtggggagctggcctcagaggagccgctggtgggcaagcgtgaagtgggctgaggggctctgagccactttgctcccatctaggggactgccccccatggaactcctttgaagtcacagcagccttcctttctgtttgctcttggggctgagaggtggctcaaacactcggggtccctatggctctgggtcaatctaggccaggctgcaccccatggacagggagtctcagggctcctgatcatgcccaggccctggcctggggcctccctccttggcagctttcccacccccacgcccctggcatcctcagttgctatgggatgcccctccagggcaccagctcagggctaagcgaaggaagataggagcagctcagagctgccaggctctgccttcctcacagacctggtggggcaggtcctgttcacagcagcaggagtgaaggcctggccatcggtggagagggcagctgtcagagggctgggggccagggcacaggattgaagagtttcacatatcatcacagcatacactgggaatttggtgggggcagaagaacccagggccactccctcaatatgaagggaaaccaagctgaatgtgaccaccggcacactgctgccatgtcccatgtccacctttctccccgggaataactggccctgagacccctagacccaaggaggcctgtccatgccaagcatccgggaagcatggctggccttatccacccatgggtcacgtcggttcccaggggcagcatgggagatctttgggggcaacagggagagtctgggtggggagacgggacttgtccaagcagaaggcaggaccctgggaaatgcataatgtaaggacatcaataatagtattattttttttgtaagggaaaatcaatatgtacattctgaaatcattttctctgtaaatggttggatttcatttcacccttaaagggatgcttaaaggagaagataatattaataataaaaacagctacaaagtctgaaaaaaaaaaaaaaaaaa

SEQ ID NO: 2033 - protein, 533 aa, Homo sapiens
MKMRRYKLFLMFCMAGLCLISFLHFFKTLSYVTFPRELASLSPNLVSSFFWNNAPVTPQASPEPGGPDLLRTPLYSHSPLLQPLPPSKAAEELHRVDLVLPEDTTEYFVRTKAGGVCFKPGTKMLERPPPGRPEEKPEGANGSSARRPPRYLLSARERTGGRGARRKWVECVCLPGWHGPSCGVPTVVQYSNLPTKERLVPREVPRRVINAINVNHEFDLLDVRFHELGDVVDAFVVCESNFTAYGEPRPLKFREMLTNGTFEYIRHKVLYVFLDHFPPGGRQDGWIADDYLRTFLTQDGVSRLRNLRPDDVFIIDDADEIPARDGVLFLKLYDGWTEPFAFHMRKSLYGFFWKQPGTLEVVSGCTVDMLQAVYGLDGIRLRRRQYYTMPNFRQYENRTGHILVQWSLGSPLHFAGWHCSWCFTPEGIYFKLVSAQNGDFPRWGDYEDKRDLNYIRGLIRTGGWFDGTQQEYPPADPSEHMYAPKYLLKNYDRFHYLLDNPYQEPRSTAAGGWRHRGPEGRPPARGKLDEAEV

SEQ ID NO: 2034 - DNA, 5730 bp, Homo sapiens
cctccgcctccactcgccctcgtgctcccttcagccccttcgcagctccgtgcgcaaggtcgtgtcccggaagtgaaggggccatgttgatgggtgacccggggagaggtacccggccagaggcgagtcctgcggagtggtagcgcgcacggcctgcggtgtgacacccagcccctgccagtcccccatggccccgtggagccgagaggcggtgctgagtctctatcgggctctgttgcgccagggccgacagcttcgctacactgatcgagacttctactttgcctccatccgccgtgaattccgaaaaaatcagaagctagaggacgctgaggcccgggagaggcagctggagaagggcctggtctttctcaacggcaaattggggaggatcatttaggatcctccaagggaaagaggacaaaggtgccttctgtagacactcctgctctcttccatccccatcttacagatgtattaagaagcctcagatgagcaatggcaggcgctggtgagcgcaaaggcaagaaggatgacaatggcattggcacggccattgactttgtgctctccaatgcccggctggtgctgggggtgggtggagcggccatgctgggcatcgccacgctggcagttaagcggatgtacgatcgggcgatcagtgcccctaccagccccacccgcctgagccattcggggaaaaggagctgggaagaacccaactggatgggctccccacgactgctgaacagggacatgaagacgggcctgagccggtccttgcagacccttcccacagactcctccaccttcgacacagatacattctgcccgccccggcccaagccagtggccaggaagggccaggtagacttgaagaagtcacgactccgcatgtccctgcaggagaaacttcttacttactaccggaaccgggcagccatccctgctggagagcaggctcgggccaagcaagctgctgtggacatatgtgccgagctccggagcttcctgcgggccaagttgcctgacatgccgcttcgggacatgtacttgagtggcagcctctacgatgacctgcaggtggtgacagctgaccacatccaactcattgtgccccttgtgctggagcagaacctgtggtcatgtattcctggtgaagacaccatcatgaatgtccctggcttcttcctggtgcgtcgtgagaatccagagtactttcctcgtgggagcagttactgggaccgctgtgtagtagggggctacctctctccaaagacagtcgcagatacatttgagaaggtagtggctggctccatcaattggccagccatagggtccctcttggactatgtgatccgcccggccccacccccagaagccctcacactggaggtgcagtatgagcgtgacaaacatctcttcattgacttcctgccatcagtgaccctcggtgacacagtcttggtggccaaaccacaccggctagcccagtatgacaacctgtggcggctgagcctgcgtcccgcggagacggcacgcctgcgggctctggaccaggctgactcgggctgccgatctctgtgcctcaagatcctcaaggccatatgcaagtccaccccggctctgggccacctcactgccagccagctaaccaatgtcatcctccacttggcccaggaggaggctgactggtctccggatatgctggccgaccgtttcctgcaggccttgaggggacttatcagctacttagaggctggagtcctgcccagtgccctaaaccccaaggtgaacttatttgcagagctcacccctgaagaaatagacgaattaggatacactctgtattgctcattgtctgagccagaggtgctgctgcagacgtagggcaggtgaaggccaaagcgggtgttggtggtcaggccctggattctccgttagatacacttggctacctagttggtgcctcacagggttcctgctgcctggtgtcttgctgatcatcaccctggtcacttcatgctgattagaatgacatctctttcgtctcctattttgttacccaactcttcctatttttgttaccaatcactgtgctctctgccgccccctggctccaggctaatttttctggaatgaattgagaaggtggcgtgctggcctgagctgatggaccacttggtgttttgcgttttggcccatgtttgctgcctctatctggtctgccttgcccgtttgcctgttcctattcagtgtcttttctattttttcctctctcgttcatgccttctgttttgctcttgtccctggagcatatctgcctaattaagatgttgccttttagttgaatgccactgaagagctgtgatagcatgtttcaaagctgaactctacagagcgagtgctgagacagtatttagggtttctgggagtgaggctggtagaagagttggcctttgaccacggttcctggagtagaagtccatcctccccccaacctcctgacccattcataaatgctgagaatgtctctcatgggaacactgttaatgacccacacaggataagctgaatgcaaagttatttgcaggttgaatttcttggtggctattagcagaagtgcagagtagggaaccagagctggttaagggcctagtgaagggtttgtgtgcccagtgtctgctcgtcatctgtggctgcaggggtcagacagacaaggatggggactgccagggcaccacttcatcatgaatgctggttttcacaccttttccttattttattgccaatcaggacaaggccttgaaggaacgcagccttagacatcaggtgaggatgatggaggtagacagtcgactgaatgtcagctggaaaatccagtcactagttggggtttggtggccatgttttctacccagacaggccctgcttttctaggatgtggccttagagcaagaacagacccaacagccagcccttcatcctccagcgtctgccataggaatgtgagaggggtgtttgctgagcgctccgggcacggccagagggcaagtgagcatgcacggacctcttccccctgtcctgtttctcacccagcacctggggagatcggtgctaccaaggaagagagcacacagataagacagaggggaggaggtgggcatttcctacattcctccttgtttgccgctgctgagattgcagtatttattgcaatgtaaatgtatcctgaaggtggggaggaatgtttaatctaccatgtccgtgtgtcatcttggtttgtgtttttccctgtttgtagcaagactctgatgataattctgtttctcatctgcccattcagtattttgttttccttccgtcaagttgtcttattttttcaatgactacctctccatcattgaggttctggtgaagctctctgcagctgtctcattccttcccaacgatagtaacaggaaatgactctttagcatcgatacctcaacatcaatttagggtagagattcctgcccctcttttgtcacagattaggaaattgagaactagggttaaccttgactatatttagaggtctttttgcctcttttccccttaacaaggatttcttatggtggtttcagtttcatttgcataaaggtattgagagggaacaaaaaacataaagctgagaatcttgagagagctcatctaccctgtctgttggtcagactcaaatgagagttaaaaaaaaaaaaaaaaatctgtatgcctgagtaccatcctggatgaatctagaaggtatggggtagagcttgacagggttcctgtgtacccactgggtatccgttagaggtaagggagaggagaggattgatagagtgttgcaaaagtatagattattcattgagataaaggatttggtttccctgccatgagtattaaaaaaatttaagttttcccaagcttgcatctctgaccaaatttcacataaaacattggaaggaggctgggtgcggtggctcatgcttgtaatcccagcactgggaagctaaggcgggtggatcacttgaggtcaggagttcgagaccagcctggccaacatggtgaaaccccgtctccacgaaaaagataaaaataagctgggcgtggtggcaggcgcctataatcccagctactcgggaggctgaggcaggagaataacttaaacccgggaggcggaggttacagtgagctgagatcgtgccactgcactccagcctgggtgacagagtgagaccctatttcaaaaaaataaaaattggaagaagagcttaaaaaagataagattttaaagagtcccaagttatttaagttgagtgtaattgtcatttaaggaaggcaaatgagtttatcatccttcttaaagagcatctcttttaactgttggacaaaaccataactttgtcattttacaaggaagaacctcttaagaagtcctcagaaccagaagcaatgtgaactctcagcgctggtcctggtgggtttgctgaccatgactgggcaagccgttctttttgctgccatcttcctcatcataaagtgtggaacataggcaattgctttgagattcttggatagaagaggacaacattctgcacctgcccccttttttaaatctttggggaaagatgagtaactttccccactactctgccttcctgttcagtaactcttacttttgcctgaagtaacagcatcttctacttctccatctagagatttttgtgtgtgtgccatcaaggttagcaaactttatacgtagcctaacacttaaaaaatgcactcattatcttaaacctaataaattccagagtttattttggttctcctctgttgcccttcctaaaaaatgagctgaagatgacagtatttttctttacatgcttggttatgacttttaaagttttatttaaataaatgttgaagctcaagtttaaagaagcgttgcagaggcccacggtctcctgggtcccggccacctgtccatattccacatttgctgactgtgctccctgcactccactcaagttgagagttcaaatagtcttgaaggggaatcagcttcaggatggaaggacccaggagaggccccgaggtgggagggttctgtaaatacagactactgcgagtgtccagagctctctgccatgatacttccttgggactgacttggctgagaacgtgttctgtcagaggatttgttagaactctgcccttttgtctgaaactcaaggccaaggagaatgataggagacttaggacagagctgacccttgcaccaggctgggaggctgcagcccttttagatgccacttactgtaagtggccagaataccagagaggtgggttccatggtcaaatgcacagtaggtgtttacctttacatttggatcaccttgtagtctttaaattcttggtccctgaggccaagtccacaacttgccttctagtcacttgcctgcccgcagtggtggtggatgtgttagctggtagatttggaatcagtcaccagtctttctgtactgtcttggttagctctatataagtaggggcagcttagccctgaggcccagagacctgctgtcctttttctccttgagggaggaaataaaactgcggaatacaatgtccttccatagcatgggaagaagaaaataaacatctcctttccaacaaaaaaaaaaaaaaaaaaaaaaaaaaaaaaaa

SEQ ID NO: 2035 - protein, 463 aa, Homo sapiens
MAGAGERKGKKDDNGIGTAIDFVLSNARLVLGVGGAAMLGIATLAVKRMYDRAISAPTSPTRLSHSGKRSWEEPNWMGSPRLLNRDMKTGLSRSLQTLPTDSSTFDTDTFCPPRPKPVARKGQVDLKKSRLRMSLQEKLLTYYRNRAAIPAGEQARAKQAAVDICAELRSFLRAKLPDMPLRDMYLSGSLYDDLQVVTADHIQLIVPLVLEQNLWSCIPGEDTIMNVPGFFLVRRENPEYFPRGSSYWDRCVVGGYLSPKTVADTFEKVVAGSINWPAIGSLLDYVIRPAPPPEALTLEVQYERDKHLFIDFLPSVTLGDTVLVAKPHRLAQYDNLWRLSLRPAETARLRALDQADSGCRSLCLKILKAICKSTPALGHLTASQLTNVILHLAQEEADWSPDMLADRFLQALRGLISYLEAGVLPSALNPKVNLFAELTPEEIDELGYTLYCSLSEPEVLLQT

SEQ ID NO: 2036 - DNA, 2022 bp, Homo sapiens
tttctactttgcccgcccacagatgtagttttctctgcgcgtgtgcgttttccctcctccccgccctcagggtccacggccaccatggcgtattaggggcagcagtgcctgcggcagcattggcctttgcagcggcggcagcagcaccaggctctgcagcggcaacccccagcggcttaagccatggcgtgagtaccggggcgggtcgtccagctgtgctcctggggccggcgcgggttttggattggtggggtgcggcctggggccagggcggtgccgccaagggggaagcgatttaacgagcgcccgggacgcgtggtctttgcttgggtgtccccgagacgctcgcgtgcctgggatcgggaaagcgtagtcgggtgcccggactgcttccccaggagccctacagccctcggaccccgagccccgcaagggtcccaggggtcttggctgttgccccacgaaacgtggcaggaaccaagatggcggcggcagggcggcggcgcgggcgtgagtcaagggcgggcggtgggcggggcgcggccgccctggccgtatttggacgtggggacggagcgctttcctcttggcggccggtggaagaatcccctggtctccgtgagcgtccattttgtggaacctgagttgcaagcagggaggggcaaatacaactgccctgttcccgattctctagatggccgatctagagaagtcccgcctcataagtggaaggatgaaattctcagaacagctaacctctaatgggagttggcttctgattctcattcaggcttctcacggcattcagcagcagcgttgctgtaaccgacaaagacaccttcgaattaagcacattcctcgattccagcaaagcaccgcaacatgaccgaaatgagcttcctgagcagcgaggtgttggtgggggacttgatgtcccccttcgaccagtcgggtttgggggctgaagaaagcctaggtctcttagatgattacctggaggtggccaagcacttcaaacctcatgggttctccagcgacaaggctaaggcgggctcctccgaatggctggctgtggatgggttggtcagtccctccaacaacagcaaggaggatgccttctccgggacagattggatgttggagaaaatggatttgaaggagttcgacttggatgccctgttgggtatagatgacctggaaaccatgccagatgaccttctgaccacgttggatgacacttgtgatctctttgcccccctagtccaggagactaataagcagcccccccagacggtgaacccaattggccatctcccagaaagtttaacaaaacccgaccaggttgcccccttcaccttcttacaacctcttcccctttccccaggggtcctgtcctccactccagatcattcctttagtttagagctgggcagtgaagtggatatcactgaaggagataggaagccagactacactgcttacgttgccatgatccctcagtgcataaaggaggaagacaccccttcagataatgatagtggcatctgtatgagcccagagtcctatctggggtctcctcagcacagcccctctaccaggggctctccaaataggagcctcccatctccaggtgttctctgtgggtctgcccgtcccaaaccttacgatcctcctggagagaagatggtagcagcaaaagtaaagggtgagaaactggataagaagctgaaaaaaatggagcaaaacaagacagcagccactaggtaccgccagaagaagagggcggagcaggaggctcttactggtgagtgcaaagagctggaaaagaagaacgaggctctaaaagagagggcggattccctggccaaggagatccagtacctgaaagatttgatagaagaggtccgcaaggcaagggggaagaaaagggtcccctagttgaggatagtcaggagcgtcaatgtgcttgtacatagagtgctgtagctgtgtgttccaataaattattttgtagggaaagta

SEQ ID NO: 2037 - protein, 351 aa, Homo sapiens
MTEMSFLSSEVLVGDLMSPFDQSGLGAEESLGLLDDYLEVAKHFKPHGFSSDKAKAGSSEWLAVDGLVSPSNNSKEDAFSGTDWMLEKMDLKEFDLDALLGIDDLETMPDDLLTTLDDTCDLFAPLVQETNKQPPQTVNPIGHLPESLTKPDQVAPFTFLQPLPLSPGVLSSTPDHSFSLELGSEVDITEGDRKPDYTAYVAMIPQCIKEEDTPSDNDSGICMSPESYLGSPQHSPSTRGSPNRSLPSPGVLCGSARPKPYDPPGEKMVAAKVKGEKLDKKLKKMEQNKTAATRYRQKKRAEQEALTGECKELEKKNEALKERADSLAKEIQYLKDLIEEVRKARGKKRVP

SEQ ID NO: 2038 - DNA, 1420 bp, Homo sapiens
tttctactttgcccgcccacagatgtagttttctctgcgcgtgtgcgttttccctcctccccgccctcagggtccacggccaccatggcgtattaggggcagcagtgcctgcggcagcattggcctttgcagcggcggcagcagcaccaggctctgcagcggcaacccccagcggcttaagccatggcgcttctcacggcattcagcagcagcgttgctgtaaccgacaaagacaccttcgaattaagcacattcctcgattccagcaaagcaccgcaacatgaccgaaatgagcttcctgagcagcgaggtgttggtgggggacttgatgtcccccttcgaccagtcgggtttgggggctgaagaaagcctaggtctcttagatgattacctggaggtggccaagcacttcaaacctcatgggttctccagcgacaaggctaaggcgggctcctccgaatggctggctgtggatgggttggtcagtccctccaacaacagcaaggaggatgccttctccgggacagattggatgttggagaaaatggatttgaaggagttcgacttggatgccctgttgggtatagatgacctggaaaccatgccagatgaccttctgaccacgttggatgacacttgtgatctctttgcccccctagtccaggagactaataagcagcccccccagacggtgaacccaattggccatctcccagaaagtttaacaaaacccgaccaggttgcccccttcaccttcttacaacctcttcccctttccccaggggtcctgtcctccactccagatcattcctttagtttagagctgggcagtgaagtggatatcactgaaggagataggaagccagactacactgcttacgttgccatgatccctcagtgcataaaggaggaagacaccccttcagataatgatagtggcatctgtatgagcccagagtcctatctggggtctcctcagcacagcccctctaccaggggctctccaaataggagcctcccatctccaggtgttctctgtgggtctgcccgtcccaaaccttacgatcctcctggagagaagatggtagcagcaaaagtaaagggtgagaaactggataagaagctgaaaaaaatggagcaaaacaagacagcagccactaggtaccgccagaagaagagggcggagcaggaggctcttactggtgagtgcaaagagctggaaaagaagaacgaggctctaaaagagagggcggattccctggccaaggagatccagtacctgaaagatttgatagaagaggtccgcaaggcaagggggaagaaaagggtcccctagttgaggatagtcaggagcgtcaatgtgcttgtacatagagtgctgtagctgtgtgttccaataaattattttgtagggaaagta

SEQ ID NO: 2039 - protein, 351 aa, Homo sapiens; identical to SEQ ID NO: 2037

SEQ ID NO: 2040 - DNA, 564 bp, Homo sapiens
atggacgctcacggagaccaggggattcttccaccggccgccaagaggaaagcgctccgtccccacgtccaaatacggccagggcggccgcgccccgcccaccgcccgcccttgactcacgcccgcgccgccgccctgccgccgccatcttggttcctgccacgtttcgtggggcaacagccaagacccctgggacccttgcggggctcggggtccgagggctgtagggctcctggggaagcagtccgggcacccgactacgctttcccgatcccaggcacgcgagcgtctcggggacacccaagcaaagaccacgcgtcccgggcgctcgttaaatcgcttcccccttggcggcaccgccctggccccaggccgcaccccaccaatccaaaacccgcgccggccccaggagcacagctggacgacccgccccggtactcacgccatggcttaagccgctgggggttgccgctgcagagcctggtgctgctgccgccgctgcaaaggccaatgctgccgcaggcactgctgcccctaatacgccatggtggccgtggaccctga

SEQ ID NO: 2041 - protein, 187 aa, Homo sapiens [sequence omitted]

SEQ ID NO: 2042 - DNA, 952 bp, Homo sapiens
ccacgcgtccggcacttccgcccatccccctccggatccctctgttcgggctcgggtttccgccgagacgacagggactgccaggtcggaagtagtgtgaggctcgtgggcggagccaagcgccgccatgtccgccgccctgctgcggcggggcctggagctgctggcggcgtccgaggccccccgggaccctccaggtcaggccaagccgagaggggctccggtgaaacggccccggaagacgaaggcaattcaggcccagaaactgcggaactcggccaagggaaaggtgcccaagtcggcactggacgagtaccggaagcgagagtgtcgagaccacctcagagtaaacctgaagtttctgaccaggacgagaagcaccgtggctgagtctgtgagccagcagattttgcgccagaaccggggccgcaaggcctgtgaccggcctgtggccaagaccaagaagaagaaggctgagggcaccgtgttcaccgaggaagacttccagaagttccagcaggaatacttcggcagctaggctccctggagggcacggtgaagaggccttcaagccctgcagcctccgactcctgctggctccaggaaccggccgtgccgcgcggccagcagatggcgatgcaggaccagcctggctcgaggaagccgcggagctgagccgagtggaggctggaatggagctggtgggccggaagtcctggggaggatttacacacagaccggagctggcttccgcaggcctgggcagagcatctgcacctgccggaaaggaacgtatctgttttgtttgcttttgcccaggtggggcctctgggctgtttgctgtggagcaaggctaattcctgagcccttggggacgacagctccaggagtaggaagaagggtgggcttccaagttacaataaatgtgaacccaagaaaaaaaaaaaaaaaa

SEQ ID NO: 2043 - protein, 136 aa, Homo sapiens
MSAALLRRGLELLAASEAPRDPPGQAKPRGAPVKRPRKTKAIQAQKLRNSAKGKVPKSALDEYRKRECRDHLRVNLKFLTRTRSTVAESVSQQILRQNRGRKACDRPVAKTKKKKAEGTVFTEEDFQKFQQEYFGS

SEQ ID NO: 2044 - DNA, 2809 bp, Homo sapiens
ccggctcgcggagagcgtagcgcggccttggtggcggaatggcgttgagtgacggcccggccccgccatctggttaaagggactcgttcaacacggaagtgtcccggggctgcattgtgctacagctagaatgaagcacatcaacctatcatttgcagcgtgtggatttctgggcatttaccacttgggggcagcatctgcactttgcagacatggcaaaaaacttgtgaaggatgtcaaagccttcgctggggcgtctgcgggatcgttggttgcttctgttctgctaacagcaccagaaaaaatagaggaatgtaaccaatttacctacaagtttgccgaagaaatcagaaggcagtctttcggggcagtaacgcccggttatgacttcatggcccgactaagaagtgggatggagtcgattcttcctcccagcgctcacgagctggcccagaaccgactgcacgtatccatcaccaacgccaaaaccagagaaaatcacttagtctccactttttcctccagggaggacctcattaaggtcctcctagccagcagttttgtgcccatttatgcaggactgaagctagtggaatacaaagggcagaagtgggtggacggaggcctcaccaacgctcttcccatcctgcccgtcggccggacagtaaccatctcccccttcagtggacgactggacatctccccgcaggacaaagggcagctagatctgtatgttaatatcgccaagcaggatatcatgttgtccctggcaaacctggtgagactcaaccaagccctttttcccccaagcaagaggaaaatggaatctttgtatcagtgtggttttgatgacactgttaagtttttacttaaagaaaattggtttgaataaaatgcataaaagtttataatgcaaaacacgttttagatagtttttgatggaagtttctaatcaaatcctttttagaaaatctatcatgactcaattgtattactccttgtaatatttgtgtttatttttaatatttgaattattacttagcacatggatataagaggcactttattagaatttgacaacgtcattaagaaggatacacttaggtgataaggaatcatttttggtgaactgttgtgtcctttaaaaaatggaggaggataggttctttgggtaaattgaggaacatggaaaatggagggccaccacttaggttccatggagaatatgtggcatgatcttgacgtgaagcatgggtgtttccgtgacttagctgtgtccctgtagctctggaactgaaggaactaggtaggagaggaaggatttgagaaataggcaactcatggttaaagacctttgatcaggactggaggaacaaaggtttgtgtattagtccattttcacactgctgagaaagacatacccaagactgggcaatttacaaaagaaaggtttaatgggctcacagttccacatgactgaggaggcctcacaattgtggtggaaggtgaaaggcatgtctcacatggcagcagacaagagaagaaaacttgtgcagggaaactcccctttataaaaccatcggatctcttgagacgcgttcactatcatgagaatagcatgggaaagacctgcctccatgattcagttacctcccactgggtccctcccacaacgtgtggcaattgtgggagctacatacacttcaagatgagatttgggtggggacacagccaaaccataacagtttgctttccacaggtgtgtgcagttgctcccagtgcagttaggggcagatatccagaagcctaggagattttgaagaggcttatcccctctcatcttcctcccctaaaccccaccccagtttaggagattatcaagctggttgtcattcattctctctctctctctctctctctctctctctctctctctctctctctcgccatacctctctgagtatttagctattgttctatatactggatacatctattatgggaacttaaatagataaaatactactaaacacaaagaaccaagtagcctagtaaataagaattaaatccagaataatcattcacttctcatttttaaatcacgttgtactgatcccaggttttttactttctgagtagttgtcgatcactttgaggacttgtgtatgggcttgtaccaatttactgacactgtcttaaatcctaaatctgtttttatgaggttttgccaagcaagaactcttgattactaagaggcagttagagacaaaccaatttaattccatgtcttcaattgtcacgcatttcttcttttactctttgaaactattctttgagtcaattttatggttctcagaagccaaaatacacaacttttagcacataaacaccaacgatggcctctttttgaggagttatgcatagacccactctagagtaatgatggtccctgtggtatatactttctcctactctagcaaacatgtagtttaatcttaatgtgttgtttccataagtgacatgaagtggatagattctcaattgttatgtccacttattcactaggtaaattttcagttttaatacttttctccttaccccttcctttgatcatttcatgtgaatattctatttgtatgatacactgtatttcaataaattccttgttgatgtacccttaaattgaagaaatttaagctgcaaaaccaaatctcattgtataagacttttttgaagtatcttgtatcgactacatatgtatttgaccctgtgggaggatggtacttttctttttaacttttattttaag

SEQ ID NO: 2045 - protein, 253 aa, Homo sapiens
MKHINLSFAACGFLGIYHLGAASALCRHGKKLVKDVKAFAGASAGSLVASVLLTAPEKIEECNQFTYKFAEEIRRQSFGAVTPGYDFMARLRSGMESILPPSAHELAQNRLHVSITNAKTRENHLVSTFSSREDLIKVLLASSFVPIYAGLKLVEYKGQKWVDGGLTNALPILPVGRTVTISPFSGRLDISPQDKGQLDLYVNIAKQDIMLSLANLVRLNQALFPPSKRKMESLYQCGFDDTVKFLLKENWFE

SEQ ID NO: 2046 - DNA, 656 bp, Homo sapiens
acaactcggtggtggccactgcgcagaccagacttcgctcgtactcgtgcgcctcgcttcgcttttcctccgcaaccatgtctgacaaacccgatatggctgagatcgagaaattcgataagtcgaaactgaagaagacagagacgcaagagaaaaatccactgccttccaaagaaacgattgaacaggagaagcaagcaggcgaatcgtaatgaggcgtgcgccgccaatatgcactgtacattccacaagcattgccttcttattttacttcttttagctgtttaactttgtaagatgcaaagaggttggatcaagtttaaatgactgtgctgcccctttcacatcaaagaactactgacaacgaaggccgcgcctgcctttcccatctgtctatctatctggctggcagggaaggaaagaacttgcatgttggtgaaggaagaagtggggtggaagaagtggggtgggacgacagtgaaatctagagtaaaaccaagctggcccaaggtgtcctgcaggctgtaatgcagtttaatcagagtgccatttttttttttgttcaaatgattttaattattggaatgcacaatttttttaatatgcaaataaaaagtttaaaaacttaaaaaaaaaaaaaaaaaaaaaaaaaaaaa

SEQ ID NO: 2047 - protein, 44 aa, Homo sapiens
MSDKPDMAEIEKFDKSKLKKTETQEKNPLPSKETIEQEKQAGES

SEQ ID NO: 2048 - DNA, 1533 bp, Homo sapiens
cagtgcaggcggagccgcgccgcgctcccaccccggccgggagctaggagccagcggccagccccgcgcagcgcagcgcagcccgcagaagcccggtcagcgcacgtgcccgcgagacctgcaaacttgtgccaccggctctgcccgtccccggggagcccgaacgccccgcagccctcacccctcccgccagtctccagccatgggctgctttgaatgctgcatcaagtgtctgggaggagtcccctacgcctccctggtggccaccatcctctgcttctccggggtggccttattctgcggctgtgggcatgtggctctcgcaggcaccgtggcgattcttgagcaacacttctccaccaacgccagtgaccatgccttgctgagcgaggtgatacaactgatgcagtatgtcatctatggaattgcgtcctttttcttcttgtatgggatcattctgttggcagaaggcttttacaccacaagtgcagtgaaagaactgcacggtgagtttaaaacaaccgcttgtggccgatgcatcagtggaatgttcgttttcctcacctatgtgcttggagtggcctggctgggtgtgtttggtttctcagcggtgcccgtgtttatgttctacaacatatggtcaacttgtgaagtcatcaagtcaccgcagaccaacgggaccacgggtgtggagcagatctgtgtggatatccgacaatacggtatcattccttggaatgctttccccggaaaaatatgtggctctgccctggagaacatctgcaacacaaacgagttctacatgtcctatcacctgttcattgtggcctgtgcaggagctggtgccaccgtcattgccctgctgatctacatgatggctactacatataactatgcggttttgaagtttaagagtcgggaagattgctgcactaaattctaaattgcataaggagttttagagagctatgctctgtagcatgaaatatcactgacactccagactaaagcagagtctaggtttctgcaattttgttacagtaatttgtaaatagctttagtaaactcaccttgcatggtagattaataagatgacttactgtacatgaattacacaataatgagatctggtggctatttccacattttgaaaaggattcagttatttactgacagtggtgagcatcctttttaaaataatgttctcatacttaaacattagagagcagtatctttaaatgaattattaacactttggaatacttacattttctgttatttttgattgcctgataaccagtttcaatgatgaaaatgaaaacaagtgctgaagatgaaatggaagagaaccgttttaatctggattttgttttgtcacacctggaaaatactttgcaaatatgttctaaattgaaaacaatttttttatgatcacatggttcactaccaaatgaccctcaaataagccagatgaaaatttgaagaaaaaggtcacccagttctctggaaaaaaaaaaaaaaaaaaaaaaaaaa

SEQ ID NO: 2049 - protein, 246 aa, Homo sapiens
MGCFECCIKCLGGVPYASLVATILCFSGVALFCGCGHVALAGTVAILEQHFSTNASDHALLSEVIQLMQYVIYGIASFFFLYGIILLAEGFYTTSAVKELHGEFKTTACGRCISGMFVFLTYVLGVAWLGVFGFSAVPVFMFYNIWSTCEVIKSPQTNGTTGVEQICVDIRQYGIIPWNAFPGKICGSALENICNTNEFYMSYHLFIVACAGAGATVIALLIYMMATTYNYAVLKFKSREDCCTKF

SEQ ID NO: 2050 - DNA, 3219 bp, Homo sapiens
actgtaggcaccaccgggcgccgaatggctgttttctaactgggatcctcggtgacgtatggctgcctgccccttggcagctgtctttatggaccagtaggcagagcgaaattgacgctgacaagacttttgcatcttggaagggactgtaatctactgtagtgaagaacagagcctctcaatcagacgggtgtaaataagagacggaggggagtccaaaagaaaaggaagaggaggaaaaacaagtgtgtgttggggggaacagggggaaaagcatttttggtggatggtatgaagccagccatggaaactgcagccgaggaaaatactgaacaaagccaagagagaaaagtgaacagcagagctgaaatggaaattggcaggtaccactggatgtacccaggctcaaagaaccaccagtaccatcccgtgccaaccctgggggacagggctagccccttgagcagtccaggctgctttgaatgctgcatcaagtgtctgggaggagtcccctacgcctccctggtggccaccatcctctgcttctccggggtggccttattctgcggctgtgggcatgtggctctcgcaggcaccgtggcgattcttgagcaacacttctccaccaacgccagtgaccatgccttgctgagcgaggtgatacaactgatgcagtatgtcatctatggaattgcgtcctttttcttcttgtatgggatcattctgttggcagaaggcttttacaccacaagtgcagtgaaagaactgcacggtgagtttaaaacaaccgcttgtggccgatgcatcagtggaatgttcgttttcctcacctatgtgcttggagtggcctggctgggtgtgtttggtttctcagcggtgcccgtgtttatgttctacaacatatggtcaacttgtgaagtcatcaagtcaccgcagaccaacgggaccacgggtgtggagcagatctgtgtggatatccgacaatacggtatcattccttggaatgctttccccggaaaaatatgtggctctgccctggagaacatctgcaacacaaacgagttctacatgtcctatcacctgttcattgtggcctgtgcaggagctggtgccaccgtcattgccctgatccacttcctcatgatactgtcttctaactgggcttacttaaaggatgcgagcaaaatgcaggcttaccaggatatcaaagcaaaggaagaacaggaactgcaagatatccagtctcggtcaaaagaacaactcaattcttacacataaatgtttgccagagtgtttcggccgacgtatttacagctctgacaaatcatcagacagctgctctgcagtacagatgtgtatcccaccaaactaatgtagatgtacaaacacttcactgtctgtctcaagctgctgggatgtatctctaggaaaaccttccagtgggtaaatctttttctttagaacaaatattggaggtttcatgttagccattttaaaaggcaacactttgacaaaatgatcgttcatactttgggaatttgtggcatgttcacatttattgctagggcaattctaccaagacactcaatggaatatgtcacactccttaatagggacctgtgactccttaataaggacctgtgacatgcccagcatcaagggataagaccgtaaattcacatatatgccatctgtcctcaagtgttatctacataggaaataaaatggaattgatgtaaagttccatttctgacagctgacatttattaaactttggatcaaagataatgtgattcttatgattgatttctcaaactagcttttccctcccaagtccaggacccattaatttcctgagccaatcagaaatatatttttcaataatgctaaaattagctacaattctgctgaccctactattaaagaatctggatgctggactcactgacaagctttccagaagcaattttataacagatttcattttaacaaaatactgatccaattttcattattcttgagaaatgtcagctttgccttaatgagtatttgctttaaatttctaagaatttatatcataactagagacccaaatatctttcacagaattttgttccataaatgtttttcttaattattaagaagtgttaccttattaaaatgaccaccattctaaaccatttttcagtggtctggatacgaagtttacagtttcataccaactatctaaaacctaattgcaaattgaccacagacctctaacctcctacttttatagacttgaatacttaagtaatttaaattagggttggtatttcatttttttcttatctaaatcttagtttcctggaataataaagtttgatgttcagcaagagaactgcttgagtttaagccattttcaaaagaaacttgccttttacattattgtgttccagaacattaagtgactgtaggtactgggtattagtgatggtaaactttgtgttgctctttatgaaatgatccatataactgttgggtgcatcagtgcttttcaaaggggctgcttactatagggttaactatgtatattcattgttaagagttaacttgtggtttggctgtttcctggattttataacatacatgtgcagaaatgtattcaaatgaaaggaagcatacctttatcaagatgctattaaaattgaacatcaagtataatatttcatttggattctcttttttggttaatgcctaaaaatgcctatttgggatttttttttttttttaaattaagagaagctctcttctgtgtagaacagttgttccaaaatagcttagtgttttgttttcctgttgcatgacagatttaactattctttccagcagtggaggtgctgtcagagtccagtgttctagaagaggcagtgtctaaagcctaattttacttttctaattctggtagctattaccaggaatttttgaaagttttgtttaagtagtctaatattttttatgtaaagagcattaaattttgctatgtataaatttttgtaacctaacagtgaatcaatattttctatcagtgccaagggcttcctgtagttctattcaagtgttacaataaatatttgtagataatagtcaatacttgtgtatgcttattttaaagatctatttaggtggaaatagttgtggatgtactaagagtaatgaaataaaattatagcttcaaaa

SEQ ID NO: 2051 - protein, 328 aa, Homo sapiens
MKPAMETAAEENTEQSQERKVNSRAEMEIGRYHWMYPGSKNHQYHPVPTLGDRASPLSSPGCFECCIKCLGGVPYASLVATILCFSGVALFCGCGHVALAGTVAILEQHFSTNASDHALLSEVIQLMQYVIYGIASFFFLYGIILLAEGFYTTSAVKELHGEFKTTACGRCISGMFVFLTYVLGVAWLGVFGFSAVPVFMFYNIWSTCEVIKSPQTNGTTGVEQICVDIRQYGIIPWNAFPGKICGSALENICNTNEFYMSYHLFIVACAGAGATVIALIHFLMILSSNWAYLKDASKMQAYQDIKAKEEQELQDIQSRSKEQLNSYT

SEQ ID NO: 2052 - DNA, 1799 bp, Homo sapiens
actgtaggcaccaccgggcgccgaatggctgttttctaactgggatcctcggtgacgtatggctgcctgccccttggcagctgtctttatggaccagtaggcagagcgaaattgacgctgacaagacttttgcatcttggaagggactgtaatctactgtagtgaagaacagagcctctcaatcagacgggtgtaaataagagacggaggggagtccaaaagaaaaggaagaggaggaaaaacaagtgtgtgttggggggaacagggggaaaagcatttttggtggatggtatgaagccagccatggaaactgcagccgaggaaaatactgaacaaagccaagagagaaaagtgaacagcagagctgaaatggaaattggcaggtaccactggatgtacccaggctcaaagaaccaccagtaccatcccgtgccaaccctgggggacagggctagccccttgagcagtccaggctgctttgaatgctgcatcaagtgtctgggaggagtcccctacgcctccctggtggccaccatcctctgcttctccggggtggccttattctgcggctgtgggcatgtggctctcgcaggcaccgtggcgattcttgagcaacacttctccaccaacgccagtgaccatgccttgctgagcgaggtgatacaactgatgcagtatgtcatctatggaattgcgtcctttttcttcttgtatgggatcattctgttggcagaaggcttttacaccacaagtgcagtgaaagaactgcacggtgagtttaaaacaaccgcttgtggccgatgcatcagtggaatgttcgttttcctcacctatgtgcttggagtggcctggctgggtgtgtttggtttctcagcggtgcccgtgtttatgttctacaacatatggtcaacttgtgaagtcatcaagtcaccgcagaccaacgggaccacgggtgtggagcagatctgtgtggatatccgacaatacggtatcattccttggaatgctttccccggaaaaatatgtggctctgccctggagaacatctgcaacacaaacgagttctacatgtcctatcacctgttcattgtggcctgtgcaggagctggtgccaccgtcattgccctgctgatctacatgatggctactacatataactatgcggttttgaagtttaagagtcgggaagattgctgcactaaattctaaattgcataaggagttttagagagctatgctctgtagcatgaaatatcactgacactccagactaaagcagagtctaggtttctgcaattttgttacagtaatttgtaaatagctttagtaaactcaccttgcatggtagattaataagatgacttactgtacatgaattacacaataatgagatctggtggctatttccacattttgaaaaggattcagttatttactgacagtggtgagcatcctttttaaaataatgttctcatacttaaacattagagagcagtatctttaaatgaattattaacactttggaatacttacattttctgttatttttgattgcctgataaccagtttcaatgatgaaaatgaaaacaagtgctgaagatgaaatggaagagaaccgttttaatctggattttgttttgtcacacctggaaaatactttgcaaatatgttctaaattgaaaacaatttttttatgatcacatggttcactaccaaatgaccctcaaataagccagatgaaaatttgaagaaaaaggtcacccagttctctggaaaaaaaaaaaaaaaaaaaaaaaaaa

SEQ ID NO: 2053 - protein, 305 aa, Homo sapiens
MKPAMETAAEENTEQSQERKVNSRAEMEIGRYHWMYPGSKNHQYHPVPTLGDRASPLSSPGCFECCIKCLGGVPYASLVATILCFSGVALFCGCGHVALAGTVAILEQHFSTNASDHALLSEVIQLMQYVIYGIASFFFLYGIILLAEGFYTTSAVKELHGEFKTTACGRCISGMFVFLTYVLGVAWLGVFGFSAVPVFMFYNIWSTCEVIKSPQTNGTTGVEQICVDIRQYGIIPWNAFPGKICGSALENICNTNEFYMSYHLFIVACAGAGATVIALLIYMMATTYNYAVLKFKSREDCCTKF

SEQ ID NO: 2054 - DNA, 1679 bp, Homo sapiens
actgtaggcaccaccgggcgccgaatggctgttttctaactgggatcctcggtgacgtatggctgcctgccccttggcagctgtctttatggaccagtaggcagagcgaaattgacgctgacaagacttttgcatcttggaagggactgtaatctactgtagtgaagaacagagcctctcaatcagacgggtgtaaataagagacggaggggagtccaaaagaaaaggaagaggaggaaaaacaagtgtgtgttggggggaacagggggaaaagcatttttggtggatggtatgaagccagccatggaaactgcagccgaggaaaatactgaacaaagccaagagagaaaaggctgctttgaatgctgcatcaagtgtctgggaggagtcccctacgcctccctggtggccaccatcctctgcttctccggggtggccttattctgcggctgtgggcatgtggctctcgcaggcaccgtggcgattcttgagcaacacttctccaccaacgccagtgaccatgccttgctgagcgaggtgatacaactgatgcagtatgtcatctatggaattgcgtcctttttcttcttgtatgggatcattctgttggcagaaggcttttacaccacaagtgcagtgaaagaactgcacggtgagtttaaaacaaccgcttgtggccgatgcatcagtggaatgttcgttttcctcacctatgtgcttggagtggcctggctgggtgtgtttggtttctcagcggtgcccgtgtttatgttctacaacatatggtcaacttgtgaagtcatcaagtcaccgcagaccaacgggaccacgggtgtggagcagatctgtgtggatatccgacaatacggtatcattccttggaatgctttccccggaaaaatatgtggctctgccctggagaacatctgcaacacaaacgagttctacatgtcctatcacctgttcattgtggcctgtgcaggagctggtgccaccgtcattgccctgctgatctacatgatggctactacatataactatgcggttttgaagtttaagagtcgggaagattgctgcactaaattctaaattgcataaggagttttagagagctatgctctgtagcatgaaatatcactgacactccagactaaagcagagtctaggtttctgcaattttgttacagtaatttgtaaatagctttagtaaactcaccttgcatggtagattaataagatgacttactgtacatgaattacacaataatgagatctggtggctatttccacattttgaaaaggattcagttatttactgacagtggtgagcatcctttttaaaataatgttctcatacttaaacattagagagcagtatctttaaatgaattattaacactttggaatacttacattttctgttatttttgattgcctgataaccagtttcaatgatgaaaatgaaaacaagtgctgaagatgaaatggaagagaaccgttttaatctggattttgttttgtcacacctggaaaatactttgcaaatatgttctaaattgaaaacaatttttttatgatcacatggttcactaccaaatgaccctcaaataagccagatgaaaatttgaagaaaaaggtcacccagttctctggaaaaaaaaaaaaaaaaaaaaaaaaaa

SEQ ID NO: 2055 - protein, 265 aa, Homo sapiens
MKPAMETAAEENTEQSQERKGCFECCIKCLGGVPYASLVATILCFSGVALFCGCGHVALAGTVAILEQHFSTNASDHALLSEVIQLMQYVIYGIASFFFLYGIILLAEGFYTTSAVKELHGEFKTTACGRCISGMFVFLTYVLGVAWLGVFGFSAVPVFMFYNIWSTCEVIKSPQTNGTTGVEQICVDIRQYGIIPWNAFPGKICGSALENICNTNEFYMSYHLFIVACAGAGATVIALLIYMMATTYNYAVLKFKSREDCCTKF

SEQ ID NO: 2056 - DNA, 4699 bp, Homo sapiens
gtgtctcggacaacgagtgtacgcagttaccacacagttaccaagcagttacctcagagccgcggcgcagacgtaggcctcaggtctcgggcctcaggtctcgggcctcagagccagaccccgccatctcacgatgtcagagaggacccaggaacaggattttgttattataactgtcgacgacagtgatgataacaatgattgcagtattgagatggtggaagtttctgaaacagcagataattccactaatgacatagcagatgattccacttatgtcacagcagataatcccactgatgacacagccacacaaccaaattttccaggcggcaatgatggccatcaccgtccactccaaatgtcatatgggtctggctctgtcacccaggctggagtgcagtggcatgatcacagctcactgcagcctcaacctcttggactcaagcaattcttccacctcagccttcccagtagctgggatgacaggcgcacgccaccatgcccagtagcccatggtgaccaaatagtttcacagataaaccacccagtacatttaagaagatacagttacaactcagaggaagtggattttccaaaaagaggaagattctatactccagaggtacagtctagcatatcaccaccagcggaaaggcaggaaacccatgcctgggccagccctgctgtaacatctcttgagtcagcagcatgtcatgaactgcaggaagcagacctcagtgagagtttatcatatcccagaattgtctcctcaagttcattacagcagtatgtcgcacaaggtggctcatttccttgtttcggtatgccatggaactttatcagtggaggtgctgaaagtaccaatgctgtcatctcatttgccaatgctactacagcagtacctatggcagttctgtcacgaagagaatccagtctggcaaataaccctggtgtggtgaattactctgctctaccagaaaatgaaaatgtgggcccaggtagagccttgtcatctttctgcttccatcccaatttggaaatgccagaaagaccagcaaacagcagtaaaaacagcactgagacagcgaattatccaactttaatgggaaattacaatggccaaaatactgcctctttatctgtcttcatccctccctattttgctgagaaaattatacttactgaaatgccaggaacaacagaaaccaacgtggaaaataactctcagacagtgtattacccagctttatcgggaaatacgagtgccccatatccagcctcttcatatcttcccatcacttctaattttgaatctggcccacaaatgagttatgggacaatgagttactcaactgaaatgaaaaataactgtgaccaagatgatgcttcagcatctgcctgcctcactcccgattttgcactgttacctctgaatattttggtaaaagtagacaccaacacggaaaacagcgtcaacacaatgaatcgctcaactttattggacagtgacagtggccaggattcttcctcatcatctgtctgtatccctcccaagtatggctatcttggtgatccaaaaagaaatgtcagagtacttaaaatccatttgctggccgtacaaaatatggccaaacctaagcaagcagcctgctacttggttcgtattttgttctccaaggaaatcctgattagcagctcagtggatatccatttgaaagacagccaatccctcgacccgaacaaaatggctgcattgagagaatatctggcaacaacttttcccacctgtgatttgcatgaacatggaaaagactggcaggactgtatttctggtatcaattctatgatctactgtttatgttctgaaggcaagagtactccaaaaactgttcgcaaaaataaaaaacgtaccaaccgtgttgcatcggcatctgcagatagaaatgaccaaaggggcagagatggtggtgaaggctgttcttggatgtttcagccaatgaataactccaaaatgagagtaaagaggaacttgcagccaaacagtaatgctatccctgaaggaatgcgagaaccttccactgataatccagaggaacctggtgaagcatggagctattttggaagaccatggagaaatatacggatgccatgttcagtactgactttggcaaaaactaagtcttgcgcaagcctgtcggctagataccttattcagaaactcttcacaaaagatgtcctggtccaaagtaacgtctatggcaatctgaagcatggcctgtgtgcccttgaccccaataagattagtgctctccgagagttcctccaagaaaactacccaatttgtgatctctcggaaaatggaagagactggaagtcgtgtgtgacctccatcaacagcggtatccgtagccttagacatgacgtcagaagggctgaagccaggtctcagtcgcttccagcagtgacccctccagagctggagcaggagtcaaagccaggagatcccgacgccactgacccaagcacctgaacggcagctgccaaacttttttttttttttaactgttaagactattttgtaagtttctcaagttctaattccaaaatcagcctgctgtactggcagagtagtttgcattgacacctgtagtaatcgccaaacctctttttctgctcataaaggaggtagaatcacattaggaagatacgtaatgtttcatctgtggatttgatgacaacctctgattgagggaatggtggtaaactcctcatgggcttgtgacccatggctttgacttagataattgacattaatatactttgtttttttgataaggtagagaaagaaattcaatagaaagtaaggagccactcagtcaaataatataattcgtataaaacttgacaagtctttttatttttgtgacttgtgagatagtttaagatatttttatgtgaccaatttgtagaatgaatacatattttcaaagttatcttttcaaaattcaacttttagagtattttagcaaaatatatgtatagtttataatatagaagtatagctttataaagatattaaggatttattttttaaaataattctctgaatagtttgctgtagtagttgccttcagcttaataaaaccatagtacttctacatacatctttataagttaggctatgcctacaaaggtcttaaaaagtagataatttaccgggtgtagtggctcacacctgtaatcccagcactttgggaggccgagacgggtggatcacctgaggtcaggggttcgagaccagcctggccaacatgacgaaaccccatctctactaaaaatacaaaaaaagtagccaggcatggtggcaagcacctgtagtcccagttactcgggtggctgaggcaggagaatcacttgaacctgggaggtggagactgcagtgagccgagattgtgccactgcactcgagcctgggtgacagagtgagactccgtctcgggaaaagaaaaaaaagaagtagataattaaaaaaatcttgcataaaaaaaaatcttccataaagggcaaaaaggctttaacttccattattcagatttaatccaactaagatagtctttggcttcattcactgttcagtttcacaagttttttacaactactagtaacagagctaatacagaatagtaatccacattataaacatagatcaaaataccacatcataccccataaatacatgcagttattatttgtcaattaaaaataaaatttttttaaaagaaaagtacagttcgaccctaggcaagaagaaatttcaaattgtatatgcatattttgaattttggtttatattttgtggtatctgaaatattccctggactagaagcaaaaccacagaaacaaaactttacatttagaaaaaaatttcaagacttctattgctaactttattacattagtggtttttagaagttatttagagcagtcttgtctgatagaactttccaccatgatggaaatgtaaataaatataccacattaaaaatataaatttgcaatgtccaataggctcgtatggctattgagcatttaagatgtaattaattagacagaggaagtaaatttaacattttctctcattttagctaattagaatttaaagtgaaatagccacaagtggatagtggctactgtgttggatggcacagttcaaaatgcctcttatttataaaaaaaagtgtttaaaagtggttcccatggcttgaagaggaataatatacacataacttctttaaaatcacattttgtttgagatggagatcttgctatattgcccaggcttatctggaactcctgggctcaagagggaggatcacatttgactggacaaaatacattttataaaggtgttttgtattttatgttaaagtggaattgtgtcttcaaaattgtgtcttcaaaatttcacaagttaatactattactgtattagtccaatgttaaacattttaaatgcctgctcataagactcatttttgataaataaatgtatctttaatgttttgtttcccaaatagatacaataaataaacatttaaaatgccttaaaaaaaaaaaaaaaaaaaaaaaaaaaaaaaaaaaaaaaaaaaaaaaaaaaaaaaaaaaaaaaaaaaaaaaaaaaaaaaaaaaaaaaaaa

SEQ ID NO: 2057 - protein, 799 aa, Homo sapiens
MSERTQEQDFVIITVDDSDDNNDCSIEMVEVSETADNSTNDIADDSTYVTADNPTDDTATQPNFPGGNDGHHRPLQMSYGSGSVTQAGVQWHDHSSLQPQPLGLKQFFHLSLPSSWDDRRTPPCPVAHGDQIVSQINHPVHLRRYSYNSEEVDFPKRGRFYTPEVQSSISPPAERQETHAWASPAVTSLESAACHELQEADLSESLSYPRIVSSSSLQQYVAQGGSFPCFGMPWNFISGGAESTNAVISFANATTAVPMAVLSRRESSLANNPGVVNYSALPENENVGPGRALSSFCFHPNLEMPERPANSSKNSTETANYPTLMGNYNGQNTASLSVFIPPYFAEKIILTEMPGTTETNVENNSQTVYYPALSGNTSAPYPASSYLPITSNFESGPQMSYGTMSYSTEMKNNCDQDDASASACLTPDFALLPLNILVKVDTNTENSVNTMNRSTLLDSDSGQDSSSSSVCIPPKYGYLGDPKRNVRVLKIHLLAVQNMAKPKQAACYLVRILFSKEILISSSVDIHLKDSQSLDPNKMAALREYLATTFPTCDLHEHGKDWQDCISGINSMIYCLCSEGKSTPKTVRKNKKRTNRVASASADRNDQRGRDGGEGCSWMFQPMNNSKMRVKRNLQPNSNAIPEGMREPSTDNPEEPGEAWSYFGRPWRNIRMPCSVLTLAKTKSCASLSARYLIQKLFTKDVLVQSNVYGNLKHGLCALDPNKISALREFLQENYPICDLSENGRDWKSCVTSINSGIRSLRHDVRRAEARSQSLPAVTPPELEQESKPGDPDATDPST

SEQ ID NO: 2058 - DNA, 4130 bp, Homo sapiens
gaagctcggtgccggctcgcgcgatcggtgggacagaatttcgttgttttcaccgacgagactggaggaaacaacaccaaatagggataccatgggacaaacagtgaatgaagattccatggatgtcaagaaggagaatcaagagaaaactcctcagtcaagtacatcttctgtacaaagggatgatttccactgggaggagtatttgaaagagactgggtctataagtgctccttcagagtgcttccgtcagtctcagattccacctgtgaatgatttcaaagttggtatgaaattggaagcccgtgaccctcgcaatgccacttcagtatgtattgctacggttattggaattactggggccaggttacggttacgactggatggtagtgacaacagaaatgatttttggaggcttgtcgattccccagacatacaacctgttgggacatgtgaaaaggaaggagacttacttcaacctccactagggtaccagatgaatacatcctcctggccgatgttcctcttaaagacactaaatgggtctgaaatggcatctgccacattatttaagaaggaaccaccaaagcccccactaaataattttaaagtggggatgaaactggaagctattgacaaaaagaacccgtatctcatctgtcctgcgaccattggagatgttaaaggggatgaagttcatatcacatttgatggctggagtggagcttttgattactggtgcaagtatgattctcgagatattttcccagctgggtggtgtcgcctgacaggagatgtattacaacccccaggaactagtgttcctattgtaaagaatatagcaaaaacagagtcttctccttccgaagcaagccagcattcaatgcagtctccacagaaaactactctaatattaccaacacagcaggtcaggagatcaagtcgaattaaaccacctggacctactgcagtccccaaaaggagcagttctgttaaaaatatcacaccaaggaaaaaaggtccaaactcaggaaaaaaggaaaaacctttgcccgtgatatgttctacatctgcagcttctctaaaatcgctgaccagagaccgtggcatgttatataaagatgtcgcttctgggccatgtaaaatagtgatgtctacagtctgtgtctatgtaaacaaacatggaaactttggccctcatctggatcccaagagaatccagcagctgcctgaccacttcggcccgggcccggtgaatgtggtgcttcgccggattgtgcaggcctgtgtggattgtgcccttgaaactaaaactgtttttggatacctgaagccagataatcgtggaggagaagtgataactgcctcctttgatggggaaactcattccatccagctccctccagtgaacagtgcatcatttgctcttcgctttcttgagaacttctgccacagtctgcagtgtgataaccttttgagtagccagccttttagttcttccaggggtcatactcacagctctgcagagcatgataaaaatcagtcagcaaaagaagatgtaacagaaaggcaaagcaccaaacgatctcctcagcaaactgtaccatatgttgttcctctctctcctaagctccccaaaacaaaggagtatgcgtctgaaggagaaccattgtttgctgggggaagtgccattcccaaagaggagaatctttcagaagattctaagagctcatcactaaattcaggaaattatttgaatcctgcctgtagaaatcctatgtatattcatacttcagtctcccaggatttttctcgaagtgtgccaggcaccacaagttcaccactagttggggacatatcccccaagagcagtccccatgaagttaaattccaaatgcagaggaaaagtgaagctccaagttatatagctgtacctgatcccagtgtcctgaaacaaggcttctctaaggacccttcaacctggtctgtggatgaagtgatacagtttatgaaacatacagatcctcagatatcaggccccctcgccgacctcttcaggcaacatgaaattgatgggaaggctctgttcctactcaagagtgatgtgatgatgaagtatatggggctgaagctggggccagcattaaagctgtgttactacattgaaaagcttaaagaaggaaaatacagttaaaaaatgtgtaagtttagattggacataattctcaggtgtactgttaacattttaatttaaaagtatttctcttagcagtttttgttttgtagacagttcccataaaaatattttatcagaattgcagaactgtagtaacagttcagtcaactttgtttttttcctggagtcaccaaccagctttgggagacacagccgccactcccccagtctacttctttaaaaagcatttaacaggttagtattggcatattcaaattggcagttctttatgtctttttaaattttcattgtacagtttacaaatatacttaatgtagttaacagagaaaaacctttgattttggttaacctttatatctagaaccaaaacagctaaatcccaaaggggaaaatatcagggattgacaacttctataattaaatccatgagaatttttcctcactagagaatttaaaggtgcacctgtagatatcatcttttctcagatattttgtgtgatactctgtggtgttctgttcatgttctatcagtatatctagaaagggaatagccatataaattattttccttttattatttctctgtatgttgtatttgatcatatttaaaggaaaaaagcaagcttataagctttcatgaagtgttcttaccagtttttgataaattttttaaattataggatagaattgtcattttatgcaggagatatttatactacgagggttgtttggatggagtcagattaaattttttcagtgaaattcctattattttaaaactttccatattttcactacgcttggacatttaactaggcattcttttcttacatctctatatgaagatacctgtgtccaaaatttttgaagatatatattgtatgtgtttattcttcatatggtactttaccatatttatatattgttttatacctgtaggtttacacacaagtaaatctttttttcttgaatttaatctgggcactttgcactgccacaggggtgacgatggaactatgtatatagttaggatgttttgatttcggtaaaaaatatatgtcccatcgttgctatcaccagtacctctcagcttactcttcaggggatatgaaacaatctgtagattgggtttccataacagggaagtccgtcctaatgccaagtttctaattaatttgcttagttctgagccatttattctgctacactttgaaagatatattagttctgacttattgttggggctttattttatttttatttttttgagatggagtttcactcttgtgcccaggctggagtgcaatagctcgatctcggctcactgcaacctcgcctccctggttcaagcaattctcctgcctcagcgattacaggaatgcaccaccacgcccagctaattttgtagagatggggtttctccatgttggtcaggctggtctcaaactcctgacctcaggtgatccgcccacctcggccttgcaaaatgctgggattacaggcatgagccacctgcccagccatgtttggggctttattttataagttagaactttgaagaggaaatggtgctatatgtttattgttattactttgtgtaactttgatgtaatgtttataagctatgagaatcagttataaaagtattagccatttgttgtaaatgccaataaaatattcaccaggggcaagaatgtacattttctttttagaaaaccaaatgtactttagacatgaatgcaactatttaaagaatagcttcatttatgttattccttacatgtcataagattcttacttaaacttggtcttctttcaagttgtttgtatgaagatgctgtacccacttgaacagtcctcaggtgtttacataaatactatgttttacagttttcatattttaaaatattaataaagttaatcgcaacgattc

SEQ ID NO: 2059 - protein, 700 aa, Homo sapiens
MGQTVNEDSMDVKKENQEKTPQSSTSSVQRDDFHWEEYLKETGSISAPSECFRQSQIPPVNDFKVGMKLEARDPRNATSVCIATVIGITGARLRLRLDGSDNRNDFWRLVDSPDIQPVGTCEKEGDLLQPPLGYQMNTSSWPMFLLKTLNGSEMASATLFKKEPPKPPLNNFKVGMKLEAIDKKNPYLICPATIGDVKGDEVHITFDGWSGAFDYWCKYDSRDIFPAGWCRLTGDVLQPPGTSVPIVKNIAKTESSPSEASQHSMQSPQKTTLILPTQQVRRSSRIKPPGPTAVPKRSSSVKNITPRKKGPNSGKKEKPLPVICSTSAASLKSLTRDRGMLYKDVASGPCKIVMSTVCVYVNKHGNFGPHLDPKRIQQLPDHFGPGPVNVVLRRIVQACVDCALETKTVFGYLKPDNRGGEVITASFDGETHSIQLPPVNSASFALRFLENFCHSLQCDNLLSSQPFSSSRGHTHSSAEHDKNQSAKEDVTERQSTKRSPQQTVPYVVPLSPKLPKTKEYASEGEPLFAGGSAIPKEENLSEDSKSSSLNSGNYLNPACRNPMYIHTSVSQDFSRSVPGTTSSPLVGDISPKSSPHEVKFQMQRKSEAPSYIAVPDPSVLKQGFSKDPSTWSVDEVIQFMKHTDPQISGPLADLFRQHEIDGKALFLLKSDVMMKYMGLKLGPALKLCYYIEKLKEGKYS

SEQ ID NO: 2060 - DNA, 14069 bp, Homo sapiens
cgttaaatgcaaacgctgctctggctcatgtgtttgctccgaggtataggttttgttcgactgacgtatcagatagtcagagtggttaccacaccgacgttgtagcagctgcataataaatgactgaaagaatcatgttaggcatgcccacctaacctaacttgaatcatgcgaaaggggagctgttggaattcaaatagactttctggttcccagcagtcggcagtaatagaatgctttcaggaagatgacagaatcaggagaaagatgctgttttgcactatcttgatttgttacagcagccaacttattggcatgatggagtgacaggaaaaacagctggcatggaagatgaaagagaagatgttcaaaagaaaacattcacaaaatgggtaaatgcacaattttctaagtttgggaagcagcatattgagaacctcttcagtgacctacaggatgggaggcgcctcctagacctcctcgaaggcctgacagggcaaaaactgccaaaagaaaaaggatccacaagagttcatgccctgaacaatgtcaacaaggcactgcgggttttgcagaacaataatgttgatttagtgaatattggaagtactgacatcgtagatggaaatcataaactgactcttggtttgatttggaatataatcctccactggcaggtcaaaaatgtaatgaaaaatatcatggctggattgcaacaaaccaacagtgaaaagattctcctgagctgggtccgacaatcaactcgtaattatccacaggttaatgtaatcaacttcaccaccagctggtctgatggcctggctttgaatgctctcatccatagtcataggccagacctatttgactggaatagtgtggtttgccagcagtcagccacacaacgactggaacatgcattcaacatcgccagatatcaattaggcatagagaaactactcgatcctgaagatgttgataccacctatccagataagaagtccatcttaatgtacatcacatcactcttccaagttttgcctcaacaagtgagcattgaagccatccaggaagtggaaatgttgccaaggccacctaaagtgactaaagaagaacattttcagttacatcatcaaatgcactattctcaacagatcacggtcagtctagcacagggatatgagagaacttcttcccctaagcctcgattcaagagctatgcctacacacaggctgcttatgtcaccacctctgaccctacacggagcccatttccttcacagcatttggaagctcctgaagacaagtcatttggcagttcattgatggagagtgaagtaaacctggaccgttatcaaacagctttagaagaagtattatcgtggcttctttctgctgaggacacattgcaagcacaaggagagatttctaatgatgtggaagtggtgaaagaccagtttcatactcatgaggggtacatgatggatttgacagcccatcagggccgggttggtaatattctacaattgggaagtaagctgattggaacaggaaaattatcagaagatgaagaaactgaagtacaagagcagatgaatctcctaaattcaagatgggaatgcctcagggtagctagcatggaaaaacaaagcaatttacatagagttttaatggatctccagaatcagaaactgaaagagttgaatgactggctaacaaaaacagaagaaagaacaaggaaaatggaggaagagcctcttggacctgatcttgaagacctaaaacgccaagtacaacaacataaggtgcttcaagaagatctagaacaagaacaagtcagggtcaattctctcactcacatggtggtggtagttgatgaatctagtggagatcacgcaactgctgctttggaagaacaacttaaggtattgggagatcgatgggcaaacatctgtagatggacagaagaccgctgggttcttttacaagacatccttctcaaatggcaacgtcttactgaagaacagtgcctttttagtgcatggctttcagaaaaagaagatgcagtgaacaagattcacacaactggctttaaagatcaaaatgaaatgttatcaagtcttcaaaaactggccgttttaaaagcggatctagaaaagaaaaagcaatccatgggcaaactgtattcactcaaacaagatcttctttcaacactgaagaataagtcagtgacccagaagacggaagcatggctggataactttgcccggtgttgggataatttagtccaaaaacttgaaaagagtacagcacagatttcacaggctgtcaccaccactcagccatcactaacacagacaactgtaatggaaacagtaactacggtgaccacaagggaacagatcctggtaaagcatgctcaagaggaacttccaccaccacctccccaaaagaagaggcagattactgtggattctgaaattaggaaaaggttggatgttgatataactgaacttcacagctggattactcgctcagaagctgtgttgcagagtcctgaatttgcaatctttcggaaggaaggcaacttctcagacttaaaagaaaaagtcaatgccatagagcgagaaaaagctgagaagttcagaaaactgcaagatgccagcagatcagctcaggccctggtggaacagatggtgaatgagggtgttaatgcagatagcatcaaacaagcctcagaacaactgaacagccggtggatcgaattctgccagttgctaagtgagagacttaactggctggagtatcagaacaacatcatcgctttctataatcagctacaacaattggagcagatgacaactactgctgaaaactggttgaaaatccaacccaccaccccatcagagccaacagcaattaaaagtcagttaaaaatttgtaaggatgaagtcaaccggctatcaggtcttcaacctcaaattgaacgattaaaaattcaaagcatagccctgaaagagaaaggacaaggacccatgttcctggatgcagactttgtggcctttacaaatcattttaagcaagtcttttctgatgtgcaggccagagagaaagagctacagacaatttttgacactttgccaccaatgcgctatcaggagaccatgagtgccatcaggacatgggtccagcagtcagaaaccaaactctccatacctcaacttagtgtcaccgactatgaaatcatggagcagagactcggggaattgcaggctttacaaagttctctgcaagagcaacaaagtggcctatactatctcagcaccactgtgaaagagatgtcgaagaaagcgccctctgaaattagccggaaatatcaatcagaatttgaagaaattgagggacgctggaagaagctctcctcccagctggttgagcattgtcaaaagctagaggagcaaatgaataaactccgaaaaattcagaatcacatacaaaccctgaagaaatggatggctgaagttgatgtttttctgaaggaggaatggcctgcccttggggattcagaaattctaaaaaagcagctgaaacagtgcagacttttagtcagtgatattcagacaattcagcccagtctaaacagtgtcaatgaaggtgggcagaagataaagaatgaagcagagccagagtttgcttcgagacttgagacagaactcaaagaacttaacactcagtgggatcacatgtgccaacaggtctatgccagaaaggaggccttgaagggaggtttggagaaaactgtaagcctccagaaagatctatcagagatgcacgaatggatgacacaagctgaagaagagtatcttgagagagattttgaatataaaactccagatgaattacagaaagcagttgaagagatgaagagagctaaagaagaggcccaacaaaaagaagcgaaagtgaaactccttactgagtctgtaaatagtgtcatagctcaagctccacctgtagcacaagaggccttaaaaaaggaacttgaaactctaaccaccaactaccagtggctctgcactaggctgaatgggaaatgcaagactttggaagaagtttgggcatgttggcatgagttattgtcatacttggagaaagcaaacaagtggctaaatgaagtagaatttaaacttaaaaccactgaaaacattcctggcggagctgaggaaatctctgaggtgctagattcacttgaaaatttgatgcgacattcagaggataacccaaatcagattcgcatattggcacagaccctaacagatggcggagtcatggatgagctaatcaatgaggaacttgagacatttaattctcgttggagggaactacatgaagaggctgtaaggaggcaaaagttgcttgaacagagcatccagtctgcccaggagactgaaaaatccttacacttaatccaggagtccctcacattcattgacaagcagttggcagcttatattgcagacaaggtggacgcagctcaaatgcctcaggaagcccagaaaatccaatctgatttgacaagtcatgagatcagtttagaagaaatgaagaaacataatcaggggaaggaggctgcccaaagagtcctgtctcagattgatgttgcacagaaaaaattacaagatgtctccatgaagtttcgattattccagaaaccagccaattttgagcagcgtctacaagaaagtaagatgattttagatgaagtgaagatgcacttgcctgcattggaaacaaagagtgtggaacaggaagtagtacagtcacagctaaatcattgtgtgaacttgtataaaagtctgagtgaagtgaagtctgaagtggaaatggtgataaagactggacgtcagattgtacagaaaaagcagacggaaaatcccaaagaacttgatgaaagagtaacagctttgaaattgcattataatgagctgggagcaaaggtaacagaaagaaagcaacagttggagaaatgcttgaaattgtcccgtaagatgcgaaaggaaatgaatgtcttgacagaatggctggcagctacagatatggaattgacaaagagatcagcagttgaaggaatgcctagtaatttggattctgaagttgcctggggaaaggctactcaaaaagagattgagaaacagaaggtgcacctgaagagtatcacagaggtaggagaggccttgaaaacagttttgggcaagaaggagacgttggtggaagataaactcagtcttctgaatagtaactggatagctgtcacctcccgagcagaagagtggttaaatcttttgttggaataccagaaacacatggaaacttttgaccagaatgtggaccacatcacaaagtggatcattcaggctgacacacttttggatgaatcagagaaaaagaaaccccagcaaaaagaagacgtgcttaagcgtttaaaggcagaactgaatgacatacgcccaaaggtggactctacacgtgaccaagcagcaaacttgatggcaaaccgcggtgaccactgcaggaaattagtagagccccaaatctcagagctcaaccatcgatttgcagccatttcacacagaattaagactggaaaggcctccattcctttgaaggaattggagcagtttaactcagatatacaaaaattgcttgaaccactggaggctgaaattcagcagggggtgaatctgaaagaggaagacttcaataaagatatgaatgaagacaatgagggtactgtaaaagaattgttgcaaagaggagacaacttacaacaaagaatcacagatgagagaaagcgagaggaaataaagataaaacagcagctgttacagacaaaacataatgctctcaaggatttgaggtctcaaagaagaaaaaaggctctagaaatttctcatcagtggtatcagtacaagaggcaggctgatgatctcctgaaatgcttggatgacattgaaaaaaaattagccagcctacctgagcccagagatgaaaggaaaataaaggaaattgatcgggaattgcagaagaagaaagaggagctgaatgcagtgcgtaggcaagctgagggcttgtctgaggatggggccgcaatggcagtggagccaactcagatccagctcagcaagcgctggcgggaaattgagagcaaatttgctcagtttcgaagactcaactttgcacaaattcacactgtccgtgaagaaacgatgatggtgatgactgaagacatgcctttggaaatttcttatgtgccttctacttatttgactgaaatcactcatgtctcacaagccctattagaagtggaacaacttctcaatgctcctgacctctgtgctaaggactttgaagatctctttaagcaagaggagtctctgaagaatataaaagatagtctacaacaaagctcaggtcggattgacattattcatagcaagaagacagcagcattgcaaagtgcaacgcctgtggaaagggtgaagctacaggaagctctctcccagcttgatttccaatgggaaaaagttaacaaaatgtacaaggaccgacaagggcgatttgacagatctgttgagaaatggcggcgttttcattatgatataaagatatttaatcagtggctaacagaagctgaacagtttctcagaaagacacaaattcctgagaattgggaacatgctaaatacaaatggtatcttaaggaactccaggatggcattgggcagcggcaaactgttgtcagaacattgaatgcaactggggaagaaataattcagcaatcctcaaaaacagatgccagtattctacaggaaaaattgggaagcctgaatctgcggtggcaggaggtctgcaaacagctgtcagacagaaaaaagaggctagaagaacaaaagaatatcttgtcagaatttcaaagagatttaaatgaatttgttttatggttggaggaagcagataacattgctagtatcccacttgaacctggaaaagagcagcaactaaaagaaaagcttgagcaagtcaagttactggtggaagagttgcccctgcgccagggaattctcaaacaattaaatgaaactggaggacccgtgcttgtaagtgctcccataagcccagaagagcaagataaacttgaaaataagctcaagcagacaaatctccagtggataaaggtttccagagctttacctgagaaacaaggagaaattgaagctcaaataaaagaccttgggcagcttgaaaaaaagcttgaagaccttgaagagcagttaaatcatctgctgctgtggttatctcctattaggaatcagttggaaatttataaccaaccaaaccaagaaggaccatttgacgttcaggaaactgaaatagcagttcaagctaaacaaccggatgtggaagagattttgtctaaagggcagcatttgtacaaggaaaaaccagccactcagccagtgaagaggaagttagaagatctgagctctgagtggaaggcggtaaaccgtttacttcaagagctgagggcaaagcagcctgacctagctcctggactgaccactattggagcctctcctactcagactgttactctggtgacacaacctgtggttactaaggaaactgccatctccaaactagaaatgccatcttccttgatgttggaggtacctgctctggcagatttcaaccgggcttggacagaacttaccgactggctttctctgcttgatcaagttataaaatcacagagggtgatggtgggtgaccttgaggatatcaacgagatgatcatcaagcagaaggcaacaatgcaggatttggaacagaggcgtccccagttggaagaactcattaccgctgcccaaaatttgaaaaacaagaccagcaatcaagaggctagaacaatcattacggatcgaattgaaagaattcagaatcagtgggatgaagtacaagaacaccttcagaaccggaggcaacagttgaatgaaatgttaaaggattcaacacaatggctggaagctaaggaagaagctgagcaggtcttaggacaggccagagccaagcttgagtcatggaaggagggtccctatacagtagatgcaatccaaaagaaaatcacagaaaccaagcagttggccaaagacctccgccagtggcagacaaatgtagatgtggcaaatgacttggccctgaaacttctccgggattattctgcagatgataccagaaaagtccacatgataacagagaatatcaatgcctcttggagaagcattcataaaagggtgagtgagcgagaggctgctttggaagaaactcatagattactgcaacagttccccctggacctggaaaagtttcttgcctggcttacagaagctgaaacaactgccaatgtcctacaggatgctacccgtaaggaaaggctcctagaagactccaagggagtaaaagagctgatgaaacaatggcaagacctccaaggtgaaattgaagctcacacagatgtttatcacaacctggatgaaaacagccaaaaaatcctgagatccctggaaggttccgatgatgcagtcctgttacaaagacgtttggataacatgaacttcaagtggagtgaacttcggaaaaagtctctcaacattaggtcccatttggaagccagttctgaccagtggaagcgtctgcacctttctctgcaggaacttctggtgtggctacagctgaaagatgatgaattaagccggcaggcacctattggaggcgactttccagcagttcagaagcagaacgatgtacatagggccttcaagagggaattgaaaactaaagaacctgtaatcatgagtactcttgagactgtacgaatatttctgacagagcagcctttggaaggactagagaaactctaccaggagcccagagagctgcctcctgaggagagagcccagaatgtcactcggcttctacgaaagcaggctgaggaggtcaatactgagtgggaaaaattgaacctgcactccgctgactggcagagaaaaatagatgagacccttgaaagactccaggaacttcaagaggccacggatgagctggacctcaagctgcgccaagctgaggtgatcaagggatcctggcagcccgtgggcgatctcctcattgactctctccaagatcacctcgagaaagtcaaggcacttcgaggagaaattgcgcctctgaaagagaacgtgagccacgtcaatgaccttgctcgccagcttaccactttgggcattcagctctcaccgtataacctcagcactctggaagacctgaacaccagatggaagcttctgcaggtggccgtcgaggaccgagtcaggcagctgcatgaagcccacagggactttggtccagcatctcagcactttctttccacgtctgtccagggtccctgggagagagccatctcgccaaacaaagtgccctactatatcaaccacgagactcaaacaacttgctgggaccatcccaaaatgacagagctctaccagtctttagctgacctgaataatgtcagattctcagcttataggactgccatgaaactccgaagactgcagaaggccctttgcttggatctcttgagcctgtcagctgcatgtgatgccttggaccagcacaacctcaagcaaaatgaccagcccatggatatcctgcagattattaattgtttgaccactatttatgaccgcctggagcaagagcacaacaatttggtcaacgtccctctctgcgtggatatgtgtctgaactggctgctgaatgtttatgatacgggacgaacagggaggatccgtgtcctgtcttttaaaactggcatcatttccctgtgtaaagcacatttggaagacaagtacagataccttttcaagcaagtggcaagttcaacaggattttgtgaccagcgcaggctgggcctccttctgcatgattctatccaaattccaagacagttgggtgaagttgcatcctttgggggcagtaacattgagccaagtgtccggagctgcttccaatttgctaataataagccagagatcgaagcggccctcttcctagactggatgagactggaaccccagtccatggtgtggctgcccgtcctgcacagagtggctgctgcagaaactgccaagcatcaggccaaatgtaacatctgcaaagagtgtccaatcattggattcaggtacaggagtctaaagcactttaattatgacatctgccaaagctgctttttttctggtcgagttgcaaaaggccataaaatgcactatcccatggtggaatattgcactccgactacatcaggagaagatgttcgagactttgccaaggtactaaaaaacaaatttcgaaccaaaaggtattttgcgaagcatccccgaatgggctacctgccagtgcagactgtcttagagggggacaacatggaaactcccgttactctgatcaacttctggccagtagattctgcgcctgcctcgtcccctcagctttcacacgatgatactcattcacgcattgaacattatgctagcaggctagcagaaatggaaaacagcaatggatcttatctaaatgatagcatctctcctaatgagagcatagatgatgaacatttgttaatccagcattactgccaaagtttgaaccaggactcccccctgagccagcctcgtagtcctgcccagatcttgatttccttagagagtgaggaaagaggggagctagagagaatcctagcagatcttgaggaagaaaacaggaatctgcaagcagaatatgaccgtctaaagcagcagcacgaacataaaggcctgtccccactgccgtcccctcctgaaatgatgcccacctctccccagagtccccgggatgctgagctcattgctgaggccaagctactgcgtcaacacaaaggccgcctggaagccaggatgcaaatcctggaagaccacaataaacagctggagtcacagttacacaggctaaggcagctgctggagcaaccccaggcagaggccaaagtgaatggcacaacggtgtcctctccttctacctctctacagaggtccgacagcagtcagcctatgctgctccgagtggttggcagtcaaacttcggactccatgggtgaggaagatcttctcagtcctccccaggacacaagcacagggttagaggaggtgatggagcaactcaacaactccttccctagttcaagaggaagaaatacccctggaaagccaatgagagaggacacaatgtaggaagtcttttccacatggcagatgatttgggcagagcgatggagtccttagtatcagtcatgacagatgaagaaggagcagaataaatgttttacaactcctgattcccgcatggtttttataatattcatacaacaaagaggattagacagtaagagtttacaagaaataaatctatatttttgtgaagggtagtggtattatactgtagatttcagtagtttctaagtctgttattgttttgttaacaatggcaggttttacacgtctatgcaattgtacaaaaaagttataagaaaactacatgtaaaatcttgatagctaaataacttgccatttctttatatggaacgcattttgggttgtttaaaaatttataacagttataaagaaagattgtaaactaaagtgtgctttataaaaaaaagttgtttataaaaacccctaaaaacaaaacaaacacacacacacacacatacacacacacacacaaaactttgaggcagcgcattgttttgcatccttttggcgtgatatccatatgaaattcatggctttttctttttttgcatattaaagataagacttcctctaccaccacaccaaatgactactacacactgctcatttgagaactgtcagctgagtggggcaggcttgagttttcatttcatatatctatatgtctataagtatataaatactatagttatatagataaagagatacgaatttctatagactgactttttccattttttaaatgttcatgtcacatcctaatagaaagaaattacttctagtcagtcatccaggcttacctgcttggtctagaatggatttttcccggagccggaagccaggaggaaactacaccacactaaaacattgtctacagctccagatgtttctcattttaaacaactttccactgacaacgaaagtaaagtaaagtattggatttttttaaagggaacatgtgaatgaatacacaggacttattatatcagagtgagtaatcggttggttggttgattgattgattgattgatacattcagcttcctgctgctagcaatgccacgatttagatttaatgatgcttcagtggaaatcaatcagaaggtattctgaccttgtgaacatcagaaggtattttttaactcccaagcagtagcaggacgatgatagggctggagggctatggattcccagcccatccctgtgaaggagtaggccactctttaagtgaaggattggatgattgttcataatacataaagttctctgtaattacaactaaattattatgccctcttctcacagtcaaaaggaactgggtggtttggtttttgttgcttttttagatttattgtcccatgtgggatgagtttttaaatgccacaagacataatttaaaataaataaactttgggaaaaggtgtaagacagtagccccatcacatttgtgatactgacaggtatcaacccagaagcccatgaactgtgtttccatcctttgcatttctctgcgagtagttccacacaggtttgtaagtaagtaagaaagaaggcaaattgattcaaatgttacaaaaaaacccttcttggtggattagacaggttaaatatataaacaaacaaacaaaaattgctcaaaaaagaggagaaaagctcaagaggaaaagctaaggactggtaggaaaaagctttactctttcatgccattttatttctttttgatttttaaatcattcattcaatagataccaccgtgtgacctataattttgcaaatctgttacctctgacatcaagtgtaattagcttttggagagtgggctgacatcaagtgtaattagcttttggagagtgggttttgtccattattaataattaattaattaacatcaaacacggcttctcatgctatttctacctcactttggttttggggtgttcctgataattgtgcacacctgagttcacagcttcaccacttgtccattgcgttattttctttttcctttataattctttctttttccttcataattttcaaaagaaaacccaaagctctaaggtaacaaattaccaaattacatgaagatttggtttttgtcttgcatttttttcctttatgtgacgctggaccttttctttacccaaggatttttaaaactcagatttaaaacaaggggttactttacatcctactaagaagtttaagtaagtaagtttcattctaaaatcagaggtaaatagagtgcataaataattttgttttaatctttttgtttttcttttagacacattagctctggagtgagtctgtcataatatttgaacaaaaattgagagctttattgctgcattttaagcataattaatttggacattatttcgtgttgtgttctttataaccaccgagtattaaactgtaaatcataatgtaactgaagcataaacatcacatggcatgttttgtcattgttttcaggtactgagttcttacttgagtatcataatatattgtgttttaacaccaacactgtaacatttacgaattatttttttaaacttcagttttactgcattttcacaacatatcagacttcaccaaatatatgccttactattgtattatagtactgctttactgtgtatctcaataaagcacgcagttatgttac

SEQ ID NO: 2061 - protein, 3677 aa, Homo sapiens
MEDEREDVQKKTFTKWVNAQFSKFGKQHIENLFSDLQDGRRLLDLLEGLTGQKLPKEKGSTRVHALNNVNKALRVLQNNNVDLVNIGSTDIVDGNHKLTLGLIWNIILHWQVKNVMKNIMAGLQQTNSEKILLSWVRQSTRNYPQVNVINFTTSWSDGLALNALIHSHRPDLFDWNSVVCQQSATQRLEHAFNIARYQLGIEKLLDPEDVDTTYPDKKSILMYITSLFQVLPQQVSIEAIQEVEMLPRPPKVTKEEHFQLHHQMHYSQQITVSLAQGYERTSSPKPRFKSYAYTQAAYVTTSDPTRSPFPSQHLEAPEDKSFGSSLMESEVNLDRYQTALEEVLSWLLSAEDTLQAQGEISNDVEVVKDQFHTHEGYMMDLTAHQGRVGNILQLGSKLIGTGKLSEDEETEVQEQMNLLNSRWECLRVASMEKQSNLHRVLMDLQNQKLKELNDWLTKTEERTRKMEEEPLGPDLEDLKRQVQQHKVLQEDLEQEQVRVNSLTHMVVVVDESSGDHATAALEEQLKVLGDRWANICRWTEDRWVLLQDILLKWQRLTEEQCLFSAWLSEKEDAVNKIHTTGFKDQNEMLSSLQKLAVLKADLEKKKQSMGKLYSLKQDLLSTLKNKSVTQKTEAWLDNFARCWDNLVQKLEKSTAQISQAVTTTQPSLTQTTVMETVTTVTTREQILVKHAQEELPPPPPQKKRQITVDSEIRKRLDVDITELHSWITRSEAVLQSPEFAIFRKEGNFSDLKEKVNAIEREKAEKFRKLQDASRSAQALVEQMVNEGVNADSIKQASEQLNSRWIEFCQLLSERLNWLEYQNNIIAFYNQLQQLEQMTTTAENWLKIQPTTPSEPTAIKSQLKICKDEVNRLSGLQPQIERLKIQSIALKEKGQGPMFLDADFVAFTNHFKQVFSDVQAREKELQTIFDTLPPMRYQETMSAIRTWVQQSETKLSIPQLSVTDYEIMEQRLGELQALQSSLQEQQSGLYYLSTTVKEMSKKAPSEISRKYQSEFEEIEGRWKKLSSQLVEHCQKLEEQMNKLRKIQNHIQTLKKWMAEVDVFLKEEWPALGDSEILKKQLKQCRLLVSDIQTIQPSLNSVNEGGQKIKNEAEPEFASRLETELKELNTQWDHMCQQVYARKEALKGGLEKTVSLQKDLSEMHEWMTQAEEEYLERDFEYKTPDELQKAVEEMKRAKEEAQQKEAKVKLLTESVNSVIAQAPPVAQEALKKELETLTTNYQWLCTRLNGKCKTLEEVWACWHELLSYLEKANKWLNEVEFKLKTTENIPGGAEEISEVLDSLENLMRHSEDNPNQIRILAQTLTDGGVMDELINEELETFNSRWRELHEEAVRRQKLLEQSIQSAQETEKSLHLIQESLTFIDKQLAAYIADKVDAAQMPQEAQKIQSDLTSHEISLEEMKKHNQGKEAAQRVLSQIDVAQKKLQDVSMKFRLFQKPANFEQRLQESKMILDEVKMHLPALETKSVEQEVVQSQLNHCVNLYKSLSEVKSEVEMVIKTGRQIVQKKQTENPKELDERVTALKLHYNELGAKVTERKQQLEKCLKLSRKMRKEMNVLTEWLAATDMELTKRSAVEGMPSNLDSEVAWGKATQKEIEKQKVHLKSITEVGEALKTVLGKKETLVEDKLSLLNSNWIAVTSRAEEWLNLLLEYQKHMETFDQNVDHITKWIIQADTLLDESEKKKPQQKEDVLKRLKAELNDIRPKVDSTRDQAANLMANRGDHCRKLVEPQISELNHRFAAISHRIKTGKASIPLKELEQFNSDIQKLLEPLEAEIQQGVNLKEEDFNKDMNEDNEGTVKELLQRGDNLQQRITDERKREEIKIKQQLLQTKHNALKDLRSQRRKKALEISHQWYQYKRQADDLLKCLDDIEKKLASLPEPRDERKIKEIDRELQKKKEELNAVRRQAEGLSEDGAAMAVEPTQIQLSKRWREIESKFAQFRRLNFAQIHTVREETMMVMTEDMPLEISYVPSTYLTEITHVSQALLEVEQLLNAPDLCAKDFEDLFKQEESLKNIKDSLQQSSGRIDIIHSKKTAALQSATPVERVKLQEALSQLDFQWEKVNKMYKDRQGRFDRSVEKWRRFHYDIKIFNQWLTEAEQFLRKTQIPENWEHAKYKWYLKELQDGIGQRQTVVRTLNATGEEIIQQSSKTDASILQEKLGSLNLRWQEVCKQLSDRKKRLEEQKNILSEFQRDLNEFVLWLEEADNIASIPLEPGKEQQLKEKLEQVKLLVEELPLRQGILKQLNETGGPVLVSAPISPEEQDKLENKLKQTNLQWIKVSRALPEKQGEIEAQIKDLGQLEKKLEDLEEQLNHLLLWLSPIRNQLEIYNQPNQEGPFDVQETEIAVQAKQPDVEEILSKGQHLYKEKPATQPVKRKLEDLSSEWKAVNRLLQELRAKQPDLAPGLTTIGASPTQTVTLVTQPVVTKETAISKLEMPSSLMLEVPALADFNRAWTELTDWLSLLDQVIKSQRVMVGDLEDINEMIIKQKATMQDLEQRRPQLEELITAAQNLKNKTSNQEARTIITDRIERIQNQWDEVQEHLQNRRQQLNEMLKDSTQWLEAKEEAEQVLGQARAKLESWKEGPYTVDAIQKKITETKQLAKDLRQWQTNVDVANDLALKLLRDYSADDTRKVHMITENINASWRSIHKRVSEREAALEETHRLLQQFPLDLEKFLAWLTEAETTANVLQDATRKERLLEDSKGVKELMKQWQDLQGEIEAHTDVYHNLDENSQKILRSLEGSDDAVLLQRRLDNMNFKWSELRKKSLNIRSHLEASSDQWKRLHLSLQELLVWLQLKDDELSRQAPIGGDFPAVQKQNDVHRAFKRELKTKEPVIMSTLETVRIFLTEQPLEGLEKLYQEPRELPPEERAQNVTRLLRKQAEEVNTEWEKLNLHSADWQRKIDETLERLQELQEATDELDLKLRQAEVIKGSWQPVGDLLIDSLQDHLEKVKALRGEIAPLKENVSHVNDLARQLTTLGIQLSPYNLSTLEDLNTRWKLLQVAVEDRVRQLHEAHRDFGPASQHFLSTSVQGPWERAISPNKVPYYINHETQTTCWDHPKMTELYQSLADLNNVRFSAYRTAMKLRRLQKALCLDLLSLSAACDALDQHNLKQNDQPMDILQIINCLTTIYDRLEQEHNNLVNVPLCVDMCLNWLLNVYDTGRTGRIRVLSFKTGIISLCKAHLEDKYRYLFKQVASSTGFCDQRRLGLLLHDSIQIPRQLGEVASFGGSNIEPSVRSCFQFANNKPEIEAALFLDWMRLEPQSMVWLPVLHRVAAAETAKHQAKCNICKECPIIGFRYRSLKHFNYDICQSCFFSGRVAKGHKMHYPMVEYCTPTTSGEDVRDFAKVLKNKFRTKRYFAKHPRMGYLPVQTVLEGDNMETPVTLINFWPVDSAPASSPQLSHDDTHSRIEHYASRLAEMENSNGSYLNDSISPNESIDDEHLLIQHYCQSLNQDSPLSQPRSPAQILISLESEERGELERILADLEEENRNLQAEYDRLKQQHEHKGLSPLPSPPEMMPTSPQSPRDAELIAEAKLLRQHKGRLEARMQILEDHNKQLESQLHRLRQLLEQPQAEAKVNGTTVSSPSTSLQRSDSSQPMLLRVVGSQTSDSMGEEDLLSPPQDTSTGLEEVMEQLNNSFPSSRGRNTPGKPMREDTM

SEQ ID NO: 2062 - DNA, 13993 bp, Homo sapiens
tcctggcatcagttactgtgttgactcactcagtgttgggatcactcactttccccctacaggactcagatctgggaggcaattaccttcggagaaaaacgaataggaaaaactgaagtgttactttttttaaagctgctgaagtttgttggtttctcattgtttttaagcctactggagcaataaagtttgaagaacttttaccaggttttttttatcgctgccttgatatacacttttcaaaatgctttggtgggaagaagtagaggactgttatgaaagagaagatgttcaaaagaaaacattcacaaaatgggtaaatgcacaattttctaagtttgggaagcagcatattgagaacctcttcagtgacctacaggatgggaggcgcctcctagacctcctcgaaggcctgacagggcaaaaactgccaaaagaaaaaggatccacaagagttcatgccctgaacaatgtcaacaaggcactgcgggttttgcagaacaataatgttgatttagtgaatattggaagtactgacatcgtagatggaaatcataaactgactcttggtttgatttggaatataatcctccactggcaggtcaaaaatgtaatgaaaaatatcatggctggattgcaacaaaccaacagtgaaaagattctcctgagctgggtccgacaatcaactcgtaattatccacaggttaatgtaatcaacttcaccaccagctggtctgatggcctggctttgaatgctctcatccatagtcataggccagacctatttgactggaatagtgtggtttgccagcagtcagccacacaacgactggaacatgcattcaacatcgccagatatcaattaggcatagagaaactactcgatcctgaagatgttgataccacctatccagataagaagtccatcttaatgtacatcacatcactcttccaagttttgcctcaacaagtgagcattgaagccatccaggaagtggaaatgttgccaaggccacctaaagtgactaaagaagaacattttcagttacatcatcaaatgcactattctcaacagatcacggtcagtctagcacagggatatgagagaacttcttcccctaagcctcgattcaagagctatgcctacacacaggctgcttatgtcaccacctctgaccctacacggagcccatttccttcacagcatttggaagctcctgaagacaagtcatttggcagttcattgatggagagtgaagtaaacctggaccgttatcaaacagctttagaagaagtattatcgtggcttctttctgctgaggacacattgcaagcacaaggagagatttctaatgatgtggaagtggtgaaagaccagtttcatactcatgaggggtacatgatggatttgacagcccatcagggccgggttggtaatattctacaattgggaagtaagctgattggaacaggaaaattatcagaagatgaagaaactgaagtacaagagcagatgaatctcctaaattcaagatgggaatgcctcagggtagctagcatggaaaaacaaagcaatttacatagagttttaatggatctccagaatcagaaactgaaagagttgaatgactggctaacaaaaacagaagaaagaacaaggaaaatggaggaagagcctcttggacctgatcttgaagacctaaaacgccaagtacaacaacataaggtgcttcaagaagatctagaacaagaacaagtcagggtcaattctctcactcacatggtggtggtagttgatgaatctagtggagatcacgcaactgctgctttggaagaacaacttaaggtattgggagatcgatgggcaaacatctgtagatggacagaagaccgctgggttcttttacaagacatccttctcaaatggcaacgtcttactgaagaacagtgcctttttagtgcatggctttcagaaaaagaagatgcagtgaacaagattcacacaactggctttaaagatcaaaatgaaatgttatcaagtcttcaaaaactggccgttttaaaagcggatctagaaaagaaaaagcaatccatgggcaaactgtattcactcaaacaagatcttctttcaacactgaagaataagtcagtgacccagaagacggaagcatggctggataactttgcccggtgttgggataatttagtccaaaaacttgaaaagagtacagcacagatttcacaggctgtcaccaccactcagccatcactaacacagacaactgtaatggaaacagtaactacggtgaccacaagggaacagatcctggtaaagcatgctcaagaggaacttccaccaccacctccccaaaagaagaggcagattactgtggattctgaaattaggaaaaggttggatgttgatataactgaacttcacagctggattactcgctcagaagctgtgttgcagagtcctgaatttgcaatctttcggaaggaaggcaacttctcagacttaaaagaaaaagtcaatgccatagagcgagaaaaagctgagaagttcagaaaactgcaagatgccagcagatcagctcaggccctggtggaacagatggtgaatgagggtgttaatgcagatagcatcaaacaagcctcagaacaactgaacagccggtggatcgaattctgccagttgctaagtgagagacttaactggctggagtatcagaacaacatcatcgctttctataatcagctacaacaattggagcagatgacaactactgctgaaaactggttgaaaatccaacccaccaccccatcagagccaacagcaattaaaagtcagttaaaaatttgtaaggatgaagtcaaccggctatcaggtcttcaacctcaaattgaacgattaaaaattcaaagcatagccctgaaagagaaaggacaaggacccatgttcctggatgcagactttgtggcctttacaaatcattttaagcaagtcttttctgatgtgcaggccagagagaaagagctacagacaatttttgacactttgccaccaatgcgctatcaggagaccatgagtgccatcaggacatgggtccagcagtcagaaaccaaactctccatacctcaacttagtgtcaccgactatgaaatcatggagcagagactcggggaattgcaggctttacaaagttctctgcaagagcaacaaagtggcctatactatctcagcaccactgtgaaagagatgtcgaagaaagcgccctctgaaattagccggaaatatcaatcagaatttgaagaaattgagggacgctggaagaagctctcctcccagctggttgagcattgtcaaaagctagaggagcaaatgaataaactccgaaaaattcagaatcacatacaaaccctgaagaaatggatggctgaagttgatgtttttctgaaggaggaatggcctgcccttggggattcagaaattctaaaaaagcagctgaaacagtgcagacttttagtcagtgatattcagacaattcagcccagtctaaacagtgtcaatgaaggtgggcagaagataaagaatgaagcagagccagagtttgcttcgagacttgagacagaactcaaagaacttaacactcagtgggatcacatgtgccaacaggtctatgccagaaaggaggccttgaagggaggtttggagaaaactgtaagcctccagaaagatctatcagagatgcacgaatggatgacacaagctgaagaagagtatcttgagagagattttgaatataaaactccagatgaattacagaaagcagttgaagagatgaagagagctaaagaagaggcccaacaaaaagaagcgaaagtgaaactccttactgagtctgtaaatagtgtcatagctcaagctccacctgtagcacaagaggccttaaaaaaggaacttgaaactctaaccaccaactaccagtggctctgcactaggctgaatgggaaatgcaagactttggaagaagtttgggcatgttggcatgagttattgtcatacttggagaaagcaaacaagtggctaaatgaagtagaatttaaacttaaaaccactgaaaacattcctggcggagctgaggaaatctctgaggtgctagattcacttgaaaatttgatgcgacattcagaggataacccaaatcagattcgcatattggcacagaccctaacagatggcggagtcatggatgagctaatcaatgaggaacttgagacatttaattctcgttggagggaactacatgaagaggctgtaaggaggcaaaagttgcttgaacagagcatccagtctgcccaggagactgaaaaatccttacacttaatccaggagtccctcacattcattgacaagcagttggcagcttatattgcagacaaggtggacgcagctcaaatgcctcaggaagcccagaaaatccaatctgatttgacaagtcatgagatcagtttagaagaaatgaagaaacataatcaggggaaggaggctgcccaaagagtcctgtctcagattgatgttgcacagaaaaaattacaagatgtctccatgaagtttcgattattccagaaaccagccaattttgagcagcgtctacaagaaagtaagatgattttagatgaagtgaagatgcacttgcctgcattggaaacaaagagtgtggaacaggaagtagtacagtcacagctaaatcattgtgtgaacttgtataaaagtctgagtgaagtgaagtctgaagtggaaatggtgataaagactggacgtcagattgtacagaaaaagcagacggaaaatcccaaagaacttgatgaaagagtaacagctttgaaattgcattataatgagctgggagcaaaggtaacagaaagaaagcaacagttggagaaatgcttgaaattgtcccgtaagatgcgaaaggaaatgaatgtcttgacagaatggctggcagctacagatatggaattgacaaagagatcagcagttgaaggaatgcctagtaatttggattctgaagttgcctggggaaaggctactcaaaaagagattgagaaacagaaggtgcacctgaagagtatcacagaggtaggagaggccttgaaaacagttttgggcaagaaggagacgttggtggaagataaactcagtcttctgaatagtaactggatagctgtcacctcccgagcagaagagtggttaaatcttttgttggaataccagaaacacatggaaacttttgaccagaatgtggaccacatcacaaagtggatcattcaggctgacacacttttggatgaatcagagaaaaagaaaccccagcaaaaagaagacgtgcttaagcgtttaaaggcagaactgaatgacatacgcccaaaggtggactctacacgtgaccaagcagcaaacttgatggcaaaccgcggtgaccactgcaggaaattagtagagccccaaatctcagagctcaaccatcgatttgcagccatttcacacagaattaagactggaaaggcctccattcctttgaaggaattggagcagtttaactcagatatacaaaaattgcttgaaccactggaggctgaaattcagcagggggtgaatctgaaagaggaagacttcaataaagatatgaatgaagacaatgagggtactgtaaaagaattgttgcaaagaggagacaacttacaacaaagaatcacagatgagagaaagcgagaggaaataaagataaaacagcagctgttacagacaaaacataatgctctcaaggatttgaggtctcaaagaagaaaaaaggctctagaaatttctcatcagtggtatcagtacaagaggcaggctgatgatctcctgaaatgcttggatgacattgaaaaaaaattagccagcctacctgagcccagagatgaaaggaaaataaaggaaattgatcgggaattgcagaagaagaaagaggagctgaatgcagtgcgtaggcaagctgagggcttgtctgaggatggggccgcaatggcagtggagccaactcagatccagctcagcaagcgctggcgggaaattgagagcaaatttgctcagtttcgaagactcaactttgcacaaattcacactgtccgtgaagaaacgatgatggtgatgactgaagacatgcctttggaaatttcttatgtgccttctacttatttgactgaaatcactcatgtctcacaagccctattagaagtggaacaacttctcaatgctcctgacctctgtgctaaggactttgaagatctctttaagcaagaggagtctctgaagaatataaaagatagtctacaacaaagctcaggtcggattgacattattcatagcaagaagacagcagcattgcaaagtgcaacgcctgtggaaagggtgaagctacaggaagctctctcccagcttgatttccaatgggaaaaagttaacaaaatgtacaaggaccgacaagggcgatttgacagatctgttgagaaatggcggcgttttcattatgatataaagatatttaatcagtggctaacagaagctgaacagtttctcagaaagacacaaattcctgagaattgggaacatgctaaatacaaatggtatcttaaggaactccaggatggcattgggcagcggcaaactgttgtcagaacattgaatgcaactggggaagaaataattcagcaatcctcaaaaacagatgccagtattctacaggaaaaattgggaagcctgaatctgcggtggcaggaggtctgcaaacagctgtcagacagaaaaaagaggctagaagaacaaaagaatatcttgtcagaatttcaaagagatttaaatgaatttgttttatggttggaggaagcagataacattgctagtatcccacttgaacctggaaaagagcagcaactaaaagaaaagcttgagcaagtcaagttactggtggaagagttgcccctgcgccagggaattctcaaacaattaaatgaaactggaggacccgtgcttgtaagtgctcccataagcccagaagagcaagataaacttgaaaataagctcaagcagacaaatctccagtggataaaggtttccagagctttacctgagaaacaaggagaaattgaagctcaaataaaagaccttgggcagcttgaaaaaaagcttgaagaccttgaagagcagttaaatcatctgctgctgtggttatctcctattaggaatcagttggaaatttataaccaaccaaaccaagaaggaccatttgacgttcaggaaactgaaatagcagttcaagctaaacaaccggatgtggaagagattttgtctaaagggcagcatttgtacaaggaaaaaccagccactcagccagtgaagaggaagttagaagatctgagctctgagtggaaggcggtaaaccgtttacttcaagagctgagggcaaagcagcctgacctagctcctggactgaccactattggagcctctcctactcagactgttactctggtgacacaacctgtggttactaaggaaactgccatctccaaactagaaatgccatcttccttgatgttggaggtacctgctctggcagatttcaaccgggcttggacagaacttaccgactggctttctctgcttgatcaagttataaaatcacagagggtgatggtgggtgaccttgaggatatcaacgagatgatcatcaagcagaaggcaacaatgcaggatttggaacagaggcgtccccagttggaagaactcattaccgctgcccaaaatttgaaaaacaagaccagcaatcaagaggctagaacaatcattacggatcgaattgaaagaattcagaatcagtgggatgaagtacaagaacaccttcagaaccggaggcaacagttgaatgaaatgttaaaggattcaacacaatggctggaagctaaggaagaagctgagcaggtcttaggacaggccagagccaagcttgagtcatggaaggagggtccctatacagtagatgcaatccaaaagaaaatcacagaaaccaagcagttggccaaagacctccgccagtggcagacaaatgtagatgtggcaaatgacttggccctgaaacttctccgggattattctgcagatgataccagaaaagtccacatgataacagagaatatcaatgcctcttggagaagcattcataaaagggtgagtgagcgagaggctgctttggaagaaactcatagattactgcaacagttccccctggacctggaaaagtttcttgcctggcttacagaagctgaaacaactgccaatgtcctacaggatgctacccgtaaggaaaggctcctagaagactccaagggagtaaaagagctgatgaaacaatggcaagacctccaaggtgaaattgaagctcacacagatgtttatcacaacctggatgaaaacagccaaaaaatcctgagatccctggaaggttccgatgatgcagtcctgttacaaagacgtttggataacatgaacttcaagtggagtgaacttcggaaaaagtctctcaacattaggtcccatttggaagccagttctgaccagtggaagcgtctgcacctttctctgcaggaacttctggtgtggctacagctgaaagatgatgaattaagccggcaggcacctattggaggcgactttccagcagttcagaagcagaacgatgtacatagggccttcaagagggaattgaaaactaaagaacctgtaatcatgagtactcttgagactgtacgaatatttctgacagagcagcctttggaaggactagagaaactctaccaggagcccagagagctgcctcctgaggagagagcccagaatgtcactcggcttctacgaaagcaggctgaggaggtcaatactgagtgggaaaaattgaacctgcactccgctgactggcagagaaaaatagatgagacccttgaaagactccaggaacttcaagaggccacggatgagctggacctcaagctgcgccaagctgaggtgatcaagggatcctggcagcccgtgggcgatctcctcattgactctctccaagatcacctcgagaaagtcaaggcacttcgaggagaaattgcgcctctgaaagagaacgtgagccacgtcaatgaccttgctcgccagcttaccactttgggcattcagctctcaccgtataacctcagcactctggaagacctgaacaccagatggaagcttctgcaggtggccgtcgaggaccgagtcaggcagctgcatgaagcccacagggactttggtccagcatctcagcactttctttccacgtctgtccagggtccctgggagagagccatctcgccaaacaaagtgccctactatatcaaccacgagactcaaacaacttgctgggaccatcccaaaatgacagagctctaccagtctttagctgacctgaataatgtcagattctcagcttataggactgccatgaaactccgaagactgcagaaggccctttgcttggatctcttgagcctgtcagctgcatgtgatgccttggaccagcacaacctcaagcaaaatgaccagcccatggatatcctgcagattattaattgtttgaccactatttatgaccgcctggagcaagagcacaacaatttggtcaacgtccctctctgcgtggatatgtgtctgaactggctgctgaatgtttatgatacgggacgaacagggaggatccgtgtcctgtcttttaaaactggcatcatttccctgtgtaaagcacatttggaagacaagtacagataccttttcaagcaagtggcaagttcaacaggattttgtgaccagcgcaggctgggcctccttctgcatgattctatccaaattccaagacagttgggtgaagttgcatcctttgggggcagtaacattgagccaagtgtccggagctgcttccaatttgctaataataagccagagatcgaagcggccctcttcctagactggatgagactggaaccccagtccatggtgtggctgcccgtcctgcacagagtggctgctgcagaaactgccaagcatcaggccaaatgtaacatctgcaaagagtgtccaatcattggattcaggtacaggagtctaaagcactttaattatgacatctgccaaagctgctttttttctggtcgagttgcaaaaggccataaaatgcactatcccatggtggaatattgcactccgactacatcaggagaagatgttcgagactttgccaaggtactaaaaaacaaatttcgaaccaaaaggtattttgcgaagcatccccgaatgggctacctgccagtgcagactgtcttagagggggacaacatggaaactcccgttactctgatcaacttctggccagtagattctgcgcctgcctcgtcccctcagctttcacacgatgatactcattcacgcattgaacattatgctagcaggctagcagaaatggaaaacagcaatggatcttatctaaatgatagcatctctcctaatgagagcatagatgatgaacatttgttaatccagcattactgccaaagtttgaaccaggactcccccctgagccagcctcgtagtcctgcccagatcttgatttccttagagagtgaggaaagaggggagctagagagaatcctagcagatcttgaggaagaaaacaggaatctgcaagcagaatatgaccgtctaaagcagcagcacgaacataaaggcctgtccccactgccgtcccctcctgaaatgatgcccacctctccccagagtccccgggatgctgagctcattgctgaggccaagctactgcgtcaacacaaaggccgcctggaagccaggatgcaaatcctggaagaccacaataaacagctggagtcacagttacacaggctaaggcagctgctggagcaaccccaggcagaggccaaagtgaatggcacaacggtgtcctctccttctacctctctacagaggtccgacagcagtcagcctatgctgctccgagtggttggcagtcaaacttcggactccatgggtgaggaagatcttctcagtcctccccaggacacaagcacagggttagaggaggtgatggagcaactcaacaactccttccctagttcaagaggaagaaatacccctggaaagccaatgagagaggacacaatgtaggaagtcttttccacatggcagatgatttgggcagagcgatggagtccttagtatcagtcatgacagatgaagaaggagcagaataaatgttttacaactcctgattcccgcatggtttttataatattcatacaacaaagaggattagacagtaagagtttacaagaaataaatctatatttttgtgaagggtagtggtattatactgtagatttcagtagtttctaagtctgttattgttttgttaacaatggcaggttttacacgtctatgcaattgtacaaaaaagttataagaaaactacatgtaaaatcttgatagctaaataacttgccatttctttatatggaacgcattttgggttgtttaaaaatttataacagttataaagaaagattgtaaactaaagtgtgctttataaaaaaaagttgtttataaaaacccctaaaaacaaaacaaacacacacacacacacatacacacacacacacaaaactttgaggcagcgcattgttttgcatccttttggcgtgatatccatatgaaattcatggctttttctttttttgcatattaaagataagacttcctctaccaccacaccaaatgactactacacactgctcatttgagaactgtcagctgagtggggcaggcttgagttttcatttcatatatctatatgtctataagtatataaatactatagttatatagataaagagatacgaatttctatagactgactttttccattttttaaatgttcatgtcacatcctaatagaaagaaattacttctagtcagtcatccaggcttacctgcttggtctagaatggatttttcccggagccggaagccaggaggaaactacaccacactaaaacattgtctacagctccagatgtttctcattttaaacaactttccactgacaacgaaagtaaagtaaagtattggatttttttaaagggaacatgtgaatgaatacacaggacttattatatcagagtgagtaatcggttggttggttgattgattgattgattgatacattcagcttcctgctgctagcaatgccacgatttagatttaatgatgcttcagtggaaatcaatcagaaggtattctgaccttgtgaacatcagaaggtattttttaactcccaagcagtagcaggacgatgatagggctggagggctatggattcccagcccatccctgtgaaggagtaggccactctttaagtgaaggattggatgattgttcataatacataaagttctctgtaattacaactaaattattatgccctcttctcacagtcaaaaggaactgggtggtttggtttttgttgcttttttagatttattgtcccatgtgggatgagtttttaaatgccacaagacataatttaaaataaataaactttgggaaaaggtgtaagacagtagccccatcacatttgtgatactgacaggtatcaacccagaagcccatgaactgtgtttccatcctttgcatttctctgcgagtagttccacacaggtttgtaagtaagtaagaaagaaggcaaattgattcaaatgttacaaaaaaacccttcttggtggattagacaggttaaatatataaacaaacaaacaaaaattgctcaaaaaagaggagaaaagctcaagaggaaaagctaaggactggtaggaaaaagctttactctttcatgccattttatttctttttgatttttaaatcattcattcaatagataccaccgtgtgacctataattttgcaaatctgttacctctgacatcaagtgtaattagcttttggagagtgggctgacatcaagtgtaattagcttttggagagtgggttttgtccattattaataattaattaattaacatcaaacacggcttctcatgctatttctacctcactttggttttggggtgttcctgataattgtgcacacctgagttcacagcttcaccacttgtccattgcgttattttctttttcctttataattctttctttttccttcataattttcaaaagaaaacccaaagctctaaggtaacaaattaccaaattacatgaagatttggtttttgtcttgcatttttttcctttatgtgacgctggaccttttctttacccaaggatttttaaaactcagatttaaaacaaggggttactttacatcctactaagaagtttaagtaagtaagtttcattctaaaatcagaggtaaatagagtgcataaataattttgttttaatctttttgtttttcttttagacacattagctctggagtgagtctgtcataatatttgaacaaaaattgagagctttattgctgcattttaagcataattaatttggacattatttcgtgttgtgttctttataaccaccgagtattaaactgtaaatcataatgtaactgaagcataaacatcacatggcatgttttgtcattgttttcaggtactgagttcttacttgagtatcataatatattgtgttttaacaccaacactgtaacatttacgaattatttttttaaacttcagttttactgcattttcacaacatatcagacttcaccaaatatatgccttactattgtattatagtactgctttactgtgtatctcaataaagcacgcagttatgttac

SEQ ID NO: 2063 - protein, 3685 aa, Homo sapiens
MLWWEEVEDCYEREDVQKKTFTKWVNAQFSKFGKQHIENLFSDLQDGRRLLDLLEGLTGQKLPKEKGSTRVHALNNVNKALRVLQNNNVDLVNIGSTDIVDGNHKLTLGLIWNIILHWQVKNVMKNIMAGLQQTNSEKILLSWVRQSTRNYPQVNVINFTTSWSDGLALNALIHSHRPDLFDWNSVVCQQSATQRLEHAFNIARYQLGIEKLLDPEDVDTTYPDKKSILMYITSLFQVLPQQVSIEAIQEVEMLPRPPKVTKEEHFQLHHQMHYSQQITVSLAQGYERTSSPKPRFKSYAYTQAAYVTTSDPTRSPFPSQHLEAPEDKSFGSSLMESEVNLDRYQTALEEVLSWLLSAEDTLQAQGEISNDVEVVKDQFHTHEGYMMDLTAHQGRVGNILQLGSKLIGTGKLSEDEETEVQEQMNLLNSRWECLRVASMEKQSNLHRVLMDLQNQKLKELNDWLTKTEERTRKMEEEPLGPDLEDLKRQVQQHKVLQEDLEQEQVRVNSLTHMVVVVDESSGDHATAALEEQLKVLGDRWANICRWTEDRWVLLQDILLKWQRLTEEQCLFSAWLSEKEDAVNKIHTTGFKDQNEMLSSLQKLAVLKADLEKKKQSMGKLYSLKQDLLSTLKNKSVTQKTEAWLDNFARCWDNLVQKLEKSTAQISQAVTTTQPSLTQTTVMETVTTVTTREQILVKHAQEELPPPPPQKKRQITVDSEIRKRLDVDITELHSWITRSEAVLQSPEFAIFRKEGNFSDLKEKVNAIEREKAEKFRKLQDASRSAQALVEQMVNEGVNADSIKQASEQLNSRWIEFCQLLSERLNWLEYQNNIIAFYNQLQQLEQMTTTAENWLKIQPTTPSEPTAIKSQLKICKDEVNRLSGLQPQIERLKIQSIALKEKGQGPMFLDADFVAFTNHFKQVFSDVQAREKELQTIFDTLPPMRYQETMSAIRTWVQQSETKLSIPQLSVTDYEIMEQRLGELQALQSSLQEQQSGLYYLSTTVKEMSKKAPSEISRKYQSEFEEIEGRWKKLSSQLVEHCQKLEEQMNKLRKIQNHIQTLKKWMAEVDVFLKEEWPALGDSEILKKQLKQCRLLVSDIQTIQPSLNSVNEGGQKIKNEAEPEFASRLETELKELNTQWDHMCQQVYARKEALKGGLEKTVSLQKDLSEMHEWMTQAEEEYLERDFEYKTPDELQKAVEEMKRAKEEAQQKEAKVKLLTESVNSVIAQAPPVAQEALKKELETLTTNYQWLCTRLNGKCKTLEEVWACWHELLSYLEKANKWLNEVEFKLKTTENIPGGAEEISEVLDSLENLMRHSEDNPNQIRILAQTLTDGGVMDELINEELETFNSRWRELHEEAVRRQKLLEQSIQSAQETEKSLHLIQESLTFIDKQLAAYIADKVDAAQMPQEAQKIQSDLTSHEISLEEMKKHNQGKEAAQRVLSQIDVAQKKLQDVSMKFRLFQKPANFEQRLQESKMILDEVKMHLPALETKSVEQEVVQSQLNHCVNLYKSLSEVKSEVEMVIKTGRQIVQKKQTENPKELDERVTALKLHYNELGAKVTERKQQLEKCLKLSRKMRKEMNVLTEWLAATDMELTKRSAVEGMPSNLDSEVAWGKATQKEIEKQKVHLKSITEVGEALKTVLGKKETLVEDKLSLLNSNWIAVTSRAEEWLNLLLEYQKHMETFDQNVDHITKWIIQADTLLDESEKKKPQQKEDVLKRLKAELNDIRPKVDSTRDQAANLMANRGDHCRKLVEPQISELNHRFAAISHRIKTGKASIPLKELEQFNSDIQKLLEPLEAEIQQGVNLKEEDFNKDMNEDNEGTVKELLQRGDNLQQRITDERKREEIKIKQQLLQTKHNALKDLRSQRRKKALEISHQWYQYKRQADDLLKCLDDIEKKLASLPEPRDERKIKEIDRELQKKKEELNAVRRQAEGLSEDGAAMAVEPTQIQLSKRWREIESKFAQFRRLNFAQIHTVREETMMVMTEDMPLEISYVPSTYLTEITHVSQALLEVEQLLNAPDLCAKDFEDLFKQEESLKNIKDSLQQSSGRIDIIHSKKTAALQSATPVERVKLQEALSQLDFQWEKVNKMYKDRQGRFDRSVEKWRRFHYDIKIFNQWLTEAEQFLRKTQIPENWEHAKYKWYLKELQDGIGQRQTVVRTLNATGEEIIQQSSKTDASILQEKLGSLNLRWQEVCKQLSDRKKRLEEQKNILSEFQRDLNEFVLWLEEADNIASIPLEPGKEQQLKEKLEQVKLLVEELPLRQGILKQLNETGGPVLVSAPISPEEQDKLENKLKQTNLQWIKVSRALPEKQGEIEAQIKDLGQLEKKLEDLEEQLNHLLLWLSPIRNQLEIYNQPNQEGPFDVQETEIAVQAKQPDVEEILSKGQHLYKEKPATQPVKRKLEDLSSEWKAVNRLLQELRAKQPDLAPGLTTIGASPTQTVTLVTQPVVTKETAISKLEMPSSLMLEVPALADFNRAWTELTDWLSLLDQVIKSQRVMVGDLEDINEMIIKQKATMQDLEQRRPQLEELITAAQNLKNKTSNQEARTIITDRIERIQNQWDEVQEHLQNRRQQLNEMLKDSTQWLEAKEEAEQVLGQARAKLESWKEGPYTVDAIQKKITETKQLAKDLRQWQTNVDVANDLALKLLRDYSADDTRKVHMITENINASWRSIHKRVSEREAALEETHRLLQQFPLDLEKFLAWLTEAETTANVLQDATRKERLLEDSKGVKELMKQWQDLQGEIEAHTDVYHNLDENSQKILRSLEGSDDAVLLQRRLDNMNFKWSELRKKSLNIRSHLEASSDQWKRLHLSLQELLVWLQLKDDELSRQAPIGGDFPAVQKQNDVHRAFKRELKTKEPVIMSTLETVRIFLTEQPLEGLEKLYQEPRELPPEERAQNVTRLLRKQAEEVNTEWEKLNLHSADWQRKIDETLERLQELQEATDELDLKLRQAEVIKGSWQPVGDLLIDSLQDHLEKVKALRGEIAPLKENVSHVNDLARQLTTLGIQLSPYNLSTLEDLNTRWKLLQVAVEDRVRQLHEAHRDFGPASQHFLSTSVQGPWERAISPNKVPYYINHETQTTCWDHPKMTELYQSLADLNNVRFSAYRTAMKLRRLQKALCLDLLSLSAACDALDQHNLKQNDQPMDILQIINCLTTIYDRLEQEHNNLVNVPLCVDMCLNWLLNVYDTGRTGRIRVLSFKTGIISLCKAHLEDKYRYLFKQVASSTGFCDQRRLGLLLHDSIQIPRQLGEVASFGGSNIEPSVRSCFQFANNKPEIEAALFLDWMRLEPQSMVWLPVLHRVAAAETAKHQAKCNICKECPIIGFRYRSLKHFNYDICQSCFFSGRVAKGHKMHYPMVEYCTPTTSGEDVRDFAKVLKNKFRTKRYFAKHPRMGYLPVQTVLEGDNMETPVTLINFWPVDSAPASSPQLSHDDTHSRIEHYASRLAEMENSNGSYLNDSISPNESIDDEHLLIQHYCQSLNQDSPLSQPRSPAQILISLESEERGELERILADLEEENRNLQAEYDRLKQQHEHKGLSPLPSPPEMMPTSPQSPRDAELIAEAKLLRQHKGRLEARMQILEDHNKQLESQLHRLRQLLEQPQAEAKVNGTTVSSPSTSLQRSDSSQPMLLRVVGSQTSDSMGEEDLLSPPQDTSTGLEEVMEQLNNSFPSSRGRNTPGKPMREDTM

SEQ ID NO: 2064 - DNA, 13764 bp, Homo sapiens
tcactgacacatagagtaacttctagttctccaagctctactcatgatgaaagagaagatgttcaaaagaaaacattcacaaaatgggtaaatgcacaattttctaagtttgggaagcagcatattgagaacctcttcagtgacctacaggatgggaggcgcctcctagacctcctcgaaggcctgacagggcaaaaactgccaaaagaaaaaggatccacaagagttcatgccctgaacaatgtcaacaaggcactgcgggttttgcagaacaataatgttgatttagtgaatattggaagtactgacatcgtagatggaaatcataaactgactcttggtttgatttggaatataatcctccactggcaggtcaaaaatgtaatgaaaaatatcatggctggattgcaacaaaccaacagtgaaaagattctcctgagctgggtccgacaatcaactcgtaattatccacaggttaatgtaatcaacttcaccaccagctggtctgatggcctggctttgaatgctctcatccatagtcataggccagacctatttgactggaatagtgtggtttgccagcagtcagccacacaacgactggaacatgcattcaacatcgccagatatcaattaggcatagagaaactactcgatcctgaagatgttgataccacctatccagataagaagtccatcttaatgtacatcacatcactcttccaagttttgcctcaacaagtgagcattgaagccatccaggaagtggaaatgttgccaaggccacctaaagtgactaaagaagaacattttcagttacatcatcaaatgcactattctcaacagatcacggtcagtctagcacagggatatgagagaacttcttcccctaagcctcgattcaagagctatgcctacacacaggctgcttatgtcaccacctctgaccctacacggagcccatttccttcacagcatttggaagctcctgaagacaagtcatttggcagttcattgatggagagtgaagtaaacctggaccgttatcaaacagctttagaagaagtattatcgtggcttctttctgctgaggacacattgcaagcacaaggagagatttctaatgatgtggaagtggtgaaagaccagtttcatactcatgaggggtacatgatggatttgacagcccatcagggccgggttggtaatattctacaattgggaagtaagctgattggaacaggaaaattatcagaagatgaagaaactgaagtacaagagcagatgaatctcctaaattcaagatgggaatgcctcagggtagctagcatggaaaaacaaagcaatttacatagagttttaatggatctccagaatcagaaactgaaagagttgaatgactggctaacaaaaacagaagaaagaacaaggaaaatggaggaagagcctcttggacctgatcttgaagacctaaaacgccaagtacaacaacataaggtgcttcaagaagatctagaacaagaacaagtcagggtcaattctctcactcacatggtggtggtagttgatgaatctagtggagatcacgcaactgctgctttggaagaacaacttaaggtattgggagatcgatgggcaaacatctgtagatggacagaagaccgctgggttcttttacaagacatccttctcaaatggcaacgtcttactgaagaacagtgcctttttagtgcatggctttcagaaaaagaagatgcagtgaacaagattcacacaactggctttaaagatcaaaatgaaatgttatcaagtcttcaaaaactggccgttttaaaagcggatctagaaaagaaaaagcaatccatgggcaaactgtattcactcaaacaagatcttctttcaacactgaagaataagtcagtgacccagaagacggaagcatggctggataactttgcccggtgttgggataatttagtccaaaaacttgaaaagagtacagcacagatttcacaggctgtcaccaccactcagccatcactaacacagacaactgtaatggaaacagtaactacggtgaccacaagggaacagatcctggtaaagcatgctcaagaggaacttccaccaccacctccccaaaagaagaggcagattactgtggattctgaaattaggaaaaggttggatgttgatataactgaacttcacagctggattactcgctcagaagctgtgttgcagagtcctgaatttgcaatctttcggaaggaaggcaacttctcagacttaaaagaaaaagtcaatgccatagagcgagaaaaagctgagaagttcagaaaactgcaagatgccagcagatcagctcaggccctggtggaacagatggtgaatgagggtgttaatgcagatagcatcaaacaagcctcagaacaactgaacagccggtggatcgaattctgccagttgctaagtgagagacttaactggctggagtatcagaacaacatcatcgctttctataatcagctacaacaattggagcagatgacaactactgctgaaaactggttgaaaatccaacccaccaccccatcagagccaacagcaattaaaagtcagttaaaaatttgtaaggatgaagtcaaccggctatcaggtcttcaacctcaaattgaacgattaaaaattcaaagcatagccctgaaagagaaaggacaaggacccatgttcctggatgcagactttgtggcctttacaaatcattttaagcaagtcttttctgatgtgcaggccagagagaaagagctacagacaatttttgacactttgccaccaatgcgctatcaggagaccatgagtgccatcaggacatgggtccagcagtcagaaaccaaactctccatacctcaacttagtgtcaccgactatgaaatcatggagcagagactcggggaattgcaggctttacaaagttctctgcaagagcaacaaagtggcctatactatctcagcaccactgtgaaagagatgtcgaagaaagcgccctctgaaattagccggaaatatcaatcagaatttgaagaaattgagggacgctggaagaagctctcctcccagctggttgagcattgtcaaaagctagaggagcaaatgaataaactccgaaaaattcagaatcacatacaaaccctgaagaaatggatggctgaagttgatgtttttctgaaggaggaatggcctgcccttggggattcagaaattctaaaaaagcagctgaaacagtgcagacttttagtcagtgatattcagacaattcagcccagtctaaacagtgtcaatgaaggtgggcagaagataaagaatgaagcagagccagagtttgcttcgagacttgagacagaactcaaagaacttaacactcagtgggatcacatgtgccaacaggtctatgccagaaaggaggccttgaagggaggtttggagaaaactgtaagcctccagaaagatctatcagagatgcacgaatggatgacacaagctgaagaagagtatcttgagagagattttgaatataaaactccagatgaattacagaaagcagttgaagagatgaagagagctaaagaagaggcccaacaaaaagaagcgaaagtgaaactccttactgagtctgtaaatagtgtcatagctcaagctccacctgtagcacaagaggccttaaaaaaggaacttgaaactctaaccaccaactaccagtggctctgcactaggctgaatgggaaatgcaagactttggaagaagtttgggcatgttggcatgagttattgtcatacttggagaaagcaaacaagtggctaaatgaagtagaatttaaacttaaaaccactgaaaacattcctggcggagctgaggaaatctctgaggtgctagattcacttgaaaatttgatgcgacattcagaggataacccaaatcagattcgcatattggcacagaccctaacagatggcggagtcatggatgagctaatcaatgaggaacttgagacatttaattctcgttggagggaactacatgaagaggctgtaaggaggcaaaagttgcttgaacagagcatccagtctgcccaggagactgaaaaatccttacacttaatccaggagtccctcacattcattgacaagcagttggcagcttatattgcagacaaggtggacgcagctcaaatgcctcaggaagcccagaaaatccaatctgatttgacaagtcatgagatcagtttagaagaaatgaagaaacataatcaggggaaggaggctgcccaaagagtcctgtctcagattgatgttgcacagaaaaaattacaagatgtctccatgaagtttcgattattccagaaaccagccaattttgagcagcgtctacaagaaagtaagatgattttagatgaagtgaagatgcacttgcctgcattggaaacaaagagtgtggaacaggaagtagtacagtcacagctaaatcattgtgtgaacttgtataaaagtctgagtgaagtgaagtctgaagtggaaatggtgataaagactggacgtcagattgtacagaaaaagcagacggaaaatcccaaagaacttgatgaaagagtaacagctttgaaattgcattataatgagctgggagcaaaggtaacagaaagaaagcaacagttggagaaatgcttgaaattgtcccgtaagatgcgaaaggaaatgaatgtcttgacagaatggctggcagctacagatatggaattgacaaagagatcagcagttgaaggaatgcctagtaatttggattctgaagttgcctggggaaaggctactcaaaaagagattgagaaacagaaggtgcacctgaagagtatcacagaggtaggagaggccttgaaaacagttttgggcaagaaggagacgttggtggaagataaactcagtcttctgaatagtaactggatagctgtcacctcccgagcagaagagtggttaaatcttttgttggaataccagaaacacatggaaacttttgaccagaatgtggaccacatcacaaagtggatcattcaggctgacacacttttggatgaatcagagaaaaagaaaccccagcaaaaagaagacgtgcttaagcgtttaaaggcagaactgaatgacatacgcccaaaggtggactctacacgtgaccaagcagcaaacttgatggcaaaccgcggtgaccactgcaggaaattagtagagccccaaatctcagagctcaaccatcgatttgcagccatttcacacagaattaagactggaaaggcctccattcctttgaaggaattggagcagtttaactcagatatacaaaaattgcttgaaccactggaggctgaaattcagcagggggtgaatctgaaagaggaagacttcaataaagatatgaatgaagacaatgagggtactgtaaaagaattgttgcaaagaggagacaacttacaacaaagaatcacagatgagagaaagcgagaggaaataaagataaaacagcagctgttacagacaaaacataatgctctcaaggatttgaggtctcaaagaagaaaaaaggctctagaaatttctcatcagtggtatcagtacaagaggcaggctgatgatctcctgaaatgcttggatgacattgaaaaaaaattagccagcctacctgagcccagagatgaaaggaaaataaaggaaattgatcgggaattgcagaagaagaaagaggagctgaatgcagtgcgtaggcaagctgagggcttgtctgaggatggggccgcaatggcagtggagccaactcagatccagctcagcaagcgctggcgggaaattgagagcaaatttgctcagtttcgaagactcaactttgcacaaattcacactgtccgtgaagaaacgatgatggtgatgactgaagacatgcctttggaaatttcttatgtgccttctacttatttgactgaaatcactcatgtctcacaagccctattagaagtggaacaacttctcaatgctcctgacctctgtgctaaggactttgaagatctctttaagcaagaggagtctctgaagaatataaaagatagtctacaacaaagctcaggtcggattgacattattcatagcaagaagacagcagcattgcaaagtgcaacgcctgtggaaagggtgaagctacaggaagctctctcccagcttgatttccaatgggaaaaagttaacaaaatgtacaaggaccgacaagggcgatttgacagatctgttgagaaatggcggcgttttcattatgatataaagatatttaatcagtggctaacagaagctgaacagtttctcagaaagacacaaattcctgagaattgggaacatgctaaatacaaatggtatcttaaggaactccaggatggcattgggcagcggcaaactgttgtcagaacattgaatgcaactggggaagaaataattcagcaatcctcaaaaacagatgccagtattctacaggaaaaattgggaagcctgaatctgcggtggcaggaggtctgcaaacagctgtcagacagaaaaaagaggctagaagaacaaaagaatatcttgtcagaatttcaaagagatttaaatgaatttgttttatggttggaggaagcagataacattgctagtatcccacttgaacctggaaaagagcagcaactaaaagaaaagcttgagcaagtcaagttactggtggaagagttgcccctgcgccagggaattctcaaacaattaaatgaaactggaggacccgtgcttgtaagtgctcccataagcccagaagagcaagataaacttgaaaataagctcaagcagacaaatctccagtggataaaggtttccagagctttacctgagaaacaaggagaaattgaagctcaaataaaagaccttgggcagcttgaaaaaaagcttgaagaccttgaagagcagttaaatcatctgctgctgtggttatctcctattaggaatcagttggaaatttataaccaaccaaaccaagaaggaccatttgacgttcaggaaactgaaatagcagttcaagctaaacaaccggatgtggaagagattttgtctaaagggcagcatttgtacaaggaaaaaccagccactcagccagtgaagaggaagttagaagatctgagctctgagtggaaggcggtaaaccgtttacttcaagagctgagggcaaagcagcctgacctagctcctggactgaccactattggagcctctcctactcagactgttactctggtgacacaacctgtggttactaaggaaactgccatctccaaactagaaatgccatcttccttgatgttggaggtacctgctctggcagatttcaaccgggcttggacagaacttaccgactggctttctctgcttgatcaagttataaaatcacagagggtgatggtgggtgaccttgaggatatcaacgagatgatcatcaagcagaaggcaacaatgcaggatttggaacagaggcgtccccagttggaagaactcattaccgctgcccaaaatttgaaaaacaagaccagcaatcaagaggctagaacaatcattacggatcgaattgaaagaattcagaatcagtgggatgaagtacaagaacaccttcagaaccggaggcaacagttgaatgaaatgttaaaggattcaacacaatggctggaagctaaggaagaagctgagcaggtcttaggacaggccagagccaagcttgagtcatggaaggagggtccctatacagtagatgcaatccaaaagaaaatcacagaaaccaagcagttggccaaagacctccgccagtggcagacaaatgtagatgtggcaaatgacttggccctgaaacttctccgggattattctgcagatgataccagaaaagtccacatgataacagagaatatcaatgcctcttggagaagcattcataaaagggtgagtgagcgagaggctgctttggaagaaactcatagattactgcaacagttccccctggacctggaaaagtttcttgcctggcttacagaagctgaaacaactgccaatgtcctacaggatgctacccgtaaggaaaggctcctagaagactccaagggagtaaaagagctgatgaaacaatggcaagacctccaaggtgaaattgaagctcacacagatgtttatcacaacctggatgaaaacagccaaaaaatcctgagatccctggaaggttccgatgatgcagtcctgttacaaagacgtttggataacatgaacttcaagtggagtgaacttcggaaaaagtctctcaacattaggtcccatttggaagccagttctgaccagtggaagcgtctgcacctttctctgcaggaacttctggtgtggctacagctgaaagatgatgaattaagccggcaggcacctattggaggcgactttccagcagttcagaagcagaacgatgtacatagggccttcaagagggaattgaaaactaaagaacctgtaatcatgagtactcttgagactgtacgaatatttctgacagagcagcctttggaaggactagagaaactctaccaggagcccagagagctgcctcctgaggagagagcccagaatgtcactcggcttctacgaaagcaggctgaggaggtcaatactgagtgggaaaaattgaacctgcactccgctgactggcagagaaaaatagatgagacccttgaaagactccaggaacttcaagaggccacggatgagctggacctcaagctgcgccaagctgaggtgatcaagggatcctggcagcccgtgggcgatctcctcattgactctctccaagatcacctcgagaaagtcaaggcacttcgaggagaaattgcgcctctgaaagagaacgtgagccacgtcaatgaccttgctcgccagcttaccactttgggcattcagctctcaccgtataacctcagcactctggaagacctgaacaccagatggaagcttctgcaggtggccgtcgaggaccgagtcaggcagctgcatgaagcccacagggactttggtccagcatctcagcactttctttccacgtctgtccagggtccctgggagagagccatctcgccaaacaaagtgccctactatatcaaccacgagactcaaacaacttgctgggaccatcccaaaatgacagagctctaccagtctttagctgacctgaataatgtcagattctcagcttataggactgccatgaaactccgaagactgcagaaggccctttgcttggatctcttgagcctgtcagctgcatgtgatgccttggaccagcacaacctcaagcaaaatgaccagcccatggatatcctgcagattattaattgtttgaccactatttatgaccgcctggagcaagagcacaacaatttggtcaacgtccctctctgcgtggatatgtgtctgaactggctgctgaatgtttatgatacgggacgaacagggaggatccgtgtcctgtcttttaaaactggcatcatttccctgtgtaaagcacatttggaagacaagtacagataccttttcaagcaagtggcaagttcaacaggattttgtgaccagcgcaggctgggcctccttctgcatgattctatccaaattccaagacagttgggtgaagttgcatcctttgggggcagtaacattgagccaagtgtccggagctgcttccaatttgctaataataagccagagatcgaagcggccctcttcctagactggatgagactggaaccccagtccatggtgtggctgcccgtcctgcacagagtggctgctgcagaaactgccaagcatcaggccaaatgtaacatctgcaaagagtgtccaatcattggattcaggtacaggagtctaaagcactttaattatgacatctgccaaagctgctttttttctggtcgagttgcaaaaggccataaaatgcactatcccatggtggaatattgcactccgactacatcaggagaagatgttcgagactttgccaaggtactaaaaaacaaatttcgaaccaaaaggtattttgcgaagcatccccgaatgggctacctgccagtgcagactgtcttagagggggacaacatggaaactcccgttactctgatcaacttctggccagtagattctgcgcctgcctcgtcccctcagctttcacacgatgatactcattcacgcattgaacattatgctagcaggctagcagaaatggaaaacagcaatggatcttatctaaatgatagcatctctcctaatgagagcatagatgatgaacatttgttaatccagcattactgccaaagtttgaaccaggactcccccctgagccagcctcgtagtcctgcccagatcttgatttccttagagagtgaggaaagaggggagctagagagaatcctagcagatcttgaggaagaaaacaggaatctgcaagcagaatatgaccgtctaaagcagcagcacgaacataaaggcctgtccccactgccgtcccctcctgaaatgatgcccacctctccccagagtccccgggatgctgagctcattgctgaggccaagctactgcgtcaacacaaaggccgcctggaagccaggatgcaaatcctggaagaccacaataaacagctggagtcacagttacacaggctaaggcagctgctggagcaaccccaggcagaggccaaagtgaatggcacaacggtgtcctctccttctacctctctacagaggtccgacagcagtcagcctatgctgctccgagtggttggcagtcaaacttcggactccatgggtgaggaagatcttctcagtcctccccaggacacaagcacagggttagaggaggtgatggagcaactcaacaactccttccctagttcaagaggaagaaatacccctggaaagccaatgagagaggacacaatgtaggaagtcttttccacatggcagatgatttgggcagagcgatggagtccttagtatcagtcatgacagatgaagaaggagcagaataaatgttttacaactcctgattcccgcatggtttttataatattcatacaacaaagaggattagacagtaagagtttacaagaaataaatctatatttttgtgaagggtagtggtattatactgtagatttcagtagtttctaagtctgttattgttttgttaacaatggcaggttttacacgtctatgcaattgtacaaaaaagttataagaaaactacatgtaaaatcttgatagctaaataacttgccatttctttatatggaacgcattttgggttgtttaaaaatttataacagttataaagaaagattgtaaactaaagtgtgctttataaaaaaaagttgtttataaaaacccctaaaaacaaaacaaacacacacacacacacatacacacacacacacaaaactttgaggcagcgcattgttttgcatccttttggcgtgatatccatatgaaattcatggctttttctttttttgcatattaaagataagacttcctctaccaccacaccaaatgactactacacactgctcatttgagaactgtcagctgagtggggcaggcttgagttttcatttcatatatctatatgtctataagtatataaatactatagttatatagataaagagatacgaatttctatagactgactttttccattttttaaatgttcatgtcacatcctaatagaaagaaattacttctagtcagtcatccaggcttacctgcttggtctagaatggatttttcccggagccggaagccaggaggaaactacaccacactaaaacattgtctacagctccagatgtttctcattttaaacaactttccactgacaacgaaagtaaagtaaagtattggatttttttaaagggaacatgtgaatgaatacacaggacttattatatcagagtgagtaatcggttggttggttgattgattgattgattgatacattcagcttcctgctgctagcaatgccacgatttagatttaatgatgcttcagtggaaatcaatcagaaggtattctgaccttgtgaacatcagaaggtattttttaactcccaagcagtagcaggacgatgatagggctggagggctatggattcccagcccatccctgtgaaggagtaggccactctttaagtgaaggattggatgattgttcataatacataaagttctctgtaattacaactaaattattatgccctcttctcacagtcaaaaggaactgggtggtttggtttttgttgcttttttagatttattgtcccatgtgggatgagtttttaaatgccacaagacataatttaaaataaataaactttgggaaaaggtgtaagacagtagccccatcacatttgtgatactgacaggtatcaacccagaagcccatgaactgtgtttccatcctttgcatttctctgcgagtagttccacacaggtttgtaagtaagtaagaaagaaggcaaattgattcaaatgttacaaaaaaacccttcttggtggattagacaggttaaatatataaacaaacaaacaaaaattgctcaaaaaagaggagaaaagctcaagaggaaaagctaaggactggtaggaaaaagctttactctttcatgccattttatttctttttgatttttaaatcattcattcaatagataccaccgtgtgacctataattttgcaaatctgttacctctgacatcaagtgtaattagcttttggagagtgggctgacatcaagtgtaattagcttttggagagtgggttttgtccattattaataattaattaattaacatcaaacacggcttctcatgctatttctacctcactttggttttggggtgttcctgataattgtgcacacctgagttcacagcttcaccacttgtccattgcgttattttctttttcctttataattctttctttttccttcataattttcaaaagaaaacccaaagctctaaggtaacaaattaccaaattacatgaagatttggtttttgtcttgcatttttttcctttatgtgacgctggaccttttctttacccaaggatttttaaaactcagatttaaaacaaggggttactttacatcctactaagaagtttaagtaagtaagtttcattctaaaatcagaggtaaatagagtgcataaataattttgttttaatctttttgtttttcttttagacacattagctctggagtgagtctgtcataatatttgaacaaaaattgagagctttattgctgcattttaagcataattaatttggacattatttcgtgttgtgttctttataaccaccgagtattaaactgtaaatcataatgtaactgaagcataaacatcacatggcatgttttgtcattgttttcaggtactgagttcttacttgagtatcataatatattgtgttttaacaccaacactgtaacatttacgaattatttttttaaacttcagttttactgcattttcacaacatatcagacttcaccaaatatatgccttactattgtattatagtactgctttactgtgtatctcaataaagcacgcagttatgttac

SEQ ID NO: 2065 - protein, 3562 aa, Homo sapiens
MKNIMAGLQQTNSEKILLSWVRQSTRNYPQVNVINFTTSWSDGLALNALIHSHRPDLFDWNSVVCQQSATQRLEHAFNIARYQLGIEKLLDPEDVDTTYPDKKSILMYITSLFQVLPQQVSIEAIQEVEMLPRPPKVTKEEHFQLHHQMHYSQQITVSLAQGYERTSSPKPRFKSYAYTQAAYVTTSDPTRSPFPSQHLEAPEDKSFGSSLMESEVNLDRYQTALEEVLSWLLSAEDTLQAQGEISNDVEVVKDQFHTHEGYMMDLTAHQGRVGNILQLGSKLIGTGKLSEDEETEVQEQMNLLNSRWECLRVASMEKQSNLHRVLMDLQNQKLKELNDWLTKTEERTRKMEEEPLGPDLEDLKRQVQQHKVLQEDLEQEQVRVNSLTHMVVVVDESSGDHATAALEEQLKVLGDRWANICRWTEDRWVLLQDILLKWQRLTEEQCLFSAWLSEKEDAVNKIHTTGFKDQNEMLSSLQKLAVLKADLEKKKQSMGKLYSLKQDLLSTLKNKSVTQKTEAWLDNFARCWDNLVQKLEKSTAQISQAVTTTQPSLTQTTVMETVTTVTTREQILVKHAQEELPPPPPQKKRQITVDSEIRKRLDVDITELHSWITRSEAVLQSPEFAIFRKEGNFSDLKEKVNAIEREKAEKFRKLQDASRSAQALVEQMVNEGVNADSIKQASEQLNSRWIEFCQLLSERLNWLEYQNNIIAFYNQLQQLEQMTTTAENWLKIQPTTPSEPTAIKSQLKICKDEVNRLSGLQPQIERLKIQSIALKEKGQGPMFLDADFVAFTNHFKQVFSDVQAREKELQTIFDTLPPMRYQETMSAIRTWVQQSETKLSIPQLSVTDYEIMEQRLGELQALQSSLQEQQSGLYYLSTTVKEMSKKAPSEISRKYQSEFEEIEGRWKKLSSQLVEHCQKLEEQMNKLRKIQNHIQTLKKWMAEVDVFLKEEWPALGDSEILKKQLKQCRLLVSDIQTIQPSLNSVNEGGQKIKNEAEPEFASRLETELKELNTQWDHMCQQVYARKEALKGGLEKTVSLQKDLSEMHEWMTQAEEEYLERDFEYKTPDELQKAVEEMKRAKEEAQQKEAKVKLLTESVNSVIAQAPPVAQEALKKELETLTTNYQWLCTRLNGKCKTLEEVWACWHELLSYLEKANKWLNEVEFKLKTTENIPGGAEEISEVLDSLENLMRHSEDNPNQIRILAQTLTDGGVMDELINEELETFNSRWRELHEEAVRRQKLLEQSIQSAQETEKSLHLIQESLTFIDKQLAAYIADKVDAAQMPQEAQKIQSDLTSHEISLEEMKKHNQGKEAAQRVLSQIDVAQKKLQDVSMKFRLFQKPANFEQRLQESKMILDEVKMHLPALETKSVEQEVVQSQLNHCVNLYKSLSEVKSEVEMVIKTGRQIVQKKQTENPKELDERVTALKLHYNELGAKVTERKQQLEKCLKLSRKMRKEMNVLTEWLAATDMELTKRSAVEGMPSNLDSEVAWGKATQKEIEKQKVHLKSITEVGEALKTVLGKKETLVEDKLSLLNSNWIAVTSRAEEWLNLLLEYQKHMETFDQNVDHITKWIIQADTLLDESEKKKPQQKEDVLKRLKAELNDIRPKVDSTRDQAANLMANRGDHCRKLVEPQISELNHRFAAISHRIKTGKASIPLKELEQFNSDIQKLLEPLEAEIQQGVNLKEEDFNKDMNEDNEGTVKELLQRGDNLQQRITDERKREEIKIKQQLLQTKHNALKDLRSQRRKKALEISHQWYQYKRQADDLLKCLDDIEKKLASLPEPRDERKIKEIDRELQKKKEELNAVRRQAEGLSEDGAAMAVEPTQIQLSKRWREIESKFAQFRRLNFAQIHTVREETMMVMTEDMPLEISYVPSTYLTEITHVSQALLEVEQLLNAPDLCAKDFEDLFKQEESLKNIKDSLQQSSGRIDIIHSKKTAALQSATPVERVKLQEALSQLDFQWEKVNKMYKDRQGRFDRSVEKWRRFHYDIKIFNQWLTEAEQFLRKTQIPENWEHAKYKWYLKELQDGIGQRQTVVRTLNATGEEIIQQSSKTDASILQEKLGSLNLRWQEVCKQLSDRKKRLEEQKNILSEFQRDLNEFVLWLEEADNIASIPLEPGKEQQLKEKLEQVKLLVEELPLRQGILKQLNETGGPVLVSAPISPEEQDKLENKLKQTNLQWIKVSRALPEKQGEIEAQIKDLGQLEKKLEDLEEQLNHLLLWLSPIRNQLEIYNQPNQEGPFDVQETEIAVQAKQPDVEEILSKGQHLYKEKPATQPVKRKLEDLSSEWKAVNRLLQELRAKQPDLAPGLTTIGASPTQTVTLVTQPVVTKETAISKLEMPSSLMLEVPALADFNRAWTELTDWLSLLDQVIKSQRVMVGDLEDINEMIIKQKATMQDLEQRRPQLEELITAAQNLKNKTSNQEARTIITDRIERIQNQWDEVQEHLQNRRQQLNEMLKDSTQWLEAKEEAEQVLGQARAKLESWKEGPYTVDAIQKKITETKQLAKDLRQWQTNVDVANDLALKLLRDYSADDTRKVHMITENINASWRSIHKRVSEREAALEETHRLLQQFPLDLEKFLAWLTEAETTANVLQDATRKERLLEDSKGVKELMKQWQDLQGEIEAHTDVYHNLDENSQKILRSLEGSDDAVLLQRRLDNMNFKWSELRKKSLNIRSHLEASSDQWKRLHLSLQELLVWLQLKDDELSRQAPIGGDFPAVQKQNDVHRAFKRELKTKEPVIMSTLETVRIFLTEQPLEGLEKLYQEPRELPPEERAQNVTRLLRKQAEEVNTEWEKLNLHSADWQRKIDETLERLQELQEATDELDLKLRQAEVIKGSWQPVGDLLIDSLQDHLEKVKALRGEIAPLKENVSHVNDLARQLTTLGIQLSPYNLSTLEDLNTRWKLLQVAVEDRVRQLHEAHRDFGPASQHFLSTSVQGPWERAISPNKVPYYINHETQTTCWDHPKMTELYQSLADLNNVRFSAYRTAMKLRRLQKALCLDLLSLSAACDALDQHNLKQNDQPMDILQIINCLTTIYDRLEQEHNNLVNVPLCVDMCLNWLLNVYDTGRTGRIRVLSFKTGIISLCKAHLEDKYRYLFKQVASSTGFCDQRRLGLLLHDSIQIPRQLGEVASFGGSNIEPSVRSCFQFANNKPEIEAALFLDWMRLEPQSMVWLPVLHRVAAAETAKHQAKCNICKECPIIGFRYRSLKHFNYDICQSCFFSGRVAKGHKMHYPMVEYCTPTTSGEDVRDFAKVLKNKFRTKRYFAKHPRMGYLPVQTVLEGDNMETPVTLINFWPVDSAPASSPQLSHDDTHSRIEHYASRLAEMENSNGSYLNDSISPNESIDDEHLLIQHYCQSLNQDSPLSQPRSPAQILISLESEERGELERILADLEEENRNLQAEYDRLKQQHEHKGLSPLPSPPEMMPTSPQSPRDAELIAEAKLLRQHKGRLEARMQILEDHNKQLESQLHRLRQLLEQPQAEAKVNGTTVSSPSTSLQRSDSSQPMLLRVVGSQTSDSMGEEDLLSPPQDTSTGLEEVMEQLNNSFPSSRGRNTPGKPMREDTM

SEQ ID NO: 2066 - DNA, 14000 bp, Homo sapiens
atgctgtctgtgaagctgaatctgtgagaacacctcactattcacggcaaccggagtggaagaaacaggtgcaaaaagattgtgtgtttgtctgcttttgtgaggctggtcagagattctgtgcctgctttatctgtgcttggctatgactctacctccaggtttaccataccccatagaatgtgtaagagaaaagtaccaacagggaaatcagcaaaaagctttcctatgaaggtgtgtagccagcctccgcagaatttgaaatgtctgaggtctcatctgatgaaagagaagatgttcaaaagaaaacattcacaaaatgggtaaatgcacaattttctaagtttgggaagcagcatattgagaacctcttcagtgacctacaggatgggaggcgcctcctagacctcctcgaaggcctgacagggcaaaaactgccaaaagaaaaaggatccacaagagttcatgccctgaacaatgtcaacaaggcactgcgggttttgcagaacaataatgttgatttagtgaatattggaagtactgacatcgtagatggaaatcataaactgactcttggtttgatttggaatataatcctccactggcaggtcaaaaatgtaatgaaaaatatcatggctggattgcaacaaaccaacagtgaaaagattctcctgagctgggtccgacaatcaactcgtaattatccacaggttaatgtaatcaacttcaccaccagctggtctgatggcctggctttgaatgctctcatccatagtcataggccagacctatttgactggaatagtgtggtttgccagcagtcagccacacaacgactggaacatgcattcaacatcgccagatatcaattaggcatagagaaactactcgatcctgaagatgttgataccacctatccagataagaagtccatcttaatgtacatcacatcactcttccaagttttgcctcaacaagtgagcattgaagccatccaggaagtggaaatgttgccaaggccacctaaagtgactaaagaagaacattttcagttacatcatcaaatgcactattctcaacagatcacggtcagtctagcacagggatatgagagaacttcttcccctaagcctcgattcaagagctatgcctacacacaggctgcttatgtcaccacctctgaccctacacggagcccatttccttcacagcatttggaagctcctgaagacaagtcatttggcagttcattgatggagagtgaagtaaacctggaccgttatcaaacagctttagaagaagtattatcgtggcttctttctgctgaggacacattgcaagcacaaggagagatttctaatgatgtggaagtggtgaaagaccagtttcatactcatgaggggtacatgatggatttgacagcccatcagggccgggttggtaatattctacaattgggaagtaagctgattggaacaggaaaattatcagaagatgaagaaactgaagtacaagagcagatgaatctcctaaattcaagatgggaatgcctcagggtagctagcatggaaaaacaaagcaatttacatagagttttaatggatctccagaatcagaaactgaaagagttgaatgactggctaacaaaaacagaagaaagaacaaggaaaatggaggaagagcctcttggacctgatcttgaagacctaaaacgccaagtacaacaacataaggtgcttcaagaagatctagaacaagaacaagtcagggtcaattctctcactcacatggtggtggtagttgatgaatctagtggagatcacgcaactgctgctttggaagaacaacttaaggtattgggagatcgatgggcaaacatctgtagatggacagaagaccgctgggttcttttacaagacatccttctcaaatggcaacgtcttactgaagaacagtgcctttttagtgcatggctttcagaaaaagaagatgcagtgaacaagattcacacaactggctttaaagatcaaaatgaaatgttatcaagtcttcaaaaactggccgttttaaaagcggatctagaaaagaaaaagcaatccatgggcaaactgtattcactcaaacaagatcttctttcaacactgaagaataagtcagtgacccagaagacggaagcatggctggataactttgcccggtgttgggataatttagtccaaaaacttgaaaagagtacagcacagatttcacaggctgtcaccaccactcagccatcactaacacagacaactgtaatggaaacagtaactacggtgaccacaagggaacagatcctggtaaagcatgctcaagaggaacttccaccaccacctccccaaaagaagaggcagattactgtggattctgaaattaggaaaaggttggatgttgatataactgaacttcacagctggattactcgctcagaagctgtgttgcagagtcctgaatttgcaatctttcggaaggaaggcaacttctcagacttaaaagaaaaagtcaatgccatagagcgagaaaaagctgagaagttcagaaaactgcaagatgccagcagatcagctcaggccctggtggaacagatggtgaatgagggtgttaatgcagatagcatcaaacaagcctcagaacaactgaacagccggtggatcgaattctgccagttgctaagtgagagacttaactggctggagtatcagaacaacatcatcgctttctataatcagctacaacaattggagcagatgacaactactgctgaaaactggttgaaaatccaacccaccaccccatcagagccaacagcaattaaaagtcagttaaaaatttgtaaggatgaagtcaaccggctatcaggtcttcaacctcaaattgaacgattaaaaattcaaagcatagccctgaaagagaaaggacaaggacccatgttcctggatgcagactttgtggcctttacaaatcattttaagcaagtcttttctgatgtgcaggccagagagaaagagctacagacaatttttgacactttgccaccaatgcgctatcaggagaccatgagtgccatcaggacatgggtccagcagtcagaaaccaaactctccatacctcaacttagtgtcaccgactatgaaatcatggagcagagactcggggaattgcaggctttacaaagttctctgcaagagcaacaaagtggcctatactatctcagcaccactgtgaaagagatgtcgaagaaagcgccctctgaaattagccggaaatatcaatcagaatttgaagaaattgagggacgctggaagaagctctcctcccagctggttgagcattgtcaaaagctagaggagcaaatgaataaactccgaaaaattcagaatcacatacaaaccctgaagaaatggatggctgaagttgatgtttttctgaaggaggaatggcctgcccttggggattcagaaattctaaaaaagcagctgaaacagtgcagacttttagtcagtgatattcagacaattcagcccagtctaaacagtgtcaatgaaggtgggcagaagataaagaatgaagcagagccagagtttgcttcgagacttgagacagaactcaaagaacttaacactcagtgggatcacatgtgccaacaggtctatgccagaaaggaggccttgaagggaggtttggagaaaactgtaagcctccagaaagatctatcagagatgcacgaatggatgacacaagctgaagaagagtatcttgagagagattttgaatataaaactccagatgaattacagaaagcagttgaagagatgaagagagctaaagaagaggcccaacaaaaagaagcgaaagtgaaactccttactgagtctgtaaatagtgtcatagctcaagctccacctgtagcacaagaggccttaaaaaaggaacttgaaactctaaccaccaactaccagtggctctgcactaggctgaatgggaaatgcaagactttggaagaagtttgggcatgttggcatgagttattgtcatacttggagaaagcaaacaagtggctaaatgaagtagaatttaaacttaaaaccactgaaaacattcctggcggagctgaggaaatctctgaggtgctagattcacttgaaaatttgatgcgacattcagaggataacccaaatcagattcgcatattggcacagaccctaacagatggcggagtcatggatgagctaatcaatgaggaacttgagacatttaattctcgttggagggaactacatgaagaggctgtaaggaggcaaaagttgcttgaacagagcatccagtctgcccaggagactgaaaaatccttacacttaatccaggagtccctcacattcattgacaagcagttggcagcttatattgcagacaaggtggacgcagctcaaatgcctcaggaagcccagaaaatccaatctgatttgacaagtcatgagatcagtttagaagaaatgaagaaacataatcaggggaaggaggctgcccaaagagtcctgtctcagattgatgttgcacagaaaaaattacaagatgtctccatgaagtttcgattattccagaaaccagccaattttgagcagcgtctacaagaaagtaagatgattttagatgaagtgaagatgcacttgcctgcattggaaacaaagagtgtggaacaggaagtagtacagtcacagctaaatcattgtgtgaacttgtataaaagtctgagtgaagtgaagtctgaagtggaaatggtgataaagactggacgtcagattgtacagaaaaagcagacggaaaatcccaaagaacttgatgaaagagtaacagctttgaaattgcattataatgagctgggagcaaaggtaacagaaagaaagcaacagttggagaaatgcttgaaattgtcccgtaagatgcgaaaggaaatgaatgtcttgacagaatggctggcagctacagatatggaattgacaaagagatcagcagttgaaggaatgcctagtaatttggattctgaagttgcctggggaaaggctactcaaaaagagattgagaaacagaaggtgcacctgaagagtatcacagaggtaggagaggccttgaaaacagttttgggcaagaaggagacgttggtggaagataaactcagtcttctgaatagtaactggatagctgtcacctcccgagcagaagagtggttaaatcttttgttggaataccagaaacacatggaaacttttgaccagaatgtggaccacatcacaaagtggatcattcaggctgacacacttttggatgaatcagagaaaaagaaaccccagcaaaaagaagacgtgcttaagcgtttaaaggcagaactgaatgacatacgcccaaaggtggactctacacgtgaccaagcagcaaacttgatggcaaaccgcggtgaccactgcaggaaattagtagagccccaaatctcagagctcaaccatcgatttgcagccatttcacacagaattaagactggaaaggcctccattcctttgaaggaattggagcagtttaactcagatatacaaaaattgcttgaaccactggaggctgaaattcagcagggggtgaatctgaaagaggaagacttcaataaagatatgaatgaagacaatgagggtactgtaaaagaattgttgcaaagaggagacaacttacaacaaagaatcacagatgagagaaagcgagaggaaataaagataaaacagcagctgttacagacaaaacataatgctctcaaggatttgaggtctcaaagaagaaaaaaggctctagaaatttctcatcagtggtatcagtacaagaggcaggctgatgatctcctgaaatgcttggatgacattgaaaaaaaattagccagcctacctgagcccagagatgaaaggaaaataaaggaaattgatcgggaattgcagaagaagaaagaggagctgaatgcagtgcgtaggcaagctgagggcttgtctgaggatggggccgcaatggcagtggagccaactcagatccagctcagcaagcgctggcgggaaattgagagcaaatttgctcagtttcgaagactcaactttgcacaaattcacactgtccgtgaagaaacgatgatggtgatgactgaagacatgcctttggaaatttcttatgtgccttctacttatttgactgaaatcactcatgtctcacaagccctattagaagtggaacaacttctcaatgctcctgacctctgtgctaaggactttgaagatctctttaagcaagaggagtctctgaagaatataaaagatagtctacaacaaagctcaggtcggattgacattattcatagcaagaagacagcagcattgcaaagtgcaacgcctgtggaaagggtgaagctacaggaagctctctcccagcttgatttccaatgggaaaaagttaacaaaatgtacaaggaccgacaagggcgatttgacagatctgttgagaaatggcggcgttttcattatgatataaagatatttaatcagtggctaacagaagctgaacagtttctcagaaagacacaaattcctgagaattgggaacatgctaaatacaaatggtatcttaaggaactccaggatggcattgggcagcggcaaactgttgtcagaacattgaatgcaactggggaagaaataattcagcaatcctcaaaaacagatgccagtattctacaggaaaaattgggaagcctgaatctgcggtggcaggaggtctgcaaacagctgtcagacagaaaaaagaggctagaagaacaaaagaatatcttgtcagaatttcaaagagatttaaatgaatttgttttatggttggaggaagcagataacattgctagtatcccacttgaacctggaaaagagcagcaactaaaagaaaagcttgagcaagtcaagttactggtggaagagttgcccctgcgccagggaattctcaaacaattaaatgaaactggaggacccgtgcttgtaagtgctcccataagcccagaagagcaagataaacttgaaaataagctcaagcagacaaatctccagtggataaaggtttccagagctttacctgagaaacaaggagaaattgaagctcaaataaaagaccttgggcagcttgaaaaaaagcttgaagaccttgaagagcagttaaatcatctgctgctgtggttatctcctattaggaatcagttggaaatttataaccaaccaaaccaagaaggaccatttgacgttcaggaaactgaaatagcagttcaagctaaacaaccggatgtggaagagattttgtctaaagggcagcatttgtacaaggaaaaaccagccactcagccagtgaagaggaagttagaagatctgagctctgagtggaaggcggtaaaccgtttacttcaagagctgagggcaaagcagcctgacctagctcctggactgaccactattggagcctctcctactcagactgttactctggtgacacaacctgtggttactaaggaaactgccatctccaaactagaaatgccatcttccttgatgttggaggtacctgctctggcagatttcaaccgggcttggacagaacttaccgactggctttctctgcttgatcaagttataaaatcacagagggtgatggtgggtgaccttgaggatatcaacgagatgatcatcaagcagaaggcaacaatgcaggatttggaacagaggcgtccccagttggaagaactcattaccgctgcccaaaatttgaaaaacaagaccagcaatcaagaggctagaacaatcattacggatcgaattgaaagaattcagaatcagtgggatgaagtacaagaacaccttcagaaccggaggcaacagttgaatgaaatgttaaaggattcaacacaatggctggaagctaaggaagaagctgagcaggtcttaggacaggccagagccaagcttgagtcatggaaggagggtccctatacagtagatgcaatccaaaagaaaatcacagaaaccaagcagttggccaaagacctccgccagtggcagacaaatgtagatgtggcaaatgacttggccctgaaacttctccgggattattctgcagatgataccagaaaagtccacatgataacagagaatatcaatgcctcttggagaagcattcataaaagggtgagtgagcgagaggctgctttggaagaaactcatagattactgcaacagttccccctggacctggaaaagtttcttgcctggcttacagaagctgaaacaactgccaatgtcctacaggatgctacccgtaaggaaaggctcctagaagactccaagggagtaaaagagctgatgaaacaatggcaagacctccaaggtgaaattgaagctcacacagatgtttatcacaacctggatgaaaacagccaaaaaatcctgagatccctggaaggttccgatgatgcagtcctgttacaaagacgtttggataacatgaacttcaagtggagtgaacttcggaaaaagtctctcaacattaggtcccatttggaagccagttctgaccagtggaagcgtctgcacctttctctgcaggaacttctggtgtggctacagctgaaagatgatgaattaagccggcaggcacctattggaggcgactttccagcagttcagaagcagaacgatgtacatagggccttcaagagggaattgaaaactaaagaacctgtaatcatgagtactcttgagactgtacgaatatttctgacagagcagcctttggaaggactagagaaactctaccaggagcccagagagctgcctcctgaggagagagcccagaatgtcactcggcttctacgaaagcaggctgaggaggtcaatactgagtgggaaaaattgaacctgcactccgctgactggcagagaaaaatagatgagacccttgaaagactccaggaacttcaagaggccacggatgagctggacctcaagctgcgccaagctgaggtgatcaagggatcctggcagcccgtgggcgatctcctcattgactctctccaagatcacctcgagaaagtcaaggcacttcgaggagaaattgcgcctctgaaagagaacgtgagccacgtcaatgaccttgctcgccagcttaccactttgggcattcagctctcaccgtataacctcagcactctggaagacctgaacaccagatggaagcttctgcaggtggccgtcgaggaccgagtcaggcagctgcatgaagcccacagggactttggtccagcatctcagcactttctttccacgtctgtccagggtccctgggagagagccatctcgccaaacaaagtgccctactatatcaaccacgagactcaaacaacttgctgggaccatcccaaaatgacagagctctaccagtctttagctgacctgaataatgtcagattctcagcttataggactgccatgaaactccgaagactgcagaaggccctttgcttggatctcttgagcctgtcagctgcatgtgatgccttggaccagcacaacctcaagcaaaatgaccagcccatggatatcctgcagattattaattgtttgaccactatttatgaccgcctggagcaagagcacaacaatttggtcaacgtccctctctgcgtggatatgtgtctgaactggctgctgaatgtttatgatacgggacgaacagggaggatccgtgtcctgtcttttaaaactggcatcatttccctgtgtaaagcacatttggaagacaagtacagataccttttcaagcaagtggcaagttcaacaggattttgtgaccagcgcaggctgggcctccttctgcatgattctatccaaattccaagacagttgggtgaagttgcatcctttgggggcagtaacattgagccaagtgtccggagctgcttccaatttgctaataataagccagagatcgaagcggccctcttcctagactggatgagactggaaccccagtccatggtgtggctgcccgtcctgcacagagtggctgctgcagaaactgccaagcatcaggccaaatgtaacatctgcaaagagtgtccaatcattggattcaggtacaggagtctaaagcactttaattatgacatctgccaaagctgctttttttctggtcgagttgcaaaaggccataaaatgcactatcccatggtggaatattgcactccgactacatcaggagaagatgttcgagactttgccaaggtactaaaaaacaaatttcgaaccaaaaggtattttgcgaagcatccccgaatgggctacctgccagtgcagactgtcttagagggggacaacatggaaactcccgttactctgatcaacttctggccagtagattctgcgcctgcctcgtcccctcagctttcacacgatgatactcattcacgcattgaacattatgctagcaggctagcagaaatggaaaacagcaatggatcttatctaaatgatagcatctctcctaatgagagcatagatgatgaacatttgttaatccagcattactgccaaagtttgaaccaggactcccccctgagccagcctcgtagtcctgcccagatcttgatttccttagagagtgaggaaagaggggagctagagagaatcctagcagatcttgaggaagaaaacaggaatctgcaagcagaatatgaccgtctaaagcagcagcacgaacataaaggcctgtccccactgccgtcccctcctgaaatgatgcccacctctccccagagtccccgggatgctgagctcattgctgaggccaagctactgcgtcaacacaaaggccgcctggaagccaggatgcaaatcctggaagaccacaataaacagctggagtcacagttacacaggctaaggcagctgctggagcaaccccaggcagaggccaaagtgaatggcacaacggtgtcctctccttctacctctctacagaggtccgacagcagtcagcctatgctgctccgagtggttggcagtcaaacttcggactccatgggtgaggaagatcttctcagtcctccccaggacacaagcacagggttagaggaggtgatggagcaactcaacaactccttccctagttcaagaggaagaaatacccctggaaagccaatgagagaggacacaatgtaggaagtcttttccacatggcagatgatttgggcagagcgatggagtccttagtatcagtcatgacagatgaagaaggagcagaataaatgttttacaactcctgattcccgcatggtttttataatattcatacaacaaagaggattagacagtaagagtttacaagaaataaatctatatttttgtgaagggtagtggtattatactgtagatttcagtagtttctaagtctgttattgttttgttaacaatggcaggttttacacgtctatgcaattgtacaaaaaagttataagaaaactacatgtaaaatcttgatagctaaataacttgccatttctttatatggaacgcattttgggttgtttaaaaatttataacagttataaagaaagattgtaaactaaagtgtgctttataaaaaaaagttgtttataaaaacccctaaaaacaaaacaaacacacacacacacacatacacacacacacacaaaactttgaggcagcgcattgttttgcatccttttggcgtgatatccatatgaaattcatggctttttctttttttgcatattaaagataagacttcctctaccaccacaccaaatgactactacacactgctcatttgagaactgtcagctgagtggggcaggcttgagttttcatttcatatatctatatgtctataagtatataaatactatagttatatagataaagagatacgaatttctatagactgactttttccattttttaaatgttcatgtcacatcctaatagaaagaaattacttctagtcagtcatccaggcttacctgcttggtctagaatggatttttcccggagccggaagccaggaggaaactacaccacactaaaacattgtctacagctccagatgtttctcattttaaacaactttccactgacaacgaaagtaaagtaaagtattggatttttttaaagggaacatgtgaatgaatacacaggacttattatatcagagtgagtaatcggttggttggttgattgattgattgattgatacattcagcttcctgctgctagcaatgccacgatttagatttaatgatgcttcagtggaaatcaatcagaaggtattctgaccttgtgaacatcagaaggtattttttaactcccaagcagtagcaggacgatgatagggctggagggctatggattcccagcccatccctgtgaaggagtaggccactctttaagtgaaggattggatgattgttcataatacataaagttctctgtaattacaactaaattattatgccctcttctcacagtcaaaaggaactgggtggtttggtttttgttgcttttttagatttattgtcccatgtgggatgagtttttaaatgccacaagacataatttaaaataaataaactttgggaaaaggtgtaagacagtagccccatcacatttgtgatactgacaggtatcaacccagaagcccatgaactgtgtttccatcctttgcatttctctgcgagtagttccacacaggtttgtaagtaagtaagaaagaaggcaaattgattcaaatgttacaaaaaaacccttcttggtggattagacaggttaaatatataaacaaacaaacaaaaattgctcaaaaaagaggagaaaagctcaagaggaaaagctaaggactggtaggaaaaagctttactctttcatgccattttatttctttttgatttttaaatcattcattcaatagataccaccgtgtgacctataattttgcaaatctgttacctctgacatcaagtgtaattagcttttggagagtgggctgacatcaagtgtaattagcttttggagagtgggttttgtccattattaataattaattaattaacatcaaacacggcttctcatgctatttctacctcactttggttttggggtgttcctgataattgtgcacacctgagttcacagcttcaccacttgtccattgcgttattttctttttcctttataattctttctttttccttcataattttcaaaagaaaacccaaagctctaaggtaacaaattaccaaattacatgaagatttggtttttgtcttgcatttttttcctttatgtgacgctggaccttttctttacccaaggatttttaaaactcagatttaaaacaaggggttactttacatcctactaagaagtttaagtaagtaagtttcattctaaaatcagaggtaaatagagtgcataaataattttgttttaatctttttgtttttcttttagacacattagctctggagtgagtctgtcataatatttgaacaaaaattgagagctttattgctgcattttaagcataattaatttggacattatttcgtgttgtgttctttataaccaccgagtattaaactgtaaatcataatgtaactgaagcataaacatcacatggcatgttttgtcattgttttcaggtactgagttcttacttgagtatcataatatattgtgttttaacaccaacactgtaacatttacgaattatttttttaaacttcagttttactgcattttcacaacatatcagacttcaccaaatatatgccttactattgtattatagtactgctttactgtgtatctcaataaagcacgcagttatgttac

SEQ ID NO: 2067 - protein, 3681 aa, Homo sapiens
MSEVSSDEREDVQKKTFTKWVNAQFSKFGKQHIENLFSDLQDGRRLLDLLEGLTGQKLPKEKGSTRVHALNNVNKALRVLQNNNVDLVNIGSTDIVDGNHKLTLGLIWNIILHWQVKNVMKNIMAGLQQTNSEKILLSWVRQSTRNYPQVNVINFTTSWSDGLALNALIHSHRPDLFDWNSVVCQQSATQRLEHAFNIARYQLGIEKLLDPEDVDTTYPDKKSILMYITSLFQVLPQQVSIEAIQEVEMLPRPPKVTKEEHFQLHHQMHYSQQITVSLAQGYERTSSPKPRFKSYAYTQAAYVTTSDPTRSPFPSQHLEAPEDKSFGSSLMESEVNLDRYQTALEEVLSWLLSAEDTLQAQGEISNDVEVVKDQFHTHEGYMMDLTAHQGRVGNILQLGSKLIGTGKLSEDEETEVQEQMNLLNSRWECLRVASMEKQSNLHRVLMDLQNQKLKELNDWLTKTEERTRKMEEEPLGPDLEDLKRQVQQHKVLQEDLEQEQVRVNSLTHMVVVVDESSGDHATAALEEQLKVLGDRWANICRWTEDRWVLLQDILLKWQRLTEEQCLFSAWLSEKEDAVNKIHTTGFKDQNEMLSSLQKLAVLKADLEKKKQSMGKLYSLKQDLLSTLKNKSVTQKTEAWLDNFARCWDNLVQKLEKSTAQISQAVTTTQPSLTQTTVMETVTTVTTREQILVKHAQEELPPPPPQKKRQITVDSEIRKRLDVDITELHSWITRSEAVLQSPEFAIFRKEGNFSDLKEKVNAIEREKAEKFRKLQDASRSAQALVEQMVNEGVNADSIKQASEQLNSRWIEFCQLLSERLNWLEYQNNIIAFYNQLQQLEQMTTTAENWLKIQPTTPSEPTAIKSQLKICKDEVNRLSGLQPQIERLKIQSIALKEKGQGPMFLDADFVAFTNHFKQVFSDVQAREKELQTIFDTLPPMRYQETMSAIRTWVQQSETKLSIPQLSVTDYEIMEQRLGELQALQSSLQEQQSGLYYLSTTVKEMSKKAPSEISRKYQSEFEEIEGRWKKLSSQLVEHCQKLEEQMNKLRKIQNHIQTLKKWMAEVDVFLKEEWPALGDSEILKKQLKQCRLLVSDIQTIQPSLNSVNEGGQKIKNEAEPEFASRLETELKELNTQWDHMCQQVYARKEALKGGLEKTVSLQKDLSEMHEWMTQAEEEYLERDFEYKTPDELQKAVEEMKRAKEEAQQKEAKVKLLTESVNSVIAQAPPVAQEALKKELETLTTNYQWLCTRLNGKCKTLEEVWACWHELLSYLEKANKWLNEVEFKLKTTENIPGGAEEISEVLDSLENLMRHSEDNPNQIRILAQTLTDGGVMDELINEELETFNSRWRELHEEAVRRQKLLEQSIQSAQETEKSLHLIQESLTFIDKQLAAYIADKVDAAQMPQEAQKIQSDLTSHEISLEEMKKHNQGKEAAQRVLSQIDVAQKKLQDVSMKFRLFQKPANFEQRLQESKMILDEVKMHLPALETKSVEQEVVQSQLNHCVNLYKSLSEVKSEVEMVIKTGRQIVQKKQTENPKELDERVTALKLHYNELGAKVTERKQQLEKCLKLSRKMRKEMNVLTEWLAATDMELTKRSAVEGMPSNLDSEVAWGKATQKEIEKQKVHLKSITEVGEALKTVLGKKETLVEDKLSLLNSNWIAVTSRAEEWLNLLLEYQKHMETFDQNVDHITKWIIQADTLLDESEKKKPQQKEDVLKRLKAELNDIRPKVDSTRDQAANLMANRGDHCRKLVEPQISELNHRFAAISHRIKTGKASIPLKELEQFNSDIQKLLEPLEAEIQQGVNLKEEDFNKDMNEDNEGTVKELLQRGDNLQQRITDERKREEIKIKQQLLQTKHNALKDLRSQRRKKALEISHQWYQYKRQADDLLKCLDDIEKKLASLPEPRDERKIKEIDRELQKKKEELNAVRRQAEGLSEDGAAMAVEPTQIQLSKRWREIESKFAQFRRLNFAQIHTVREETMMVMTEDMPLEISYVPSTYLTEITHVSQALLEVEQLLNAPDLCAKDFEDLFKQEESLKNIKDSLQQSSGRIDIIHSKKTAALQSATPVERVKLQEALSQLDFQWEKVNKMYKDRQGRFDRSVEKWRRFHYDIKIFNQWLTEAEQFLRKTQIPENWEHAKYKWYLKELQDGIGQRQTVVRTLNATGEEIIQQSSKTDASILQEKLGSLNLRWQEVCKQLSDRKKRLEEQKNILSEFQRDLNEFVLWLEEADNIASIPLEPGKEQQLKEKLEQVKLLVEELPLRQGILKQLNETGGPVLVSAPISPEEQDKLENKLKQTNLQWIKVSRALPEKQGEIEAQIKDLGQLEKKLEDLEEQLNHLLLWLSPIRNQLEIYNQPNQEGPFDVQETEIAVQAKQPDVEEILSKGQHLYKEKPATQPVKRKLEDLSSEWKAVNRLLQELRAKQPDLAPGLTTIGASPTQTVTLVTQPVVTKETAISKLEMPSSLMLEVPALADFNRAWTELTDWLSLLDQVIKSQRVMVGDLEDINEMIIKQKATMQDLEQRRPQLEELITAAQNLKNKTSNQEARTIITDRIERIQNQWDEVQEHLQNRRQQLNEMLKDSTQWLEAKEEAEQVLGQARAKLESWKEGPYTVDAIQKKITETKQLAKDLRQWQTNVDVANDLALKLLRDYSADDTRKVHMITENINASWRSIHKRVSEREAALEETHRLLQQFPLDLEKFLAWLTEAETTANVLQDATRKERLLEDSKGVKELMKQWQDLQGEIEAHTDVYHNLDENSQKILRSLEGSDDAVLLQRRLDNMNFKWSELRKKSLNIRSHLEASSDQWKRLHLSLQELLVWLQLKDDELSRQAPIGGDFPAVQKQNDVHRAFKRELKTKEPVIMSTLETVRIFLTEQPLEGLEKLYQEPRELPPEERAQNVTRLLRKQAEEVNTEWEKLNLHSADWQRKIDETLERLQELQEATDELDLKLRQAEVIKGSWQPVGDLLIDSLQDHLEKVKALRGEIAPLKENVSHVNDLARQLTTLGIQLSPYNLSTLEDLNTRWKLLQVAVEDRVRQLHEAHRDFGPASQHFLSTSVQGPWERAISPNKVPYYINHETQTTCWDHPKMTELYQSLADLNNVRFSAYRTAMKLRRLQKALCLDLLSLSAACDALDQHNLKQNDQPMDILQIINCLTTIYDRLEQEHNNLVNVPLCVDMCLNWLLNVYDTGRTGRIRVLSFKTGIISLCKAHLEDKYRYLFKQVASSTGFCDQRRLGLLLHDSIQIPRQLGEVASFGGSNIEPSVRSCFQFANNKPEIEAALFLDWMRLEPQSMVWLPVLHRVAAAETAKHQAKCNICKECPIIGFRYRSLKHFNYDICQSCFFSGRVAKGHKMHYPMVEYCTPTTSGEDVRDFAKVLKNKFRTKRYFAKHPRMGYLPVQTVLEGDNMETPVTLINFWPVDSAPASSPQLSHDDTHSRIEHYASRLAEMENSNGSYLNDSISPNESIDDEHLLIQHYCQSLNQDSPLSQPRSPAQILISLESEERGELERILADLEEENRNLQAEYDRLKQQHEHKGLSPLPSPPEMMPTSPQSPRDAELIAEAKLLRQHKGRLEARMQILEDHNKQLESQLHRLRQLLEQPQAEAKVNGTTVSSPSTSLQRSDSSQPMLLRVVGSQTSDSMGEEDLLSPPQDTSTGLEEVMEQLNNSFPSSRGRNTPGKPMREDTM

SEQ ID NO: 2068 - DNA, 14083 bp, Homo sapiens
tgctgtctgtgaagctgaatctgtgagaacacctcactattcacggcaaccggagtggaagaaacaggtgcaaaaagattgtgtgtttgtctgcttttgtgaggctggtcagagattctgtgcctgctttatctgtgcttggctatgactctacctccaggtttaccataccccatagaatgtgtaagagaaaagtaccaacagggaaatcagcaaaaagctttcctatgaaggtgtgtagccagcctccgcagaatttgaaatgtctgaggtctcatctggtgagtaaaagctgcagataaatgcaacagccattcagaagaatgataaattccacaagcattcagaagcaggcttccctaaagatgaaagagaagatgttcaaaagaaaacattcacaaaatgggtaaatgcacaattttctaagtttgggaagcagcatattgagaacctcttcagtgacctacaggatgggaggcgcctcctagacctcctcgaaggcctgacagggcaaaaactgccaaaagaaaaaggatccacaagagttcatgccctgaacaatgtcaacaaggcactgcgggttttgcagaacaataatgttgatttagtgaatattggaagtactgacatcgtagatggaaatcataaactgactcttggtttgatttggaatataatcctccactggcaggtcaaaaatgtaatgaaaaatatcatggctggattgcaacaaaccaacagtgaaaagattctcctgagctgggtccgacaatcaactcgtaattatccacaggttaatgtaatcaacttcaccaccagctggtctgatggcctggctttgaatgctctcatccatagtcataggccagacctatttgactggaatagtgtggtttgccagcagtcagccacacaacgactggaacatgcattcaacatcgccagatatcaattaggcatagagaaactactcgatcctgaagatgttgataccacctatccagataagaagtccatcttaatgtacatcacatcactcttccaagttttgcctcaacaagtgagcattgaagccatccaggaagtggaaatgttgccaaggccacctaaagtgactaaagaagaacattttcagttacatcatcaaatgcactattctcaacagatcacggtcagtctagcacagggatatgagagaacttcttcccctaagcctcgattcaagagctatgcctacacacaggctgcttatgtcaccacctctgaccctacacggagcccatttccttcacagcatttggaagctcctgaagacaagtcatttggcagttcattgatggagagtgaagtaaacctggaccgttatcaaacagctttagaagaagtattatcgtggcttctttctgctgaggacacattgcaagcacaaggagagatttctaatgatgtggaagtggtgaaagaccagtttcatactcatgaggggtacatgatggatttgacagcccatcagggccgggttggtaatattctacaattgggaagtaagctgattggaacaggaaaattatcagaagatgaagaaactgaagtacaagagcagatgaatctcctaaattcaagatgggaatgcctcagggtagctagcatggaaaaacaaagcaatttacatagagttttaatggatctccagaatcagaaactgaaagagttgaatgactggctaacaaaaacagaagaaagaacaaggaaaatggaggaagagcctcttggacctgatcttgaagacctaaaacgccaagtacaacaacataaggtgcttcaagaagatctagaacaagaacaagtcagggtcaattctctcactcacatggtggtggtagttgatgaatctagtggagatcacgcaactgctgctttggaagaacaacttaaggtattgggagatcgatgggcaaacatctgtagatggacagaagaccgctgggttcttttacaagacatccttctcaaatggcaacgtcttactgaagaacagtgcctttttagtgcatggctttcagaaaaagaagatgcagtgaacaagattcacacaactggctttaaagatcaaaatgaaatgttatcaagtcttcaaaaactggccgttttaaaagcggatctagaaaagaaaaagcaatccatgggcaaactgtattcactcaaacaagatcttctttcaacactgaagaataagtcagtgacccagaagacggaagcatggctggataactttgcccggtgttgggataatttagtccaaaaacttgaaaagagtacagcacagatttcacaggctgtcaccaccactcagccatcactaacacagacaactgtaatggaaacagtaactacggtgaccacaagggaacagatcctggtaaagcatgctcaagaggaacttccaccaccacctccccaaaagaagaggcagattactgtggattctgaaattaggaaaaggttggatgttgatataactgaacttcacagctggattactcgctcagaagctgtgttgcagagtcctgaatttgcaatctttcggaaggaaggcaacttctcagacttaaaagaaaaagtcaatgccatagagcgagaaaaagctgagaagttcagaaaactgcaagatgccagcagatcagctcaggccctggtggaacagatggtgaatgagggtgttaatgcagatagcatcaaacaagcctcagaacaactgaacagccggtggatcgaattctgccagttgctaagtgagagacttaactggctggagtatcagaacaacatcatcgctttctataatcagctacaacaattggagcagatgacaactactgctgaaaactggttgaaaatccaacccaccaccccatcagagccaacagcaattaaaagtcagttaaaaatttgtaaggatgaagtcaaccggctatcaggtcttcaacctcaaattgaacgattaaaaattcaaagcatagccctgaaagagaaaggacaaggacccatgttcctggatgcagactttgtggcctttacaaatcattttaagcaagtcttttctgatgtgcaggccagagagaaagagctacagacaatttttgacactttgccaccaatgcgctatcaggagaccatgagtgccatcaggacatgggtccagcagtcagaaaccaaactctccatacctcaacttagtgtcaccgactatgaaatcatggagcagagactcggggaattgcaggctttacaaagttctctgcaagagcaacaaagtggcctatactatctcagcaccactgtgaaagagatgtcgaagaaagcgccctctgaaattagccggaaatatcaatcagaatttgaagaaattgagggacgctggaagaagctctcctcccagctggttgagcattgtcaaaagctagaggagcaaatgaataaactccgaaaaattcagaatcacatacaaaccctgaagaaatggatggctgaagttgatgtttttctgaaggaggaatggcctgcccttggggattcagaaattctaaaaaagcagctgaaacagtgcagacttttagtcagtgatattcagacaattcagcccagtctaaacagtgtcaatgaaggtgggcagaagataaagaatgaagcagagccagagtttgcttcgagacttgagacagaactcaaagaacttaacactcagtgggatcacatgtgccaacaggtctatgccagaaaggaggccttgaagggaggtttggagaaaactgtaagcctccagaaagatctatcagagatgcacgaatggatgacacaagctgaagaagagtatcttgagagagattttgaatataaaactccagatgaattacagaaagcagttgaagagatgaagagagctaaagaagaggcccaacaaaaagaagcgaaagtgaaactccttactgagtctgtaaatagtgtcatagctcaagctccacctgtagcacaagaggccttaaaaaaggaacttgaaactctaaccaccaactaccagtggctctgcactaggctgaatgggaaatgcaagactttggaagaagtttgggcatgttggcatgagttattgtcatacttggagaaagcaaacaagtggctaaatgaagtagaatttaaacttaaaaccactgaaaacattcctggcggagctgaggaaatctctgaggtgctagattcacttgaaaatttgatgcgacattcagaggataacccaaatcagattcgcatattggcacagaccctaacagatggcggagtcatggatgagctaatcaatgaggaacttgagacatttaattctcgttggagggaactacatgaagaggctgtaaggaggcaaaagttgcttgaacagagcatccagtctgcccaggagactgaaaaatccttacacttaatccaggagtccctcacattcattgacaagcagttggcagcttatattgcagacaaggtggacgcagctcaaatgcctcaggaagcccagaaaatccaatctgatttgacaagtcatgagatcagtttagaagaaatgaagaaacataatcaggggaaggaggctgcccaaagagtcctgtctcagattgatgttgcacagaaaaaattacaagatgtctccatgaagtttcgattattccagaaaccagccaattttgagcagcgtctacaagaaagtaagatgattttagatgaagtgaagatgcacttgcctgcattggaaacaaagagtgtggaacaggaagtagtacagtcacagctaaatcattgtgtgaacttgtataaaagtctgagtgaagtgaagtctgaagtggaaatggtgataaagactggacgtcagattgtacagaaaaagcagacggaaaatcccaaagaacttgatgaaagagtaacagctttgaaattgcattataatgagctgggagcaaaggtaacagaaagaaagcaacagttggagaaatgcttgaaattgtcccgtaagatgcgaaaggaaatgaatgtcttgacagaatggctggcagctacagatatggaattgacaaagagatcagcagttgaaggaatgcctagtaatttggattctgaagttgcctggggaaaggctactcaaaaagagattgagaaacagaaggtgcacctgaagagtatcacagaggtaggagaggccttgaaaacagttttgggcaagaaggagacgttggtggaagataaactcagtcttctgaatagtaactggatagctgtcacctcccgagcagaagagtggttaaatcttttgttggaataccagaaacacatggaaacttttgaccagaatgtggaccacatcacaaagtggatcattcaggctgacacacttttggatgaatcagagaaaaagaaaccccagcaaaaagaagacgtgcttaagcgtttaaaggcagaactgaatgacatacgcccaaaggtggactctacacgtgaccaagcagcaaacttgatggcaaaccgcggtgaccactgcaggaaattagtagagccccaaatctcagagctcaaccatcgatttgcagccatttcacacagaattaagactggaaaggcctccattcctttgaaggaattggagcagtttaactcagatatacaaaaattgcttgaaccactggaggctgaaattcagcagggggtgaatctgaaagaggaagacttcaataaagatatgaatgaagacaatgagggtactgtaaaagaattgttgcaaagaggagacaacttacaacaaagaatcacagatgagagaaagcgagaggaaataaagataaaacagcagctgttacagacaaaacataatgctctcaaggatttgaggtctcaaagaagaaaaaaggctctagaaatttctcatcagtggtatcagtacaagaggcaggctgatgatctcctgaaatgcttggatgacattgaaaaaaaattagccagcctacctgagcccagagatgaaaggaaaataaaggaaattgatcgggaattgcagaagaagaaagaggagctgaatgcagtgcgtaggcaagctgagggcttgtctgaggatggggccgcaatggcagtggagccaactcagatccagctcagcaagcgctggcgggaaattgagagcaaatttgctcagtttcgaagactcaactttgcacaaattcacactgtccgtgaagaaacgatgatggtgatgactgaagacatgcctttggaaatttcttatgtgccttctacttatttgactgaaatcactcatgtctcacaagccctattagaagtggaacaacttctcaatgctcctgacctctgtgctaaggactttgaagatctctttaagcaagaggagtctctgaagaatataaaagatagtctacaacaaagctcaggtcggattgacattattcatagcaagaagacagcagcattgcaaagtgcaacgcctgtggaaagggtgaagctacaggaagctctctcccagcttgatttccaatgggaaaaagttaacaaaatgtacaaggaccgacaagggcgatttgacagatctgttgagaaatggcggcgttttcattatgatataaagatatttaatcagtggctaacagaagctgaacagtttctcagaaagacacaaattcctgagaattgggaacatgctaaatacaaatggtatcttaaggaactccaggatggcattgggcagcggcaaactgttgtcagaacattgaatgcaactggggaagaaataattcagcaatcctcaaaaacagatgccagtattctacaggaaaaattgggaagcctgaatctgcggtggcaggaggtctgcaaacagctgtcagacagaaaaaagaggctagaagaacaaaagaatatcttgtcagaatttcaaagagatttaaatgaatttgttttatggttggaggaagcagataacattgctagtatcccacttgaacctggaaaagagcagcaactaaaagaaaagcttgagcaagtcaagttactggtggaagagttgcccctgcgccagggaattctcaaacaattaaatgaaactggaggacccgtgcttgtaagtgctcccataagcccagaagagcaagataaacttgaaaataagctcaagcagacaaatctccagtggataaaggtttccagagctttacctgagaaacaaggagaaattgaagctcaaataaaagaccttgggcagcttgaaaaaaagcttgaagaccttgaagagcagttaaatcatctgctgctgtggttatctcctattaggaatcagttggaaatttataaccaaccaaaccaagaaggaccatttgacgttcaggaaactgaaatagcagttcaagctaaacaaccggatgtggaagagattttgtctaaagggcagcatttgtacaaggaaaaaccagccactcagccagtgaagaggaagttagaagatctgagctctgagtggaaggcggtaaaccgtttacttcaagagctgagggcaaagcagcctgacctagctcctggactgaccactattggagcctctcctactcagactgttactctggtgacacaacctgtggttactaaggaaactgccatctccaaactagaaatgccatcttccttgatgttggaggtacctgctctggcagatttcaaccgggcttggacagaacttaccgactggctttctctgcttgatcaagttataaaatcacagagggtgatggtgggtgaccttgaggatatcaacgagatgatcatcaagcagaaggcaacaatgcaggatttggaacagaggcgtccccagttggaagaactcattaccgctgcccaaaatttgaaaaacaagaccagcaatcaagaggctagaacaatcattacggatcgaattgaaagaattcagaatcagtgggatgaagtacaagaacaccttcagaaccggaggcaacagttgaatgaaatgttaaaggattcaacacaatggctggaagctaaggaagaagctgagcaggtcttaggacaggccagagccaagcttgagtcatggaaggagggtccctatacagtagatgcaatccaaaagaaaatcacagaaaccaagcagttggccaaagacctccgccagtggcagacaaatgtagatgtggcaaatgacttggccctgaaacttctccgggattattctgcagatgataccagaaaagtccacatgataacagagaatatcaatgcctcttggagaagcattcataaaagggtgagtgagcgagaggctgctttggaagaaactcatagattactgcaacagttccccctggacctggaaaagtttcttgcctggcttacagaagctgaaacaactgccaatgtcctacaggatgctacccgtaaggaaaggctcctagaagactccaagggagtaaaagagctgatgaaacaatggcaagacctccaaggtgaaattgaagctcacacagatgtttatcacaacctggatgaaaacagccaaaaaatcctgagatccctggaaggttccgatgatgcagtcctgttacaaagacgtttggataacatgaacttcaagtggagtgaacttcggaaaaagtctctcaacattaggtcccatttggaagccagttctgaccagtggaagcgtctgcacctttctctgcaggaacttctggtgtggctacagctgaaagatgatgaattaagccggcaggcacctattggaggcgactttccagcagttcagaagcagaacgatgtacatagggccttcaagagggaattgaaaactaaagaacctgtaatcatgagtactcttgagactgtacgaatatttctgacagagcagcctttggaaggactagagaaactctaccaggagcccagagagctgcctcctgaggagagagcccagaatgtcactcggcttctacgaaagcaggctgaggaggtcaatactgagtgggaaaaattgaacctgcactccgctgactggcagagaaaaatagatgagacccttgaaagactccaggaacttcaagaggccacggatgagctggacctcaagctgcgccaagctgaggtgatcaagggatcctggcagcccgtgggcgatctcctcattgactctctccaagatcacctcgagaaagtcaaggcacttcgaggagaaattgcgcctctgaaagagaacgtgagccacgtcaatgaccttgctcgccagcttaccactttgggcattcagctctcaccgtataacctcagcactctggaagacctgaacaccagatggaagcttctgcaggtggccgtcgaggaccgagtcaggcagctgcatgaagcccacagggactttggtccagcatctcagcactttctttccacgtctgtccagggtccctgggagagagccatctcgccaaacaaagtgccctactatatcaaccacgagactcaaacaacttgctgggaccatcccaaaatgacagagctctaccagtctttagctgacctgaataatgtcagattctcagcttataggactgccatgaaactccgaagactgcagaaggccctttgcttggatctcttgagcctgtcagctgcatgtgatgccttggaccagcacaacctcaagcaaaatgaccagcccatggatatcctgcagattattaattgtttgaccactatttatgaccgcctggagcaagagcacaacaatttggtcaacgtccctctctgcgtggatatgtgtctgaactggctgctgaatgtttatgatacgggacgaacagggaggatccgtgtcctgtcttttaaaactggcatcatttccctgtgtaaagcacatttggaagacaagtacagataccttttcaagcaagtggcaagttcaacaggattttgtgaccagcgcaggctgggcctccttctgcatgattctatccaaattccaagacagttgggtgaagttgcatcctttgggggcagtaacattgagccaagtgtccggagctgcttccaatttgctaataataagccagagatcgaagcggccctcttcctagactggatgagactggaaccccagtccatggtgtggctgcccgtcctgcacagagtggctgctgcagaaactgccaagcatcaggccaaatgtaacatctgcaaagagtgtccaatcattggattcaggtacaggagtctaaagcactttaattatgacatctgccaaagctgctttttttctggtcgagttgcaaaaggccataaaatgcactatcccatggtggaatattgcactccgactacatcaggagaagatgttcgagactttgccaaggtactaaaaaacaaatttcgaaccaaaaggtattttgcgaagcatccccgaatgggctacctgccagtgcagactgtcttagagggggacaacatggaaactcccgttactctgatcaacttctggccagtagattctgcgcctgcctcgtcccctcagctttcacacgatgatactcattcacgcattgaacattatgctagcaggctagcagaaatggaaaacagcaatggatcttatctaaatgatagcatctctcctaatgagagcatagatgatgaacatttgttaatccagcattactgccaaagtttgaaccaggactcccccctgagccagcctcgtagtcctgcccagatcttgatttccttagagagtgaggaaagaggggagctagagagaatcctagcagatcttgaggaagaaaacaggaatctgcaagcagaatatgaccgtctaaagcagcagcacgaacataaaggcctgtccccactgccgtcccctcctgaaatgatgcccacctctccccagagtccccgggatgctgagctcattgctgaggccaagctactgcgtcaacacaaaggccgcctggaagccaggatgcaaatcctggaagaccacaataaacagctggagtcacagttacacaggctaaggcagctgctggagcaaccccaggcagaggccaaagtgaatggcacaacggtgtcctctccttctacctctctacagaggtccgacagcagtcagcctatgctgctccgagtggttggcagtcaaacttcggactccatgggtgaggaagatcttctcagtcctccccaggacacaagcacagggttagaggaggtgatggagcaactcaacaactccttccctagttcaagaggaagaaatacccctggaaagccaatgagagaggacacaatgtaggaagtcttttccacatggcagatgatttgggcagagcgatggagtccttagtatcagtcatgacagatgaagaaggagcagaataaatgttttacaactcctgattcccgcatggtttttataatattcatacaacaaagaggattagacagtaagagtttacaagaaataaatctatatttttgtgaagggtagtggtattatactgtagatttcagtagtttctaagtctgttattgttttgttaacaatggcaggttttacacgtctatgcaattgtacaaaaaagttataagaaaactacatgtaaaatcttgatagctaaataacttgccatttctttatatggaacgcattttgggttgtttaaaaatttataacagttataaagaaagattgtaaactaaagtgtgctttataaaaaaaagttgtttataaaaacccctaaaaacaaaacaaacacacacacacacacatacacacacacacacaaaactttgaggcagcgcattgttttgcatccttttggcgtgatatccatatgaaattcatggctttttctttttttgcatattaaagataagacttcctctaccaccacaccaaatgactactacacactgctcatttgagaactgtcagctgagtggggcaggcttgagttttcatttcatatatctatatgtctataagtatataaatactatagttatatagataaagagatacgaatttctatagactgactttttccattttttaaatgttcatgtcacatcctaatagaaagaaattacttctagtcagtcatccaggcttacctgcttggtctagaatggatttttcccggagccggaagccaggaggaaactacaccacactaaaacattgtctacagctccagatgtttctcattttaaacaactttccactgacaacgaaagtaaagtaaagtattggatttttttaaagggaacatgtgaatgaatacacaggacttattatatcagagtgagtaatcggttggttggttgattgattgattgattgatacattcagcttcctgctgctagcaatgccacgatttagatttaatgatgcttcagtggaaatcaatcagaaggtattctgaccttgtgaacatcagaaggtattttttaactcccaagcagtagcaggacgatgatagggctggagggctatggattcccagcccatccctgtgaaggagtaggccactctttaagtgaaggattggatgattgttcataatacataaagttctctgtaattacaactaaattattatgccctcttctcacagtcaaaaggaactgggtggtttggtttttgttgcttttttagatttattgtcccatgtgggatgagtttttaaatgccacaagacataatttaaaataaataaactttgggaaaaggtgtaagacagtagccccatcacatttgtgatactgacaggtatcaacccagaagcccatgaactgtgtttccatcctttgcatttctctgcgagtagttccacacaggtttgtaagtaagtaagaaagaaggcaaattgattcaaatgttacaaaaaaacccttcttggtggattagacaggttaaatatataaacaaacaaacaaaaattgctcaaaaaagaggagaaaagctcaagaggaaaagctaaggactggtaggaaaaagctttactctttcatgccattttatttctttttgatttttaaatcattcattcaatagataccaccgtgtgacctataattttgcaaatctgttacctctgacatcaagtgtaattagcttttggagagtgggctgacatcaagtgtaattagcttttggagagtgggttttgtccattattaataattaattaattaacatcaaacacggcttctcatgctatttctacctcactttggttttggggtgttcctgataattgtgcacacctgagttcacagcttcaccacttgtccattgcgttattttctttttcctttataattctttctttttccttcataattttcaaaagaaaacccaaagctctaaggtaacaaattaccaaattacatgaagatttggtttttgtcttgcatttttttcctttatgtgacgctggaccttttctttacccaaggatttttaaaactcagatttaaaacaaggggttactttacatcctactaagaagtttaagtaagtaagtttcattctaaaatcagaggtaaatagagtgcataaataattttgttttaatctttttgtttttcttttagacacattagctctggagtgagtctgtcataatatttgaacaaaaattgagagctttattgctgcattttaagcataattaatttggacattatttcgtgttgtgttctttataaccaccgagtattaaactgtaaatcataatgtaactgaagcataaacatcacatggcatgttttgtcattgttttcaggtactgagttcttacttgagtatcataatatattgtgttttaacaccaacactgtaacatttacgaattatttttttaaacttcagttttactgcattttcacaacatatcagacttcaccaaatatatgccttactattgtattatagtactgctttactgtgtatctcaataaagcacgcagttatgttac

SEQ ID NO: 2069 - protein, 3562 aa, Homo sapiens; identical to SEQ ID NO: 2065

SEQ ID NO: 2070 - DNA, 9771 bp, Homo sapiens
taatgagatcaggaggaacattcgacctgagaaagacagattgcaatgactgagatgattttgctaattttttttccagcctatttccttaatgctgtaaggaggcaaaagttgcttgaacagagcatccagtctgcccaggagactgaaaaatccttacacttaatccaggagtccctcacattcattgacaagcagttggcagcttatattgcagacaaggtggacgcagctcaaatgcctcaggaagcccagaaaatccaatctgatttgacaagtcatgagatcagtttagaagaaatgaagaaacataatcaggggaaggaggctgcccaaagagtcctgtctcagattgatgttgcacagaaaaaattacaagatgtctccatgaagtttcgattattccagaaaccagccaattttgagcagcgtctacaagaaagtaagatgattttagatgaagtgaagatgcacttgcctgcattggaaacaaagagtgtggaacaggaagtagtacagtcacagctaaatcattgtgtgaacttgtataaaagtctgagtgaagtgaagtctgaagtggaaatggtgataaagactggacgtcagattgtacagaaaaagcagacggaaaatcccaaagaacttgatgaaagagtaacagctttgaaattgcattataatgagctgggagcaaaggtaacagaaagaaagcaacagttggagaaatgcttgaaattgtcccgtaagatgcgaaaggaaatgaatgtcttgacagaatggctggcagctacagatatggaattgacaaagagatcagcagttgaaggaatgcctagtaatttggattctgaagttgcctggggaaaggctactcaaaaagagattgagaaacagaaggtgcacctgaagagtatcacagaggtaggagaggccttgaaaacagttttgggcaagaaggagacgttggtggaagataaactcagtcttctgaatagtaactggatagctgtcacctcccgagcagaagagtggttaaatcttttgttggaataccagaaacacatggaaacttttgaccagaatgtggaccacatcacaaagtggatcattcaggctgacacacttttggatgaatcagagaaaaagaaaccccagcaaaaagaagacgtgcttaagcgtttaaaggcagaactgaatgacatacgcccaaaggtggactctacacgtgaccaagcagcaaacttgatggcaaaccgcggtgaccactgcaggaaattagtagagccccaaatctcagagctcaaccatcgatttgcagccatttcacacagaattaagactggaaaggcctccattcctttgaaggaattggagcagtttaactcagatatacaaaaattgcttgaaccactggaggctgaaattcagcagggggtgaatctgaaagaggaagacttcaataaagatatgaatgaagacaatgagggtactgtaaaagaattgttgcaaagaggagacaacttacaacaaagaatcacagatgagagaaagcgagaggaaataaagataaaacagcagctgttacagacaaaacataatgctctcaaggatttgaggtctcaaagaagaaaaaaggctctagaaatttctcatcagtggtatcagtacaagaggcaggctgatgatctcctgaaatgcttggatgacattgaaaaaaaattagccagcctacctgagcccagagatgaaaggaaaataaaggaaattgatcgggaattgcagaagaagaaagaggagctgaatgcagtgcgtaggcaagctgagggcttgtctgaggatggggccgcaatggcagtggagccaactcagatccagctcagcaagcgctggcgggaaattgagagcaaatttgctcagtttcgaagactcaactttgcacaaattcacactgtccgtgaagaaacgatgatggtgatgactgaagacatgcctttggaaatttcttatgtgccttctacttatttgactgaaatcactcatgtctcacaagccctattagaagtggaacaacttctcaatgctcctgacctctgtgctaaggactttgaagatctctttaagcaagaggagtctctgaagaatataaaagatagtctacaacaaagctcaggtcggattgacattattcatagcaagaagacagcagcattgcaaagtgcaacgcctgtggaaagggtgaagctacaggaagctctctcccagcttgatttccaatgggaaaaagttaacaaaatgtacaaggaccgacaagggcgatttgacagatctgttgagaaatggcggcgttttcattatgatataaagatatttaatcagtggctaacagaagctgaacagtttctcagaaagacacaaattcctgagaattgggaacatgctaaatacaaatggtatcttaaggaactccaggatggcattgggcagcggcaaactgttgtcagaacattgaatgcaactggggaagaaataattcagcaatcctcaaaaacagatgccagtattctacaggaaaaattgggaagcctgaatctgcggtggcaggaggtctgcaaacagctgtcagacagaaaaaagaggctagaagaacaaaagaatatcttgtcagaatttcaaagagatttaaatgaatttgttttatggttggaggaagcagataacattgctagtatcccacttgaacctggaaaagagcagcaactaaaagaaaagcttgagcaagtcaagttactggtggaagagttgcccctgcgccagggaattctcaaacaattaaatgaaactggaggacccgtgcttgtaagtgctcccataagcccagaagagcaagataaacttgaaaataagctcaagcagacaaatctccagtggataaaggtttccagagctttacctgagaaacaaggagaaattgaagctcaaataaaagaccttgggcagcttgaaaaaaagcttgaagaccttgaagagcagttaaatcatctgctgctgtggttatctcctattaggaatcagttggaaatttataaccaaccaaaccaagaaggaccatttgacgttcaggaaactgaaatagcagttcaagctaaacaaccggatgtggaagagattttgtctaaagggcagcatttgtacaaggaaaaaccagccactcagccagtgaagaggaagttagaagatctgagctctgagtggaaggcggtaaaccgtttacttcaagagctgagggcaaagcagcctgacctagctcctggactgaccactattggagcctctcctactcagactgttactctggtgacacaacctgtggttactaaggaaactgccatctccaaactagaaatgccatcttccttgatgttggaggtacctgctctggcagatttcaaccgggcttggacagaacttaccgactggctttctctgcttgatcaagttataaaatcacagagggtgatggtgggtgaccttgaggatatcaacgagatgatcatcaagcagaaggcaacaatgcaggatttggaacagaggcgtccccagttggaagaactcattaccgctgcccaaaatttgaaaaacaagaccagcaatcaagaggctagaacaatcattacggatcgaattgaaagaattcagaatcagtgggatgaagtacaagaacaccttcagaaccggaggcaacagttgaatgaaatgttaaaggattcaacacaatggctggaagctaaggaagaagctgagcaggtcttaggacaggccagagccaagcttgagtcatggaaggagggtccctatacagtagatgcaatccaaaagaaaatcacagaaaccaagcagttggccaaagacctccgccagtggcagacaaatgtagatgtggcaaatgacttggccctgaaacttctccgggattattctgcagatgataccagaaaagtccacatgataacagagaatatcaatgcctcttggagaagcattcataaaagggtgagtgagcgagaggctgctttggaagaaactcatagattactgcaacagttccccctggacctggaaaagtttcttgcctggcttacagaagctgaaacaactgccaatgtcctacaggatgctacccgtaaggaaaggctcctagaagactccaagggagtaaaagagctgatgaaacaatggcaagacctccaaggtgaaattgaagctcacacagatgtttatcacaacctggatgaaaacagccaaaaaatcctgagatccctggaaggttccgatgatgcagtcctgttacaaagacgtttggataacatgaacttcaagtggagtgaacttcggaaaaagtctctcaacattaggtcccatttggaagccagttctgaccagtggaagcgtctgcacctttctctgcaggaacttctggtgtggctacagctgaaagatgatgaattaagccggcaggcacctattggaggcgactttccagcagttcagaagcagaacgatgtacatagggccttcaagagggaattgaaaactaaagaacctgtaatcatgagtactcttgagactgtacgaatatttctgacagagcagcctttggaaggactagagaaactctaccaggagcccagagagctgcctcctgaggagagagcccagaatgtcactcggcttctacgaaagcaggctgaggaggtcaatactgagtgggaaaaattgaacctgcactccgctgactggcagagaaaaatagatgagacccttgaaagactccaggaacttcaagaggccacggatgagctggacctcaagctgcgccaagctgaggtgatcaagggatcctggcagcccgtgggcgatctcctcattgactctctccaagatcacctcgagaaagtcaaggcacttcgaggagaaattgcgcctctgaaagagaacgtgagccacgtcaatgaccttgctcgccagcttaccactttgggcattcagctctcaccgtataacctcagcactctggaagacctgaacaccagatggaagcttctgcaggtggccgtcgaggaccgagtcaggcagctgcatgaagcccacagggactttggtccagcatctcagcactttctttccacgtctgtccagggtccctgggagagagccatctcgccaaacaaagtgccctactatatcaaccacgagactcaaacaacttgctgggaccatcccaaaatgacagagctctaccagtctttagctgacctgaataatgtcagattctcagcttataggactgccatgaaactccgaagactgcagaaggccctttgcttggatctcttgagcctgtcagctgcatgtgatgccttggaccagcacaacctcaagcaaaatgaccagcccatggatatcctgcagattattaattgtttgaccactatttatgaccgcctggagcaagagcacaacaatttggtcaacgtccctctctgcgtggatatgtgtctgaactggctgctgaatgtttatgatacgggacgaacagggaggatccgtgtcctgtcttttaaaactggcatcatttccctgtgtaaagcacatttggaagacaagtacagataccttttcaagcaagtggcaagttcaacaggattttgtgaccagcgcaggctgggcctccttctgcatgattctatccaaattccaagacagttgggtgaagttgcatcctttgggggcagtaacattgagccaagtgtccggagctgcttccaatttgctaataataagccagagatcgaagcggccctcttcctagactggatgagactggaaccccagtccatggtgtggctgcccgtcctgcacagagtggctgctgcagaaactgccaagcatcaggccaaatgtaacatctgcaaagagtgtccaatcattggattcaggtacaggagtctaaagcactttaattatgacatctgccaaagctgctttttttctggtcgagttgcaaaaggccataaaatgcactatcccatggtggaatattgcactccgactacatcaggagaagatgttcgagactttgccaaggtactaaaaaacaaatttcgaaccaaaaggtattttgcgaagcatccccgaatgggctacctgccagtgcagactgtcttagagggggacaacatggaaactcccgttactctgatcaacttctggccagtagattctgcgcctgcctcgtcccctcagctttcacacgatgatactcattcacgcattgaacattatgctagcaggctagcagaaatggaaaacagcaatggatcttatctaaatgatagcatctctcctaatgagagcatagatgatgaacatttgttaatccagcattactgccaaagtttgaaccaggactcccccctgagccagcctcgtagtcctgcccagatcttgatttccttagagagtgaggaaagaggggagctagagagaatcctagcagatcttgaggaagaaaacaggaatctgcaagcagaatatgaccgtctaaagcagcagcacgaacataaaggcctgtccccactgccgtcccctcctgaaatgatgcccacctctccccagagtccccgggatgctgagctcattgctgaggccaagctactgcgtcaacacaaaggccgcctggaagccaggatgcaaatcctggaagaccacaataaacagctggagtcacagttacacaggctaaggcagctgctggagcaaccccaggcagaggccaaagtgaatggcacaacggtgtcctctccttctacctctctacagaggtccgacagcagtcagcctatgctgctccgagtggttggcagtcaaacttcggactccatgggtgaggaagatcttctcagtcctccccaggacacaagcacagggttagaggaggtgatggagcaactcaacaactccttccctagttcaagaggaagaaatacccctggaaagccaatgagagaggacacaatgtaggaagtcttttccacatggcagatgatttgggcagagcgatggagtccttagtatcagtcatgacagatgaagaaggagcagaataaatgttttacaactcctgattcccgcatggtttttataatattcatacaacaaagaggattagacagtaagagtttacaagaaataaatctatatttttgtgaagggtagtggtattatactgtagatttcagtagtttctaagtctgttattgttttgttaacaatggcaggttttacacgtctatgcaattgtacaaaaaagttataagaaaactacatgtaaaatcttgatagctaaataacttgccatttctttatatggaacgcattttgggttgtttaaaaatttataacagttataaagaaagattgtaaactaaagtgtgctttataaaaaaaagttgtttataaaaacccctaaaaacaaaacaaacacacacacacacacatacacacacacacacaaaactttgaggcagcgcattgttttgcatccttttggcgtgatatccatatgaaattcatggctttttctttttttgcatattaaagataagacttcctctaccaccacaccaaatgactactacacactgctcatttgagaactgtcagctgagtggggcaggcttgagttttcatttcatatatctatatgtctataagtatataaatactatagttatatagataaagagatacgaatttctatagactgactttttccattttttaaatgttcatgtcacatcctaatagaaagaaattacttctagtcagtcatccaggcttacctgcttggtctagaatggatttttcccggagccggaagccaggaggaaactacaccacactaaaacattgtctacagctccagatgtttctcattttaaacaactttccactgacaacgaaagtaaagtaaagtattggatttttttaaagggaacatgtgaatgaatacacaggacttattatatcagagtgagtaatcggttggttggttgattgattgattgattgatacattcagcttcctgctgctagcaatgccacgatttagatttaatgatgcttcagtggaaatcaatcagaaggtattctgaccttgtgaacatcagaaggtattttttaactcccaagcagtagcaggacgatgatagggctggagggctatggattcccagcccatccctgtgaaggagtaggccactctttaagtgaaggattggatgattgttcataatacataaagttctctgtaattacaactaaattattatgccctcttctcacagtcaaaaggaactgggtggtttggtttttgttgcttttttagatttattgtcccatgtgggatgagtttttaaatgccacaagacataatttaaaataaataaactttgggaaaaggtgtaagacagtagccccatcacatttgtgatactgacaggtatcaacccagaagcccatgaactgtgtttccatcctttgcatttctctgcgagtagttccacacaggtttgtaagtaagtaagaaagaaggcaaattgattcaaatgttacaaaaaaacccttcttggtggattagacaggttaaatatataaacaaacaaacaaaaattgctcaaaaaagaggagaaaagctcaagaggaaaagctaaggactggtaggaaaaagctttactctttcatgccattttatttctttttgatttttaaatcattcattcaatagataccaccgtgtgacctataattttgcaaatctgttacctctgacatcaagtgtaattagcttttggagagtgggctgacatcaagtgtaattagcttttggagagtgggttttgtccattattaataattaattaattaacatcaaacacggcttctcatgctatttctacctcactttggttttggggtgttcctgataattgtgcacacctgagttcacagcttcaccacttgtccattgcgttattttctttttcctttataattctttctttttccttcataattttcaaaagaaaacccaaagctctaaggtaacaaattaccaaattacatgaagatttggtttttgtcttgcatttttttcctttatgtgacgctggaccttttctttacccaaggatttttaaaactcagatttaaaacaaggggttactttacatcctactaagaagtttaagtaagtaagtttcattctaaaatcagaggtaaatagagtgcataaataattttgttttaatctttttgtttttcttttagacacattagctctggagtgagtctgtcataatatttgaacaaaaattgagagctttattgctgcattttaagcataattaatttggacattatttcgtgttgtgttctttataaccaccgagtattaaactgtaaatcataatgtaactgaagcataaacatcacatggcatgttttgtcattgttttcaggtactgagttcttacttgagtatcataatatattgtgttttaacaccaacactgtaacatttacgaattatttttttaaacttcagttttactgcattttcacaacatatcagacttcaccaaatatatgccttactattgtattatagtactgctttactgtgtatctcaataaagcacgcagttatgttac

SEQ ID NO: 2071 - protein, 2344 aa, Homo sapiens
MTEMILLIFFPAYFLNAVRRQKLLEQSIQSAQETEKSLHLIQESLTFIDKQLAAYIADKVDAAQMPQEAQKIQSDLTSHEISLEEMKKHNQGKEAAQRVLSQIDVAQKKLQDVSMKFRLFQKPANFEQRLQESKMILDEVKMHLPALETKSVEQEVVQSQLNHCVNLYKSLSEVKSEVEMVIKTGRQIVQKKQTENPKELDERVTALKLHYNELGAKVTERKQQLEKCLKLSRKMRKEMNVLTEWLAATDMELTKRSAVEGMPSNLDSEVAWGKATQKEIEKQKVHLKSITEVGEALKTVLGKKETLVEDKLSLLNSNWIAVTSRAEEWLNLLLEYQKHMETFDQNVDHITKWIIQADTLLDESEKKKPQQKEDVLKRLKAELNDIRPKVDSTRDQAANLMANRGDHCRKLVEPQISELNHRFAAISHRIKTGKASIPLKELEQFNSDIQKLLEPLEAEIQQGVNLKEEDFNKDMNEDNEGTVKELLQRGDNLQQRITDERKREEIKIKQQLLQTKHNALKDLRSQRRKKALEISHQWYQYKRQADDLLKCLDDIEKKLASLPEPRDERKIKEIDRELQKKKEELNAVRRQAEGLSEDGAAMAVEPTQIQLSKRWREIESKFAQFRRLNFAQIHTVREETMMVMTEDMPLEISYVPSTYLTEITHVSQALLEVEQLLNAPDLCAKDFEDLFKQEESLKNIKDSLQQSSGRIDIIHSKKTAALQSATPVERVKLQEALSQLDFQWEKVNKMYKDRQGRFDRSVEKWRRFHYDIKIFNQWLTEAEQFLRKTQIPENWEHAKYKWYLKELQDGIGQRQTVVRTLNATGEEIIQQSSKTDASILQEKLGSLNLRWQEVCKQLSDRKKRLEEQKNILSEFQRDLNEFVLWLEEADNIASIPLEPGKEQQLKEKLEQVKLLVEELPLRQGILKQLNETGGPVLVSAPISPEEQDKLENKLKQTNLQWIKVSRALPEKQGEIEAQIKDLGQLEKKLEDLEEQLNHLLLWLSPIRNQLEIYNQPNQEGPFDVQETEIAVQAKQPDVEEILSKGQHLYKEKPATQPVKRKLEDLSSEWKAVNRLLQELRAKQPDLAPGLTTIGASPTQTVTLVTQPVVTKETAISKLEMPSSLMLEVPALADFNRAWTELTDWLSLLDQVIKSQRVMVGDLEDINEMIIKQKATMQDLEQRRPQLEELITAAQNLKNKTSNQEARTIITDRIERIQNQWDEVQEHLQNRRQQLNEMLKDSTQWLEAKEEAEQVLGQARAKLESWKEGPYTVDAIQKKITETKQLAKDLRQWQTNVDVANDLALKLLRDYSADDTRKVHMITENINASWRSIHKRVSEREAALEETHRLLQQFPLDLEKFLAWLTEAETTANVLQDATRKERLLEDSKGVKELMKQWQDLQGEIEAHTDVYHNLDENSQKILRSLEGSDDAVLLQRRLDNMNFKWSELRKKSLNIRSHLEASSDQWKRLHLSLQELLVWLQLKDDELSRQAPIGGDFPAVQKQNDVHRAFKRELKTKEPVIMSTLETVRIFLTEQPLEGLEKLYQEPRELPPEERAQNVTRLLRKQAEEVNTEWEKLNLHSADWQRKIDETLERLQELQEATDELDLKLRQAEVIKGSWQPVGDLLIDSLQDHLEKVKALRGEIAPLKENVSHVNDLARQLTTLGIQLSPYNLSTLEDLNTRWKLLQVAVEDRVRQLHEAHRDFGPASQHFLSTSVQGPWERAISPNKVPYYINHETQTTCWDHPKMTELYQSLADLNNVRFSAYRTAMKLRRLQKALCLDLLSLSAACDALDQHNLKQNDQPMDILQIINCLTTIYDRLEQEHNNLVNVPLCVDMCLNWLLNVYDTGRTGRIRVLSFKTGIISLCKAHLEDKYRYLFKQVASSTGFCDQRRLGLLLHDSIQIPRQLGEVASFGGSNIEPSVRSCFQFANNKPEIEAALFLDWMRLEPQSMVWLPVLHRVAAAETAKHQAKCNICKECPIIGFRYRSLKHFNYDICQSCFFSGRVAKGHKMHYPMVEYCTPTTSGEDVRDFAKVLKNKFRTKRYFAKHPRMGYLPVQTVLEGDNMETPVTLINFWPVDSAPASSPQLSHDDTHSRIEHYASRLAEMENSNGSYLNDSISPNESIDDEHLLIQHYCQSLNQDSPLSQPRSPAQILISLESEERGELERILADLEEENRNLQAEYDRLKQQHEHKGLSPLPSPPEMMPTSPQSPRDAELIAEAKLLRQHKGRLEARMQILEDHNKQLESQLHRLRQLLEQPQAEAKVNGTTVSSPSTSLQRSDSSQPMLLRVVGSQTSDSMGEEDLLSPPQDTSTGLEEVMEQLNNSFPSSRGRNTPGKPMREDTM

SEQ ID NO: 2072 - DNA, 9914 bp, Homo sapiens
taatgagatcaggaggaacattcgacctgagaaagacagattgcaatgactgagatgattttgctaattttttttccagcctatttccttaatgtacgtgatattgtgattgattttcatgcagagatccctgatcctatagttttgtttgctatttatttttctccttcacattttttttctatcaacagagctgaatgagtgccaggaagctgcgaaatctgtcttacaaaaaggctgtaaggaggcaaaagttgcttgaacagagcatccagtctgcccaggagactgaaaaatccttacacttaatccaggagtccctcacattcattgacaagcagttggcagcttatattgcagacaaggtggacgcagctcaaatgcctcaggaagcccagaaaatccaatctgatttgacaagtcatgagatcagtttagaagaaatgaagaaacataatcaggggaaggaggctgcccaaagagtcctgtctcagattgatgttgcacagaaaaaattacaagatgtctccatgaagtttcgattattccagaaaccagccaattttgagcagcgtctacaagaaagtaagatgattttagatgaagtgaagatgcacttgcctgcattggaaacaaagagtgtggaacaggaagtagtacagtcacagctaaatcattgtgtgaacttgtataaaagtctgagtgaagtgaagtctgaagtggaaatggtgataaagactggacgtcagattgtacagaaaaagcagacggaaaatcccaaagaacttgatgaaagagtaacagctttgaaattgcattataatgagctgggagcaaaggtaacagaaagaaagcaacagttggagaaatgcttgaaattgtcccgtaagatgcgaaaggaaatgaatgtcttgacagaatggctggcagctacagatatggaattgacaaagagatcagcagttgaaggaatgcctagtaatttggattctgaagttgcctggggaaaggctactcaaaaagagattgagaaacagaaggtgcacctgaagagtatcacagaggtaggagaggccttgaaaacagttttgggcaagaaggagacgttggtggaagataaactcagtcttctgaatagtaactggatagctgtcacctcccgagcagaagagtggttaaatcttttgttggaataccagaaacacatggaaacttttgaccagaatgtggaccacatcacaaagtggatcattcaggctgacacacttttggatgaatcagagaaaaagaaaccccagcaaaaagaagacgtgcttaagcgtttaaaggcagaactgaatgacatacgcccaaaggtggactctacacgtgaccaagcagcaaacttgatggcaaaccgcggtgaccactgcaggaaattagtagagccccaaatctcagagctcaaccatcgatttgcagccatttcacacagaattaagactggaaaggcctccattcctttgaaggaattggagcagtttaactcagatatacaaaaattgcttgaaccactggaggctgaaattcagcagggggtgaatctgaaagaggaagacttcaataaagatatgaatgaagacaatgagggtactgtaaaagaattgttgcaaagaggagacaacttacaacaaagaatcacagatgagagaaagcgagaggaaataaagataaaacagcagctgttacagacaaaacataatgctctcaaggatttgaggtctcaaagaagaaaaaaggctctagaaatttctcatcagtggtatcagtacaagaggcaggctgatgatctcctgaaatgcttggatgacattgaaaaaaaattagccagcctacctgagcccagagatgaaaggaaaataaaggaaattgatcgggaattgcagaagaagaaagaggagctgaatgcagtgcgtaggcaagctgagggcttgtctgaggatggggccgcaatggcagtggagccaactcagatccagctcagcaagcgctggcgggaaattgagagcaaatttgctcagtttcgaagactcaactttgcacaaattcacactgtccgtgaagaaacgatgatggtgatgactgaagacatgcctttggaaatttcttatgtgccttctacttatttgactgaaatcactcatgtctcacaagccctattagaagtggaacaacttctcaatgctcctgacctctgtgctaaggactttgaagatctctttaagcaagaggagtctctgaagaatataaaagatagtctacaacaaagctcaggtcggattgacattattcatagcaagaagacagcagcattgcaaagtgcaacgcctgtggaaagggtgaagctacaggaagctctctcccagcttgatttccaatgggaaaaagttaacaaaatgtacaaggaccgacaagggcgatttgacagatctgttgagaaatggcggcgttttcattatgatataaagatatttaatcagtggctaacagaagctgaacagtttctcagaaagacacaaattcctgagaattgggaacatgctaaatacaaatggtatcttaaggaactccaggatggcattgggcagcggcaaactgttgtcagaacattgaatgcaactggggaagaaataattcagcaatcctcaaaaacagatgccagtattctacaggaaaaattgggaagcctgaatctgcggtggcaggaggtctgcaaacagctgtcagacagaaaaaagaggctagaagaacaaaagaatatcttgtcagaatttcaaagagatttaaatgaatttgttttatggttggaggaagcagataacattgctagtatcccacttgaacctggaaaagagcagcaactaaaagaaaagcttgagcaagtcaagttactggtggaagagttgcccctgcgccagggaattctcaaacaattaaatgaaactggaggacccgtgcttgtaagtgctcccataagcccagaagagcaagataaacttgaaaataagctcaagcagacaaatctccagtggataaaggtttccagagctttacctgagaaacaaggagaaattgaagctcaaataaaagaccttgggcagcttgaaaaaaagcttgaagaccttgaagagcagttaaatcatctgctgctgtggttatctcctattaggaatcagttggaaatttataaccaaccaaaccaagaaggaccatttgacgttcaggaaactgaaatagcagttcaagctaaacaaccggatgtggaagagattttgtctaaagggcagcatttgtacaaggaaaaaccagccactcagccagtgaagaggaagttagaagatctgagctctgagtggaaggcggtaaaccgtttacttcaagagctgagggcaaagcagcctgacctagctcctggactgaccactattggagcctctcctactcagactgttactctggtgacacaacctgtggttactaaggaaactgccatctccaaactagaaatgccatcttccttgatgttggaggtacctgctctggcagatttcaaccgggcttggacagaacttaccgactggctttctctgcttgatcaagttataaaatcacagagggtgatggtgggtgaccttgaggatatcaacgagatgatcatcaagcagaaggcaacaatgcaggatttggaacagaggcgtccccagttggaagaactcattaccgctgcccaaaatttgaaaaacaagaccagcaatcaagaggctagaacaatcattacggatcgaattgaaagaattcagaatcagtgggatgaagtacaagaacaccttcagaaccggaggcaacagttgaatgaaatgttaaaggattcaacacaatggctggaagctaaggaagaagctgagcaggtcttaggacaggccagagccaagcttgagtcatggaaggagggtccctatacagtagatgcaatccaaaagaaaatcacagaaaccaagcagttggccaaagacctccgccagtggcagacaaatgtagatgtggcaaatgacttggccctgaaacttctccgggattattctgcagatgataccagaaaagtccacatgataacagagaatatcaatgcctcttggagaagcattcataaaagggtgagtgagcgagaggctgctttggaagaaactcatagattactgcaacagttccccctggacctggaaaagtttcttgcctggcttacagaagctgaaacaactgccaatgtcctacaggatgctacccgtaaggaaaggctcctagaagactccaagggagtaaaagagctgatgaaacaatggcaagacctccaaggtgaaattgaagctcacacagatgtttatcacaacctggatgaaaacagccaaaaaatcctgagatccctggaaggttccgatgatgcagtcctgttacaaagacgtttggataacatgaacttcaagtggagtgaacttcggaaaaagtctctcaacattaggtcccatttggaagccagttctgaccagtggaagcgtctgcacctttctctgcaggaacttctggtgtggctacagctgaaagatgatgaattaagccggcaggcacctattggaggcgactttccagcagttcagaagcagaacgatgtacatagggccttcaagagggaattgaaaactaaagaacctgtaatcatgagtactcttgagactgtacgaatatttctgacagagcagcctttggaaggactagagaaactctaccaggagcccagagagctgcctcctgaggagagagcccagaatgtcactcggcttctacgaaagcaggctgaggaggtcaatactgagtgggaaaaattgaacctgcactccgctgactggcagagaaaaatagatgagacccttgaaagactccaggaacttcaagaggccacggatgagctggacctcaagctgcgccaagctgaggtgatcaagggatcctggcagcccgtgggcgatctcctcattgactctctccaagatcacctcgagaaagtcaaggcacttcgaggagaaattgcgcctctgaaagagaacgtgagccacgtcaatgaccttgctcgccagcttaccactttgggcattcagctctcaccgtataacctcagcactctggaagacctgaacaccagatggaagcttctgcaggtggccgtcgaggaccgagtcaggcagctgcatgaagcccacagggactttggtccagcatctcagcactttctttccacgtctgtccagggtccctgggagagagccatctcgccaaacaaagtgccctactatatcaaccacgagactcaaacaacttgctgggaccatcccaaaatgacagagctctaccagtctttagctgacctgaataatgtcagattctcagcttataggactgccatgaaactccgaagactgcagaaggccctttgcttggatctcttgagcctgtcagctgcatgtgatgccttggaccagcacaacctcaagcaaaatgaccagcccatggatatcctgcagattattaattgtttgaccactatttatgaccgcctggagcaagagcacaacaatttggtcaacgtccctctctgcgtggatatgtgtctgaactggctgctgaatgtttatgatacgggacgaacagggaggatccgtgtcctgtcttttaaaactggcatcatttccctgtgtaaagcacatttggaagacaagtacagataccttttcaagcaagtggcaagttcaacaggattttgtgaccagcgcaggctgggcctccttctgcatgattctatccaaattccaagacagttgggtgaagttgcatcctttgggggcagtaacattgagccaagtgtccggagctgcttccaatttgctaataataagccagagatcgaagcggccctcttcctagactggatgagactggaaccccagtccatggtgtggctgcccgtcctgcacagagtggctgctgcagaaactgccaagcatcaggccaaatgtaacatctgcaaagagtgtccaatcattggattcaggtacaggagtctaaagcactttaattatgacatctgccaaagctgctttttttctggtcgagttgcaaaaggccataaaatgcactatcccatggtggaatattgcactccgactacatcaggagaagatgttcgagactttgccaaggtactaaaaaacaaatttcgaaccaaaaggtattttgcgaagcatccccgaatgggctacctgccagtgcagactgtcttagagggggacaacatggaaactcccgttactctgatcaacttctggccagtagattctgcgcctgcctcgtcccctcagctttcacacgatgatactcattcacgcattgaacattatgctagcaggctagcagaaatggaaaacagcaatggatcttatctaaatgatagcatctctcctaatgagagcatagatgatgaacatttgttaatccagcattactgccaaagtttgaaccaggactcccccctgagccagcctcgtagtcctgcccagatcttgatttccttagagagtgaggaaagaggggagctagagagaatcctagcagatcttgaggaagaaaacaggaatctgcaagcagaatatgaccgtctaaagcagcagcacgaacataaaggcctgtccccactgccgtcccctcctgaaatgatgcccacctctccccagagtccccgggatgctgagctcattgctgaggccaagctactgcgtcaacacaaaggccgcctggaagccaggatgcaaatcctggaagaccacaataaacagctggagtcacagttacacaggctaaggcagctgctggagcaaccccaggcagaggccaaagtgaatggcacaacggtgtcctctccttctacctctctacagaggtccgacagcagtcagcctatgctgctccgagtggttggcagtcaaacttcggactccatgggtgaggaagatcttctcagtcctccccaggacacaagcacagggttagaggaggtgatggagcaactcaacaactccttccctagttcaagaggaagaaatacccctggaaagccaatgagagaggacacaatgtaggaagtcttttccacatggcagatgatttgggcagagcgatggagtccttagtatcagtcatgacagatgaagaaggagcagaataaatgttttacaactcctgattcccgcatggtttttataatattcatacaacaaagaggattagacagtaagagtttacaagaaataaatctatatttttgtgaagggtagtggtattatactgtagatttcagtagtttctaagtctgttattgttttgttaacaatggcaggttttacacgtctatgcaattgtacaaaaaagttataagaaaactacatgtaaaatcttgatagctaaataacttgccatttctttatatggaacgcattttgggttgtttaaaaatttataacagttataaagaaagattgtaaactaaagtgtgctttataaaaaaaagttgtttataaaaacccctaaaaacaaaacaaacacacacacacacacatacacacacacacacaaaactttgaggcagcgcattgttttgcatccttttggcgtgatatccatatgaaattcatggctttttctttttttgcatattaaagataagacttcctctaccaccacaccaaatgactactacacactgctcatttgagaactgtcagctgagtggggcaggcttgagttttcatttcatatatctatatgtctataagtatataaatactatagttatatagataaagagatacgaatttctatagactgactttttccattttttaaatgttcatgtcacatcctaatagaaagaaattacttctagtcagtcatccaggcttacctgcttggtctagaatggatttttcccggagccggaagccaggaggaaactacaccacactaaaacattgtctacagctccagatgtttctcattttaaacaactttccactgacaacgaaagtaaagtaaagtattggatttttttaaagggaacatgtgaatgaatacacaggacttattatatcagagtgagtaatcggttggttggttgattgattgattgattgatacattcagcttcctgctgctagcaatgccacgatttagatttaatgatgcttcagtggaaatcaatcagaaggtattctgaccttgtgaacatcagaaggtattttttaactcccaagcagtagcaggacgatgatagggctggagggctatggattcccagcccatccctgtgaaggagtaggccactctttaagtgaaggattggatgattgttcataatacataaagttctctgtaattacaactaaattattatgccctcttctcacagtcaaaaggaactgggtggtttggtttttgttgcttttttagatttattgtcccatgtgggatgagtttttaaatgccacaagacataatttaaaataaataaactttgggaaaaggtgtaagacagtagccccatcacatttgtgatactgacaggtatcaacccagaagcccatgaactgtgtttccatcctttgcatttctctgcgagtagttccacacaggtttgtaagtaagtaagaaagaaggcaaattgattcaaatgttacaaaaaaacccttcttggtggattagacaggttaaatatataaacaaacaaacaaaaattgctcaaaaaagaggagaaaagctcaagaggaaaagctaaggactggtaggaaaaagctttactctttcatgccattttatttctttttgatttttaaatcattcattcaatagataccaccgtgtgacctataattttgcaaatctgttacctctgacatcaagtgtaattagcttttggagagtgggctgacatcaagtgtaattagcttttggagagtgggttttgtccattattaataattaattaattaacatcaaacacggcttctcatgctatttctacctcactttggttttggggtgttcctgataattgtgcacacctgagttcacagcttcaccacttgtccattgcgttattttctttttcctttataattctttctttttccttcataattttcaaaagaaaacccaaagctctaaggtaacaaattaccaaattacatgaagatttggtttttgtcttgcatttttttcctttatgtgacgctggaccttttctttacccaaggatttttaaaactcagatttaaaacaaggggttactttacatcctactaagaagtttaagtaagtaagtttcattctaaaatcagaggtaaatagagtgcataaataattttgttttaatctttttgtttttcttttagacacattagctctggagtgagtctgtcataatatttgaacaaaaattgagagctttattgctgcattttaagcataattaatttggacattatttcgtgttgtgttctttataaccaccgagtattaaactgtaaatcataatgtaactgaagcataaacatcacatggcatgttttgtcattgttttcaggtactgagttcttacttgagtatcataatatattgtgttttaacaccaacactgtaacatttacgaattatttttttaaacttcagttttactgcattttcacaacatatcagacttcaccaaatatatgccttactattgtattatagtactgctttactgtgtatctcaataaagcacgcagttatgttac

SEQ ID NO: 2073 - protein, 2341 aa, Homo sapiens
MSARKLRNLSYKKAVRRQKLLEQSIQSAQETEKSLHLIQESLTFIDKQLAAYIADKVDAAQMPQEAQKIQSDLTSHEISLEEMKKHNQGKEAAQRVLSQIDVAQKKLQDVSMKFRLFQKPANFEQRLQESKMILDEVKMHLPALETKSVEQEVVQSQLNHCVNLYKSLSEVKSEVEMVIKTGRQIVQKKQTENPKELDERVTALKLHYNELGAKVTERKQQLEKCLKLSRKMRKEMNVLTEWLAATDMELTKRSAVEGMPSNLDSEVAWGKATQKEIEKQKVHLKSITEVGEALKTVLGKKETLVEDKLSLLNSNWIAVTSRAEEWLNLLLEYQKHMETFDQNVDHITKWIIQADTLLDESEKKKPQQKEDVLKRLKAELNDIRPKVDSTRDQAANLMANRGDHCRKLVEPQISELNHRFAAISHRIKTGKASIPLKELEQFNSDIQKLLEPLEAEIQQGVNLKEEDFNKDMNEDNEGTVKELLQRGDNLQQRITDERKREEIKIKQQLLQTKHNALKDLRSQRRKKALEISHQWYQYKRQADDLLKCLDDIEKKLASLPEPRDERKIKEIDRELQKKKEELNAVRRQAEGLSEDGAAMAVEPTQIQLSKRWREIESKFAQFRRLNFAQIHTVREETMMVMTEDMPLEISYVPSTYLTEITHVSQALLEVEQLLNAPDLCAKDFEDLFKQEESLKNIKDSLQQSSGRIDIIHSKKTAALQSATPVERVKLQEALSQLDFQWEKVNKMYKDRQGRFDRSVEKWRRFHYDIKIFNQWLTEAEQFLRKTQIPENWEHAKYKWYLKELQDGIGQRQTVVRTLNATGEEIIQQSSKTDASILQEKLGSLNLRWQEVCKQLSDRKKRLEEQKNILSEFQRDLNEFVLWLEEADNIASIPLEPGKEQQLKEKLEQVKLLVEELPLRQGILKQLNETGGPVLVSAPISPEEQDKLENKLKQTNLQWIKVSRALPEKQGEIEAQIKDLGQLEKKLEDLEEQLNHLLLWLSPIRNQLEIYNQPNQEGPFDVQETEIAVQAKQPDVEEILSKGQHLYKEKPATQPVKRKLEDLSSEWKAVNRLLQELRAKQPDLAPGLTTIGASPTQTVTLVTQPVVTKETAISKLEMPSSLMLEVPALADFNRAWTELTDWLSLLDQVIKSQRVMVGDLEDINEMIIKQKATMQDLEQRRPQLEELITAAQNLKNKTSNQEARTIITDRIERIQNQWDEVQEHLQNRRQQLNEMLKDSTQWLEAKEEAEQVLGQARAKLESWKEGPYTVDAIQKKITETKQLAKDLRQWQTNVDVANDLALKLLRDYSADDTRKVHMITENINASWRSIHKRVSEREAALEETHRLLQQFPLDLEKFLAWLTEAETTANVLQDATRKERLLEDSKGVKELMKQWQDLQGEIEAHTDVYHNLDENSQKILRSLEGSDDAVLLQRRLDNMNFKWSELRKKSLNIRSHLEASSDQWKRLHLSLQELLVWLQLKDDELSRQAPIGGDFPAVQKQNDVHRAFKRELKTKEPVIMSTLETVRIFLTEQPLEGLEKLYQEPRELPPEERAQNVTRLLRKQAEEVNTEWEKLNLHSADWQRKIDETLERLQELQEATDELDLKLRQAEVIKGSWQPVGDLLIDSLQDHLEKVKALRGEIAPLKENVSHVNDLARQLTTLGIQLSPYNLSTLEDLNTRWKLLQVAVEDRVRQLHEAHRDFGPASQHFLSTSVQGPWERAISPNKVPYYINHETQTTCWDHPKMTELYQSLADLNNVRFSAYRTAMKLRRLQKALCLDLLSLSAACDALDQHNLKQNDQPMDILQIINCLTTIYDRLEQEHNNLVNVPLCVDMCLNWLLNVYDTGRTGRIRVLSFKTGIISLCKAHLEDKYRYLFKQVASSTGFCDQRRLGLLLHDSIQIPRQLGEVASFGGSNIEPSVRSCFQFANNKPEIEAALFLDWMRLEPQSMVWLPVLHRVAAAETAKHQAKCNICKECPIIGFRYRSLKHFNYDICQSCFFSGRVAKGHKMHYPMVEYCTPTTSGEDVRDFAKVLKNKFRTKRYFAKHPRMGYLPVQTVLEGDNMETPVTLINFWPVDSAPASSPQLSHDDTHSRIEHYASRLAEMENSNGSYLNDSISPNESIDDEHLLIQHYCQSLNQDSPLSQPRSPAQILISLESEERGELERILADLEEENRNLQAEYDRLKQQHEHKGLSPLPSPPEMMPTSPQSPRDAELIAEAKLLRQHKGRLEARMQILEDHNKQLESQLHRLRQLLEQPQAEAKVNGTTVSSPSTSLQRSDSSQPMLLRVVGSQTSDSMGEEDLLSPPQDTSTGLEEVMEQLNNSFPSSRGRNTPGKPMREDTM

SEQ ID NO: 2074 - DNA, 7410 bp, Homo sapiens
acactagcaatggcaaagctttgtgcggaggcattgctggctgctctgaactaaaagcatccgtggggaccgaaagaggtttttgcacaccttattaaggaactccaggatggcattgggcagcggcaaactgttgtcagaacattgaatgcaactggggaagaaataattcagcaatcctcaaaaacagatgccagtattctacaggaaaaattgggaagcctgaatctgcggtggcaggaggtctgcaaacagctgtcagacagaaaaaagaggctagaagaacaaaagaatatcttgtcagaatttcaaagagatttaaatgaatttgttttatggttggaggaagcagataacattgctagtatcccacttgaacctggaaaagagcagcaactaaaagaaaagcttgagcaagtcaagttactggtggaagagttgcccctgcgccagggaattctcaaacaattaaatgaaactggaggacccgtgcttgtaagtgctcccataagcccagaagagcaagataaacttgaaaataagctcaagcagacaaatctccagtggataaaggtttccagagctttacctgagaaacaaggagaaattgaagctcaaataaaagaccttgggcagcttgaaaaaaagcttgaagaccttgaagagcagttaaatcatctgctgctgtggttatctcctattaggaatcagttggaaatttataaccaaccaaaccaagaaggaccatttgacgttcaggaaactgaaatagcagttcaagctaaacaaccggatgtggaagagattttgtctaaagggcagcatttgtacaaggaaaaaccagccactcagccagtgaagaggaagttagaagatctgagctctgagtggaaggcggtaaaccgtttacttcaagagctgagggcaaagcagcctgacctagctcctggactgaccactattggagcctctcctactcagactgttactctggtgacacaacctgtggttactaaggaaactgccatctccaaactagaaatgccatcttccttgatgttggaggtacctgctctggcagatttcaaccgggcttggacagaacttaccgactggctttctctgcttgatcaagttataaaatcacagagggtgatggtgggtgaccttgaggatatcaacgagatgatcatcaagcagaaggcaacaatgcaggatttggaacagaggcgtccccagttggaagaactcattaccgctgcccaaaatttgaaaaacaagaccagcaatcaagaggctagaacaatcattacggatcgaattgaaagaattcagaatcagtgggatgaagtacaagaacaccttcagaaccggaggcaacagttgaatgaaatgttaaaggattcaacacaatggctggaagctaaggaagaagctgagcaggtcttaggacaggccagagccaagcttgagtcatggaaggagggtccctatacagtagatgcaatccaaaagaaaatcacagaaaccaagcagttggccaaagacctccgccagtggcagacaaatgtagatgtggcaaatgacttggccctgaaacttctccgggattattctgcagatgataccagaaaagtccacatgataacagagaatatcaatgcctcttggagaagcattcataaaagggtgagtgagcgagaggctgctttggaagaaactcatagattactgcaacagttccccctggacctggaaaagtttcttgcctggcttacagaagctgaaacaactgccaatgtcctacaggatgctacccgtaaggaaaggctcctagaagactccaagggagtaaaagagctgatgaaacaatggcaagacctccaaggtgaaattgaagctcacacagatgtttatcacaacctggatgaaaacagccaaaaaatcctgagatccctggaaggttccgatgatgcagtcctgttacaaagacgtttggataacatgaacttcaagtggagtgaacttcggaaaaagtctctcaacattaggtcccatttggaagccagttctgaccagtggaagcgtctgcacctttctctgcaggaacttctggtgtggctacagctgaaagatgatgaattaagccggcaggcacctattggaggcgactttccagcagttcagaagcagaacgatgtacatagggccttcaagagggaattgaaaactaaagaacctgtaatcatgagtactcttgagactgtacgaatatttctgacagagcagcctttggaaggactagagaaactctaccaggagcccagagagctgcctcctgaggagagagcccagaatgtcactcggcttctacgaaagcaggctgaggaggtcaatactgagtgggaaaaattgaacctgcactccgctgactggcagagaaaaatagatgagacccttgaaagactccaggaacttcaagaggccacggatgagctggacctcaagctgcgccaagctgaggtgatcaagggatcctggcagcccgtgggcgatctcctcattgactctctccaagatcacctcgagaaagtcaaggcacttcgaggagaaattgcgcctctgaaagagaacgtgagccacgtcaatgaccttgctcgccagcttaccactttgggcattcagctctcaccgtataacctcagcactctggaagacctgaacaccagatggaagcttctgcaggtggccgtcgaggaccgagtcaggcagctgcatgaagcccacagggactttggtccagcatctcagcactttctttccacgtctgtccagggtccctgggagagagccatctcgccaaacaaagtgccctactatatcaaccacgagactcaaacaacttgctgggaccatcccaaaatgacagagctctaccagtctttagctgacctgaataatgtcagattctcagcttataggactgccatgaaactccgaagactgcagaaggccctttgcttggatctcttgagcctgtcagctgcatgtgatgccttggaccagcacaacctcaagcaaaatgaccagcccatggatatcctgcagattattaattgtttgaccactatttatgaccgcctggagcaagagcacaacaatttggtcaacgtccctctctgcgtggatatgtgtctgaactggctgctgaatgtttatgatacgggacgaacagggaggatccgtgtcctgtcttttaaaactggcatcatttccctgtgtaaagcacatttggaagacaagtacagataccttttcaagcaagtggcaagttcaacaggattttgtgaccagcgcaggctgggcctccttctgcatgattctatccaaattccaagacagttgggtgaagttgcatcctttgggggcagtaacattgagccaagtgtccggagctgcttccaatttgctaataataagccagagatcgaagcggccctcttcctagactggatgagactggaaccccagtccatggtgtggctgcccgtcctgcacagagtggctgctgcagaaactgccaagcatcaggccaaatgtaacatctgcaaagagtgtccaatcattggattcaggtacaggagtctaaagcactttaattatgacatctgccaaagctgctttttttctggtcgagttgcaaaaggccataaaatgcactatcccatggtggaatattgcactccgactacatcaggagaagatgttcgagactttgccaaggtactaaaaaacaaatttcgaaccaaaaggtattttgcgaagcatccccgaatgggctacctgccagtgcagactgtcttagagggggacaacatggaaactcccgttactctgatcaacttctggccagtagattctgcgcctgcctcgtcccctcagctttcacacgatgatactcattcacgcattgaacattatgctagcaggctagcagaaatggaaaacagcaatggatcttatctaaatgatagcatctctcctaatgagagcatagatgatgaacatttgttaatccagcattactgccaaagtttgaaccaggactcccccctgagccagcctcgtagtcctgcccagatcttgatttccttagagagtgaggaaagaggggagctagagagaatcctagcagatcttgaggaagaaaacaggaatctgcaagcagaatatgaccgtctaaagcagcagcacgaacataaaggcctgtccccactgccgtcccctcctgaaatgatgcccacctctccccagagtccccgggatgctgagctcattgctgaggccaagctactgcgtcaacacaaaggccgcctggaagccaggatgcaaatcctggaagaccacaataaacagctggagtcacagttacacaggctaaggcagctgctggagcaaccccaggcagaggccaaagtgaatggcacaacggtgtcctctccttctacctctctacagaggtccgacagcagtcagcctatgctgctccgagtggttggcagtcaaacttcggactccatgggtgaggaagatcttctcagtcctccccaggacacaagcacagggttagaggaggtgatggagcaactcaacaactccttccctagttcaagaggaagaaatacccctggaaagccaatgagagaggacacaatgtaggaagtcttttccacatggcagatgatttgggcagagcgatggagtccttagtatcagtcatgacagatgaagaaggagcagaataaatgttttacaactcctgattcccgcatggtttttataatattcatacaacaaagaggattagacagtaagagtttacaagaaataaatctatatttttgtgaagggtagtggtattatactgtagatttcagtagtttctaagtctgttattgttttgttaacaatggcaggttttacacgtctatgcaattgtacaaaaaagttataagaaaactacatgtaaaatcttgatagctaaataacttgccatttctttatatggaacgcattttgggttgtttaaaaatttataacagttataaagaaagattgtaaactaaagtgtgctttataaaaaaaagttgtttataaaaacccctaaaaacaaaacaaacacacacacacacacatacacacacacacacaaaactttgaggcagcgcattgttttgcatccttttggcgtgatatccatatgaaattcatggctttttctttttttgcatattaaagataagacttcctctaccaccacaccaaatgactactacacactgctcatttgagaactgtcagctgagtggggcaggcttgagttttcatttcatatatctatatgtctataagtatataaatactatagttatatagataaagagatacgaatttctatagactgactttttccattttttaaatgttcatgtcacatcctaatagaaagaaattacttctagtcagtcatccaggcttacctgcttggtctagaatggatttttcccggagccggaagccaggaggaaactacaccacactaaaacattgtctacagctccagatgtttctcattttaaacaactttccactgacaacgaaagtaaagtaaagtattggatttttttaaagggaacatgtgaatgaatacacaggacttattatatcagagtgagtaatcggttggttggttgattgattgattgattgatacattcagcttcctgctgctagcaatgccacgatttagatttaatgatgcttcagtggaaatcaatcagaaggtattctgaccttgtgaacatcagaaggtattttttaactcccaagcagtagcaggacgatgatagggctggagggctatggattcccagcccatccctgtgaaggagtaggccactctttaagtgaaggattggatgattgttcataatacataaagttctctgtaattacaactaaattattatgccctcttctcacagtcaaaaggaactgggtggtttggtttttgttgcttttttagatttattgtcccatgtgggatgagtttttaaatgccacaagacataatttaaaataaataaactttgggaaaaggtgtaagacagtagccccatcacatttgtgatactgacaggtatcaacccagaagcccatgaactgtgtttccatcctttgcatttctctgcgagtagttccacacaggtttgtaagtaagtaagaaagaaggcaaattgattcaaatgttacaaaaaaacccttcttggtggattagacaggttaaatatataaacaaacaaacaaaaattgctcaaaaaagaggagaaaagctcaagaggaaaagctaaggactggtaggaaaaagctttactctttcatgccattttatttctttttgatttttaaatcattcattcaatagataccaccgtgtgacctataattttgcaaatctgttacctctgacatcaagtgtaattagcttttggagagtgggctgacatcaagtgtaattagcttttggagagtgggttttgtccattattaataattaattaattaacatcaaacacggcttctcatgctatttctacctcactttggttttggggtgttcctgataattgtgcacacctgagttcacagcttcaccacttgtccattgcgttattttctttttcctttataattctttctttttccttcataattttcaaaagaaaacccaaagctctaaggtaacaaattaccaaattacatgaagatttggtttttgtcttgcatttttttcctttatgtgacgctggaccttttctttacccaaggatttttaaaactcagatttaaaacaaggggttactttacatcctactaagaagtttaagtaagtaagtttcattctaaaatcagaggtaaatagagtgcataaataattttgttttaatctttttgtttttcttttagacacattagctctggagtgagtctgtcataatatttgaacaaaaattgagagctttattgctgcattttaagcataattaatttggacattatttcgtgttgtgttctttataaccaccgagtattaaactgtaaatcataatgtaactgaagcataaacatcacatggcatgttttgtcattgttttcaggtactgagttcttacttgagtatcataatatattgtgttttaacaccaacactgtaacatttacgaattatttttttaaacttcagttttactgcattttcacaacatatcagacttcaccaaatatatgccttactattgtattatagtactgctttactgtgtatctcaataaagcacgcagttatgttac

SEQ ID NO: 2075 - protein, 1225 aa, Homo sapiens
MPSSLMLEVPALADFNRAWTELTDWLSLLDQVIKSQRVMVGDLEDINEMIIKQKATMQDLEQRRPQLEELITAAQNLKNKTSNQEARTIITDRIERIQNQWDEVQEHLQNRRQQLNEMLKDSTQWLEAKEEAEQVLGQARAKLESWKEGPYTVDAIQKKITETKQLAKDLRQWQTNVDVANDLALKLLRDYSADDTRKVHMITENINASWRSIHKRVSEREAALEETHRLLQQFPLDLEKFLAWLTEAETTANVLQDATRKERLLEDSKGVKELMKQWQDLQGEIEAHTDVYHNLDENSQKILRSLEGSDDAVLLQRRLDNMNFKWSELRKKSLNIRSHLEASSDQWKRLHLSLQELLVWLQLKDDELSRQAPIGGDFPAVQKQNDVHRAFKRELKTKEPVIMSTLETVRIFLTEQPLEGLEKLYQEPRELPPEERAQNVTRLLRKQAEEVNTEWEKLNLHSADWQRKIDETLERLQELQEATDELDLKLRQAEVIKGSWQPVGDLLIDSLQDHLEKVKALRGEIAPLKENVSHVNDLARQLTTLGIQLSPYNLSTLEDLNTRWKLLQVAVEDRVRQLHEAHRDFGPASQHFLSTSVQGPWERAISPNKVPYYINHETQTTCWDHPKMTELYQSLADLNNVRFSAYRTAMKLRRLQKALCLDLLSLSAACDALDQHNLKQNDQPMDILQIINCLTTIYDRLEQEHNNLVNVPLCVDMCLNWLLNVYDTGRTGRIRVLSFKTGIISLCKAHLEDKYRYLFKQVASSTGFCDQRRLGLLLHDSIQIPRQLGEVASFGGSNIEPSVRSCFQFANNKPEIEAALFLDWMRLEPQSMVWLPVLHRVAAAETAKHQAKCNICKECPIIGFRYRSLKHFNYDICQSCFFSGRVAKGHKMHYPMVEYCTPTTSGEDVRDFAKVLKNKFRTKRYFAKHPRMGYLPVQTVLEGDNMETPVTLINFWPVDSAPASSPQLSHDDTHSRIEHYASRLAEMENSNGSYLNDSISPNESIDDEHLLIQHYCQSLNQDSPLSQPRSPAQILISLESEERGELERILADLEEENRNLQAEYDRLKQQHEHKGLSPLPSPPEMMPTSPQSPRDAELIAEAKLLRQHKGRLEARMQILEDHNKQLESQLHRLRQLLEQPQAEAKVNGTTVSSPSTSLQRSDSSQPMLLRVVGSQTSDSMGEEDLLSPPQDTSTGLEEVMEQLNNSFPSSRGRNTPGKPMREDTM

SEQ ID NO: 2076 - DNA, 5623 bp, Homo sapiens
gggttttctcaggattgctatgcaacaggatcagtgctgtagtgcccggttcaagctgaaaatgttacacaggaagacataccatgtaaaggacctccaaggtgaaattgaagctcacacagatgtttatcacaacctggatgaaaacagccaaaaaatcctgagatccctggaaggttccgatgatgcagtcctgttacaaagacgtttggataacatgaacttcaagtggagtgaacttcggaaaaagtctctcaacattaggtcccatttggaagccagttctgaccagtggaagcgtctgcacctttctctgcaggaacttctggtgtggctacagctgaaagatgatgaattaagccggcaggcacctattggaggcgactttccagcagttcagaagcagaacgatgtacatagggccttcaagagggaattgaaaactaaagaacctgtaatcatgagtactcttgagactgtacgaatatttctgacagagcagcctttggaaggactagagaaactctaccaggagcccagagagctgcctcctgaggagagagcccagaatgtcactcggcttctacgaaagcaggctgaggaggtcaatactgagtgggaaaaattgaacctgcactccgctgactggcagagaaaaatagatgagacccttgaaagactccaggaacttcaagaggccacggatgagctggacctcaagctgcgccaagctgaggtgatcaagggatcctggcagcccgtgggcgatctcctcattgactctctccaagatcacctcgagaaagtcaaggcacttcgaggagaaattgcgcctctgaaagagaacgtgagccacgtcaatgaccttgctcgccagcttaccactttgggcattcagctctcaccgtataacctcagcactctggaagacctgaacaccagatggaagcttctgcaggtggccgtcgaggaccgagtcaggcagctgcatgaagcccacagggactttggtccagcatctcagcactttctttccacgtctgtccagggtccctgggagagagccatctcgccaaacaaagtgccctactatatcaaccacgagactcaaacaacttgctgggaccatcccaaaatgacagagctctaccagtctttagctgacctgaataatgtcagattctcagcttataggactgccatgaaactccgaagactgcagaaggccctttgcttggatctcttgagcctgtcagctgcatgtgatgccttggaccagcacaacctcaagcaaaatgaccagcccatggatatcctgcagattattaattgtttgaccactatttatgaccgcctggagcaagagcacaacaatttggtcaacgtccctctctgcgtggatatgtgtctgaactggctgctgaatgtttatgatacgggacgaacagggaggatccgtgtcctgtcttttaaaactggcatcatttccctgtgtaaagcacatttggaagacaagtacagataccttttcaagcaagtggcaagttcaacaggattttgtgaccagcgcaggctgggcctccttctgcatgattctatccaaattccaagacagttgggtgaagttgcatcctttgggggcagtaacattgagccaagtgtccggagctgcttccaatttgctaataataagccagagatcgaagcggccctcttcctagactggatgagactggaaccccagtccatggtgtggctgcccgtcctgcacagagtggctgctgcagaaactgccaagcatcaggccaaatgtaacatctgcaaagagtgtccaatcattggattcaggtacaggagtctaaagcactttaattatgacatctgccaaagctgctttttttctggtcgagttgcaaaaggccataaaatgcactatcccatggtggaatattgcactccgactacatcaggagaagatgttcgagactttgccaaggtactaaaaaacaaatttcgaaccaaaaggtattttgcgaagcatccccgaatgggctacctgccagtgcagactgtcttagagggggacaacatggaaactcccgttactctgatcaacttctggccagtagattctgcgcctgcctcgtcccctcagctttcacacgatgatactcattcacgcattgaacattatgctagcaggctagcagaaatggaaaacagcaatggatcttatctaaatgatagcatctctcctaatgagagcatagatgatgaacatttgttaatccagcattactgccaaagtttgaaccaggactcccccctgagccagcctcgtagtcctgcccagatcttgatttccttagagagtgaggaaagaggggagctagagagaatcctagcagatcttgaggaagaaaacaggaatctgcaagcagaatatgaccgtctaaagcagcagcacgaacataaaggcctgtccccactgccgtcccctcctgaaatgatgcccacctctccccagagtccccgggatgctgagctcattgctgaggccaagctactgcgtcaacacaaaggccgcctggaagccaggatgcaaatcctggaagaccacaataaacagctggagtcacagttacacaggctaaggcagctgctggagcaaccccaggcagaggccaaagtgaatggcacaacggtgtcctctccttctacctctctacagaggtccgacagcagtcagcctatgctgctccgagtggttggcagtcaaacttcggactccatgggtgaggaagatcttctcagtcctccccaggacacaagcacagggttagaggaggtgatggagcaactcaacaactccttccctagttcaagaggaagaaatacccctggaaagccaatgagagaggacacaatgtaggaagtcttttccacatggcagatgatttgggcagagcgatggagtccttagtatcagtcatgacagatgaagaaggagcagaataaatgttttacaactcctgattcccgcatggtttttataatattcatacaacaaagaggattagacagtaagagtttacaagaaataaatctatatttttgtgaagggtagtggtattatactgtagatttcagtagtttctaagtctgttattgttttgttaacaatggcaggttttacacgtctatgcaattgtacaaaaaagttataagaaaactacatgtaaaatcttgatagctaaataacttgccatttctttatatggaacgcattttgggttgtttaaaaatttataacagttataaagaaagattgtaaactaaagtgtgctttataaaaaaaagttgtttataaaaacccctaaaaacaaaacaaacacacacacacacacatacacacacacacacaaaactttgaggcagcgcattgttttgcatccttttggcgtgatatccatatgaaattcatggctttttctttttttgcatattaaagataagacttcctctaccaccacaccaaatgactactacacactgctcatttgagaactgtcagctgagtggggcaggcttgagttttcatttcatatatctatatgtctataagtatataaatactatagttatatagataaagagatacgaatttctatagactgactttttccattttttaaatgttcatgtcacatcctaatagaaagaaattacttctagtcagtcatccaggcttacctgcttggtctagaatggatttttcccggagccggaagccaggaggaaactacaccacactaaaacattgtctacagctccagatgtttctcattttaaacaactttccactgacaacgaaagtaaagtaaagtattggatttttttaaagggaacatgtgaatgaatacacaggacttattatatcagagtgagtaatcggttggttggttgattgattgattgattgatacattcagcttcctgctgctagcaatgccacgatttagatttaatgatgcttcagtggaaatcaatcagaaggtattctgaccttgtgaacatcagaaggtattttttaactcccaagcagtagcaggacgatgatagggctggagggctatggattcccagcccatccctgtgaaggagtaggccactctttaagtgaaggattggatgattgttcataatacataaagttctctgtaattacaactaaattattatgccctcttctcacagtcaaaaggaactgggtggtttggtttttgttgcttttttagatttattgtcccatgtgggatgagtttttaaatgccacaagacataatttaaaataaataaactttgggaaaaggtgtaagacagtagccccatcacatttgtgatactgacaggtatcaacccagaagcccatgaactgtgtttccatcctttgcatttctctgcgagtagttccacacaggtttgtaagtaagtaagaaagaaggcaaattgattcaaatgttacaaaaaaacccttcttggtggattagacaggttaaatatataaacaaacaaacaaaaattgctcaaaaaagaggagaaaagctcaagaggaaaagctaaggactggtaggaaaaagctttactctttcatgccattttatttctttttgatttttaaatcattcattcaatagataccaccgtgtgacctataattttgcaaatctgttacctctgacatcaagtgtaattagcttttggagagtgggctgacatcaagtgtaattagcttttggagagtgggttttgtccattattaataattaattaattaacatcaaacacggcttctcatgctatttctacctcactttggttttggggtgttcctgataattgtgcacacctgagttcacagcttcaccacttgtccattgcgttattttctttttcctttataattctttctttttccttcataattttcaaaagaaaacccaaagctctaaggtaacaaattaccaaattacatgaagatttggtttttgtcttgcatttttttcctttatgtgacgctggaccttttctttacccaaggatttttaaaactcagatttaaaacaaggggttactttacatcctactaagaagtttaagtaagtaagtttcattctaaaatcagaggtaaatagagtgcataaataattttgttttaatctttttgtttttcttttagacacattagctctggagtgagtctgtcataatatttgaacaaaaattgagagctttattgctgcattttaagcataattaatttggacattatttcgtgttgtgttctttataaccaccgagtattaaactgtaaatcataatgtaactgaagcataaacatcacatggcatgttttgtcattgttttcaggtactgagttcttacttgagtatcataatatattgtgttttaacaccaacactgtaacatttacgaattatttttttaaacttcagttttactgcattttcacaacatatcagacttcaccaaatatatgccttactattgtattatagtactgctttactgtgtatctcaataaagcacgcagttatgttac

SEQ ID NO: 2077 - protein, 956 aa, Homo sapiens
MLHRKTYHVKDLQGEIEAHTDVYHNLDENSQKILRSLEGSDDAVLLQRRLDNMNFKWSELRKKSLNIRSHLEASSDQWKRLHLSLQELLVWLQLKDDELSRQAPIGGDFPAVQKQNDVHRAFKRELKTKEPVIMSTLETVRIFLTEQPLEGLEKLYQEPRELPPEERAQNVTRLLRKQAEEVNTEWEKLNLHSADWQRKIDETLERLQELQEATDELDLKLRQAEVIKGSWQPVGDLLIDSLQDHLEKVKALRGEIAPLKENVSHVNDLARQLTTLGIQLSPYNLSTLEDLNTRWKLLQVAVEDRVRQLHEAHRDFGPASQHFLSTSVQGPWERAISPNKVPYYINHETQTTCWDHPKMTELYQSLADLNNVRFSAYRTAMKLRRLQKALCLDLLSLSAACDALDQHNLKQNDQPMDILQIINCLTTIYDRLEQEHNNLVNVPLCVDMCLNWLLNVYDTGRTGRIRVLSFKTGIISLCKAHLEDKYRYLFKQVASSTGFCDQRRLGLLLHDSIQIPRQLGEVASFGGSNIEPSVRSCFQFANNKPEIEAALFLDWMRLEPQSMVWLPVLHRVAAAETAKHQAKCNICKECPIIGFRYRSLKHFNYDICQSCFFSGRVAKGHKMHYPMVEYCTPTTSGEDVRDFAKVLKNKFRTKRYFAKHPRMGYLPVQTVLEGDNMETPVTLINFWPVDSAPASSPQLSHDDTHSRIEHYASRLAEMENSNGSYLNDSISPNESIDDEHLLIQHYCQSLNQDSPLSQPRSPAQILISLESEERGELERILADLEEENRNLQAEYDRLKQQHEHKGLSPLPSPPEMMPTSPQSPRDAELIAEAKLLRQHKGRLEARMQILEDHNKQLESQLHRLRQLLEQPQAEAKVNGTTVSSPSTSLQRSDSSQPMLLRVVGSQTSDSMGEEDLLSPPQDTSTGLEEVMEQLNNSFPSSRGRNTPGKPMREDTM

SEQ ID NO: 2078 - DNA, 4623 bp, Homo sapiens
actttcggggagcccggcggctctgggaagctcactcctccactcgtacccacactcgaccgcggagcccttgcagccatgagggaacagctcaaaggccacgagactcaaacaacttgctgggaccatcccaaaatgacagagctctaccagtctttagctgacctgaataatgtcagattctcagcttataggactgccatgaaactccgaagactgcagaaggccctttgcttggatctcttgagcctgtcagctgcatgtgatgccttggaccagcacaacctcaagcaaaatgaccagcccatggatatcctgcagattattaattgtttgaccactatttatgaccgcctggagcaagagcacaacaatttggtcaacgtccctctctgcgtggatatgtgtctgaactggctgctgaatgtttatgatacgggacgaacagggaggatccgtgtcctgtcttttaaaactggcatcatttccctgtgtaaagcacatttggaagacaagtacagataccttttcaagcaagtggcaagttcaacaggattttgtgaccagcgcaggctgggcctccttctgcatgattctatccaaattccaagacagttgggtgaagttgcatcctttgggggcagtaacattgagccaagtgtccggagctgcttccaatttgctaataataagccagagatcgaagcggccctcttcctagactggatgagactggaaccccagtccatggtgtggctgcccgtcctgcacagagtggctgctgcagaaactgccaagcatcaggccaaatgtaacatctgcaaagagtgtccaatcattggattcaggtacaggagtctaaagcactttaattatgacatctgccaaagctgctttttttctggtcgagttgcaaaaggccataaaatgcactatcccatggtggaatattgcactccgactacatcaggagaagatgttcgagactttgccaaggtactaaaaaacaaatttcgaaccaaaaggtattttgcgaagcatccccgaatgggctacctgccagtgcagactgtcttagagggggacaacatggaaactcccgttactctgatcaacttctggccagtagattctgcgcctgcctcgtcccctcagctttcacacgatgatactcattcacgcattgaacattatgctagcaggctagcagaaatggaaaacagcaatggatcttatctaaatgatagcatctctcctaatgagagcatagatgatgaacatttgttaatccagcattactgccaaagtttgaaccaggactcccccctgagccagcctcgtagtcctgcccagatcttgatttccttagagagtgaggaaagaggggagctagagagaatcctagcagatcttgaggaagaaaacaggaatctgcaagcagaatatgaccgtctaaagcagcagcacgaacataaaggcctgtccccactgccgtcccctcctgaaatgatgcccacctctccccagagtccccgggatgctgagctcattgctgaggccaagctactgcgtcaacacaaaggccgcctggaagccaggatgcaaatcctggaagaccacaataaacagctggagtcacagttacacaggctaaggcagctgctggagcaaccccaggcagaggccaaagtgaatggcacaacggtgtcctctccttctacctctctacagaggtccgacagcagtcagcctatgctgctccgagtggttggcagtcaaacttcggactccatgggtgaggaagatcttctcagtcctccccaggacacaagcacagggttagaggaggtgatggagcaactcaacaactccttccctagttcaagaggaagaaatacccctggaaagccaatgagagaggacacaatgtaggaagtcttttccacatggcagatgatttgggcagagcgatggagtccttagtatcagtcatgacagatgaagaaggagcagaataaatgttttacaactcctgattcccgcatggtttttataatattcatacaacaaagaggattagacagtaagagtttacaagaaataaatctatatttttgtgaagggtagtggtattatactgtagatttcagtagtttctaagtctgttattgttttgttaacaatggcaggttttacacgtctatgcaattgtacaaaaaagttataagaaaactacatgtaaaatcttgatagctaaataacttgccatttctttatatggaacgcattttgggttgtttaaaaatttataacagttataaagaaagattgtaaactaaagtgtgctttataaaaaaaagttgtttataaaaacccctaaaaacaaaacaaacacacacacacacacatacacacacacacacaaaactttgaggcagcgcattgttttgcatccttttggcgtgatatccatatgaaattcatggctttttctttttttgcatattaaagataagacttcctctaccaccacaccaaatgactactacacactgctcatttgagaactgtcagctgagtggggcaggcttgagttttcatttcatatatctatatgtctataagtatataaatactatagttatatagataaagagatacgaatttctatagactgactttttccattttttaaatgttcatgtcacatcctaatagaaagaaattacttctagtcagtcatccaggcttacctgcttggtctagaatggatttttcccggagccggaagccaggaggaaactacaccacactaaaacattgtctacagctccagatgtttctcattttaaacaactttccactgacaacgaaagtaaagtaaagtattggatttttttaaagggaacatgtgaatgaatacacaggacttattatatcagagtgagtaatcggttggttggttgattgattgattgattgatacattcagcttcctgctgctagcaatgccacgatttagatttaatgatgcttcagtggaaatcaatcagaaggtattctgaccttgtgaacatcagaaggtattttttaactcccaagcagtagcaggacgatgatagggctggagggctatggattcccagcccatccctgtgaaggagtaggccactctttaagtgaaggattggatgattgttcataatacataaagttctctgtaattacaactaaattattatgccctcttctcacagtcaaaaggaactgggtggtttggtttttgttgcttttttagatttattgtcccatgtgggatgagtttttaaatgccacaagacataatttaaaataaataaactttgggaaaaggtgtaagacagtagccccatcacatttgtgatactgacaggtatcaacccagaagcccatgaactgtgtttccatcctttgcatttctctgcgagtagttccacacaggtttgtaagtaagtaagaaagaaggcaaattgattcaaatgttacaaaaaaacccttcttggtggattagacaggttaaatatataaacaaacaaacaaaaattgctcaaaaaagaggagaaaagctcaagaggaaaagctaaggactggtaggaaaaagctttactctttcatgccattttatttctttttgatttttaaatcattcattcaatagataccaccgtgtgacctataattttgcaaatctgttacctctgacatcaagtgtaattagcttttggagagtgggctgacatcaagtgtaattagcttttggagagtgggttttgtccattattaataattaattaattaacatcaaacacggcttctcatgctatttctacctcactttggttttggggtgttcctgataattgtgcacacctgagttcacagcttcaccacttgtccattgcgttattttctttttcctttataattctttctttttccttcataattttcaaaagaaaacccaaagctctaaggtaacaaattaccaaattacatgaagatttggtttttgtcttgcatttttttcctttatgtgacgctggaccttttctttacccaaggatttttaaaactcagatttaaaacaaggggttactttacatcctactaagaagtttaagtaagtaagtttcattctaaaatcagaggtaaatagagtgcataaataattttgttttaatctttttgtttttcttttagacacattagctctggagtgagtctgtcataatatttgaacaaaaattgagagctttattgctgcattttaagcataattaatttggacattatttcgtgttgtgttctttataaccaccgagtattaaactgtaaatcataatgtaactgaagcataaacatcacatggcatgttttgtcattgttttcaggtactgagttcttacttgagtatcataatatattgtgttttaacaccaacactgtaacatttacgaattatttttttaaacttcagttttactgcattttcacaacatatcagacttcaccaaatatatgccttactattgtattatagtactgctttactgtgtatctcaataaagcacgcagttatgttac

SEQ ID NO: 2079 - protein, 617 aa, Homo sapiens
MREQLKGHETQTTCWDHPKMTELYQSLADLNNVRFSAYRTAMKLRRLQKALCLDLLSLSAACDALDQHNLKQNDQPMDILQIINCLTTIYDRLEQEHNNLVNVPLCVDMCLNWLLNVYDTGRTGRIRVLSFKTGIISLCKAHLEDKYRYLFKQVASSTGFCDQRRLGLLLHDSIQIPRQLGEVASFGGSNIEPSVRSCFQFANNKPEIEAALFLDWMRLEPQSMVWLPVLHRVAAAETAKHQAKCNICKECPIIGFRYRSLKHFNYDICQSCFFSGRVAKGHKMHYPMVEYCTPTTSGEDVRDFAKVLKNKFRTKRYFAKHPRMGYLPVQTVLEGDNMETPVTLINFWPVDSAPASSPQLSHDDTHSRIEHYASRLAEMENSNGSYLNDSISPNESIDDEHLLIQHYCQSLNQDSPLSQPRSPAQILISLESEERGELERILADLEEENRNLQAEYDRLKQQHEHKGLSPLPSPPEMMPTSPQSPRDAELIAEAKLLRQHKGRLEARMQILEDHNKQLESQLHRLRQLLEQPQAEAKVNGTTVSSPSTSLQRSDSSQPMLLRVVGSQTSDSMGEEDLLSPPQDTSTGLEEVMEQLNNSFPSSRGRNTPGKPMREDTM

SEQ ID NO: 2080 - DNA, 4591 bp, Homo sapiens
actttcggggagcccggcggctctgggaagctcactcctccactcgtacccacactcgaccgcggagcccttgcagccatgagggaacagctcaaaggccacgagactcaaacaacttgctgggaccatcccaaaatgacagagctctaccagtctttagctgacctgaataatgtcagattctcagcttataggactgccatgaaactccgaagactgcagaaggccctttgcttggatctcttgagcctgtcagctgcatgtgatgccttggaccagcacaacctcaagcaaaatgaccagcccatggatatcctgcagattattaattgtttgaccactatttatgaccgcctggagcaagagcacaacaatttggtcaacgtccctctctgcgtggatatgtgtctgaactggctgctgaatgtttatgatacgggacgaacagggaggatccgtgtcctgtcttttaaaactggcatcatttccctgtgtaaagcacatttggaagacaagtacagataccttttcaagcaagtggcaagttcaacaggattttgtgaccagcgcaggctgggcctccttctgcatgattctatccaaattccaagacagttgggtgaagttgcatcctttgggggcagtaacattgagccaagtgtccggagctgcttccaatttgctaataataagccagagatcgaagcggccctcttcctagactggatgagactggaaccccagtccatggtgtggctgcccgtcctgcacagagtggctgctgcagaaactgccaagcatcaggccaaatgtaacatctgcaaagagtgtccaatcattggattcaggtacaggagtctaaagcactttaattatgacatctgccaaagctgctttttttctggtcgagttgcaaaaggccataaaatgcactatcccatggtggaatattgcactccgactacatcaggagaagatgttcgagactttgccaaggtactaaaaaacaaatttcgaaccaaaaggtattttgcgaagcatccccgaatgggctacctgccagtgcagactgtcttagagggggacaacatggaaactcccgttactctgatcaacttctggccagtagattctgcgcctgcctcgtcccctcagctttcacacgatgatactcattcacgcattgaacattatgctagcaggctagcagaaatggaaaacagcaatggatcttatctaaatgatagcatctctcctaatgagagcatagatgatgaacatttgttaatccagcattactgccaaagtttgaaccaggactcccccctgagccagcctcgtagtcctgcccagatcttgatttccttagagagtgaggaaagaggggagctagagagaatcctagcagatcttgaggaagaaaacaggaatctgcaagcagaatatgaccgtctaaagcagcagcacgaacataaaggcctgtccccactgccgtcccctcctgaaatgatgcccacctctccccagagtccccgggatgctgagctcattgctgaggccaagctactgcgtcaacacaaaggccgcctggaagccaggatgcaaatcctggaagaccacaataaacagctggagtcacagttacacaggctaaggcagctgctggagcaaccccaggcagaggccaaagtgaatggcacaacggtgtcctctccttctacctctctacagaggtccgacagcagtcagcctatgctgctccgagtggttggcagtcaaacttcggactccatgggtgaggaagatcttctcagtcctccccaggacacaagcacagggttagaggaggtgatggagcaactcaacaactccttccctagttcaagaggacacaatgtaggaagtcttttccacatggcagatgatttgggcagagcgatggagtccttagtatcagtcatgacagatgaagaaggagcagaataaatgttttacaactcctgattcccgcatggtttttataatattcatacaacaaagaggattagacagtaagagtttacaagaaataaatctatatttttgtgaagggtagtggtattatactgtagatttcagtagtttctaagtctgttattgttttgttaacaatggcaggttttacacgtctatgcaattgtacaaaaaagttataagaaaactacatgtaaaatcttgatagctaaataacttgccatttctttatatggaacgcattttgggttgtttaaaaatttataacagttataaagaaagattgtaaactaaagtgtgctttataaaaaaaagttgtttataaaaacccctaaaaacaaaacaaacacacacacacacacatacacacacacacacaaaactttgaggcagcgcattgttttgcatccttttggcgtgatatccatatgaaattcatggctttttctttttttgcatattaaagataagacttcctctaccaccacaccaaatgactactacacactgctcatttgagaactgtcagctgagtggggcaggcttgagttttcatttcatatatctatatgtctataagtatataaatactatagttatatagataaagagatacgaatttctatagactgactttttccattttttaaatgttcatgtcacatcctaatagaaagaaattacttctagtcagtcatccaggcttacctgcttggtctagaatggatttttcccggagccggaagccaggaggaaactacaccacactaaaacattgtctacagctccagatgtttctcattttaaacaactttccactgacaacgaaagtaaagtaaagtattggatttttttaaagggaacatgtgaatgaatacacaggacttattatatcagagtgagtaatcggttggttggttgattgattgattgattgatacattcagcttcctgctgctagcaatgccacgatttagatttaatgatgcttcagtggaaatcaatcagaaggtattctgaccttgtgaacatcagaaggtattttttaactcccaagcagtagcaggacgatgatagggctggagggctatggattcccagcccatccctgtgaaggagtaggccactctttaagtgaaggattggatgattgttcataatacataaagttctctgtaattacaactaaattattatgccctcttctcacagtcaaaaggaactgggtggtttggtttttgttgcttttttagatttattgtcccatgtgggatgagtttttaaatgccacaagacataatttaaaataaataaactttgggaaaaggtgtaagacagtagccccatcacatttgtgatactgacaggtatcaacccagaagcccatgaactgtgtttccatcctttgcatttctctgcgagtagttccacacaggtttgtaagtaagtaagaaagaaggcaaattgattcaaatgttacaaaaaaacccttcttggtggattagacaggttaaatatataaacaaacaaacaaaaattgctcaaaaaagaggagaaaagctcaagaggaaaagctaaggactggtaggaaaaagctttactctttcatgccattttatttctttttgatttttaaatcattcattcaatagataccaccgtgtgacctataattttgcaaatctgttacctctgacatcaagtgtaattagcttttggagagtgggctgacatcaagtgtaattagcttttggagagtgggttttgtccattattaataattaattaattaacatcaaacacggcttctcatgctatttctacctcactttggttttggggtgttcctgataattgtgcacacctgagttcacagcttcaccacttgtccattgcgttattttctttttcctttataattctttctttttccttcataattttcaaaagaaaacccaaagctctaaggtaacaaattaccaaattacatgaagatttggtttttgtcttgcatttttttcctttatgtgacgctggaccttttctttacccaaggatttttaaaactcagatttaaaacaaggggttactttacatcctactaagaagtttaagtaagtaagtttcattctaaaatcagaggtaaatagagtgcataaataattttgttttaatctttttgtttttcttttagacacattagctctggagtgagtctgtcataatatttgaacaaaaattgagagctttattgctgcattttaagcataattaatttggacattatttcgtgttgtgttctttataaccaccgagtattaaactgtaaatcataatgtaactgaagcataaacatcacatggcatgttttgtcattgttttcaggtactgagttcttacttgagtatcataatatattgtgttttaacaccaacactgtaacatttacgaattatttttttaaacttcagttttactgcattttcacaacatatcagacttcaccaaatatatgccttactattgtattatagtactgctttactgtgtatctcaataaagcacgcagttatgttac

SEQ ID NO: 2081 - protein, 635 aa, Homo sapiens
MREQLKGHETQTTCWDHPKMTELYQSLADLNNVRFSAYRTAMKLRRLQKALCLDLLSLSAACDALDQHNLKQNDQPMDILQIINCLTTIYDRLEQEHNNLVNVPLCVDMCLNWLLNVYDTGRTGRIRVLSFKTGIISLCKAHLEDKYRYLFKQVASSTGFCDQRRLGLLLHDSIQIPRQLGEVASFGGSNIEPSVRSCFQFANNKPEIEAALFLDWMRLEPQSMVWLPVLHRVAAAETAKHQAKCNICKECPIIGFRYRSLKHFNYDICQSCFFSGRVAKGHKMHYPMVEYCTPTTSGEDVRDFAKVLKNKFRTKRYFAKHPRMGYLPVQTVLEGDNMETPVTLINFWPVDSAPASSPQLSHDDTHSRIEHYASRLAEMENSNGSYLNDSISPNESIDDEHLLIQHYCQSLNQDSPLSQPRSPAQILISLESEERGELERILADLEEENRNLQAEYDRLKQQHEHKGLSPLPSPPEMMPTSPQSPRDAELIAEAKLLRQHKGRLEARMQILEDHNKQLESQLHRLRQLLEQPQAEAKVNGTTVSSPSTSLQRSDSSQPMLLRVVGSQTSDSMGEEDLLSPPQDTSTGLEEVMEQLNNSFPSSRGHNVGSLFHMADDLGRAMESLVSVMTDEEGAE

SEQ ID NO: 2082 - DNA, 4584 bp, Homo sapiens
actttcggggagcccggcggctctgggaagctcactcctccactcgtacccacactcgaccgcggagcccttgcagccatgagggaacagctcaaaggccacgagactcaaacaacttgctgggaccatcccaaaatgacagagctctaccagtctttagctgacctgaataatgtcagattctcagcttataggactgccatgaaactccgaagactgcagaaggccctttgcttggatctcttgagcctgtcagctgcatgtgatgccttggaccagcacaacctcaagcaaaatgaccagcccatggatatcctgcagattattaattgtttgaccactatttatgaccgcctggagcaagagcacaacaatttggtcaacgtccctctctgcgtggatatgtgtctgaactggctgctgaatgtttatgatacgggacgaacagggaggatccgtgtcctgtcttttaaaactggcatcatttccctgtgtaaagcacatttggaagacaagtacagataccttttcaagcaagtggcaagttcaacaggattttgtgaccagcgcaggctgggcctccttctgcatgattctatccaaattccaagacagttgggtgaagttgcatcctttgggggcagtaacattgagccaagtgtccggagctgcttccaatttgctaataataagccagagatcgaagcggccctcttcctagactggatgagactggaaccccagtccatggtgtggctgcccgtcctgcacagagtggctgctgcagaaactgccaagcatcaggccaaatgtaacatctgcaaagagtgtccaatcattggattcaggtacaggagtctaaagcactttaattatgacatctgccaaagctgctttttttctggtcgagttgcaaaaggccataaaatgcactatcccatggtggaatattgcactccgactacatcaggagaagatgttcgagactttgccaaggtactaaaaaacaaatttcgaaccaaaaggtattttgcgaagcatccccgaatgggctacctgccagtgcagactgtcttagagggggacaacatggaaacgcctgcctcgtcccctcagctttcacacgatgatactcattcacgcattgaacattatgctagcaggctagcagaaatggaaaacagcaatggatcttatctaaatgatagcatctctcctaatgagagcatagatgatgaacatttgttaatccagcattactgccaaagtttgaaccaggactcccccctgagccagcctcgtagtcctgcccagatcttgatttccttagagagtgaggaaagaggggagctagagagaatcctagcagatcttgaggaagaaaacaggaatctgcaagcagaatatgaccgtctaaagcagcagcacgaacataaaggcctgtccccactgccgtcccctcctgaaatgatgcccacctctccccagagtccccgggatgctgagctcattgctgaggccaagctactgcgtcaacacaaaggccgcctggaagccaggatgcaaatcctggaagaccacaataaacagctggagtcacagttacacaggctaaggcagctgctggagcaaccccaggcagaggccaaagtgaatggcacaacggtgtcctctccttctacctctctacagaggtccgacagcagtcagcctatgctgctccgagtggttggcagtcaaacttcggactccatgggtgaggaagatcttctcagtcctccccaggacacaagcacagggttagaggaggtgatggagcaactcaacaactccttccctagttcaagaggaagaaatacccctggaaagccaatgagagaggacacaatgtaggaagtcttttccacatggcagatgatttgggcagagcgatggagtccttagtatcagtcatgacagatgaagaaggagcagaataaatgttttacaactcctgattcccgcatggtttttataatattcatacaacaaagaggattagacagtaagagtttacaagaaataaatctatatttttgtgaagggtagtggtattatactgtagatttcagtagtttctaagtctgttattgttttgttaacaatggcaggttttacacgtctatgcaattgtacaaaaaagttataagaaaactacatgtaaaatcttgatagctaaataacttgccatttctttatatggaacgcattttgggttgtttaaaaatttataacagttataaagaaagattgtaaactaaagtgtgctttataaaaaaaagttgtttataaaaacccctaaaaacaaaacaaacacacacacacacacatacacacacacacacaaaactttgaggcagcgcattgttttgcatccttttggcgtgatatccatatgaaattcatggctttttctttttttgcatattaaagataagacttcctctaccaccacaccaaatgactactacacactgctcatttgagaactgtcagctgagtggggcaggcttgagttttcatttcatatatctatatgtctataagtatataaatactatagttatatagataaagagatacgaatttctatagactgactttttccattttttaaatgttcatgtcacatcctaatagaaagaaattacttctagtcagtcatccaggcttacctgcttggtctagaatggatttttcccggagccggaagccaggaggaaactacaccacactaaaacattgtctacagctccagatgtttctcattttaaacaactttccactgacaacgaaagtaaagtaaagtattggatttttttaaagggaacatgtgaatgaatacacaggacttattatatcagagtgagtaatcggttggttggttgattgattgattgattgatacattcagcttcctgctgctagcaatgccacgatttagatttaatgatgcttcagtggaaatcaatcagaaggtattctgaccttgtgaacatcagaaggtattttttaactcccaagcagtagcaggacgatgatagggctggagggctatggattcccagcccatccctgtgaaggagtaggccactctttaagtgaaggattggatgattgttcataatacataaagttctctgtaattacaactaaattattatgccctcttctcacagtcaaaaggaactgggtggtttggtttttgttgcttttttagatttattgtcccatgtgggatgagtttttaaatgccacaagacataatttaaaataaataaactttgggaaaaggtgtaagacagtagccccatcacatttgtgatactgacaggtatcaacccagaagcccatgaactgtgtttccatcctttgcatttctctgcgagtagttccacacaggtttgtaagtaagtaagaaagaaggcaaattgattcaaatgttacaaaaaaacccttcttggtggattagacaggttaaatatataaacaaacaaacaaaaattgctcaaaaaagaggagaaaagctcaagaggaaaagctaaggactggtaggaaaaagctttactctttcatgccattttatttctttttgatttttaaatcattcattcaatagataccaccgtgtgacctataattttgcaaatctgttacctctgacatcaagtgtaattagcttttggagagtgggctgacatcaagtgtaattagcttttggagagtgggttttgtccattattaataattaattaattaacatcaaacacggcttctcatgctatttctacctcactttggttttggggtgttcctgataattgtgcacacctgagttcacagcttcaccacttgtccattgcgttattttctttttcctttataattctttctttttccttcataattttcaaaagaaaacccaaagctctaaggtaacaaattaccaaattacatgaagatttggtttttgtcttgcatttttttcctttatgtgacgctggaccttttctttacccaaggatttttaaaactcagatttaaaacaaggggttactttacatcctactaagaagtttaagtaagtaagtttcattctaaaatcagaggtaaatagagtgcataaataattttgttttaatctttttgtttttcttttagacacattagctctggagtgagtctgtcataatatttgaacaaaaattgagagctttattgctgcattttaagcataattaatttggacattatttcgtgttgtgttctttataaccaccgagtattaaactgtaaatcataatgtaactgaagcataaacatcacatggcatgttttgtcattgttttcaggtactgagttcttacttgagtatcataatatattgtgttttaacaccaacactgtaacatttacgaattatttttttaaacttcagttttactgcattttcacaacatatcagacttcaccaaatatatgccttactattgtattatagtactgctttactgtgtatctcaataaagcacgcagttatgttac

SEQ ID NO: 2083 - protein, 604 aa, Homo sapiens
MREQLKGHETQTTCWDHPKMTELYQSLADLNNVRFSAYRTAMKLRRLQKALCLDLLSLSAACDALDQHNLKQNDQPMDILQIINCLTTIYDRLEQEHNNLVNVPLCVDMCLNWLLNVYDTGRTGRIRVLSFKTGIISLCKAHLEDKYRYLFKQVASSTGFCDQRRLGLLLHDSIQIPRQLGEVASFGGSNIEPSVRSCFQFANNKPEIEAALFLDWMRLEPQSMVWLPVLHRVAAAETAKHQAKCNICKECPIIGFRYRSLKHFNYDICQSCFFSGRVAKGHKMHYPMVEYCTPTTSGEDVRDFAKVLKNKFRTKRYFAKHPRMGYLPVQTVLEGDNMETPASSPQLSHDDTHSRIEHYASRLAEMENSNGSYLNDSISPNESIDDEHLLIQHYCQSLNQDSPLSQPRSPAQILISLESEERGELERILADLEEENRNLQAEYDRLKQQHEHKGLSPLPSPPEMMPTSPQSPRDAELIAEAKLLRQHKGRLEARMQILEDHNKQLESQLHRLRQLLEQPQAEAKVNGTTVSSPSTSLQRSDSSQPMLLRVVGSQTSDSMGEEDLLSPPQDTSTGLEEVMEQLNNSFPSSRGRNTPGKPMREDTM

SEQ ID NO: 2084 - DNA, 4552 bp, Homo sapiens
actttcggggagcccggcggctctgggaagctcactcctccactcgtacccacactcgaccgcggagcccttgcagccatgagggaacagctcaaaggccacgagactcaaacaacttgctgggaccatcccaaaatgacagagctctaccagtctttagctgacctgaataatgtcagattctcagcttataggactgccatgaaactccgaagactgcagaaggccctttgcttggatctcttgagcctgtcagctgcatgtgatgccttggaccagcacaacctcaagcaaaatgaccagcccatggatatcctgcagattattaattgtttgaccactatttatgaccgcctggagcaagagcacaacaatttggtcaacgtccctctctgcgtggatatgtgtctgaactggctgctgaatgtttatgatacgggacgaacagggaggatccgtgtcctgtcttttaaaactggcatcatttccctgtgtaaagcacatttggaagacaagtacagataccttttcaagcaagtggcaagttcaacaggattttgtgaccagcgcaggctgggcctccttctgcatgattctatccaaattccaagacagttgggtgaagttgcatcctttgggggcagtaacattgagccaagtgtccggagctgcttccaatttgctaataataagccagagatcgaagcggccctcttcctagactggatgagactggaaccccagtccatggtgtggctgcccgtcctgcacagagtggctgctgcagaaactgccaagcatcaggccaaatgtaacatctgcaaagagtgtccaatcattggattcaggtacaggagtctaaagcactttaattatgacatctgccaaagctgctttttttctggtcgagttgcaaaaggccataaaatgcactatcccatggtggaatattgcactccgactacatcaggagaagatgttcgagactttgccaaggtactaaaaaacaaatttcgaaccaaaaggtattttgcgaagcatccccgaatgggctacctgccagtgcagactgtcttagagggggacaacatggaaacgcctgcctcgtcccctcagctttcacacgatgatactcattcacgcattgaacattatgctagcaggctagcagaaatggaaaacagcaatggatcttatctaaatgatagcatctctcctaatgagagcatagatgatgaacatttgttaatccagcattactgccaaagtttgaaccaggactcccccctgagccagcctcgtagtcctgcccagatcttgatttccttagagagtgaggaaagaggggagctagagagaatcctagcagatcttgaggaagaaaacaggaatctgcaagcagaatatgaccgtctaaagcagcagcacgaacataaaggcctgtccccactgccgtcccctcctgaaatgatgcccacctctccccagagtccccgggatgctgagctcattgctgaggccaagctactgcgtcaacacaaaggccgcctggaagccaggatgcaaatcctggaagaccacaataaacagctggagtcacagttacacaggctaaggcagctgctggagcaaccccaggcagaggccaaagtgaatggcacaacggtgtcctctccttctacctctctacagaggtccgacagcagtcagcctatgctgctccgagtggttggcagtcaaacttcggactccatgggtgaggaagatcttctcagtcctccccaggacacaagcacagggttagaggaggtgatggagcaactcaacaactccttccctagttcaagaggacacaatgtaggaagtcttttccacatggcagatgatttgggcagagcgatggagtccttagtatcagtcatgacagatgaagaaggagcagaataaatgttttacaactcctgattcccgcatggtttttataatattcatacaacaaagaggattagacagtaagagtttacaagaaataaatctatatttttgtgaagggtagtggtattatactgtagatttcagtagtttctaagtctgttattgttttgttaacaatggcaggttttacacgtctatgcaattgtacaaaaaagttataagaaaactacatgtaaaatcttgatagctaaataacttgccatttctttatatggaacgcattttgggttgtttaaaaatttataacagttataaagaaagattgtaaactaaagtgtgctttataaaaaaaagttgtttataaaaacccctaaaaacaaaacaaacacacacacacacacatacacacacacacacaaaactttgaggcagcgcattgttttgcatccttttggcgtgatatccatatgaaattcatggctttttctttttttgcatattaaagataagacttcctctaccaccacaccaaatgactactacacactgctcatttgagaactgtcagctgagtggggcaggcttgagttttcatttcatatatctatatgtctataagtatataaatactatagttatatagataaagagatacgaatttctatagactgactttttccattttttaaatgttcatgtcacatcctaatagaaagaaattacttctagtcagtcatccaggcttacctgcttggtctagaatggatttttcccggagccggaagccaggaggaaactacaccacactaaaacattgtctacagctccagatgtttctcattttaaacaactttccactgacaacgaaagtaaagtaaagtattggatttttttaaagggaacatgtgaatgaatacacaggacttattatatcagagtgagtaatcggttggttggttgattgattgattgattgatacattcagcttcctgctgctagcaatgccacgatttagatttaatgatgcttcagtggaaatcaatcagaaggtattctgaccttgtgaacatcagaaggtattttttaactcccaagcagtagcaggacgatgatagggctggagggctatggattcccagcccatccctgtgaaggagtaggccactctttaagtgaaggattggatgattgttcataatacataaagttctctgtaattacaactaaattattatgccctcttctcacagtcaaaaggaactgggtggtttggtttttgttgcttttttagatttattgtcccatgtgggatgagtttttaaatgccacaagacataatttaaaataaataaactttgggaaaaggtgtaagacagtagccccatcacatttgtgatactgacaggtatcaacccagaagcccatgaactgtgtttccatcctttgcatttctctgcgagtagttccacacaggtttgtaagtaagtaagaaagaaggcaaattgattcaaatgttacaaaaaaacccttcttggtggattagacaggttaaatatataaacaaacaaacaaaaattgctcaaaaaagaggagaaaagctcaagaggaaaagctaaggactggtaggaaaaagctttactctttcatgccattttatttctttttgatttttaaatcattcattcaatagataccaccgtgtgacctataattttgcaaatctgttacctctgacatcaagtgtaattagcttttggagagtgggctgacatcaagtgtaattagcttttggagagtgggttttgtccattattaataattaattaattaacatcaaacacggcttctcatgctatttctacctcactttggttttggggtgttcctgataattgtgcacacctgagttcacagcttcaccacttgtccattgcgttattttctttttcctttataattctttctttttccttcataattttcaaaagaaaacccaaagctctaaggtaacaaattaccaaattacatgaagatttggtttttgtcttgcatttttttcctttatgtgacgctggaccttttctttacccaaggatttttaaaactcagatttaaaacaaggggttactttacatcctactaagaagtttaagtaagtaagtttcattctaaaatcagaggtaaatagagtgcataaataattttgttttaatctttttgtttttcttttagacacattagctctggagtgagtctgtcataatatttgaacaaaaattgagagctttattgctgcattttaagcataattaatttggacattatttcgtgttgtgttctttataaccaccgagtattaaactgtaaatcataatgtaactgaagcataaacatcacatggcatgttttgtcattgttttcaggtactgagttcttacttgagtatcataatatattgtgttttaacaccaacactgtaacatttacgaattatttttttaaacttcagttttactgcattttcacaacatatcagacttcaccaaatatatgccttactattgtattatagtactgctttactgtgtatctcaataaagcacgcagttatgttac

SEQ ID NO: 2085 - protein, 622 aa, Homo sapiens
MREQLKGHETQTTCWDHPKMTELYQSLADLNNVRFSAYRTAMKLRRLQKALCLDLLSLSAACDALDQHNLKQNDQPMDILQIINCLTTIYDRLEQEHNNLVNVPLCVDMCLNWLLNVYDTGRTGRIRVLSFKTGIISLCKAHLEDKYRYLFKQVASSTGFCDQRRLGLLLHDSIQIPRQLGEVASFGGSNIEPSVRSCFQFANNKPEIEAALFLDWMRLEPQSMVWLPVLHRVAAAETAKHQAKCNICKECPIIGFRYRSLKHFNYDICQSCFFSGRVAKGHKMHYPMVEYCTPTTSGEDVRDFAKVLKNKFRTKRYFAKHPRMGYLPVQTVLEGDNMETPASSPQLSHDDTHSRIEHYASRLAEMENSNGSYLNDSISPNESIDDEHLLIQHYCQSLNQDSPLSQPRSPAQILISLESEERGELERILADLEEENRNLQAEYDRLKQQHEHKGLSPLPSPPEMMPTSPQSPRDAELIAEAKLLRQHKGRLEARMQILEDHNKQLESQLHRLRQLLEQPQAEAKVNGTTVSSPSTSLQRSDSSQPMLLRVVGSQTSDSMGEEDLLSPPQDTSTGLEEVMEQLNNSFPSSRGHNVGSLFHMADDLGRAMESLVSVMTDEEGAE

SEQ ID NO: 2086 - DNA, 1571 bp, Homo sapiens
actttcggggagcccggcggctctgggaagctcactcctccactcgtacccacactcgaccgcggagcccttgcagccatgagggaacagctcaaaggccacgagactcaaacaacttgctgggaccatcccaaaatgacagagctctaccagtctttagctgacctgaataatgtcagattctcagcttataggactgccatgaaactccgaagactgcagaaggccctttgcttggatctcttgagcctgtcagctgcatgtgatgccttggaccagcacaacctcaagcaaaatgaccagcccatggatatcctgcagattattaattgtttgaccactatttatgaccgcctggagcaagagcacaacaatttggtcaacgtccctctctgcgtggatatgtgtctgaactggctgctgaatgtttatgatacgggacgaacagggaggatccgtgtcctgtcttttaaaactggcatcatttccctgtgtaaagcacatttggaagacaagtacagataccttttcaagcaagtggcaagttcaacaggattttgtgaccagcgcaggctgggcctccttctgcatgattctatccaaattccaagacagttgggtgaagttgcatcctttgggggcagtaacattgagccaagtgtccggagctgcttccaatttgctaataataagccagagatcgaagcggccctcttcctagactggatgagactggaaccccagtccatggtgtggctgcccgtcctgcacagagtggctgctgcagaaactgccaagcatcaggccaaatgtaacatctgcaaagagtgtccaatcattggattcaggtacaggagtctaaagcactttaattatgacatctgccaaagctgctttttttctggtcgagttgcaaaaggccataaaatgcactatcccatggtggaatattgcactccgactacatcaggagaagatgttcgagactttgccaaggtactaaaaaacaaatttcgaaccaaaaggtattttgcgaagcatccccgaatgggctacctgccagtgcagactgtcttagagggggacaacatggaaacgtgagtagtagcaaaagcagaacacactcttgtttgatgtatatttgaactcctctcagctgaacaccctccttcactcccaaatgcaaacagtctcttctatttctttctttttatttacattagctgaaaagagaaaaataagctgatgtccagttgccactttcccacgtcacttgacaatttctttttccaaaagttaaactttatctcacagggggaaaaaaaaaaaaaaaccacaacacaatacagccactaattgccttacaagccttataagaaatatgggactgtttacaaatgagtgattccagtatttcattttgattttcctctctcacaaatcagtaaatgtgtgtctttttgtatctcattgtgtggtcatatctagtcacttgtttctactcaaaagaaaatatagtcacaggaaactacttcacagtaagtagtaatgattctcaagatcaaagggga

SEQ ID NO: 2087 - protein, 340 aa, Homo sapiens
MREQLKGHETQTTCWDHPKMTELYQSLADLNNVRFSAYRTAMKLRRLQKALCLDLLSLSAACDALDQHNLKQNDQPMDILQIINCLTTIYDRLEQEHNNLVNVPLCVDMCLNWLLNVYDTGRTGRIRVLSFKTGIISLCKAHLEDKYRYLFKQVASSTGFCDQRRLGLLLHDSIQIPRQLGEVASFGGSNIEPSVRSCFQFANNKPEIEAALFLDWMRLEPQSMVWLPVLHRVAAAETAKHQAKCNICKECPIIGFRYRSLKHFNYDICQSCFFSGRVAKGHKMHYPMVEYCTPTTSGEDVRDFAKVLKNKFRTKRYFAKHPRMGYLPVQTVLEGDNMET

SEQ ID NO: 2088 - DNA, 7050 bp, Homo sapiens
acactagcaatggcaaagctttgtgcggaggcattgctggctgctctgaactaaaagcatccgtggggaccgaaagaggtttttgcacaccttattaaggaactccaggatggcattgggcagcggcaaactgttgtcagaacattgaatgcaactggggaagaaataattcagcaatcctcaaaaacagatgccagtattctacaggaaaaattgggaagcctgaatctgcggtggcaggaggtctgcaaacagctgtcagacagaaaaaagaggctagaagaacaaaagaatatcttgtcagaatttcaaagagatttaaatgaatttgttttatggttggaggaagcagataacattgctagtatcccacttgaacctggaaaagagcagcaactaaaagaaaagcttgagcaagtcaagttactggtggaagagttgcccctgcgccagggaattctcaaacaattaaatgaaactggaggacccgtgcttgtaagtgctcccataagcccagaagagcaagataaacttgaaaataagctcaagcagacaaatctccagtggataaaggtttccagagctttacctgagaaacaaggagaaattgaagctcaaataaaagaccttgggcagcttgaaaaaaagcttgaagaccttgaagagcagttaaatcatctgctgctgtggttatctcctattaggaatcagttggaaatttataaccaaccaaaccaagaaggaccatttgacgttcaggaaactgaaatagcagttcaagctaaacaaccggatgtggaagagattttgtctaaagggcagcatttgtacaaggaaaaaccagccactcagccagtgaagaggaagttagaagatctgagctctgagtggaaggcggtaaaccgtttacttcaagagctgagggcaaagcagcctgacctagctcctggactgaccactattggagcctctcctactcagactgttactctggtgacacaacctgtggttactaaggaaactgccatctccaaactagaaatgccatcttccttgatgttggaggtacctgctctggcagatttcaaccgggcttggacagaacttaccgactggctttctctgcttgatcaagttataaaatcacagagggtgatggtgggtgaccttgaggatatcaacgagatgatcatcaagcagaaggcaacaatgcaggatttggaacagaggcgtccccagttggaagaactcattaccgctgcccaaaatttgaaaaacaagaccagcaatcaagaggctagaacaatcattacggatcgaattgaaagaattcagaatcagtgggatgaagtacaagaacaccttcagaaccggaggcaacagttgaatgaaatgttaaaggattcaacacaatggctggaagctaaggaagaagctgagcaggtcttaggacaggccagagccaagcttgagtcatggaaggagggtccctatacagtagatgcaatccaaaagaaaatcacagaaaccaagcagttggccaaagacctccgccagtggcagacaaatgtagatgtggcaaatgacttggccctgaaacttctccgggattattctgcagatgataccagaaaagtccacatgataacagagaatatcaatgcctcttggagaagcattcataaaagggtgagtgagcgagaggctgctttggaagaaactcatagattactgcaacagttccccctggacctggaaaagtttcttgcctggcttacagaagctgaaacaactgccaatgtcctacaggatgctacccgtaaggaaaggctcctagaagactccaagggagtaaaagagctgatgaaacaatggcaagacctccaaggtgaaattgaagctcacacagatgtttatcacaacctggatgaaaacagccaaaaaatcctgagatccctggaaggttccgatgatgcagtcctgttacaaagacgtttggataacatgaacttcaagtggagtgaacttcggaaaaagtctctcaacattaggtcccatttggaagccagttctgaccagtggaagcgtctgcacctttctctgcaggaacttctggtgtggctacagctgaaagatgatgaattaagccggcaggcacctattggaggcgactttccagcagttcagaagcagaacgatgtacatagggccttcaagagggaattgaaaactaaagaacctgtaatcatgagtactcttgagactgtacgaatatttctgacagagcagcctttggaaggactagagaaactctaccaggagcccagagagctgcctcctgaggagagagcccagaatgtcactcggcttctacgaaagcaggctgaggaggtcaatactgagtgggaaaaattgaacctgcactccgctgactggcagagaaaaatagatgagacccttgaaagactccaggaacttcaagaggccacggatgagctggacctcaagctgcgccaagctgaggtgatcaagggatcctggcagcccgtgggcgatctcctcattgactctctccaagatcacctcgagaaagtcaaggcacttcgaggagaaattgcgcctctgaaagagaacgtgagccacgtcaatgaccttgctcgccagcttaccactttgggcattcagctctcaccgtataacctcagcactctggaagacctgaacaccagatggaagcttctgcaggtggccgtcgaggaccgagtcaggcagctgcatgaagcccacagggactttggtccagcatctcagcactttctttccacgtctgtccagggtccctgggagagagccatctcgccaaacaaagtgccctactatatcaaccacgagactcaaacaacttgctgggaccatcccaaaatgacagagctctaccagtctttagctgacctgaataatgtcagattctcagcttataggactgccatgaaactccgaagactgcagaaggccctttgcttggatctcttgagcctgtcagctgcatgtgatgccttggaccagcacaacctcaagcaaaatgaccagcccatggatatcctgcagattattaattgtttgaccactatttatgaccgcctggagcaagagcacaacaatttggtcaacgtccctctctgcgtggatatgtgtctgaactggctgctgaatgtttatgatacgggacgaacagggaggatccgtgtcctgtcttttaaaactggcatcatttccctgtgtaaagcacatttggaagacaagtacagataccttttcaagcaagtggcaagttcaacaggattttgtgaccagcgcaggctgggcctccttctgcatgattctatccaaattccaagacagttgggtgaagttgcatcctttgggggcagtaacattgagccaagtgtccggagctgcttccaatttgctaataataagccagagatcgaagcggccctcttcctagactggatgagactggaaccccagtccatggtgtggctgcccgtcctgcacagagtggctgctgcagaaactgccaagcatcaggccaaatgtaacatctgcaaagagtgtccaatcattggattcaggtacaggagtctaaagcactttaattatgacatctgccaaagctgctttttttctggtcgagttgcaaaaggccataaaatgcactatcccatggtggaatattgcactccgactacatcaggagaagatgttcgagactttgccaaggtactaaaaaacaaatttcgaaccaaaaggtattttgcgaagcatccccgaatgggctacctgccagtgcagaatctgcaagcagaatatgaccgtctaaagcagcagcacgaacataaaggcctgtccccactgccgtcccctcctgaaatgatgcccacctctccccagagtccccgggatgctgagctcattgctgaggccaagctactgcgtcaacacaaaggccgcctggaagccaggatgcaaatcctggaagaccacaataaacagctggagtcacagttacacaggctaaggcagctgctggagcaaccccaggcagaggccaaagtgaatggcacaacggtgtcctctccttctacctctctacagaggtccgacagcagtcagcctatgctgctccgagtggttggcagtcaaacttcggactccatgggtgaggaagatcttctcagtcctccccaggacacaagcacagggttagaggaggtgatggagcaactcaacaactccttccctagttcaagaggaagaaatacccctggaaagccaatgagagaggacacaatgtaggaagtcttttccacatggcagatgatttgggcagagcgatggagtccttagtatcagtcatgacagatgaagaaggagcagaataaatgttttacaactcctgattcccgcatggtttttataatattcatacaacaaagaggattagacagtaagagtttacaagaaataaatctatatttttgtgaagggtagtggtattatactgtagatttcagtagtttctaagtctgttattgttttgttaacaatggcaggttttacacgtctatgcaattgtacaaaaaagttataagaaaactacatgtaaaatcttgatagctaaataacttgccatttctttatatggaacgcattttgggttgtttaaaaatttataacagttataaagaaagattgtaaactaaagtgtgctttataaaaaaaagttgtttataaaaacccctaaaaacaaaacaaacacacacacacacacatacacacacacacacaaaactttgaggcagcgcattgttttgcatccttttggcgtgatatccatatgaaattcatggctttttctttttttgcatattaaagataagacttcctctaccaccacaccaaatgactactacacactgctcatttgagaactgtcagctgagtggggcaggcttgagttttcatttcatatatctatatgtctataagtatataaatactatagttatatagataaagagatacgaatttctatagactgactttttccattttttaaatgttcatgtcacatcctaatagaaagaaattacttctagtcagtcatccaggcttacctgcttggtctagaatggatttttcccggagccggaagccaggaggaaactacaccacactaaaacattgtctacagctccagatgtttctcattttaaacaactttccactgacaacgaaagtaaagtaaagtattggatttttttaaagggaacatgtgaatgaatacacaggacttattatatcagagtgagtaatcggttggttggttgattgattgattgattgatacattcagcttcctgctgctagcaatgccacgatttagatttaatgatgcttcagtggaaatcaatcagaaggtattctgaccttgtgaacatcagaaggtattttttaactcccaagcagtagcaggacgatgatagggctggagggctatggattcccagcccatccctgtgaaggagtaggccactctttaagtgaaggattggatgattgttcataatacataaagttctctgtaattacaactaaattattatgccctcttctcacagtcaaaaggaactgggtggtttggtttttgttgcttttttagatttattgtcccatgtgggatgagtttttaaatgccacaagacataatttaaaataaataaactttgggaaaaggtgtaagacagtagccccatcacatttgtgatactgacaggtatcaacccagaagcccatgaactgtgtttccatcctttgcatttctctgcgagtagttccacacaggtttgtaagtaagtaagaaagaaggcaaattgattcaaatgttacaaaaaaacccttcttggtggattagacaggttaaatatataaacaaacaaacaaaaattgctcaaaaaagaggagaaaagctcaagaggaaaagctaaggactggtaggaaaaagctttactctttcatgccattttatttctttttgatttttaaatcattcattcaatagataccaccgtgtgacctataattttgcaaatctgttacctctgacatcaagtgtaattagcttttggagagtgggctgacatcaagtgtaattagcttttggagagtgggttttgtccattattaataattaattaattaacatcaaacacggcttctcatgctatttctacctcactttggttttggggtgttcctgataattgtgcacacctgagttcacagcttcaccacttgtccattgcgttattttctttttcctttataattctttctttttccttcataattttcaaaagaaaacccaaagctctaaggtaacaaattaccaaattacatgaagatttggtttttgtcttgcatttttttcctttatgtgacgctggaccttttctttacccaaggatttttaaaactcagatttaaaacaaggggttactttacatcctactaagaagtttaagtaagtaagtttcattctaaaatcagaggtaaatagagtgcataaataattttgttttaatctttttgtttttcttttagacacattagctctggagtgagtctgtcataatatttgaacaaaaattgagagctttattgctgcattttaagcataattaatttggacattatttcgtgttgtgttctttataaccaccgagtattaaactgtaaatcataatgtaactgaagcataaacatcacatggcatgttttgtcattgttttcaggtactgagttcttacttgagtatcataatatattgtgttttaacaccaacactgtaacatttacgaattatttttttaaacttcagttttactgcattttcacaacatatcagacttcaccaaatatatgccttactattgtattatagtactgctttactgtgtatctcaataaagcacgcagttatgttac

SEQ ID NO: 2089 - protein, 1105 aa, Homo sapiens
MPSSLMLEVPALADFNRAWTELTDWLSLLDQVIKSQRVMVGDLEDINEMIIKQKATMQDLEQRRPQLEELITAAQNLKNKTSNQEARTIITDRIERIQNQWDEVQEHLQNRRQQLNEMLKDSTQWLEAKEEAEQVLGQARAKLESWKEGPYTVDAIQKKITETKQLAKDLRQWQTNVDVANDLALKLLRDYSADDTRKVHMITENINASWRSIHKRVSEREAALEETHRLLQQFPLDLEKFLAWLTEAETTANVLQDATRKERLLEDSKGVKELMKQWQDLQGEIEAHTDVYHNLDENSQKILRSLEGSDDAVLLQRRLDNMNFKWSELRKKSLNIRSHLEASSDQWKRLHLSLQELLVWLQLKDDELSRQAPIGGDFPAVQKQNDVHRAFKRELKTKEPVIMSTLETVRIFLTEQPLEGLEKLYQEPRELPPEERAQNVTRLLRKQAEEVNTEWEKLNLHSADWQRKIDETLERLQELQEATDELDLKLRQAEVIKGSWQPVGDLLIDSLQDHLEKVKALRGEIAPLKENVSHVNDLARQLTTLGIQLSPYNLSTLEDLNTRWKLLQVAVEDRVRQLHEAHRDFGPASQHFLSTSVQGPWERAISPNKVPYYINHETQTTCWDHPKMTELYQSLADLNNVRFSAYRTAMKLRRLQKALCLDLLSLSAACDALDQHNLKQNDQPMDILQIINCLTTIYDRLEQEHNNLVNVPLCVDMCLNWLLNVYDTGRTGRIRVLSFKTGIISLCKAHLEDKYRYLFKQVASSTGFCDQRRLGLLLHDSIQIPRQLGEVASFGGSNIEPSVRSCFQFANNKPEIEAALFLDWMRLEPQSMVWLPVLHRVAAAETAKHQAKCNICKECPIIGFRYRSLKHFNYDICQSCFFSGRVAKGHKMHYPMVEYCTPTTSGEDVRDFAKVLKNKFRTKRYFAKHPRMGYLPVQNLQAEYDRLKQQHEHKGLSPLPSPPEMMPTSPQSPRDAELIAEAKLLRQHKGRLEARMQILEDHNKQLESQLHRLRQLLEQPQAEAKVNGTTVSSPSTSLQRSDSSQPMLLRVVGSQTSDSMGEEDLLSPPQDTSTGLEEVMEQLNNSFPSSRGRNTPGKPMREDTM

SEQ ID NO: 2090 - DNA, 7378 bp, Homo sapiens
acactagcaatggcaaagctttgtgcggaggcattgctggctgctctgaactaaaagcatccgtggggaccgaaagaggtttttgcacaccttattaaggaactccaggatggcattgggcagcggcaaactgttgtcagaacattgaatgcaactggggaagaaataattcagcaatcctcaaaaacagatgccagtattctacaggaaaaattgggaagcctgaatctgcggtggcaggaggtctgcaaacagctgtcagacagaaaaaagaggctagaagaacaaaagaatatcttgtcagaatttcaaagagatttaaatgaatttgttttatggttggaggaagcagataacattgctagtatcccacttgaacctggaaaagagcagcaactaaaagaaaagcttgagcaagtcaagttactggtggaagagttgcccctgcgccagggaattctcaaacaattaaatgaaactggaggacccgtgcttgtaagtgctcccataagcccagaagagcaagataaacttgaaaataagctcaagcagacaaatctccagtggataaaggtttccagagctttacctgagaaacaaggagaaattgaagctcaaataaaagaccttgggcagcttgaaaaaaagcttgaagaccttgaagagcagttaaatcatctgctgctgtggttatctcctattaggaatcagttggaaatttataaccaaccaaaccaagaaggaccatttgacgttcaggaaactgaaatagcagttcaagctaaacaaccggatgtggaagagattttgtctaaagggcagcatttgtacaaggaaaaaccagccactcagccagtgaagaggaagttagaagatctgagctctgagtggaaggcggtaaaccgtttacttcaagagctgagggcaaagcagcctgacctagctcctggactgaccactattggagcctctcctactcagactgttactctggtgacacaacctgtggttactaaggaaactgccatctccaaactagaaatgccatcttccttgatgttggaggtacctgctctggcagatttcaaccgggcttggacagaacttaccgactggctttctctgcttgatcaagttataaaatcacagagggtgatggtgggtgaccttgaggatatcaacgagatgatcatcaagcagaaggcaacaatgcaggatttggaacagaggcgtccccagttggaagaactcattaccgctgcccaaaatttgaaaaacaagaccagcaatcaagaggctagaacaatcattacggatcgaattgaaagaattcagaatcagtgggatgaagtacaagaacaccttcagaaccggaggcaacagttgaatgaaatgttaaaggattcaacacaatggctggaagctaaggaagaagctgagcaggtcttaggacaggccagagccaagcttgagtcatggaaggagggtccctatacagtagatgcaatccaaaagaaaatcacagaaaccaagcagttggccaaagacctccgccagtggcagacaaatgtagatgtggcaaatgacttggccctgaaacttctccgggattattctgcagatgataccagaaaagtccacatgataacagagaatatcaatgcctcttggagaagcattcataaaagggtgagtgagcgagaggctgctttggaagaaactcatagattactgcaacagttccccctggacctggaaaagtttcttgcctggcttacagaagctgaaacaactgccaatgtcctacaggatgctacccgtaaggaaaggctcctagaagactccaagggagtaaaagagctgatgaaacaatggcaagacctccaaggtgaaattgaagctcacacagatgtttatcacaacctggatgaaaacagccaaaaaatcctgagatccctggaaggttccgatgatgcagtcctgttacaaagacgtttggataacatgaacttcaagtggagtgaacttcggaaaaagtctctcaacattaggtcccatttggaagccagttctgaccagtggaagcgtctgcacctttctctgcaggaacttctggtgtggctacagctgaaagatgatgaattaagccggcaggcacctattggaggcgactttccagcagttcagaagcagaacgatgtacatagggccttcaagagggaattgaaaactaaagaacctgtaatcatgagtactcttgagactgtacgaatatttctgacagagcagcctttggaaggactagagaaactctaccaggagcccagagagctgcctcctgaggagagagcccagaatgtcactcggcttctacgaaagcaggctgaggaggtcaatactgagtgggaaaaattgaacctgcactccgctgactggcagagaaaaatagatgagacccttgaaagactccaggaacttcaagaggccacggatgagctggacctcaagctgcgccaagctgaggtgatcaagggatcctggcagcccgtgggcgatctcctcattgactctctccaagatcacctcgagaaagtcaaggcacttcgaggagaaattgcgcctctgaaagagaacgtgagccacgtcaatgaccttgctcgccagcttaccactttgggcattcagctctcaccgtataacctcagcactctggaagacctgaacaccagatggaagcttctgcaggtggccgtcgaggaccgagtcaggcagctgcatgaagcccacagggactttggtccagcatctcagcactttctttccacgtctgtccagggtccctgggagagagccatctcgccaaacaaagtgccctactatatcaaccacgagactcaaacaacttgctgggaccatcccaaaatgacagagctctaccagtctttagctgacctgaataatgtcagattctcagcttataggactgccatgaaactccgaagactgcagaaggccctttgcttggatctcttgagcctgtcagctgcatgtgatgccttggaccagcacaacctcaagcaaaatgaccagcccatggatatcctgcagattattaattgtttgaccactatttatgaccgcctggagcaagagcacaacaatttggtcaacgtccctctctgcgtggatatgtgtctgaactggctgctgaatgtttatgatacgggacgaacagggaggatccgtgtcctgtcttttaaaactggcatcatttccctgtgtaaagcacatttggaagacaagtacagataccttttcaagcaagtggcaagttcaacaggattttgtgaccagcgcaggctgggcctccttctgcatgattctatccaaattccaagacagttgggtgaagttgcatcctttgggggcagtaacattgagccaagtgtccggagctgcttccaatttgctaataataagccagagatcgaagcggccctcttcctagactggatgagactggaaccccagtccatggtgtggctgcccgtcctgcacagagtggctgctgcagaaactgccaagcatcaggccaaatgtaacatctgcaaagagtgtccaatcattggattcaggtacaggagtctaaagcactttaattatgacatctgccaaagctgctttttttctggtcgagttgcaaaaggccataaaatgcactatcccatggtggaatattgcactccgactacatcaggagaagatgttcgagactttgccaaggtactaaaaaacaaatttcgaaccaaaaggtattttgcgaagcatccccgaatgggctacctgccagtgcagactgtcttagagggggacaacatggaaactcccgttactctgatcaacttctggccagtagattctgcgcctgcctcgtcccctcagctttcacacgatgatactcattcacgcattgaacattatgctagcaggctagcagaaatggaaaacagcaatggatcttatctaaatgatagcatctctcctaatgagagcatagatgatgaacatttgttaatccagcattactgccaaagtttgaaccaggactcccccctgagccagcctcgtagtcctgcccagatcttgatttccttagagagtgaggaaagaggggagctagagagaatcctagcagatcttgaggaagaaaacaggaatctgcaagcagaatatgaccgtctaaagcagcagcacgaacataaaggcctgtccccactgccgtcccctcctgaaatgatgcccacctctccccagagtccccgggatgctgagctcattgctgaggccaagctactgcgtcaacacaaaggccgcctggaagccaggatgcaaatcctggaagaccacaataaacagctggagtcacagttacacaggctaaggcagctgctggagcaaccccaggcagaggccaaagtgaatggcacaacggtgtcctctccttctacctctctacagaggtccgacagcagtcagcctatgctgctccgagtggttggcagtcaaacttcggactccatgggtgaggaagatcttctcagtcctccccaggacacaagcacagggttagaggaggtgatggagcaactcaacaactccttccctagttcaagaggacacaatgtaggaagtcttttccacatggcagatgatttgggcagagcgatggagtccttagtatcagtcatgacagatgaagaaggagcagaataaatgttttacaactcctgattcccgcatggtttttataatattcatacaacaaagaggattagacagtaagagtttacaagaaataaatctatatttttgtgaagggtagtggtattatactgtagatttcagtagtttctaagtctgttattgttttgttaacaatggcaggttttacacgtctatgcaattgtacaaaaaagttataagaaaactacatgtaaaatcttgatagctaaataacttgccatttctttatatggaacgcattttgggttgtttaaaaatttataacagttataaagaaagattgtaaactaaagtgtgctttataaaaaaaagttgtttataaaaacccctaaaaacaaaacaaacacacacacacacacatacacacacacacacaaaactttgaggcagcgcattgttttgcatccttttggcgtgatatccatatgaaattcatggctttttctttttttgcatattaaagataagacttcctctaccaccacaccaaatgactactacacactgctcatttgagaactgtcagctgagtggggcaggcttgagttttcatttcatatatctatatgtctataagtatataaatactatagttatatagataaagagatacgaatttctatagactgactttttccattttttaaatgttcatgtcacatcctaatagaaagaaattacttctagtcagtcatccaggcttacctgcttggtctagaatggatttttcccggagccggaagccaggaggaaactacaccacactaaaacattgtctacagctccagatgtttctcattttaaacaactttccactgacaacgaaagtaaagtaaagtattggatttttttaaagggaacatgtgaatgaatacacaggacttattatatcagagtgagtaatcggttggttggttgattgattgattgattgatacattcagcttcctgctgctagcaatgccacgatttagatttaatgatgcttcagtggaaatcaatcagaaggtattctgaccttgtgaacatcagaaggtattttttaactcccaagcagtagcaggacgatgatagggctggagggctatggattcccagcccatccctgtgaaggagtaggccactctttaagtgaaggattggatgattgttcataatacataaagttctctgtaattacaactaaattattatgccctcttctcacagtcaaaaggaactgggtggtttggtttttgttgcttttttagatttattgtcccatgtgggatgagtttttaaatgccacaagacataatttaaaataaataaactttgggaaaaggtgtaagacagtagccccatcacatttgtgatactgacaggtatcaacccagaagcccatgaactgtgtttccatcctttgcatttctctgcgagtagttccacacaggtttgtaagtaagtaagaaagaaggcaaattgattcaaatgttacaaaaaaacccttcttggtggattagacaggttaaatatataaacaaacaaacaaaaattgctcaaaaaagaggagaaaagctcaagaggaaaagctaaggactggtaggaaaaagctttactctttcatgccattttatttctttttgatttttaaatcattcattcaatagataccaccgtgtgacctataattttgcaaatctgttacctctgacatcaagtgtaattagcttttggagagtgggctgacatcaagtgtaattagcttttggagagtgggttttgtccattattaataattaattaattaacatcaaacacggcttctcatgctatttctacctcactttggttttggggtgttcctgataattgtgcacacctgagttcacagcttcaccacttgtccattgcgttattttctttttcctttataattctttctttttccttcataattttcaaaagaaaacccaaagctctaaggtaacaaattaccaaattacatgaagatttggtttttgtcttgcatttttttcctttatgtgacgctggaccttttctttacccaaggatttttaaaactcagatttaaaacaaggggttactttacatcctactaagaagtttaagtaagtaagtttcattctaaaatcagaggtaaatagagtgcataaataattttgttttaatctttttgtttttcttttagacacattagctctggagtgagtctgtcataatatttgaacaaaaattgagagctttattgctgcattttaagcataattaatttggacattatttcgtgttgtgttctttataaccaccgagtattaaactgtaaatcataatgtaactgaagcataaacatcacatggcatgttttgtcattgttttcaggtactgagttcttacttgagtatcataatatattgtgttttaacaccaacactgtaacatttacgaattatttttttaaacttcagttttactgcattttcacaacatatcagacttcaccaaatatatgccttactattgtattatagtactgctttactgtgtatctcaataaagcacgcagttatgttac

SEQ ID NO: 2091 - protein, 1243 aa, Homo sapiens
MPSSLMLEVPALADFNRAWTELTDWLSLLDQVIKSQRVMVGDLEDINEMIIKQKATMQDLEQRRPQLEELITAAQNLKNKTSNQEARTIITDRIERIQNQWDEVQEHLQNRRQQLNEMLKDSTQWLEAKEEAEQVLGQARAKLESWKEGPYTVDAIQKKITETKQLAKDLRQWQTNVDVANDLALKLLRDYSADDTRKVHMITENINASWRSIHKRVSEREAALEETHRLLQQFPLDLEKFLAWLTEAETTANVLQDATRKERLLEDSKGVKELMKQWQDLQGEIEAHTDVYHNLDENSQKILRSLEGSDDAVLLQRRLDNMNFKWSELRKKSLNIRSHLEASSDQWKRLHLSLQELLVWLQLKDDELSRQAPIGGDFPAVQKQNDVHRAFKRELKTKEPVIMSTLETVRIFLTEQPLEGLEKLYQEPRELPPEERAQNVTRLLRKQAEEVNTEWEKLNLHSADWQRKIDETLERLQELQEATDELDLKLRQAEVIKGSWQPVGDLLIDSLQDHLEKVKALRGEIAPLKENVSHVNDLARQLTTLGIQLSPYNLSTLEDLNTRWKLLQVAVEDRVRQLHEAHRDFGPASQHFLSTSVQGPWERAISPNKVPYYINHETQTTCWDHPKMTELYQSLADLNNVRFSAYRTAMKLRRLQKALCLDLLSLSAACDALDQHNLKQNDQPMDILQIINCLTTIYDRLEQEHNNLVNVPLCVDMCLNWLLNVYDTGRTGRIRVLSFKTGIISLCKAHLEDKYRYLFKQVASSTGFCDQRRLGLLLHDSIQIPRQLGEVASFGGSNIEPSVRSCFQFANNKPEIEAALFLDWMRLEPQSMVWLPVLHRVAAAETAKHQAKCNICKECPIIGFRYRSLKHFNYDICQSCFFSGRVAKGHKMHYPMVEYCTPTTSGEDVRDFAKVLKNKFRTKRYFAKHPRMGYLPVQTVLEGDNMETPVTLINFWPVDSAPASSPQLSHDDTHSRIEHYASRLAEMENSNGSYLNDSISPNESIDDEHLLIQHYCQSLNQDSPLSQPRSPAQILISLESEERGELERILADLEEENRNLQAEYDRLKQQHEHKGLSPLPSPPEMMPTSPQSPRDAELIAEAKLLRQHKGRLEARMQILEDHNKQLESQLHRLRQLLEQPQAEAKVNGTTVSSPSTSLQRSDSSQPMLLRVVGSQTSDSMGEEDLLSPPQDTSTGLEEVMEQLNNSFPSSRGHNVGSLFHMADDLGRAMESLVSVMTDEEGAE

SEQ ID NO: 2092 - DNA, 7339 bp, Homo sapiens
acactagcaatggcaaagctttgtgcggaggcattgctggctgctctgaactaaaagcatccgtggggaccgaaagaggtttttgcacaccttattaaggaactccaggatggcattgggcagcggcaaactgttgtcagaacattgaatgcaactggggaagaaataattcagcaatcctcaaaaacagatgccagtattctacaggaaaaattgggaagcctgaatctgcggtggcaggaggtctgcaaacagctgtcagacagaaaaaagaggctagaagaacaaaagaatatcttgtcagaatttcaaagagatttaaatgaatttgttttatggttggaggaagcagataacattgctagtatcccacttgaacctggaaaagagcagcaactaaaagaaaagcttgagcaagtcaagttactggtggaagagttgcccctgcgccagggaattctcaaacaattaaatgaaactggaggacccgtgcttgtaagtgctcccataagcccagaagagcaagataaacttgaaaataagctcaagcagacaaatctccagtggataaaggtttccagagctttacctgagaaacaaggagaaattgaagctcaaataaaagaccttgggcagcttgaaaaaaagcttgaagaccttgaagagcagttaaatcatctgctgctgtggttatctcctattaggaatcagttggaaatttataaccaaccaaaccaagaaggaccatttgacgttcaggaaactgaaatagcagttcaagctaaacaaccggatgtggaagagattttgtctaaagggcagcatttgtacaaggaaaaaccagccactcagccagtgaagaggaagttagaagatctgagctctgagtggaaggcggtaaaccgtttacttcaagagctgagggcaaagcagcctgacctagctcctggactgaccactattggagcctctcctactcagactgttactctggtgacacaacctgtggttactaaggaaactgccatctccaaactagaaatgccatcttccttgatgttggaggtacctgctctggcagatttcaaccgggcttggacagaacttaccgactggctttctctgcttgatcaagttataaaatcacagagggtgatggtgggtgaccttgaggatatcaacgagatgatcatcaagcagaaggcaacaatgcaggatttggaacagaggcgtccccagttggaagaactcattaccgctgcccaaaatttgaaaaacaagaccagcaatcaagaggctagaacaatcattacggatcgaattgaaagaattcagaatcagtgggatgaagtacaagaacaccttcagaaccggaggcaacagttgaatgaaatgttaaaggattcaacacaatggctggaagctaaggaagaagctgagcaggtcttaggacaggccagagccaagcttgagtcatggaaggagggtccctatacagtagatgcaatccaaaagaaaatcacagaaaccaagcagttggccaaagacctccgccagtggcagacaaatgtagatgtggcaaatgacttggccctgaaacttctccgggattattctgcagatgataccagaaaagtccacatgataacagagaatatcaatgcctcttggagaagcattcataaaagggtgagtgagcgagaggctgctttggaagaaactcatagattactgcaacagttccccctggacctggaaaagtttcttgcctggcttacagaagctgaaacaactgccaatgtcctacaggatgctacccgtaaggaaaggctcctagaagactccaagggagtaaaagagctgatgaaacaatggcaagacctccaaggtgaaattgaagctcacacagatgtttatcacaacctggatgaaaacagccaaaaaatcctgagatccctggaaggttccgatgatgcagtcctgttacaaagacgtttggataacatgaacttcaagtggagtgaacttcggaaaaagtctctcaacattaggtcccatttggaagccagttctgaccagtggaagcgtctgcacctttctctgcaggaacttctggtgtggctacagctgaaagatgatgaattaagccggcaggcacctattggaggcgactttccagcagttcagaagcagaacgatgtacatagggccttcaagagggaattgaaaactaaagaacctgtaatcatgagtactcttgagactgtacgaatatttctgacagagcagcctttggaaggactagagaaactctaccaggagcccagagagctgcctcctgaggagagagcccagaatgtcactcggcttctacgaaagcaggctgaggaggtcaatactgagtgggaaaaattgaacctgcactccgctgactggcagagaaaaatagatgagacccttgaaagactccaggaacttcaagaggccacggatgagctggacctcaagctgcgccaagctgaggtgatcaagggatcctggcagcccgtgggcgatctcctcattgactctctccaagatcacctcgagaaagtcaaggcacttcgaggagaaattgcgcctctgaaagagaacgtgagccacgtcaatgaccttgctcgccagcttaccactttgggcattcagctctcaccgtataacctcagcactctggaagacctgaacaccagatggaagcttctgcaggtggccgtcgaggaccgagtcaggcagctgcatgaagcccacagggactttggtccagcatctcagcactttctttccacgtctgtccagggtccctgggagagagccatctcgccaaacaaagtgccctactatatcaaccacgagactcaaacaacttgctgggaccatcccaaaatgacagagctctaccagtctttagctgacctgaataatgtcagattctcagcttataggactgccatgaaactccgaagactgcagaaggccctttgcttggatctcttgagcctgtcagctgcatgtgatgccttggaccagcacaacctcaagcaaaatgaccagcccatggatatcctgcagattattaattgtttgaccactatttatgaccgcctggagcaagagcacaacaatttggtcaacgtccctctctgcgtggatatgtgtctgaactggctgctgaatgtttatgatacgggacgaacagggaggatccgtgtcctgtcttttaaaactggcatcatttccctgtgtaaagcacatttggaagacaagtacagataccttttcaagcaagtggcaagttcaacaggattttgtgaccagcgcaggctgggcctccttctgcatgattctatccaaattccaagacagttgggtgaagttgcatcctttgggggcagtaacattgagccaagtgtccggagctgcttccaatttgctaataataagccagagatcgaagcggccctcttcctagactggatgagactggaaccccagtccatggtgtggctgcccgtcctgcacagagtggctgctgcagaaactgccaagcatcaggccaaatgtaacatctgcaaagagtgtccaatcattggattcaggtacaggagtctaaagcactttaattatgacatctgccaaagctgctttttttctggtcgagttgcaaaaggccataaaatgcactatcccatggtggaatattgcactccgactacatcaggagaagatgttcgagactttgccaaggtactaaaaaacaaatttcgaaccaaaaggtattttgcgaagcatccccgaatgggctacctgccagtgcagactgtcttagagggggacaacatggaaacgcctgcctcgtcccctcagctttcacacgatgatactcattcacgcattgaacattatgctagcaggctagcagaaatggaaaacagcaatggatcttatctaaatgatagcatctctcctaatgagagcatagatgatgaacatttgttaatccagcattactgccaaagtttgaaccaggactcccccctgagccagcctcgtagtcctgcccagatcttgatttccttagagagtgaggaaagaggggagctagagagaatcctagcagatcttgaggaagaaaacaggaatctgcaagcagaatatgaccgtctaaagcagcagcacgaacataaaggcctgtccccactgccgtcccctcctgaaatgatgcccacctctccccagagtccccgggatgctgagctcattgctgaggccaagctactgcgtcaacacaaaggccgcctggaagccaggatgcaaatcctggaagaccacaataaacagctggagtcacagttacacaggctaaggcagctgctggagcaaccccaggcagaggccaaagtgaatggcacaacggtgtcctctccttctacctctctacagaggtccgacagcagtcagcctatgctgctccgagtggttggcagtcaaacttcggactccatgggtgaggaagatcttctcagtcctccccaggacacaagcacagggttagaggaggtgatggagcaactcaacaactccttccctagttcaagaggacacaatgtaggaagtcttttccacatggcagatgatttgggcagagcgatggagtccttagtatcagtcatgacagatgaagaaggagcagaataaatgttttacaactcctgattcccgcatggtttttataatattcatacaacaaagaggattagacagtaagagtttacaagaaataaatctatatttttgtgaagggtagtggtattatactgtagatttcagtagtttctaagtctgttattgttttgttaacaatggcaggttttacacgtctatgcaattgtacaaaaaagttataagaaaactacatgtaaaatcttgatagctaaataacttgccatttctttatatggaacgcattttgggttgtttaaaaatttataacagttataaagaaagattgtaaactaaagtgtgctttataaaaaaaagttgtttataaaaacccctaaaaacaaaacaaacacacacacacacacatacacacacacacacaaaactttgaggcagcgcattgttttgcatccttttggcgtgatatccatatgaaattcatggctttttctttttttgcatattaaagataagacttcctctaccaccacaccaaatgactactacacactgctcatttgagaactgtcagctgagtggggcaggcttgagttttcatttcatatatctatatgtctataagtatataaatactatagttatatagataaagagatacgaatttctatagactgactttttccattttttaaatgttcatgtcacatcctaatagaaagaaattacttctagtcagtcatccaggcttacctgcttggtctagaatggatttttcccggagccggaagccaggaggaaactacaccacactaaaacattgtctacagctccagatgtttctcattttaaacaactttccactgacaacgaaagtaaagtaaagtattggatttttttaaagggaacatgtgaatgaatacacaggacttattatatcagagtgagtaatcggttggttggttgattgattgattgattgatacattcagcttcctgctgctagcaatgccacgatttagatttaatgatgcttcagtggaaatcaatcagaaggtattctgaccttgtgaacatcagaaggtattttttaactcccaagcagtagcaggacgatgatagggctggagggctatggattcccagcccatccctgtgaaggagtaggccactctttaagtgaaggattggatgattgttcataatacataaagttctctgtaattacaactaaattattatgccctcttctcacagtcaaaaggaactgggtggtttggtttttgttgcttttttagatttattgtcccatgtgggatgagtttttaaatgccacaagacataatttaaaataaataaactttgggaaaaggtgtaagacagtagccccatcacatttgtgatactgacaggtatcaacccagaagcccatgaactgtgtttccatcctttgcatttctctgcgagtagttccacacaggtttgtaagtaagtaagaaagaaggcaaattgattcaaatgttacaaaaaaacccttcttggtggattagacaggttaaatatataaacaaacaaacaaaaattgctcaaaaaagaggagaaaagctcaagaggaaaagctaaggactggtaggaaaaagctttactctttcatgccattttatttctttttgatttttaaatcattcattcaatagataccaccgtgtgacctataattttgcaaatctgttacctctgacatcaagtgtaattagcttttggagagtgggctgacatcaagtgtaattagcttttggagagtgggttttgtccattattaataattaattaattaacatcaaacacggcttctcatgctatttctacctcactttggttttggggtgttcctgataattgtgcacacctgagttcacagcttcaccacttgtccattgcgttattttctttttcctttataattctttctttttccttcataattttcaaaagaaaacccaaagctctaaggtaacaaattaccaaattacatgaagatttggtttttgtcttgcatttttttcctttatgtgacgctggaccttttctttacccaaggatttttaaaactcagatttaaaacaaggggttactttacatcctactaagaagtttaagtaagtaagtttcattctaaaatcagaggtaaatagagtgcataaataattttgttttaatctttttgtttttcttttagacacattagctctggagtgagtctgtcataatatttgaacaaaaattgagagctttattgctgcattttaagcataattaatttggacattatttcgtgttgtgttctttataaccaccgagtattaaactgtaaatcataatgtaactgaagcataaacatcacatggcatgttttgtcattgttttcaggtactgagttcttacttgagtatcataatatattgtgttttaacaccaacactgtaacatttacgaattatttttttaaacttcagttttactgcattttcacaacatatcagacttcaccaaatatatgccttactattgtattatagtactgctttactgtgtatctcaataaagcacgcagttatgttac

SEQ ID NO: 2093 - protein, 1230 aa, Homo sapiens
MPSSLMLEVPALADFNRAWTELTDWLSLLDQVIKSQRVMVGDLEDINEMIIKQKATMQDLEQRRPQLEELITAAQNLKNKTSNQEARTIITDRIERIQNQWDEVQEHLQNRRQQLNEMLKDSTQWLEAKEEAEQVLGQARAKLESWKEGPYTVDAIQKKITETKQLAKDLRQWQTNVDVANDLALKLLRDYSADDTRKVHMITENINASWRSIHKRVSEREAALEETHRLLQQFPLDLEKFLAWLTEAETTANVLQDATRKERLLEDSKGVKELMKQWQDLQGEIEAHTDVYHNLDENSQKILRSLEGSDDAVLLQRRLDNMNFKWSELRKKSLNIRSHLEASSDQWKRLHLSLQELLVWLQLKDDELSRQAPIGGDFPAVQKQNDVHRAFKRELKTKEPVIMSTLETVRIFLTEQPLEGLEKLYQEPRELPPEERAQNVTRLLRKQAEEVNTEWEKLNLHSADWQRKIDETLERLQELQEATDELDLKLRQAEVIKGSWQPVGDLLIDSLQDHLEKVKALRGEIAPLKENVSHVNDLARQLTTLGIQLSPYNLSTLEDLNTRWKLLQVAVEDRVRQLHEAHRDFGPASQHFLSTSVQGPWERAISPNKVPYYINHETQTTCWDHPKMTELYQSLADLNNVRFSAYRTAMKLRRLQKALCLDLLSLSAACDALDQHNLKQNDQPMDILQIINCLTTIYDRLEQEHNNLVNVPLCVDMCLNWLLNVYDTGRTGRIRVLSFKTGIISLCKAHLEDKYRYLFKQVASSTGFCDQRRLGLLLHDSIQIPRQLGEVASFGGSNIEPSVRSCFQFANNKPEIEAALFLDWMRLEPQSMVWLPVLHRVAAAETAKHQAKCNICKECPIIGFRYRSLKHFNYDICQSCFFSGRVAKGHKMHYPMVEYCTPTTSGEDVRDFAKVLKNKFRTKRYFAKHPRMGYLPVQTVLEGDNMETPASSPQLSHDDTHSRIEHYASRLAEMENSNGSYLNDSISPNESIDDEHLLIQHYCQSLNQDSPLSQPRSPAQILISLESEERGELERILADLEEENRNLQAEYDRLKQQHEHKGLSPLPSPPEMMPTSPQSPRDAELIAEAKLLRQHKGRLEARMQILEDHNKQLESQLHRLRQLLEQPQAEAKVNGTTVSSPSTSLQRSDSSQPMLLRVVGSQTSDSMGEEDLLSPPQDTSTGLEEVMEQLNNSFPSSRGHNVGSLFHMADDLGRAMESLVSVMTDEEGAE

SEQ ID NO: 2094 - DNA, 7048 bp, Homo sapiens
acactagcaatggcaaagctttgtgcggaggcattgctggctgctctgaactaaaagcatccgtggggaccgaaagaggtttttgcacaccttattaaggaactccaggatggcattgggcagcggcaaactgttgtcagaacattgaatgcaactggggaagaaataattcagcaatcctcaaaaacagatgccagtattctacaggaaaaattgggaagcctgaatctgcggtggcaggaggtctgcaaacagctgtcagacagaaaaaagaggctagaagaacaaaagaatatcttgtcagaatttcaaagagatttaaatgaatttgttttatggttggaggaagcagataacattgctagtatcccacttgaacctggaaaagagcagcaactaaaagaaaagcttgagcaagtcaagttactggtggaagagttgcccctgcgccagggaattctcaaacaattaaatgaaactggaggacccgtgcttgtaagtgctcccataagcccagaagagcaagataaacttgaaaataagctcaagcagacaaatctccagtggataaaggtttccagagctttacctgagaaacaaggagaaattgaagctcaaataaaagaccttgggcagcttgaaaaaaagcttgaagaccttgaagagcagttaaatcatctgctgctgtggttatctcctattaggaatcagttggaaatttataaccaaccaaaccaagaaggaccatttgacgttcaggaaactgaaatagcagttcaagctaaacaaccggatgtggaagagattttgtctaaagggcagcatttgtacaaggaaaaaccagccactcagccagtgaagaggaagttagaagatctgagctctgagtggaaggcggtaaaccgtttacttcaagagctgagggcaaagcagcctgacctagctcctggactgaccactattggagcctctcctactcagactgttactctggtgacacaacctgtggttactaaggaaactgccatctccaaactagaaatgccatcttccttgatgttggaggtacctgctctggcagatttcaaccgggcttggacagaacttaccgactggctttctctgcttgatcaagttataaaatcacagagggtgatggtgggtgaccttgaggatatcaacgagatgatcatcaagcagaaggcaacaatgcaggatttggaacagaggcgtccccagttggaagaactcattaccgctgcccaaaatttgaaaaacaagaccagcaatcaagaggctagaacaatcattacggatcgaattgaaagaattcagaatcagtgggatgaagtacaagaacaccttcagaaccggaggcaacagttgaatgaaatgttaaaggattcaacacaatggctggaagctaaggaagaagctgagcaggtcttaggacaggccagagccaagcttgagtcatggaaggagggtccctatacagtagatgcaatccaaaagaaaatcacagaaaccaagcagttggccaaagacctccgccagtggcagacaaatgtagatgtggcaaatgacttggccctgaaacttctccgggattattctgcagatgataccagaaaagtccacatgataacagagaatatcaatgcctcttggagaagcattcataaaagggtgagtgagcgagaggctgctttggaagaaactcatagattactgcaacagttccccctggacctggaaaagtttcttgcctggcttacagaagctgaaacaactgccaatgtcctacaggatgctacccgtaaggaaaggctcctagaagactccaagggagtaaaagagctgatgaaacaatggcaagacctccaaggtgaaattgaagctcacacagatgtttatcacaacctggatgaaaacagccaaaaaatcctgagatccctggaaggttccgatgatgcagtcctgttacaaagacgtttggataacatgaacttcaagtggagtgaacttcggaaaaagtctctcaacattaggtcccatttggaagccagttctgaccagtggaagcgtctgcacctttctctgcaggaacttctggtgtggctacagctgaaagatgatgaattaagccggcaggcacctattggaggcgactttccagcagttcagaagcagaacgatgtacatagggccttcaagagggaattgaaaactaaagaacctgtaatcatgagtactcttgagactgtacgaatatttctgacagagcagcctttggaaggactagagaaactctaccaggagcccagagagctgcctcctgaggagagagcccagaatgtcactcggcttctacgaaagcaggctgaggaggtcaatactgagtgggaaaaattgaacctgcactccgctgactggcagagaaaaatagatgagacccttgaaagactccaggaacttcaagaggccacggatgagctggacctcaagctgcgccaagctgaggtgatcaagggatcctggcagcccgtgggcgatctcctcattgactctctccaagatcacctcgagaaagtcaaggcacttcgaggagaaattgcgcctctgaaagagaacgtgagccacgtcaatgaccttgctcgccagcttaccactttgggcattcagctctcaccgtataacctcagcactctggaagacctgaacaccagatggaagcttctgcaggtggccgtcgaggaccgagtcaggcagctgcatgaagcccacagggactttggtccagcatctcagcactttctttccacgtctgtccagggtccctgggagagagccatctcgccaaacaaagtgccctactatatcaaccacgagactcaaacaacttgctgggaccatcccaaaatgacagagctctaccagtctttagctgacctgaataatgtcagattctcagcttataggactgccatgaaactccgaagactgcagaaggccctttgcttggatctcttgagcctgtcagctgcatgtgatgccttggaccagcacaacctcaagcaaaatgaccagcccatggatatcctgcagattattaattgtttgaccactatttatgaccgcctggagcaagagcacaacaatttggtcaacgtccctctctgcgtggatatgtgtctgaactggctgctgaatgtttatgatacgggacgaacagggaggatccgtgtcctgtcttttaaaactggcatcatttccctgtgtaaagcacatttggaagacaagtacagataccttttcaagcaagtggcaagttcaacaggattttgtgaccagcgcaggctgggcctccttctgcatgattctatccaaattccaagacagttgggtgaagttgcatcctttgggggcagtaacattgagccaagtgtccggagctgcttccaatttgctaataataagccagagatcgaagcggccctcttcctagactggatgagactggaaccccagtccatggtgtggctgcccgtcctgcacagagtggctgctgcagaaactgccaagcatcaggccaaatgtaacatctgcaaagagtgtccaatcattggattcaggtacaggagtctaaagcactttaattatgacatctgccaaagctgctttttttctggtcgagttgcaaaaggccataaaatgcactatcccatggtggaatattgcactccgactacatcaggagaagatgttcgagactttgccaaggtactaaaaaacaaatttcgaaccaaaaggtattttgcgaagcatccccgaatgggctacctgccagtgcagactgtcttagagggggacaacatggaaacgaatctgcaagcagaatatgaccgtctaaagcagcagcacgaacataaaggcctgtccccactgccgtcccctcctgaaatgatgcccacctctccccagagtccccgggatgctgagctcattgctgaggccaagctactgcgtcaacacaaaggccgcctggaagccaggatgcaaatcctggaagaccacaataaacagctggagtcacagttacacaggctaaggcagctgctggagcaaccccaggcagaggccaaagtgaatggcacaacggtgtcctctccttctacctctctacagaggtccgacagcagtcagcctatgctgctccgagtggttggcagtcaaacttcggactccatgggtgaggaagatcttctcagtcctccccaggacacaagcacagggttagaggaggtgatggagcaactcaacaactccttccctagttcaagaggacacaatgtaggaagtcttttccacatggcagatgatttgggcagagcgatggagtccttagtatcagtcatgacagatgaagaaggagcagaataaatgttttacaactcctgattcccgcatggtttttataatattcatacaacaaagaggattagacagtaagagtttacaagaaataaatctatatttttgtgaagggtagtggtattatactgtagatttcagtagtttctaagtctgttattgttttgttaacaatggcaggttttacacgtctatgcaattgtacaaaaaagttataagaaaactacatgtaaaatcttgatagctaaataacttgccatttctttatatggaacgcattttgggttgtttaaaaatttataacagttataaagaaagattgtaaactaaagtgtgctttataaaaaaaagttgtttataaaaacccctaaaaacaaaacaaacacacacacacacacatacacacacacacacaaaactttgaggcagcgcattgttttgcatccttttggcgtgatatccatatgaaattcatggctttttctttttttgcatattaaagataagacttcctctaccaccacaccaaatgactactacacactgctcatttgagaactgtcagctgagtggggcaggcttgagttttcatttcatatatctatatgtctataagtatataaatactatagttatatagataaagagatacgaatttctatagactgactttttccattttttaaatgttcatgtcacatcctaatagaaagaaattacttctagtcagtcatccaggcttacctgcttggtctagaatggatttttcccggagccggaagccaggaggaaactacaccacactaaaacattgtctacagctccagatgtttctcattttaaacaactttccactgacaacgaaagtaaagtaaagtattggatttttttaaagggaacatgtgaatgaatacacaggacttattatatcagagtgagtaatcggttggttggttgattgattgattgattgatacattcagcttcctgctgctagcaatgccacgatttagatttaatgatgcttcagtggaaatcaatcagaaggtattctgaccttgtgaacatcagaaggtattttttaactcccaagcagtagcaggacgatgatagggctggagggctatggattcccagcccatccctgtgaaggagtaggccactctttaagtgaaggattggatgattgttcataatacataaagttctctgtaattacaactaaattattatgccctcttctcacagtcaaaaggaactgggtggtttggtttttgttgcttttttagatttattgtcccatgtgggatgagtttttaaatgccacaagacataatttaaaataaataaactttgggaaaaggtgtaagacagtagccccatcacatttgtgatactgacaggtatcaacccagaagcccatgaactgtgtttccatcctttgcatttctctgcgagtagttccacacaggtttgtaagtaagtaagaaagaaggcaaattgattcaaatgttacaaaaaaacccttcttggtggattagacaggttaaatatataaacaaacaaacaaaaattgctcaaaaaagaggagaaaagctcaagaggaaaagctaaggactggtaggaaaaagctttactctttcatgccattttatttctttttgatttttaaatcattcattcaatagataccaccgtgtgacctataattttgcaaatctgttacctctgacatcaagtgtaattagcttttggagagtgggctgacatcaagtgtaattagcttttggagagtgggttttgtccattattaataattaattaattaacatcaaacacggcttctcatgctatttctacctcactttggttttggggtgttcctgataattgtgcacacctgagttcacagcttcaccacttgtccattgcgttattttctttttcctttataattctttctttttccttcataattttcaaaagaaaacccaaagctctaaggtaacaaattaccaaattacatgaagatttggtttttgtcttgcatttttttcctttatgtgacgctggaccttttctttacccaaggatttttaaaactcagatttaaaacaaggggttactttacatcctactaagaagtttaagtaagtaagtttcattctaaaatcagaggtaaatagagtgcataaataattttgttttaatctttttgtttttcttttagacacattagctctggagtgagtctgtcataatatttgaacaaaaattgagagctttattgctgcattttaagcataattaatttggacattatttcgtgttgtgttctttataaccaccgagtattaaactgtaaatcataatgtaactgaagcataaacatcacatggcatgttttgtcattgttttcaggtactgagttcttacttgagtatcataatatattgtgttttaacaccaacactgtaacatttacgaattatttttttaaacttcagttttactgcattttcacaacatatcagacttcaccaaatatatgccttactattgtattatagtactgctttactgtgtatctcaataaagcacgcagttatgttac

SEQ ID NO: 2095 - protein, 1133 aa, Homo sapiens
MPSSLMLEVPALADFNRAWTELTDWLSLLDQVIKSQRVMVGDLEDINEMIIKQKATMQDLEQRRPQLEELITAAQNLKNKTSNQEARTIITDRIERIQNQWDEVQEHLQNRRQQLNEMLKDSTQWLEAKEEAEQVLGQARAKLESWKEGPYTVDAIQKKITETKQLAKDLRQWQTNVDVANDLALKLLRDYSADDTRKVHMITENINASWRSIHKRVSEREAALEETHRLLQQFPLDLEKFLAWLTEAETTANVLQDATRKERLLEDSKGVKELMKQWQDLQGEIEAHTDVYHNLDENSQKILRSLEGSDDAVLLQRRLDNMNFKWSELRKKSLNIRSHLEASSDQWKRLHLSLQELLVWLQLKDDELSRQAPIGGDFPAVQKQNDVHRAFKRELKTKEPVIMSTLETVRIFLTEQPLEGLEKLYQEPRELPPEERAQNVTRLLRKQAEEVNTEWEKLNLHSADWQRKIDETLERLQELQEATDELDLKLRQAEVIKGSWQPVGDLLIDSLQDHLEKVKALRGEIAPLKENVSHVNDLARQLTTLGIQLSPYNLSTLEDLNTRWKLLQVAVEDRVRQLHEAHRDFGPASQHFLSTSVQGPWERAISPNKVPYYINHETQTTCWDHPKMTELYQSLADLNNVRFSAYRTAMKLRRLQKALCLDLLSLSAACDALDQHNLKQNDQPMDILQIINCLTTIYDRLEQEHNNLVNVPLCVDMCLNWLLNVYDTGRTGRIRVLSFKTGIISLCKAHLEDKYRYLFKQVASSTGFCDQRRLGLLLHDSIQIPRQLGEVASFGGSNIEPSVRSCFQFANNKPEIEAALFLDWMRLEPQSMVWLPVLHRVAAAETAKHQAKCNICKECPIIGFRYRSLKHFNYDICQSCFFSGRVAKGHKMHYPMVEYCTPTTSGEDVRDFAKVLKNKFRTKRYFAKHPRMGYLPVQTVLEGDNMETNLQAEYDRLKQQHEHKGLSPLPSPPEMMPTSPQSPRDAELIAEAKLLRQHKGRLEARMQILEDHNKQLESQLHRLRQLLEQPQAEAKVNGTTVSSPSTSLQRSDSSQPMLLRVVGSQTSDSMGEEDLLSPPQDTSTGLEEVMEQLNNSFPSSRGHNVGSLFHMADDLGRAMESLVSVMTDEEGAE

SEQ ID NO: 2096 - DNA, 6080 bp, Homo sapiens
ctccaaagctgggggaagagaggggggttgtgtgcagatggcccttcaatctcgaaagaaagatgtcggaatctgaaggcgggaaagacaccaccccagagcccagtccagccaatggggcaggccctggtcccgaatgggggctgtgccccgggcccccagctgtggaaggtgaaagcagtggggcatcaggcctagggacccctaagcgaagaaaccagcacagcaagcacaagacagtggcagtggccagtgcccagcggtcacctcgggcactcttctgcctcaccctggccaatcctctgcgacggtcctgcatcagcatcgtggagtggaagcccttcgacatcctcatcctgctgaccatctttgccaactgcgtggccctgggagtttacatccccttccctgaggacgactccaacactgccaaccacaacctggagcaggtggagtacgtattcctggtgattttcactgtggagacggtgctcaagatcgtggcctacgggctggtgctccaccccagcgcctacatccgcaatggctggaacctactcgacttcatcatcgtcgtggtcgggctgttcagcgttctgctggagcagggccccggacggccaggcgacgccccgcacaccgggggaaagccaggaggcttcgatgtgaaggcattgagggcgtttcgggtgctgcggccactgaggctggtgtctggggtcccgagcctgcacatagtgctcaattccatcatgaaggctctggtgccgctgctgcacattgcactgctcgtgctcttcgtcatcatcatttatgccatcattgggctcgagctgttccttggacgaatgcacaagacgtgctacttcctgggatccgacatggaagcggaggaggacccatcgccctgtgcgtcttcgggatcagggcgtgcgtgcacgctgaaccagactgagtgccgcgggcgctggccagggcccaatggaggcatcaccaactttgacaacttcttcttcgccatgctgacagtcttccagtgtgtcaccatggaaggctggaccgatgtgctctactggatgcaagatgccatggggtatgaactgccctgggtgtactttgtgagccttgtcatctttgggtccttcttcgtcctcaaccttgtgcttggcgtcctgagtggggagttctccaaggagagagagaaagcgaaagctcgcggggacttccagaagcagcgggagaagcagcagatggaggaagacctgcggggctacctggactggatcactcaagccgaagagctggacatggaggacccctccgccgatgacaaccttggttctatggctgaagagggccgggcgggccatcggccacagctggccgagctgaccaataggaggcgtggacgtctgcgctggttcagtcattctactcgctccacacactccaccagcagccatgccagcctcccagccagtgacaccggttccatgacagagacccaaggcgatgaggatgaggaggagggggctctggccagctgtacacgctgcctaaacaagatcatgaaaaccagagtctgccgccgcctccgccgagccaaccgggtccttcgggcacgctgccgtcgggcagtgaagtccaatgcctgctactgggctgtgctgttgctcgtcttcctcaacacgttgaccatcgcctctgagcaccacgggcagcctgtgtggctcacccagatccaggagtatgccaacaaagtgttgctctgtctgttcacggtggagatgcttctcaaattgtacggtctgggcccctctgcctatgtgtcttccttcttcaaccgctttgactgctttgtggtctgtgggggcatcctagagaccaccttggtggaggtgggcgccatgcagcccttgggcatctcagtgctccgatgtgtgcgcctcctcaggatctttaaggtcaccagacactgggcttctctgagcaatctggtggcatccctgctcaattcaatgaaatccatcgcatccttgctgcttctcctcttcctcttcatcattatcttctccctgcttggcatgcagctgtttgggggcaagttcaactttgaccagacccacaccaagcgaagcacctttgacacgttcccccaggccctcctcactgtctttcagatcctgacaggtgaggactggaacgtggtcatgtatgatggtatcatggcatatggtggccccttcttcccaggaatgttggtgtgcatctatttcatcattctcttcatctgtggcaactacatcctgttgaacgtgtttcttgccattgctgtggacaacctggccagtggagatgcaggcactgccaaggacaagggcggggagaagagcaatgagaaggatctcccacaggagaatgaaggcctggtgcctggtgtggagaaagaggaagaggagggtgcaaggagggaaggagcagacatggaggaggaggaggaggaggaagaagaggaagaagaggaagaagaggaagagggtgcagggggtgtggaactcctgcaggaagttgtacccaaggagaaggtggtacccatccctgagggcagcgccttcttctgcctcagccaaaccaacccgctgaggaagggctgccacaccctcatccaccatcatgtcttcaccaatcttatcctggtgttcatcatcctcagcagtgtgtccctggccgctgaggaccccatccgagcccactccttccgcaaccatattctgggttacttcgattatgccttcacctccattttcactgtggagattctactaaagatgacagtgtttggggccttcctgcaccgcggctccttctgccgtagctggtttaatatgttggatctgctggtggtcagtgtgtccctcatctcctttggcatccactccagcgccatctcggtggtgaagattctgcgagtactccgagtactgcggcccctccgagccatcaacagggccaagggactcaagcatgtggtgcagtgtgtatttgtggccatccggaccatcggaaacatcatgattgtcaccacacttctgcaatttatgttcgcctgcatcggggtgcagctcttcaaggggaaattctacacctgcacggacgaggccaaacacacccctcaagaatgcaagggctccttcctggtatacccagatggagacgtgtcacggcccctggtccgggagcggctctgggtcaacagtgatttcaactttgacaatgtcctttcagccatgatggccctgttcactgtctccacctttgaaggctggcctgcactgctatacaaggccatcgatgcatatgcagaggaccatggccccatctataattaccgtgtggagatctcagtgttcttcattgtctacatcatcatcattgcgttcttcatgatgaacatcttcgtgggcttcgtcatcatcactttccgtgcccagggcgagcaggagtaccaaaactgtgagctggacaagaaccagcgtcaatgtgtggaatatgccctcaaggcccagccactccgccgttacatccccaagaacccgcatcagtatcgtgtgtgggccactgtgaactctgctgcctttgagtacctgatgttcctgctcatcctgctcaacacagttgccctagccatgcagcactatgagcagactgctcccttcaactatgccatggacatcctcaacatggtcttcactggcctcttcactattgagatggtgctcaaaatcatcgccttcaagcccaagcattacttcactgatgcctggaacacgtttgacgctcttattgtggtgggcagcatagtggatattgccgtcactgaagtcaataatggtggccaccttggcgagagctctgaggacagctcccgcatttccattaccttctttcgcctcttccgagttatgcggctggtcaagcttctcagtaagggtgaagggatccgcacattgctctggacattcatcaagtccttccaggccttgccctatgtggctcttctcatcgcaatgatattcttcatctatgccgtcattggcatgcagatgttcggcaaggtggctcttcaggatggcacacagataaaccgaaacaacaacttccagacctttccacaggctgtgctgcttctgttcaggtgtgccactggtgaggcatggcaggagataatgcttgccagccttcccggaaatcggtgtgatcctgagtctgacttcggccctggtgaagagtttacctgtggtagcaattttgccatcgcctatttcatcagcttcttcatgctctgtgccttcctgatcataaatctctttgtggctgtgatcatggacaactttgattatctcaccagagattggtccatcctgggcccccatcaccttgatgaattcaagaggatctggtctgaatatgaccctggggccaagggccgcatcaaacacttggatgtggttgccctgctgagacgtatccagccccctctgggatttgggaagctgtgcccacaccgagtggcctgcaagagacttgtggcaatgaacatgcccctcaactcagatgggacggtgacattcaacgccacactctttgccctggtccggacatccctgaagatcaaaacagaagggaacctggagcaagccaaccaggagctgcggattgtcatcaaaaagatctggaagcggatgaaacagaagctgctagatgaggtcatccccccaccagacgaggaggaggtcaccgtgggcaaattctacgccacatttctgatccaggactatttccgcaaattccggcggaggaaagaaaaagggctactaggcaacgacgccgcccctagcacctcttccgcccttcaggctggtctgcggagcctgcaggacttgggtcctgagatgcggcaggccctcacctgtgacacagaggaggaggaagaagaggggcaggagggagtggaggaggaagatgaaaaggacttggaaactaacaaagccacgatggtctcccagccctcagctcgccggggctccgggatttctgtgtctctgcctgtcggggacagacttccagattcactctcctttgggcccagtgatgatgacagggggactcccacctccagtcagcccagtgtgccccaggctggatccaacacccacaggagaggctctggggctctcattttcaccatcccagaagaaggaaattctcagcccaagggaaccaaagggcaaaacaagcaagatgaggatgaggaagtccctgatcggctttcctacctagatgagcaggcagggactcccccgtgctcagtccttttgccacctcacagagctcagagatacatggatgggcacctggtaccacgccgccgtctgctgccccccacacctgcaggtcggaagccctccttcaccatccagtgtctgcagcgccagggcagttgtgaggatttacccatcccaggcacctatcatcgtgggcgaaattcagggcccaatagggctcagggttcctgggcaacaccacctcagcggggtcggctcctgtatgccccgctgttgttggtggaagagggcgcagcgggggaggggtacctcggcagatccagtggcccactgcgcaccttcacctgtctgcacgtgcctggaacccactcggaccccagccatgggaagaggggcagtgccgacagcttggtggaggctgtgcttatctcagagggtctgggcctctttgctcgagacccacgtttcgtggccctggccaagcaggagattgcagatgcgtgtcgcctgacgctggatgagatggacaatgctgccagtgacctgctggcacagggaaccagctctctctatagcgacgaggagtccatcctctcccgcttcgatgaggaggacttgggagacgagatggcctgcgtccacgccctctgaattcccacccctccccaactgctcaataaacctcctgccctcccctccccagcaggaggcaggcatggaccacaaaaaaaaaaa

SEQ ID NO: 2097 - protein, 1977 aa, Homo sapiens
MSESEGGKDTTPEPSPANGAGPGPEWGLCPGPPAVEGESSGASGLGTPKRRNQHSKHKTVAVASAQRSPRALFCLTLANPLRRSCISIVEWKPFDILILLTIFANCVALGVYIPFPEDDSNTANHNLEQVEYVFLVIFTVETVLKIVAYGLVLHPSAYIRNGWNLLDFIIVVVGLFSVLLEQGPGRPGDAPHTGGKPGGFDVKALRAFRVLRPLRLVSGVPSLHIVLNSIMKALVPLLHIALLVLFVIIIYAIIGLELFLGRMHKTCYFLGSDMEAEEDPSPCASSGSGRACTLNQTECRGRWPGPNGGITNFDNFFFAMLTVFQCVTMEGWTDVLYWMQDAMGYELPWVYFVSLVIFGSFFVLNLVLGVLSGEFSKEREKAKARGDFQKQREKQQMEEDLRGYLDWITQAEELDMEDPSADDNLGSMAEEGRAGHRPQLAELTNRRRGRLRWFSHSTRSTHSTSSHASLPASDTGSMTETQGDEDEEEGALASCTRCLNKIMKTRVCRRLRRANRVLRARCRRAVKSNACYWAVLLLVFLNTLTIASEHHGQPVWLTQIQEYANKVLLCLFTVEMLLKLYGLGPSAYVSSFFNRFDCFVVCGGILETTLVEVGAMQPLGISVLRCVRLLRIFKVTRHWASLSNLVASLLNSMKSIASLLLLLFLFIIIFSLLGMQLFGGKFNFDQTHTKRSTFDTFPQALLTVFQILTGEDWNVVMYDGIMAYGGPFFPGMLVCIYFIILFICGNYILLNVFLAIAVDNLASGDAGTAKDKGGEKSNEKDLPQENEGLVPGVEKEEEEGARREGADMEEEEEEEEEEEEEEEEEGAGGVELLQEVVPKEKVVPIPEGSAFFCLSQTNPLRKGCHTLIHHHVFTNLILVFIILSSVSLAAEDPIRAHSFRNHILGYFDYAFTSIFTVEILLKMTVFGAFLHRGSFCRSWFNMLDLLVVSVSLISFGIHSSAISVVKILRVLRVLRPLRAINRAKGLKHVVQCVFVAIRTIGNIMIVTTLLQFMFACIGVQLFKGKFYTCTDEAKHTPQECKGSFLVYPDGDVSRPLVRERLWVNSDFNFDNVLSAMMALFTVSTFEGWPALLYKAIDAYAEDHGPIYNYRVEISVFFIVYIIIIAFFMMNIFVGFVIITFRAQGEQEYQNCELDKNQRQCVEYALKAQPLRRYIPKNPHQYRVWATVNSAAFEYLMFLLILLNTVALAMQHYEQTAPFNYAMDILNMVFTGLFTIEMVLKIIAFKPKHYFTDAWNTFDALIVVGSIVDIAVTEVNNGGHLGESSEDSSRISITFFRLFRVMRLVKLLSKGEGIRTLLWTFIKSFQALPYVALLIAMIFFIYAVIGMQMFGKVALQDGTQINRNNNFQTFPQAVLLLFRCATGEAWQEIMLASLPGNRCDPESDFGPGEEFTCGSNFAIAYFISFFMLCAFLIINLFVAVIMDNFDYLTRDWSILGPHHLDEFKRIWSEYDPGAKGRIKHLDVVALLRRIQPPLGFGKLCPHRVACKRLVAMNMPLNSDGTVTFNATLFALVRTSLKIKTEGNLEQANQELRIVIKKIWKRMKQKLLDEVIPPPDEEEVTVGKFYATFLIQDYFRKFRRRKEKGLLGNDAAPSTSSALQAGLRSLQDLGPEMRQALTCDTEEEEEEGQEGVEEEDEKDLETNKATMVSQPSARRGSGISVSLPVGDRLPDSLSFGPSDDDRGTPTSSQPSVPQAGSNTHRRGSGALIFTIPEEGNSQPKGTKGQNKQDEDEEVPDRLSYLDEQAGTPPCSVLLPPHRAQRYMDGHLVPRRRLLPPTPAGRKPSFTIQCLQRQGSCEDLPIPGTYHRGRNSGPNRAQGSWATPPQRGRLLYAPLLLVEEGAAGEGYLGRSSGPLRTFTCLHVPGTHSDPSHGKRGSADSLVEAVLISEGLGLFARDPRFVALAKQEIADACRLTLDEMDNAASDLLAQGTSSLYSDEESILSRFDEEDLGDEMACVHAL

SEQ ID NO: 2098 - DNA, 585 bp, Homo sapiens
atgaccgagcgccgcgtccccttctcgctcctgcgggaccccagctgggaccccttccgcgactggtacccgcacagtcgcctctttgaccaggccttcgggctggtcgcagtggttgggcaccagctgctggccccgctacgtgcgtcccctgcccccgccgcggtcgagagccccgcggtggccgcgcccgcctacagctacgcgctcagccggcagctcagcggcggggtctcggagaatcggcccacagcggaccgctggcgcgtatccctggacatcaactacttcgcctccgacgagctgacggtcaagaccaaggatggcatggtggagatcaccagcaagcacgaggagcggcaggacgagcatggctacatctcccgatgcttcacccggaaatacacgctgccccccggtgtggaccccaccaaggtctcctcctccctgtcccctgagggcacactgaccgtggaggcccccatgcccaagctagccacgcagtccaacgagatcaccttggagtcacgggcccagcttgggggcctaggagctgcgaaatccgaccagtctgcagccaagtaa

SEQ ID NO: 2099 - DNA, 2715 bp, Homo sapiens
gcgccgtgctcgctcacagaactacactttccaactctccccacacgacccgtgacactctgtggaccgcgagcacggagcagggtttctacagctgctccccactttctcggacccggtcctggacccagcccccgactccgacacggctccaccatggaggaggcggaccgaatcctcatccattcgctgcgccaggccggcacggcagttcctccagatgtgcagaccttgcgcgccttcaccactgagctggttgtagaggctgtggtccgctgcctgcgtgtgatcaaccctgcggtgggctctggcctcagccctctgctgcctcttgccatgtctgcccggttccgcctggccatgagcctggctcaggcctgcatggacctgggctatcccttggagcttggctatcagaacttcctctaccccagtgagcctgacctccgagacctgcttctcttcttggctgagcgtctgcccaccgatgcctctgaggatgcagaccagcctgcaggtgactcagctattctcctccgggccattgggagccaaattcgggaccagctggcactgccttgggtcccgccccaccttcgcactcccaagctgcagcacctccagggctcggccctccagaagcctttccatgccagcaggctggtcgtgccagaattgagttccagaggtgagccacgggagttccaggcgagtcccctgctgcttccagtccctacccaggtgcctcagcctgttggaagggtggcctcgctcctcgaacaccatgccctgcagctctgccagcagacgggccgggaccggccaggggatgaggactgggtccaccggacatcccgcctcccaccccaggaggacacacgggctcagcggcagcggctgcagaagcaactgactgagcatctgcgccaaagctggggcctgcttggggcccccatacaagcccgggacctgggagaactgctgcaggcctggggtgctggggccaagactggtgctcctaagggctcccgcttcacgcactcagagaagttcaccttccatctggagccccaggcccaggccactcaggtgtcagatgtgccagccacctcccggcggcctgaacaggtcacgtgggcagctcaggaacaggagctcgagtcccttcgggagcagctggaaggagtgaaccgcagcattgaggaggttgaggccgacatgaagaccctgggcgtcagctttgtgcaggcagagtctgagtgccggcacagcaagctcagtacagcagagcgtgagcaggccctgcgcctgaagagccgcgcggtggagctgctgcccgatgggactgccaaccttgccaagctgcagcttgtggtggagaatagtgcccagcgggtcatccacttggcgggtcagtgggagaagcaccgggtcccactcctcgctgagtaccgccacctccgaaagctgcaggattgcagagagctggaatcttctcgacggctggcagagatccaagaactgcaccagagtgtccgggcggctgctgaagaggcccgcaggaaggaggaggtctataagcagctgatgtcagagctggagactctgcccagagatgtgtcccggctggcctacacccagcgcatcctggagatcgtgggcaacatccggaagcagaaggaagagatcaccaagatcttgtctgatacgaaggagcttcagaaggaaatcaactccctatctgggaagctggaccggacgtttgcggtgactgatgagcttgtgttcaaggatgccaagaaggacgatgctgttcggaaggcctataagtatctagctgctctgcacgagaactgcagccagctcatccagaccatcgaggacacaggcaccatcatgcgggaggttcgagacctcgaggagcagatcgagacagagctgggcaagaagaccctcagcaacctggagaagatccgggaggactaccgagccctccgccaggagaacgctggcctcctaggccgggtccgggaggcctgaggagccgccggcagaggtctctccccagcctcaggcagggatttggggtgctggaggcagtggccaagcacatgccctagctacttcctccgctgtccagttcctcctgctgcggccttggacccagacccctgcccactgaccgcaacccttatatggggtgatagtccagcatgtggggagctcggctgcagtttattggggacggtactgtgggttgggggccttggatcccaaataaatgagtagttcctctgcagtctaagctgaggcatggatcagggctcagggaatgggagtgaggtgagtggcaggggagacacggggtatttttggcaaggcagtgtgtgtggctgtgtgtgtctgcacgggactcaagagacccactggggggctgtgcgtgtgcatatgcgtgagatacacaggtgaattctaacaggccgtgtgtgtgagcgagcacgtgttgggacctcagatcctgagggtactgacgctgcttctgtgtaggcctctgggcacacccctgtgttgacagtgcccctgtgggccctgaggctggctgtgggtgcgtgccttggggtgtgtgggttgtcagggctgtgcttgtgtgtgattgtgtgatgatgcagctttgaggttgtttgagtgtactgaggcaggctctctgtgttttgg

SEQ ID NO: 2100 - protein, 627 aa, Homo sapiens
MEEADRILIHSLRQAGTAVPPDVQTLRAFTTELVVEAVVRCLRVINPAVGSGLSPLLPLAMSARFRLAMSLAQACMDLGYPLELGYQNFLYPSEPDLRDLLLFLAERLPTDASEDADQPAGDSAILLRAIGSQIRDQLALPWVPPHLRTPKLQHLQGSALQKPFHASRLVVPELSSRGEPREFQASPLLLPVPTQVPQPVGRVASLLEHHALQLCQQTGRDRPGDEDWVHRTSRLPPQEDTRAQRQRLQKQLTEHLRQSWGLLGAPIQARDLGELLQAWGAGAKTGAPKGSRFTHSEKFTFHLEPQAQATQVSDVPATSRRPEQVTWAAQEQELESLREQLEGVNRSIEEVEADMKTLGVSFVQAESECRHSKLSTAEREQALRLKSRAVELLPDGTANLAKLQLVVENSAQRVIHLAGQWEKHRVPLLAEYRHLRKLQDCRELESSRRLAEIQELHQSVRAAAEEARRKEEVYKQLMSELETLPRDVSRLAYTQRILEIVGNIRKQKEEITKILSDTKELQKEINSLSGKLDRTFAVTDELVFKDAKKDDAVRKAYKYLAALHENCSQLIQTIEDTGTIMREVRDLEEQIETELGKKTLSNLEKIREDYRALRQENAGLLGRVREA

SEQ ID NO: 2101 - DNA, 1869 bp, Homo sapiens
gcacacactcatcgaaaaaaatttggattattagaagagagaggtctgcggcttccacaccgtacagcgtggtttttcttctcggtataaaagcaaagttgtttttgatacgtgacagtttcccacaagccaggctgatccttttctgtcagtccacttcaccaagcctgcccttggacaaggacccgatgcccaaccccaggcctggcaagccctcggccccttccttggcccttggcccatccccaggagcctcgcccagctggagggctgcacccaaagcctcagacctgctgggggcccggggcccagggggaaccttccagggccgagatcttcgaggcggggcccatgcctcctcttcttccttgaaccccatgccaccatcgcagctgcagctgcccacactgcccctagtcatggtggcaccctccggggcacggctgggccccttgccccacttacaggcactcctccaggacaggccacatttcatgcaccagctctcaacggtggatgcccacgcccggacccctgtgctgcaggtgcaccccctggagagcccagccatgatcagcctcacaccacccaccaccgccactggggtcttctccctcaaggcccggcctggcctcccacctgggatcaacgtggccagcctggaatgggtgtccagggagccggcactgctctgcaccttcccaaatcccagtgcacccaggaaggacagcaccctttcggctgtgccccagagctcctacccactgctggcaaatggtgtctgcaagtggcccggatgtgagaaggtcttcgaagagccagaggacttcctcaagcactgccaggcggaccatcttctggatgagaagggcagggcacaatgtctcctccagagagagatggtacagtctctggagcagcagctggtgctggagaaggagaagctgagtgccatgcaggcccacctggctgggaaaatggcactgaccaaggcttcatctgtggcatcatccgacaagggctcctgctgcatcgtagctgctggcagccaaggccctgtcgtcccagcctggtctggcccccgggaggcccctgacagcctgtttgctgtccggaggcacctgtggggtagccatggaaacagcacattcccagagttcctccacaacatggactacttcaagttccacaacatgcgaccccctttcacctacgccacgctcatccgctgggccatcctggaggctccagagaagcagcggacactcaatgagatctaccactggttcacacgcatgtttgccttcttcagaaaccatcctgccacctggaagaacgccatccgccacaacctgagtctgcacaagtgctttgtgcgggtggagagcgagaagggggctgtgtggaccgtggatgagctggagttccgcaagaaacggagccagaggcccagcaggtgttccaaccctacacctggcccctgacctcaagatcaaggaaaggaggatggacgaacaggggccaaactggtgggaggcagaggtggtgggggcagggatgataggccctggatgtgcccacagggaccaagaagtgaggtttccactgtcttgcctgccagggcccctgttcccccgctggcagccaccccctcccccatcatatcctttgccccaaggctgctcagaggggccccggtcctggccccagcccccacctccgccccagacacaccccccagtcgagccctgcagccaaacagagccttcacaaccagccacacagagcctgcctcagctgctcgcacagattacttcagggctggaaaagtcacacagacacacaaaatgtcacaatcctgtccctcac

SEQ ID NO: 2102 - protein, 431 aa, Homo sapiens
MPNPRPGKPSAPSLALGPSPGASPSWRAAPKASDLLGARGPGGTFQGRDLRGGAHASSSSLNPMPPSQLQLPTLPLVMVAPSGARLGPLPHLQALLQDRPHFMHQLSTVDAHARTPVLQVHPLESPAMISLTPPTTATGVFSLKARPGLPPGINVASLEWVSREPALLCTFPNPSAPRKDSTLSAVPQSSYPLLANGVCKWPGCEKVFEEPEDFLKHCQADHLLDEKGRAQCLLQREMVQSLEQQLVLEKEKLSAMQAHLAGKMALTKASSVASSDKGSCCIVAAGSQGPVVPAWSGPREAPDSLFAVRRHLWGSHGNSTFPEFLHNMDYFKFHNMRPPFTYATLIRWAILEAPEKQRTLNEIYHWFTRMFAFFRNHPATWKNAIRHNLSLHKCFVRVESEKGAVWTVDELEFRKKRSQRPSRCSNPTPGP

SEQ ID NO: 2103 - DNA, 2941 bp, Homo sapiens
cgccgccgccgccgatatggcgcgtacggcccctgtggagcccccgctgcggcattccgcgcccccctcgccggccgcgggtgagccccgcacctcggtcgaggcggcggtggccccgcggagggtgctgttcgccgacgaggccttggggctgccgctggcgcagttgcgccgctaccggccgtggggcgggcccggggcgggcaagatggcggcggcggccgggcaagatggcggcggcggcggcggggccgacgaggacgacgatggcgaggatggggatgaaggggaggaggaagaggaggcttgccccgagccctcaccgctgtgccccgtccccgctggcggggggttttacctggtccccacattttcgctgccgcccgcgccgggccgtctggagcgcttggggcgcgtcatggtggagctggaggcgctgctgccgcctcccggagcggtccccgggggtgccggggtgtgggtgcctgggggccgcccgccggtgctgcgcgggttggtacgcgtgctgaaccgctccttcgagaaggcggtgcacgtgcgggcctcacacgacggctgggcttccttttgcgaccacccagcgcgctacgtcccgcgcagcccgccgtgggcaggagcgggaggaacaggagcaggagatcccatcctggatccggggctcggcctgggtcccggccaggcatccgcctcctcgcccgacgacggcggccgcaccgaccgctttgccttccagctgccctttgctgagggcgcgggcgatggggcgcgcctcgacttcgtggtgcgctatgagacccctgagggcactttctgggccaacaaccacggccgcaactacacagtcctgctccggatcgcacccgctcccacacccactgatgccgaagggctgccccagcagcagcagctgccgcagctggagccacagcccgagtgccagggtcccgtggaggctgaggccaggcagctgaagagctgcatgaagccggtgaggcgcaggcctgccgaggaggaactgaagacgaagaacatggatgataacacctttgccatggcagagcatcctgatgtccaggagtcagtgggtccactggtagcccccacccctctccgtccatggccccagatgacacttcaggtttctgacgttccgatgactggcaaccccgcagaagaaggtgatgtccccagaagcagtccacctgtggcttttacagaggtcctccaggcaccggccatcaggattcccccctcctcccctctctgtggcctgggtggctcccccagagaccaggcctcagggcccgatgcgagcgagggggccaccgggcctttcctggagcccagtcagcagcaggcagaggccacatggggagtatcgagtgagaatggaggggggctggaggctgtgagtgggtcagaggagctgctcggtgaggacaccatcgaccaggagctggagcagctctacctgtctcacctgagccgcctacgggctgctgtggctgcgggtggggcagggggtggtggggagggctccacagatggagggatgtcccccagccatcccctgggcatactgacggaccgcgacctgatcttgaagtggcctggccctgagcgggccctgaacagcgccctggctgaggagatcacgctgcactatgcccggctggggcgtggcgtggagctcatcaaggacaccgaagaccctgatgatgaaggggagggtgaagaggggctctctgtcacaccctccagcccagaaggggacagccccaaggaatcgcctccagaaatcctctccggggcccgttctgtggtagccacgatgggagatgtgtggctcccatgggcagagggctcaggatgtgacggccctgtggttctgggtacagagggtcagttcattggggatcctgagaaagggatgggcaaggacaccagctctttgcacatgaatagggtgatagctggggtgactgagtccctgggggaggccgggacagaagcccagatagaggtcaccagtgagtgggcaggcagcttggatcccatatctggcaaggagccagcctctcccgtccttctgcaggggcaaaatcccaccctcctcagtcccttgggggccgaagtctgtctctctagtgtagccaggcctcatgtgagctcccaggatgaaaaggatgcaggcccaagccttgaacccccaaagaagtctcccaccctagcagtccctgcagaatgtgtgtgtgcactgcctcctcagctccgggggcccttgacccagactctgggggtcctggccgggctagtggtggtccctgtggctctgaacagcggtgtgtccctcctggtgcttgcgctgtgcctctctctggcttggttctcataggctctgcttgtgggatcagcagaggcttaagatgggatacatggcctgtgcagtgaggggacctgggtcctttgcttctgagaatgctcaactgaaagagaggccttctcatccccaagctctccagtcaacacagggctccctgtggtgacaccagtggagatgagggaacgggtagatggtgtgagtgaggggaacttttagagtggaactgggcatgtcctccgcctaccccccgagcctgtatttatttttgtataattctctggatgagggagagtggtcgtgagctggtcttggggcacaattacccagagatatatttattaacagccaacctgtgcaacctgctggagctttatttttaatttaatttatatagagtacctattattatatgccacaatagagctctatgagaaacagtgtcttgcggtgtagtgttctcctgtttgggcatgagtgtgcagggtggtcactttctgtgggaggatcacagtggggagttgggggtgggacgtggtc

SEQ ID NO: 2104 - protein, 799 aa, Homo sapiens
MARTAPVEPPLRHSAPPSPAAGEPRTSVEAAVAPRRVLFADEALGLPLAQLRRYRPWGGPGAGKMAAAAGQDGGGGGGADEDDDGEDGDEGEEEEEACPEPSPLCPVPAGGGFYLVPTFSLPPAPGRLERLGRVMVELEALLPPPGAVPGGAGVWVPGGRPPVLRGLVRVLNRSFEKAVHVRASHDGWASFCDHPARYVPRSPPWAGAGGTGAGDPILDPGLGLGPGQASASSPDDGGRTDRFAFQLPFAEGAGDGARLDFVVRYETPEGTFWANNHGRNYTVLLRIAPAPTPTDAEGLPQQQQLPQLEPQPECQGPVEAEARQLKSCMKPVRRRPAEEELKTKNMDDNTFAMAEHPDVQESVGPLVAPTPLRPWPQMTLQVSDVPMTGNPAEEGDVPRSSPPVAFTEVLQAPAIRIPPSSPLCGLGGSPRDQASGPDASEGATGPFLEPSQQQAEATWGVSSENGGGLEAVSGSEELLGEDTIDQELEQLYLSHLSRLRAAVAAGGAGGGGEGSTDGGMSPSHPLGILTDRDLILKWPGPERALNSALAEEITLHYARLGRGVELIKDTEDPDDEGEGEEGLSVTPSSPEGDSPKESPPEILSGARSVVATMGDVWLPWAEGSGCDGPVVLGTEGQFIGDPEKGMGKDTSSLHMNRVIAGVTESLGEAGTEAQIEVTSEWAGSLDPISGKEPASPVLLQGQNPTLLSPLGAEVCLSSVARPHVSSQDEKDAGPSLEPPKKSPTLAVPAECVCALPPQLRGPLTQTLGVLAGLVVVPVALNSGVSLLVLALCLSLAWFS

SEQ ID NO: 2105 - DNA, 393 bp, Homo sapiens
tgtgaggcagtgctgtgtggttcctgccgtccggactctttttcctctactgagattcatctgtgtgaaatatgagttggcgaggaagatcgacctattattggcctagaccaagaccctatgtacagcctcctgaaatgattgggcctatgcggcccgagcagttcagtgatgaagtggaaccagcaacacctgaagaaggggaaccagcaactcaacgtcaggatcctgcagctgctcaggagggagaggatgagggagcatctgcaggtcaaggtaaaaagcaatcacagtgttaaaagaagacacgttgaaatgatgcaggctgctcctatgttggaaatttgttcattaaaattctcccaataaagctttacagccttctgcaaagaa

SEQ ID NO: 2106 - protein, 75 aa, Homo sapiens
MSWRGRSTYYWPRPRPYVQPPEMIGPMRPEQFSDEVEPATPEEGEPATQRQDPAAAQEGEDEGASAGQGKKQSQC

SEQ ID NO: 2107 - DNA, 528 bp, Homo sapiens
ctgtgaggcagtgctgtgtggttcctgccgtccggactctttttcctctactgagattcatctgtgtgaaatatgagttggcgaggaagatcgacctatcggcctagaccaagacgctacgtagagcctcctgaaatgattgggcctatgcggcccgagcagttcagtgatgaagtggaaccagcaacacctgaagaaggggaaccagcaactcaacgtcaggatcctgcagctgctcaggagggagaggatgagggagcatctgcaggtcaagggccgaagcctgaagctgatagccaggaacagggtcacccacagactgggtgtgagtgtgaagatggtcctgatgggcaggagatggacccgccaaatccagaggaggtgaaaacgcctgaagaaggtgaaaagcaatcacagtgttaaaagaagacacgttgaaatgatgcaggctgctcctatgttggaaatttgttcattaaaattctcccaataaagctttacagccttctgcaaagaaaaaaaaaaaaa

SEQ ID NO: 2108 - protein, 116 aa, Homo sapiens
MSWRGRSTYRPRPRRYVEPPEMIGPMRPEQFSDEVEPATPEEGEPATQRQDPAAAQEGEDEGASAGQGPKPEADSQEQGHPQTGCECEDGPDGQEMDPPNPEEVKTPEEGEKQSQC

SEQ ID NO: 2109 - DNA, 390 bp, Homo sapiens
tgtgaggcagtgctgtgtggttcctgccgtccggactctttttcctctactgagattcatctgtgtgaaatatgagttggcgaggaagatcgacctatcggcctagaccaagacgctacgtagagcctcctgaaatgattgggcctatgcggcccgagcagttcagtgatgaagtggaaccagcaacacctgaagaaggggaaccagcaactcaacgtcaggatcctgcagctgctcaggagggagaggatgagggagcatctgcaggtcaaggtgaaaagcaatcacagtgttaaaagaaggcacgttgaaatgatgcaggctgctcctatgttggaaatttgttcattaaaattctcccaataaagctttacagccttctgcaaagaa

SEQ ID NO: 2110 - protein, 74 aa, Homo sapiens
MSWRGRSTYRPRPRRYVEPPEMIGPMRPEQFSDEVEPATPEEGEPATQRQDPAAAQEGEDEGASAGQGEKQSQC

SEQ ID NO: 2111 - DNA, 528 bp, Homo sapiens
cgccagggagctgtgaggcagtgctgtgtggttcctgccgtccggactctttttcctctactgagattcatctgtgtgaaatatgagttggcgaggaagatcgacctattattggcctagaccaaggcgctatgtacagcctcctgaaatgattgggcctatgcggcccgagcagttcagtgatgaagtggaaccagcaacacctgaagaaggggaaccagcaactcaacgtcaggatcctgcagctgctcaggagggagaggatgagggagcatctgcaggtcaagggccgaagcctgaagctgatagccaggaacagggtcacccacagactgggtgtgagtgtgaagatggtcctgatgggcaggagatggacccgccaaatccagaggaggtgaaaacgcctgaagaaggtgaaaagcaatcacagtgttaaaagaaggcacgttgaaatgatgcaggctgctcctatgttggaaatttgttcattaaaattctcccaataaagctttacagccttctgcaaaa

SEQ ID NO: 2112 - protein, 117 aa, Homo sapiens
MSWRGRSTYYWPRPRRYVQPPEMIGPMRPEQFSDEVEPATPEEGEPATQRQDPAAAQEGEDEGASAGQGPKPEADSQEQGHPQTGCECEDGPDGQEMDPPNPEEVKTPEEGEKQSQC

SEQ ID NO: 2113 - DNA, 524 bp, Homo sapiens
agctgtgaggcagtgctgtgtggttcctgccgtccggactctttttcctctactgagattcatctgtgtgaaatatgagttggcgaggaagatcgacctattattggcctagaccaaggcgctatgtacagcctcctgaagtgattgggcctatgcggcccgagcagttcagtgatgaagtggaaccagcaacacctgaagaaggggaaccagcaactcaacgtcaggatcctgcagctgctcaggagggagaggatgagggagcatctgcaggtcaagggccgaagcctgaagctgatagccaggaacagggtcacccacagactgggtgtgagtgtgaagatggtcctgatgggcaggagatggacccgccaaatccagaggaggtgaaaacgcctgaagaaggtgaaaagcaatcacagtgttaaaagaaggcacgttgaaatgatgcaggctgctcctatgttggaaatttgttcattaaaattctcccaataaagctttacagccttctgcaaagaaaa

SEQ ID NO: 2114 - protein, 117 aa, Homo sapiens
MSWRGRSTYYWPRPRRYVQPPEVIGPMRPEQFSDEVEPATPEEGEPATQRQDPAAAQEGEDEGASAGQGPKPEADSQEQGHPQTGCECEDGPDGQEMDPPNPEEVKTPEEGEKQSQC

SEQ ID NO: 2115 - DNA, 526 bp, Homo sapiens
tggttcctgccgtccggactctttttcctctactgagattcatctgtgtgaaatatgagttggcgaggaagatcgacctattattggcctagaccaaggcgctatgtacagcctcctgaaatgattgggcctatgcggcccgagcagttcagtgatgaagtggaaccagcaacacctgaagaaggggaaccagcaactcaacgtcaggatcctgcagctgctcaggagggagaggatgagggagcatctgcaggtcaagggccgaagcctgaagctcatagccaggaacagggtcacccacagactgggtgtgagtgtgaagatggtcctgatgggcaggagatggacccgccaaatccagaggaggtgaaaacgcctgaagaaggtgaaaagcaatcacagtgttaaaagaaggcacgttgaaatgatgcaggctgctcctatgttggaaatttgttcattaaaattctcccaataaagctttacagccttctgcaaagaaaaaaaaaaaaaaaaaaaaaaaaaa

SEQ ID NO: 2116 - protein, 117 aa, Homo sapiens
MSWRGRSTYYWPRPRRYVQPPEMIGPMRPEQFSDEVEPATPEEGEPATQRQDPAAAQEGEDEGASAGQGPKPEAHSQEQGHPQTGCECEDGPDGQEMDPPNPEEVKTPEEGEKQSQC

SEQ ID NO: 2117 - DNA, 498 bp, Homo sapiens
ggttcctgccgtccggactctttttcctctactgagattcatctgtgtgaaatatgagttggcgaggaagatcgacctattattggcctagaccaaggcgctatgtacagcctcctgaaatgattgggcctatgcggcccgagcagttcagtgatgaagtggaaccagcaacacctgaagaaggggaaccagcaactcaacgtcaggatcctgcagctgctcaggagggagaggatgagggagcatctgcaggtcaagggccgaagcctgaagctcatagccaggaacagggtcacccacagactgggtgtgagtgtgaagatggtcctgatgggcaggagatggacccgccaaatccagaggaggtgaaaacgcctgaagaaggtgaaaagcaatcacagtgttaaaagaaggcacgttgaaatgatgcaggctgctcctattttggaaatttgttcattaaaattctcccaataaagctttacagccttctgcaaa

SEQ ID NO: 2118 - protein, 117 aa, Homo sapiens; identical to SEQ ID NO: 2116

SEQ ID NO: 2119 - DNA, 538 bp, Homo sapiens
acgccagggagctgtgaggcagtgctgtgtggttcctgccgtccggactctttttcctctactgagattcatctgtgtgaaatatgagttggcgaggaagatcgacctatcggcctagaccaagacgctacgtagagcctcctgaaatgattgggcctatgcggcccgagcagttcagtgatgaagtggaaccagcaacacctgaagaaggggaaccagcaactcaacgtcaggatcctgcagctgctcaggagggagaggatgagggagcatctgcaggtcaagggccgaagcctgaagctcatagccaggaacagggtcacccacagactgggtgtgagtgtgaagatggtcctgatgggcaggagatggacccgccaaatccagaggaggtgaaaacgcctgaagaaggtgaaaagcaatcacagtgttaaaagaaggcacgttgaaatgatgcaggctgctcctatgttggaaatttgttcattaaaattctcccaataaagctttacagccttctgcaaagaagtcttgcgca

SEQ ID NO: 2120 - protein, 116 aa, Homo sapiens
MSWRGRSTYRPRPRRYVEPPEMIGPMRPEQFSDEVEPATPEEGEPATQRQDPAAAQEGEDEGASAGQGPKPEAHSQEQGHPQTGCECEDGPDGQEMDPPNPEEVKTPEEGEKQSQC

SEQ ID NO: 2121 - DNA, 393 bp, Homo sapiens
tgtgaggcagtgctgtgtggttcctgccgtccggactctttttcctctactgagattcatctgtgtgaaatatgagttggcgaggaagatcgacctattattggcctagaccaaggcgctatgtacagcctcctgaaatgattgggcctatgcggcccgagcagttcagtgatgaagtggaaccagcaacacctgaagaaggggaaccagcaactcaatgtcaggatcctgcagctgctcaggagggagaggatgagggagcatctgcaggtcaaggtgaaaagcaatcacagtgttaaaagaagacacgttgaaatgatgcaggctgctcctatgttggaaatttgttcattaaaattctcccaataaagctttacagccttctgcaaagaa

SEQ ID NO: 2122 - protein, 75 aa, Homo sapiens
MSWRGRSTYYWPRPRRYVQPPEMIGPMRPEQFSDEVEPATPEEGEPATQCQDPAAAQEGEDEGASAGQGEKQSQC

SEQ ID NO: 2123 - DNA, 393 bp, Homo sapiens; identical to SEQ ID NO: 2121

SEQ ID NO: 2124 - protein, 75 aa, Homo sapiens; identical to SEQ ID NO: 2122

SEQ ID NO: 2125 - DNA, 527 bp, Homo sapiens
gccagggagctgtgaggcagtgctgtgtggttcctgccgtccggactctttttcctctactgagattcatctgtgtgaaatatgagttggcgaggaagatcgacctattattggcctagaccaaggcgctatgtacagcctcctgaagtgattgggcctatgcggcccgagcagttcagtgatgaagtggaaccagcaacacctgaagaaggggaaccagcaactcaacgtcaggatcctgcagctgctcaggagggagaggatgagggagcatctgcaggtcaagggccgaagcctgaagctgatagccaggaacagggtcacccacagactgggtgtgagtgtgaagatggtcctgatgggcaggaggtggacccgccaaatccagaggaggtgaaaacgcctgaagaaggtgaaaagcaatcacagtgttaaaagaagacacgttgaaatgatgcaggctgctcctatgttggaaatttgttcattaaaattctcccaataaagctttacagccttctgcaaaa

SEQ ID NO: 2126 - protein, 117 aa, Homo sapiens
MSWRGRSTYYWPRPRRYVQPPEVIGPMRPEQFSDEVEPATPEEGEPATQRQDPAAAQEGEDEGASAGQGPKPEADSQEQGHPQTGCECEDGPDGQEVDPPNPEEVKTPEEGEKQSQC

SEQ ID NO: 2127 - DNA, 393 bp, Homo sapiens
tgtgaggcagtgctgtgtggttcctgccgtccggactctttttcctctactgagattcatctgtgtgaaatatgagttggcgaggaagatcgacctattattggcctagaccaaggcgctatgtacagcctcctgaaatgattgggcctatgcggcccgagcagttcagtgatgaagtggaaccagcaacacctgaagaaggggaaccagcaactcaacgtcaggatcctgcagctgctcaggagggagaggatgagggagcatctgcaggtcaaggtgaaaagcaatcacagtgttaaaagaagacacgttgaaatgatgcaggctgctcctatgttggaaatttgttcattaaaattctcccaataaagctttacagccttctgcaaagaa

SEQ ID NO: 2128 - protein, 75 aa, Homo sapiens
MSWRGRSTYYWPRPRRYVQPPEMIGPMRPEQFSDEVEPATPEEGEPATQRQDPAAAQEGEDEGASAGQGEKQSQC

SEQ ID NO: 2129 - DNA, 393 bp, Homo sapiens
tgtgaggcagtgctgtgtggttcctgccgtccggactctttttcctctactgagattcatctgtgtgaaatatgagttggcgaggaagatcgacctattattggcctagaccaaggcgctatgtacagcctcctgaaatgattgggcctatgcggcccgagcagttcagtgatgaagtggaaccagcaacacctgaagaaggggaaccagcaactcaatgtcaggatcctgcagctgctcagaagggagaggatgagggagcatctgcaggtcaaggtgaaaagcaatcacagtgttaaaagaagacacgttgaaatgatgcaggctgctcctatgttggaaatttgttcattaaaattctcccaataaagctttacagccttctgcaaagaa

SEQ ID NO: 2130 - protein, 75 aa, Homo sapiens
MSWRGRSTYYWPRPRRYVQPPEMIGPMRPEQFSDEVEPATPEEGEPATQCQDPAAAQKGEDEGASAGQGEKQSQC

SEQ ID NO: 2131 - DNA, 390 bp, Homo sapiens
tgtgaggcagtgctgtgtggttcctgccgtccggactctttttcctctactgagattcatctgtgtgaaatatgagttggcgaggaagatcgacctatcggcctagaccaagacgctacgtagagcctcctgaaatgattgggcctatgcggcccgagcagttcagtgatgaagtggaaccagcaacacctgaagaaggggaaccagcaactcaacgtcaggatcctgcagctgctcaggagggacaggatgagggagcatctgcaggtcaaggtgaaaagcaatcacagtgttaaaagaagacacgttgaaatgatgcaggctgctcctatgttggaaatttgttcattaaaattctcccaataaagctttacagccttctgcaaagaa

SEQ ID NO: 2132 - protein, 74 aa, Homo sapiens
MSWRGRSTYRPRPRRYVEPPEMIGPMRPEQFSDEVEPATPEEGEPATQRQDPAAAQEGQDEGASAGQGEKQSQC

SEQ ID NO: 2133 - DNA, 561 bp, Homo sapiens
gtcttctgcccggccccttcgcccacgtgaagaacgccagggagctgtgaggcagtgctgtgtggttcctgccgtccggactctttttcctctactgagattcatctgtgtgaaatatgagttggcgaggaagatcgacctatcggcctagaccaagacgctacgtagagcctcctgaaatgattgggcctatgcggcccgagcagttcagtgatgaagtggaaccagcaacacctgaagaaggggaaccagcaactcaacgtcaggatcctgcagctgctcaggagggacaggatgagggagcatctgcaggtcaagggccgaagcctgaagctcatagccaggaacagggtcacccacagactgggtgtgagtgtgaagatggtcctgatgggcaggagatggacccgccaaatccagaggaggtgaaaacgcctgaagaaggtgaaaagcaatcacagtgttaaaagaagacacgttgaaatgatgcaggctgctcctatgttggaaatttgttcattaaaattctcccaataaagctttacagccttctgcaaagaa

SEQ ID NO: 2134 - protein, 116 aa, Homo sapiens
MSWRGRSTYRPRPRRYVEPPEMIGPMRPEQFSDEVEPATPEEGEPATQRQDPAAAQEGQDEGASAGQGPKPEAHSQEQGHPQTGCECEDGPDGQEMDPPNPEEVKTPEEGEKQSQC

SEQ ID NO: 2135 - DNA, 953 bp, Homo sapiens
gtcttctgcccggccccttcgcccacgtgaagaacgccagggagctgtgaggcagtgctgtgtggttcctgccgtccggactctttttcctctactgagattcatctgtgtgaaatatgagttggcgaggaagatcgacctattattggcctagaccaaggcgctatgtacagcctcctgaaatgattgggcctatgcggcccgagcagttcagtgatgaagtggaaccagcaacacctgaagaaggggaaccagcaactcaacgtcaggatcctgcagctgctcaggagggagaggatgagggagcatctgcaggtcaagggccgaagcctgaagctgatagccaggaacagggtcacccacagactgggtgtgagtgtgaagatggtcctgatgggcaggagatggacccgccaaatccagaggaggtgaaaacgcctgaagaagagatgaggtctcactatgttgcccagactgggattctctggcttttaatgaacaattgcttcttaaatctttccccacggaaaccttgagtgactgaaatatcaaatggcaagagaccgtttagttcctatcatctgtggcatgtgaagggcaatcacagtgttaaaagaagacatgctgaaatgttgcaggctgctcctatgttggaaaattcttcattgaagttctcccaataaagctttacagccttctgcaaagaagtcttgtgaatcttttgtcaattttatttctagctatttgatgctgtgaaatgtttcattctttgaaattttgttttctatctccttgagctgtgtgtagaggcataattctcatgtattgattttctatccagcaaccttgttaaatatgcttatgaattttaaaagtttacttctaggttttttcaattttcaacctacagaatcataccatttttgaataagaacaattttgtttctgccttt

SEQ ID NO: 2136 - protein, 139 aa, Homo sapiens
MSWRGRSTYYWPRPRRYVQPPEMIGPMRPEQFSDEVEPATPEEGEPATQRQDPAAAQEGEDEGASAGQGPKPEADSQEQGHPQTGCECEDGPDGQEMDPPNPEEVKTPEEEMRSHYVAQTGILWLLMNNCFLNLSPRKP

SEQ ID NO: 2137 - DNA, 680 bp, Homo sapiens
gcccacgtggagaacgccagggagctgtgagagtgtgcagtcgcgttcctgctgtccggacacttttttcctctactgagactcatctggtagatccgcaggccagtcctcccaggggctgaagttgtgaaatatgggttttctaagaagattaatctatcggcgtagaccaatgatctatgtagaatcttctgaggagtccagtgatgagcaacctgacgaagtggaatcaccaactcaaagtcaggattctacacctgctgaagagagagaggatgagggagcatctgcagctcaagggcaggagcctgaagctgatagccaggaactggttcagccaaagactgggtgtgagcttggagatggtcctgataccaagagggtgtgcctgcgaaatgaagagcagatgaaactgcccgcagaagggccagagcctgaagcggatagccaggaacaggttcacccgaagactgggtgtgagcgcggagatggtcctgatgtccaggagttgggcctgccaaatccagaggaggtgaaaacacctgaggaagatgaagggcaatcacagccttaaaagaagacacgctgaaatggttcaggctgctcctgtgttggaaatttgaccattaaaattctcccaataaagctttacagccttctgcaaaaaaaaaaaaaaaaaa

SEQ ID NO: 2138 - protein, 146 aa, Homo sapiens
MGFLRRLIYRRRPMIYVESSEESSDEQPDEVESPTQSQDSTPAEEREDEGASAAQGQEPEADSQELVQPKTGCELGDGPDTKRVCLRNEEQMKLPAEGPEPEADSQEQVHPKTGCERGDGPDVQELGLPNPEEVKTPEEDEGQSQP

SEQ ID NO: 2139 - DNA, 493 bp, Homo sapiens
gccacttctcttcccttcattcttcgccaggctctctgctgactcaagttcttcagttcacgatcttctagttgcagcgatgagtgcacgagtgagatcaagatccagaggaagaggagatggtcaggaggctcccgatgtggttgcattcgtggctcccggtgaatctcagcaagaggaaccaccaactgacaatcaggatattgaacctggacaagagagagaaggaacacctccgatcgaagaacgtaaagtagaaggtgattgccaggaaatggatctggaaaagactcggagtgagcgtggagatggctctgatgtaaaagagaagactccacctaatcctaagcatgctaagactaaagaagcaggagatgggcagccataagttaaaaagaagacaagctgaagctacacacatggctgatgtcacattgaaaatgtgactgaaaatttgaaaattctctcaataaagtttgagttttctctgaag

SEQ ID NO: 2140 - protein, 102 aa, Homo sapiens
MSARVRSRSRGRGDGQEAPDVVAFVAPGESQQEEPPTDNQDIEPGQEREGTPPIEERKVEGDCQEMDLEKTRSERGDGSDVKEKTPPNPKHAKTKEAGDGQP

SEQ ID NO: 2141 - DNA, 1674 bp, Homo sapiens
cggcccccgccccggccccggccccggcgcggccctgggggcggatgcctggatgtggattttgccgtggggccaccaggctgttctcacgtgaacagctttaaggtgggagagaactggaggcaggaactgcgggttatctaccagtgcttcgtgtggtgtggaaccccagagaccaggaaaagcaaggcaaagtcctgcatctgccatgtgtgtggcacccatctgaacagactccactcttgcctttcctgtgtcttctttggctgcttcacggagaaacacattcacgagcacgcagagacgaaacaacacaacttagcagtagacctgtattacggaggtatatactgctttatgtgtaaggactatgtatatgacaaagacattgagcaaattgccaaagaagagcaaggagaagctttgaaattacaagcctccacctcaacagaggtttctcaccagcagtgttcagtgccaggccttggtgagaaattcccaacctgggaaacaaccaaaccagaattagaactgctggggcacaacccgaggagaagaagaatcacctccagctttacgatcggtttaagaggactcatcaatcttggcaacacgtgctttatgaactgcattgtccaggccctcacccacacgccgatactgagagatttctttctctctgacaggcaccgatgtgagatgccgagtcccgagttgtgtctggtctgtgagatgtcgtcgctgtttcgggagttgtattctggaaacccgtctcctcatgtgccctataagttactgcacctggtgtggatacatgcccgccatttagcagggtacaggcaacaggatgcccacgagttcctcattgcagcgttagatgtcctgcacaggcactgcaaaggtgatgatgtcgggaaggcggccaacaatcccaaccactgtaactgcatcatagaccaaatcttcacaggtggcctgcagtctgatgtcacctgtcaagcctgccatggcgtctccaccacgatagacccatgctgggacattagtttggacttgcctggctcttgcacctccttctggcccatgagcccagggagggagagcagtgtgaacggggaaagccacataccaggaatcaccaccctcacggactgcttgcggaggtttacgaggccagagcacttaggaagcagtgccaaaatcaaatgtggtagttgccaaagctaccaggaatctaccaaacagctcacaatgaataaattacctgtcgttgcctgttttcatttcaaacggtttgaacattcagcgaaacagaggcgcaagatcactacatacatttcctttcctctggagctggatatgacgccgtttatggcctcaagtaaagagagcagaatgaatggacaattgcagctgccaaccaatagtggaaacaacgaaaataagtattccttgtttgctgtggttaatcaccaaggaaccttggagagtggccactataccagcttcatccggcaccacaaggaccagtggttcaagtgtgatgatgccgtcatcactaaggccagtattaaggacgtactggacagtgaagggtatttactgttctatcacaaacaggtgctagaacatgagtcagaaaaagtgaaagaaatgaacacacaagcctactga

SEQ ID NO: 2142 - protein, 557 aa, Homo sapiens
  MISC_FEATURE 1: Xaa is unknown amino acid
XPPPRPRPRRGPGGGCLDVDFAVGPPGCSHVNSFKVGENWRQELRVIYQCFVWCGTPETRKSKAKSCICHVCGTHLNRLHSCLSCVFFGCFTEKHIHEHAETKQHNLAVDLYYGGIYCFMCKDYVYDKDIEQIAKEEQGEALKLQASTSTEVSHQQCSVPGLGEKFPTWETTKPELELLGHNPRRRRITSSFTIGLRGLINLGNTCFMNCIVQALTHTPILRDFFLSDRHRCEMPSPELCLVCEMSSLFRELYSGNPSPHVPYKLLHLVWIHARHLAGYRQQDAHEFLIAALDVLHRHCKGDDVGKAANNPNHCNCIIDQIFTGGLQSDVTCQACHGVSTTIDPCWDISLDLPGSCTSFWPMSPGRESSVNGESHIPGITTLTDCLRRFTRPEHLGSSAKIKCGSCQSYQESTKQLTMNKLPVVACFHFKRFEHSAKQRRKITTYISFPLELDMTPFMASSKESRMNGQLQLPTNSGNNENKYSLFAVVNHQGTLESGHYTSFIRHHKDQWFKCDDAVITKASIKDVLDSEGYLLFYHKQVLEHESEKVKEMNTQAY

SEQ ID NO: 2143 - DNA, 2232 bp, Homo sapiens
atggctgtctccgcatctccagtgatctctgcaacttccagcggcgccggcgtcccggggggcttattccgggccgaacccctgtactcgactcccagagagccccctcgtcttactcctaatatgatcaatagtttcgtggttaataaccacagcaacagtgccggaggcggcggcaggggcaacaccaacaccaacgagtgccgcatggtcgacatgcacgggatgaaggtggcttcgttcctgatggacggccaggaactgatctgcctgccgcaagtctttgatctttttctcaagcacctggtgggaggcttgcacactgtgtacaccaagctgaagagactggatatatcccccgtggtgtgtactgttgagcaggtccggatcctccgcgggctgggggccatccagcccggggtaaaccgctgcaaactcatcaccaggaaagacttcgaaactttgttcaccgattgcaccaatgccagaaggaagaggcaaatgacaagaaaacaagctgttaacagttcaagacccggcaggccccctaagcgttctttgggagtgttgcaggaaaatgcccgccttctgacccatgcagtcccaggcctcttatcgccaggacttatcactccgacaggtataacagctgcagcgatggctgaggcgatgaaacttcagaagatgaagcttatggctatgaacactcttcagggaaatggaagccaaaatgggaccgaatcagagcctgatgatcttaattctaacacaggtggaagtgaatcctcctgggataaagataagatgcagtctccatttgctgcacctggaccccaacatggaattgctcatgcagccctagctggccagccaggcattgggggtgctccaaccctcaatccactgcagcagaaccacctgctaaccaatagactggatctgccatttatgatgatgcctcatcccctacttccagtcagcttacctcctgcatcagttgccatggcaatgaatcagatgaaccatctcaatactattgccaacatggctgctgcagcacagattcacagtccactctccagagctggtacctctgttataaaggagcggatcccagagagtccttctcctgctccttctctagaagagaatcatcgtcctgggagccagacctcttcccacaccagcagcagtgtgtccagctctccctctcagatggatcatcatttggaaagaatggaagaggtaccagttcaaattccaataatgaagtcacccttggacaagatacagctgactcctgggcaggcattgcccgctggattccctggaccattcatttttgctgatagtctgtcctccgtggagactctgttgaccaacattcagggtctgctgaaagttgctttggataatgctcgcatccaggagaagcagattcaacaagaaaagaaggagctgcgactggagctctatagagagagagaaattagagaaaaccttgaaagacaacttgcagttgagcttcaaagcagaactactatgcaaaagcgcctgaagaaggagaaaaaaaccaagagaaaattgcaggaagccttggaatttgaatcaaagcgccgggagcaagtggagcaggcacttaagcaagccaccactagtgacagtggcctgaggatgttaaaagatactggaattccagatattgaaatagaaaacaatgggactcctcatgatagtgctgctatgcaaggaggtaactattactgtttagaaatggcacaacagttgtattcagcctgaaaggtcctcgctggctttacataaatgaagatgcttgtgattccagtttatctctgaaactattcaacatggagttatttcagttttgtttatcagcaaagctttgtttactgaaggagctatttaatctatgttacattaaaaaagaaacgcgtgtacattttaaaagcaatgatgtaaactttgttcttgcattagactgaccagtttaaaaatatgaactaaaacctaatggctaaagtaacttgaccatatttgatgcttttctatgctcatttcaacttggctttttgtcttttaaatttttaaaaaatgcagtagtgtgttagagactagaaagttatatgtatggtttccctgttctactatacataacgttaaagtacaccttctttgttaaaaatgtacttgctaaacttcagcgtaaataaa

SEQ ID NO: 2144 - protein, 599 aa, Homo sapiens
MAVSASPVISATSSGAGVPGGLFRAEPLYSTPREPPRLTPNMINSFVVNNHSNSAGGGGRGNTNTNECRMVDMHGMKVASFLMDGQELICLPQVFDLFLKHLVGGLHTVYTKLKRLDISPVVCTVEQVRILRGLGAIQPGVNRCKLITRKDFETLFTDCTNARRKRQMTRKQAVNSSRPGRPPKRSLGVLQENARLLTHAVPGLLSPGLITPTGITAAAMAEAMKLQKMKLMAMNTLQGNGSQNGTESEPDDLNSNTGGSESSWDKDKMQSPFAAPGPQHGIAHAALAGQPGIGGAPTLNPLQQNHLLTNRLDLPFMMMPHPLLPVSLPPASVAMAMNQMNHLNTIANMAAAAQIHSPLSRAGTSVIKERIPESPSPAPSLEENHRPGSQTSSHTSSSVSSSPSQMDHHLERMEEVPVQIPIMKSPLDKIQLTPGQALPAGFPGPFIFADSLSSVETLLTNIQGLLKVALDNARIQEKQIQQEKKELRLELYREREIRENLERQLAVELQSRTTMQKRLKKEKKTKRKLQEALEFESKRREQVEQALKQATTSDSGLRMLKDTGIPDIEIENNGTPHDSAAMQGGNYYCLEMAQQLYSA

SEQ ID NO: 2145 - DNA, 594 bp, Homo sapiens
atgatcttcagtcaagaactgaggataagccaagccctggggatcagtctgacaataatcatgggcaacctctccaagtgtcttttcattcagggaaaactgttgtttgccgagcccaaggatgcgggctttccatttagccaggatatcaatagccatttggccagcctctcaatggctagaaacacgagccccactccagaccccactgttagagaggctttgtgtgccccggataacttaaatgcgagtattgaaagtcagggccagattaagatgtacatcaatgaagtgtgtcgggagactgtgtcacgttgctgcaactcatttctgcagcaggccggattaaatttgttaataagcatgacagttattaataacatgcttgccaagtccgcttcagacttgaagtttcctttgatatcagagggaagtggatgtgctaaggttcaggttttgaaaccgctgatgggtttgtctgaaaagccagtcttggcgggggagttagtcggtgcccagatgctcttctcattcatgtccctctttatcagaaatggaaacagagagattctcctggaaacccctgccccataa

SEQ ID NO: 2146 - protein, 197 aa, Homo sapiens
MIFSQELRISQALGISLTIIMGNLSKCLFIQGKLLFAEPKDAGFPFSQDINSHLASLSMARNTSPTPDPTVREALCAPDNLNASIESQGQIKMYINEVCRETVSRCCNSFLQQAGLNLLISMTVINNMLAKSASDLKFPLISEGSGCAKVQVLKPLMGLSEKPVLAGELVGAQMLFSFMSLFIRNGNREILLETPAP

SEQ ID NO: 2147 - DNA, 1783 bp, Homo sapiens
cacgtgaccaagagccgcctagagcacaagtcctgctagtcgcctccgtctgggtaccagccccctattactctgcaggcgtgtgaagaaagaaggaaactagctcggaccgtgcagattcatcacaagagagctacaagagcctggaagaagctgaagactgctaccctccatccttactcaccctggacctgagagacctcttcaatcaggtggagcaaggccctctcctgtcctgccccaaggctggcacagacttgagcatgggccgggctcgggaagtgggttggatggcggcaggactgatgattggggctggtgcctgctactgcgtttacaaactgaccataggaagagatgacagtgagaagctggaggaggagggggaagaggagtgggacgatgaccaggagctggatgaggaggagcctgatatttggtttgattttgaaactatggctcggccctggactgaggatggggattggactgaacctggggccccaggtggcactgaggacaggccctcagggggaggcaaggccaaccgagcacacccaataaaacagcggccattcccctatgaacataaaaatacttggagtgctcaaaattgtaaaaatggcagttgtgttctggacctctccaagtgtcttttcattcagggaaaactgttgtttgccgagcccaaggatgcgggctttccatttagccaggatatcaatagccatttggccagcctctcaatggctagaaacacgagccccactccagaccccactgttagagaggctttgtgtgccccggataacttaaatgcgagtattgaaagtcagggccagattaagatgtacatcaatgaagtgtgtcgggagactgtgtcacgttgctgcaactcatttctgcagcaggccggattaaatttgttaataagcatgacagttattaataacatgcttgccaagtccgcttcagacttgaagtttcctttgatatcagagggaagtggatgtgctaaggttcaggttttgaaaccgctgatgggtttgtctgaaaagccagtcttggcgggggagttagtcggtgcccagatgctcttctcattcatgtccctctttatcagaaatggaaacagagagattctcctggaaacccctgccccataaacggccctctcgaacacaatgggacggaatccacccacaacgcgcttggtttgcagatgtcaaagaatctgcagagggtgctactgaagatccagccttagccaatcaccacctcattgggtgaaagttccagggctcaatccaggaccacactcttattggccaggcaggggctcccacagagctttgagtaacttcttggttgtgcagtctgcaggcaatgttggcattgtaaattcctcccttgcagcctccttcatgtggtgaggggatcacttcagctgcctgctgtggacaaagaacatcaaattacagcatcacgagtgctattgttgcctgtggtggtctccctgtccaagcgggaccgctttgcagagaccagaggcatatcgcggcttgagctgaaaatgcatttgttgcagcttaggttgaattatttttcgtttgctctttcttctacacgcgcctgatggatagtgaacctattcatcaaaaaagtgcactgctcttctgtctattgtaccgacttaacctcttccacccaagtccgcatctgtgtgtatcatcaataaagttgtgtgctttgattggcagaaaagaaaaaaaaaaaaaaaaaa

SEQ ID NO: 2148 - protein, 300 aa, Homo sapiens
MGRAREVGWMAAGLMIGAGACYCVYKLTIGRDDSEKLEEEGEEEWDDDQELDEEEPDIWFDFETMARPWTEDGDWTEPGAPGGTEDRPSGGGKANRAHPIKQRPFPYEHKNTWSAQNCKNGSCVLDLSKCLFIQGKLLFAEPKDAGFPFSQDINSHLASLSMARNTSPTPDPTVREALCAPDNLNASIESQGQIKMYINEVCRETVSRCCNSFLQQAGLNLLISMTVINNMLAKSASDLKFPLISEGSGCAKVQVLKPLMGLSEKPVLAGELVGAQMLFSFMSLFIRNGNREILLETPAP

SEQ ID NO: 2149 - DNA, 1865 bp, Homo sapiens
cacgtgaccaagagccgcctagagcacaagtcctgctagtcgcctccgtctgggtaccagccccctattactctgcaggcgtgtgaagaaagaaggaaactagctcggaccgtgcaggtttgtaggtctgttggcctgtaggtttcggcacaagtttcagcgagagaaggagaaaactgccttggttggaaccttgcagattcatcacaagagagctacaagagcctggaagaagctgaagactgctaccctccatccttactcaccctggacctgagagacctcttcaatcaggtggagcaaggccctctcctgtcctgccccaaggctggcacagacttgagcatgggccgggctcgggaagtgggttggatggcggcaggactgatgattggggctggtgcctgctactgcgtttacaaactgaccataggaagagatgacagtgagaagctggaggaggagggggaagaggagtgggacgatgaccaggagctggatgaggaggagcctgatatttggtttgattttgaaactatggctcggccctggactgaggatggggattggactgaacctggggccccaggtggcactgaggacaggccctcagggggaggcaaggccaaccgagcacacccaataaaacagcggccattcccctatgaacataaaaatacttggagtgctcaaaattgtaaaaatggcagttgtgttctggacctctccaagtgtcttttcattcagggaaaactgttgtttgccgagcccaaggatgcgggctttccatttagccaggatatcaatagccatttggccagcctctcaatggctagaaacacgagccccactccagaccccactgttagagaggctttgtgtgccccggataacttaaatgcgagtattgaaagtcagggccagattaagatgtacatcaatgaagtgtgtcgggagactgtgtcacgttgctgcaactcatttctgcagcaggccggattaaatttgttaataagcatgacagttattaataacatgcttgccaagtccgcttcagacttgaagtttcctttgatatcagagggaagtggatgtgctaaggttcaggttttgaaaccgctgatgggtttgtctgaaaagccagtcttggcgggggagttagtcggtgcccagatgctcttctcattcatgtccctctttatcagaaatggaaacagagagattctcctggaaacccctgccccataaacggccctctcgaacacaatgggacggaatccacccacaacgcgcttggtttgcagatgtcaaagaatctgcagagggtgctactgaagatccagccttagccaatcaccacctcattgggtgaaagttccagggctcaatccaggaccacactcttattggccaggcaggggctcccacagagctttgagtaacttcttggttgtgcagtctgcaggcaatgttggcattgtaaattcctcccttgcagcctccttcatgtggtgaggggatcacttcagctgcctgctgtggacaaagaacatcaaattacagcatcacgagtgctattgttgcctgtggtggtctccctgtccaagcgggaccgctttgcagagaccagaggcatatcgcggcttgagctgaaaatgcatttgttgcagcttaggttgaattatttttcgtttgctctttcttctacacgcgcctgatggatagtgaacctattcatcaaaaaagtgcactgctcttctgtctattgtaccgacttaacctcttccacccaagtccgcatctgtgtgtatcatcaataaagttgtgtgctttgattggcagaaaagaaaaaaaaaaaaaaaaaa

SEQ ID NO: 2150 - protein, 300 aa, Homo sapiens; identical to SEQ ID NO: 2148

SEQ ID NO: 2151 - DNA, 3395 bp, Homo sapiens
tgaccaagagctgacgtgtgcagaagtccttcttgtcctggtcgttgttcccgtctgagtaccagctccccactgccctgagggcgggccggcctgcggcggagggaaaaaggaagaggagaaggaaattgtcccgaatccctgcagtgggtccaagcctctcccgggtggccagtctttctgtaggttgcggcacaacgccaggcaaaagaagaggaaggaatttaatcctaatcggtggaggtcgatttgagggtctgctgtagcaggtggctccgcttgaagcgagggaggaagtttcctccgatcagtagagattggaaagattgttgggagtggcacaccactagggaaaagaagaaggggcgaactgcttgtcttgaggaggtcaacccccagaatcagctcttgtggccttgaagtggctgaagacgatcaccctccacaggcttgagcccagtcccacagccttcctcccccagcctgagtgactactctattccttggtccctgctattgtcggggacgattgcatgggctacgccaggaaagtaggctgggtgaccgcaggcctggtgattggggctggcgcctgctattgcatttatagactgactaggggaagaaaacagaacaaggaaaaaatggctgagggtggatctggggatgtggatgatgctggggactgttctggggccaggtataatgactggtctgatgatgatgatgacagcaatgagagcaagagtatagtatggtacccaccttgggctcggattgggactgaagctggaaccagagctagggccagggcaagggccagggctacccgggcacgtcgggctgtccagaaacgggcttcccccaattcagatgataccgttttgtcccctcaagagctacaaaaggttctttgcttggttgagatgtctgaaaagccttatattcttgaagcagctttaattgctctgggtaacaatgctgcttatgcatttaacagagatattattcgtgatctgggtggtctcccaattgtcgcaaagattctcaatactcgggatcccatagttaaggaaaaggctttaattgtcctgaataacttgagtgtgaatgctgaaaatcagcgcaggcttaaagtatacatgaatcaagtgtgtgatgacacaatcacttctcgcttgaactcatctgtgcagcttgctggactgagattgcttacaaatatgactgttactaatgagtatcagcacatgcttgctaattccatttctgacttttttcgtttattttcagcgggaaatgaagaaaccaaacttcaggttctgaaactccttttgaatttggctgaaaatccagccatgactagggaactgctcagggcccaagtaccatcttcactgggctccctctttaataagaaggagaacaaagaagttattcttaaacttctggtcatatttgagaacataaatgataatttcaaatgggaagaaaatgaacctactcagaatcaattcggtgaaggttcactttttttctttttaaaagaatttcaagtgtgtgctgataaggttctgggaatagaaagtcaccatgattttttggtgaaagtaaaagttggaaaattcatggccaaacttgctgaacatatgttcccaaagagccaggaataacaccttgattttgtaatttagaagcaacacacattgtaaactattcattttctccaccttgtttatatggtaaaggaatcctttcagctgccagttttgaataatgaatatcatattgtatcatcaatgctgatatttaactgagttggtctttaggtttaagatggataaatgaatatcactacttgttctgaaaacatgtttgttgctttttatctcgctgcctagattgaaatattttgctatttcttctgcataagtgacagtgaaccaattcatcatgagtaagctcccttctgtcattttcattgatttaatttgtgtatcatcaataaaattgtatgttaatgctggaaagaaaaaaagaagaaagaaagaaaccatccctgtccttcagtttataatctagttggagagataagaaacgtacaaaccaaaagataacagaatatctgaagcatgtactcattgtcagatgttccctctgagagcacagaggaggcaaaagcttctgtgggatgtgctagtcggctaaagcttcacagaggaggtggcaattgaaaatgagtcctgaatggggtagggtggttagggaattccatgagacaagacaaggggggcatggtgtgagaaaggcatggaagtaggaaccctcttcctatgacaggagatcattctgcttagagtggagagtgtggagagtgggagtagataattttggaaagctgggtgaagccagttgtggagaattgtttgaatattatcccattgaatacccagagccactaaatctttttttactagaaaataattggggtccatatgaaagtctctattactgagtagtgtcaatgagggtgtggcaaaatggagcctttcacatcctagtggtggccatttggtaatacagatataagccttaaactatgtaaacccttgtcctaaggaagtaattgaataattgcccaaagattgtatgtatgaggctgttcatcccagcactgtctaagctagtaaaaattggaaacaatttaagtatctagcacattggattggttataaagcaaggaatgttcacacagtaggatattataagtatgctgatggaaatctatattgccaggaaaagctattcattatgcgttgtgaagtcagaaagtaaaaaagggtagatagaagtattcgaagtatagttccattttttgagactaataaaacatatgtttaaaaggacactaaaaactggagttatagatatccagatagaaacagtagttatctttgggtagaagaataatgagtgatctttacttttttactttttattcatctttgtgtttttatttatctaaaatgggtattgatttttaggacggttttgaaaaagaaaagtgttgggaatgaagcaagtgattgattggaaaacatactgaatggaagaaatatttagattaaaaatgaggtaggttgaagtttcttctctgaaatgatagataaatggtgaagataaggcttattgtgaggattcagtgaggtaatatatgcaaagtacttacaatgttctggcacatagtaattaattaagaaaatcgagcacccttaattacctagaatgcagggttgttagttttttggttgacttttgttttgctggggcattctgccatgttttagtgtcatttaataaataatagtaacaataaaggttaacatttattaagt

SEQ ID NO: 2152 - protein, 379 aa, Homo sapiens
MGYARKVGWVTAGLVIGAGACYCIYRLTRGRKQNKEKMAEGGSGDVDDAGDCSGARYNDWSDDDDDSNESKSIVWYPPWARIGTEAGTRARARARARATRARRAVQKRASPNSDDTVLSPQELQKVLCLVEMSEKPYILEAALIALGNNAAYAFNRDIIRDLGGLPIVAKILNTRDPIVKEKALIVLNNLSVNAENQRRLKVYMNQVCDDTITSRLNSSVQLAGLRLLTNMTVTNEYQHMLANSISDFFRLFSAGNEETKLQVLKLLLNLAENPAMTRELLRAQVPSSLGSLFNKKENKEVILKLLVIFENINDNFKWEENEPTQNQFGEGSLFFFLKEFQVCADKVLGIESHHDFLVKVKVGKFMAKLAEHMFPKSQE

SEQ ID NO: 2153 - DNA, 3367 bp, Homo sapiens
tgaccaagagctgacgtgtgcagaagtccttcttgtcctggtcgttgttcccgtctgagtaccagctccccactgccctgagggcgggccggcctgcggcggagggaaaaaggaagaggagaaggaaattgtcccgaatccctgcagtctttctgtaggttgcggcacaacgccaggcaaaagaagaggaaggaatttaatcctaatcggtggaggtcgatttgagggtctgctgtagcaggtggctccgcttgaagcgagggaggaagtttcctccgatcagtagagattggaaagattgttgggagtggcacaccactagggaaaagaagaaggggcgaactgcttgtcttgaggaggtcaacccccagaatcagctcttgtggccttgaagtggctgaagacgatcaccctccacaggcttgagcccagtcccacagccttcctcccccagcctgagtgactactctattccttggtccctgctattgtcggggacgattgcatgggctacgccaggaaagtaggctgggtgaccgcaggcctggtgattggggctggcgcctgctattgcatttatagactgactaggggaagaaaacagaacaaggaaaaaatggctgagggtggatctggggatgtggatgatgctggggactgttctggggccaggtataatgactggtctgatgatgatgatgacagcaatgagagcaagagtatagtatggtacccaccttgggctcggattgggactgaagctggaaccagagctagggccagggcaagggccagggctacccgggcacgtcgggctgtccagaaacgggcttcccccaattcagatgataccgttttgtcccctcaagagctacaaaaggttctttgcttggttgagatgtctgaaaagccttatattcttgaagcagctttaattgctctgggtaacaatgctgcttatgcatttaacagagatattattcgtgatctgggtggtctcccaattgtcgcaaagattctcaatactcgggatcccatagttaaggaaaaggctttaattgtcctgaataacttgagtgtgaatgctgaaaatcagcgcaggcttaaagtatacatgaatcaagtgtgtgatgacacaatcacttctcgcttgaactcatctgtgcagcttgctggactgagattgcttacaaatatgactgttactaatgagtatcagcacatgcttgctaattccatttctgacttttttcgtttattttcagcgggaaatgaagaaaccaaacttcaggttctgaaactccttttgaatttggctgaaaatccagccatgactagggaactgctcagggcccaagtaccatcttcactgggctccctctttaataagaaggagaacaaagaagttattcttaaacttctggtcatatttgagaacataaatgataatttcaaatgggaagaaaatgaacctactcagaatcaattcggtgaaggttcactttttttctttttaaaagaatttcaagtgtgtgctgataaggttctgggaatagaaagtcaccatgattttttggtgaaagtaaaagttggaaaattcatggccaaacttgctgaacatatgttcccaaagagccaggaataacaccttgattttgtaatttagaagcaacacacattgtaaactattcattttctccaccttgtttatatggtaaaggaatcctttcagctgccagttttgaataatgaatatcatattgtatcatcaatgctgatatttaactgagttggtctttaggtttaagatggataaatgaatatcactacttgttctgaaaacatgtttgttgctttttatctcgctgcctagattgaaatattttgctatttcttctgcataagtgacagtgaaccaattcatcatgagtaagctcccttctgtcattttcattgatttaatttgtgtatcatcaataaaattgtatgttaatgctggaaagaaaaaaagaagaaagaaagaaaccatccctgtccttcagtttataatctagttggagagataagaaacgtacaaaccaaaagataacagaatatctgaagcatgtactcattgtcagatgttccctctgagagcacagaggaggcaaaagcttctgtgggatgtgctagtcggctaaagcttcacagaggaggtggcaattgaaaatgagtcctgaatggggtagggtggttagggaattccatgagacaagacaaggggggcatggtgtgagaaaggcatggaagtaggaaccctcttcctatgacaggagatcattctgcttagagtggagagtgtggagagtgggagtagataattttggaaagctgggtgaagccagttgtggagaattgtttgaatattatcccattgaatacccagagccactaaatctttttttactagaaaataattggggtccatatgaaagtctctattactgagtagtgtcaatgagggtgtggcaaaatggagcctttcacatcctagtggtggccatttggtaatacagatataagccttaaactatgtaaacccttgtcctaaggaagtaattgaataattgcccaaagattgtatgtatgaggctgttcatcccagcactgtctaagctagtaaaaattggaaacaatttaagtatctagcacattggattggttataaagcaaggaatgttcacacagtaggatattataagtatgctgatggaaatctatattgccaggaaaagctattcattatgcgttgtgaagtcagaaagtaaaaaagggtagatagaagtattcgaagtatagttccattttttgagactaataaaacatatgtttaaaaggacactaaaaactggagttatagatatccagatagaaacagtagttatctttgggtagaagaataatgagtgatctttacttttttactttttattcatctttgtgtttttatttatctaaaatgggtattgatttttaggacggttttgaaaaagaaaagtgttgggaatgaagcaagtgattgattggaaaacatactgaatggaagaaatatttagattaaaaatgaggtaggttgaagtttcttctctgaaatgatagataaatggtgaagataaggcttattgtgaggattcagtgaggtaatatatgcaaagtacttacaatgttctggcacatagtaattaattaagaaaatcgagcacccttaattacctagaatgcagggttgttagttttttggttgacttttgttttgctggggcattctgccatgttttagtgtcatttaataaataatagtaacaataaaggttaacatttattaagt

SEQ ID NO: 2154 - protein, 379 aa, Homo sapiens; identical to SEQ ID NO: 2152

SEQ ID NO: 2155 - DNA, 3318 bp, Homo sapiens
tctctcccactcgccgcccgctttccaagacatatgtcccgcttgcagcccatttcgatgctgcgaaacgtgggtccaagcctctcccgggtggccagtctttctgtaggttgcggcacaacgccaggcaaaagaagaggaaggaatttaatcctaatcggtggaggtcgatttgagggtctgctgtagcaggtggctccgcttgaagcgagggaggaagtttcctccgatcagtagagattggaaagattgttgggagtggcacaccactagggaaaagaagaaggggcgaactgcttgtcttgaggaggtcaacccccagaatcagctcttgtggccttgaagtggctgaagacgatcaccctccacaggcttgagcccagtcccacagccttcctcccccagcctgagtgactactctattccttggtccctgctattgtcggggacgattgcatgggctacgccaggaaagtaggctgggtgaccgcaggcctggtgattggggctggcgcctgctattgcatttatagactgactaggggaagaaaacagaacaaggaaaaaatggctgagggtggatctggggatgtggatgatgctggggactgttctggggccaggtataatgactggtctgatgatgatgatgacagcaatgagagcaagagtatagtatggtacccaccttgggctcggattgggactgaagctggaaccagagctagggccagggcaagggccagggctacccgggcacgtcgggctgtccagaaacgggcttcccccaattcagatgataccgttttgtcccctcaagagctacaaaaggttctttgcttggttgagatgtctgaaaagccttatattcttgaagcagctttaattgctctgggtaacaatgctgcttatgcatttaacagagatattattcgtgatctgggtggtctcccaattgtcgcaaagattctcaatactcgggatcccatagttaaggaaaaggctttaattgtcctgaataacttgagtgtgaatgctgaaaatcagcgcaggcttaaagtatacatgaatcaagtgtgtgatgacacaatcacttctcgcttgaactcatctgtgcagcttgctggactgagattgcttacaaatatgactgttactaatgagtatcagcacatgcttgctaattccatttctgacttttttcgtttattttcagcgggaaatgaagaaaccaaacttcaggttctgaaactccttttgaatttggctgaaaatccagccatgactagggaactgctcagggcccaagtaccatcttcactgggctccctctttaataagaaggagaacaaagaagttattcttaaacttctggtcatatttgagaacataaatgataatttcaaatgggaagaaaatgaacctactcagaatcaattcggtgaaggttcactttttttctttttaaaagaatttcaagtgtgtgctgataaggttctgggaatagaaagtcaccatgattttttggtgaaagtaaaagttggaaaattcatggccaaacttgctgaacatatgttcccaaagagccaggaataacaccttgattttgtaatttagaagcaacacacattgtaaactattcattttctccaccttgtttatatggtaaaggaatcctttcagctgccagttttgaataatgaatatcatattgtatcatcaatgctgatatttaactgagttggtctttaggtttaagatggataaatgaatatcactacttgttctgaaaacatgtttgttgctttttatctcgctgcctagattgaaatattttgctatttcttctgcataagtgacagtgaaccaattcatcatgagtaagctcccttctgtcattttcattgatttaatttgtgtatcatcaataaaattgtatgttaatgctggaaagaaaaaaagaagaaagaaagaaaccatccctgtccttcagtttataatctagttggagagataagaaacgtacaaaccaaaagataacagaatatctgaagcatgtactcattgtcagatgttccctctgagagcacagaggaggcaaaagcttctgtgggatgtgctagtcggctaaagcttcacagaggaggtggcaattgaaaatgagtcctgaatggggtagggtggttagggaattccatgagacaagacaaggggggcatggtgtgagaaaggcatggaagtaggaaccctcttcctatgacaggagatcattctgcttagagtggagagtgtggagagtgggagtagataattttggaaagctgggtgaagccagttgtggagaattgtttgaatattatcccattgaatacccagagccactaaatctttttttactagaaaataattggggtccatatgaaagtctctattactgagtagtgtcaatgagggtgtggcaaaatggagcctttcacatcctagtggtggccatttggtaatacagatataagccttaaactatgtaaacccttgtcctaaggaagtaattgaataattgcccaaagattgtatgtatgaggctgttcatcccagcactgtctaagctagtaaaaattggaaacaatttaagtatctagcacattggattggttataaagcaaggaatgttcacacagtaggatattataagtatgctgatggaaatctatattgccaggaaaagctattcattatgcgttgtgaagtcagaaagtaaaaaagggtagatagaagtattcgaagtatagttccattttttgagactaataaaacatatgtttaaaaggacactaaaaactggagttatagatatccagatagaaacagtagttatctttgggtagaagaataatgagtgatctttacttttttactttttattcatctttgtgtttttatttatctaaaatgggtattgatttttaggacggttttgaaaaagaaaagtgttgggaatgaagcaagtgattgattggaaaacatactgaatggaagaaatatttagattaaaaatgaggtaggttgaagtttcttctctgaaatgatagataaatggtgaagataaggcttattgtgaggattcagtgaggtaatatatgcaaagtacttacaatgttctggcacatagtaattaattaagaaaatcgagcacccttaattacctagaatgcagggttgttagttttttggttgacttttgttttgctggggcattctgccatgttttagtgtcatttaataaataatagtaacaataaaggttaacatttattaagt

SEQ ID NO: 2156 - protein, 379 aa, Homo sapiens; identical to SEQ ID NO: 2152

SEQ ID NO: 2157 - DNA, 2807 bp, Homo sapiens
cttaaagccctgaccgtcgttctccgtcctcctctgggtaccaactctattgcgcagctcgctgccgtgcgtttaacccaggcgaggaggaggaggagaaaattcccccagattcgggcagacacctccggcccacacagccgttcaccccccgtcttttcagtcctggaaaaggaattcgggctttcattgtctaacgtcgacagtctatatttctgctcttcagtctgtccttaggatgaagctctaactgaactgaagtaaggagaaacagccttgaatctttggagggtctgtcttccttttgggctctgtgcaactgcagctacagtggaaaaaagcaaactgctcttgatcccaggccctgcctaagcctcagcagaacttgtaagcctaaactgaagagcctcacccggacgagcaggcatcccttaaccttaagcaatccagttccacgccctggatcagtgaataaccccagctgcaccatgagccgcgttcgggatgctggctgtgtagcggcggggatagtgataggggctggtgcctggtactgtgtctacaaatacaccagggggagagaccagaccaagaagagaatggccaagcccaaaaaccgggctgtggctgggactggagccagggctagagctgggctaagagccggattcacaatcgaccttgggtcaggattcagtcccccaaccccagtccgtgctgaagcagaggacagggcccaggatgaagcctctgctctggacacagttggagctgaggcagtggccccagctgcatccagcgctgaggctcagagtggggcaggcagtcaggcccaagaggcagatggagccggggttgggcctaaggccgaatcagtagttggggctgcaatggcttctgcaatagcaccacctcccggggtgacagaggcccttggggctgcagaagcccctgcaatggcaggggctcccaaagtggcagaagctcccagagaagcggagacttccagggcagcggtgcctcctgggacagtggtgcctaccgaagcggcagcacccactgaggtgaccgagggtcctggggtagcagcacctaccaaggtagctgaagctcccggggtggcatcgcctaccgaggcagctgaggctcctgtgcccgcaacgcctactggggctgcagcacctactggggctgcagagtctcctggaacttctggttcccctagaacagcggtggttcctggaacatcagctgccaagaaagcaacccctggggctcacactggggctataccgaaagccacatcagcgactggagcggtacccaaaggtggaggcaagggtgtaaccaggtcccggaatgggggcaagggcaagggcaagaaaagcaaagttgaagtagacgaactggggatgggcttccgtcctggagatggggctgcagcagctgctgcagcctctgctaatggcggacaggctttcctggcagaggtccctgattctgaggaaggggagtccgggtggactgacacagagtcagattcagactctgagcccgagacccagcgcagagggaggggaagaagacccgttgccatgcagaagcgcccctttccttatgaaattgatgagattctgggtgtccgcgatctcaggaaggtccttgccttgcttcagaaatctgatgatcctttcatccaacaggtagctttgctcactctgagcaacaatgccaattattcatgcaatcaagagacaatccgcaaattgggaggcctcccaattattgcaaacatgatcaacaaaactgatccacacattaaggaaaaagccttaatggccatgaataacctgagtgagaattatgaaaatcagggccggcttcaggtgtacatgaataaagtgatggatgatatcatggcctctaacctgaactcagcagttcaagtagttggactaaaatttctaacaaacatgactattactaatgactaccagcacctgcttgtcaattccattgcaaactttttccgtttgctatctcagggaggtggaaaaatcaaggttgagattttgaaaatcctttcgaattttgctgaaaatccagatatgttgaagaaacttctcagtacccaagtgccagcatcatttagttccctctataattcttacgtggaatcagaaatccttattaatgcccttactctatttgagattatctatgacaatctcagagcagaagtgtttaactatagagaattcaataaaggttcccttttttacttatgcactacatctggagtgtgtgttaagaaaattagagccttagcaaatcaccatgacctcttagtgaaagtgaaagttataaaactagtgaacaaattctgattggttatgtaccgtcaaaagacttgaagaaatttcatgattttgcagtgtggaagcgttgaaaattgaaagttactgcttttccacttgctcatatagtaaagggatcctttcagctgccagtgttgaataatgtatcatccagagtgatgttatctgtgacagtcaccagctttaagctgaaccattttatgaataccaaataaatagacctcttgtactgaaaacatatttgtgactttaatcgtgctgcttggatagaaatatttttactggttcttctgaattgacagtaaacctgtccattatgaatggcctactgttctattatttgttttgacttgaatttatccaccaaagacttcatttgtgtatcatcaataaagttgtatgtttcaactgacaaaaaaaaaaaaaaaa

SEQ ID NO: 2158 - protein, 632 aa, Homo sapiens
MSRVRDAGCVAAGIVIGAGAWYCVYKYTRGRDQTKKRMAKPKNRAVAGTGARARAGLRAGFTIDLGSGFSPPTPVRAEAEDRAQDEASALDTVGAEAVAPAASSAEAQSGAGSQAQEADGAGVGPKAESVVGAAMASAIAPPPGVTEALGAAEAPAMAGAPKVAEAPREAETSRAAVPPGTVVPTEAAAPTEVTEGPGVAAPTKVAEAPGVASPTEAAEAPVPATPTGAAAPTGAAESPGTSGSPRTAVVPGTSAAKKATPGAHTGAIPKATSATGAVPKGGGKGVTRSRNGGKGKGKKSKVEVDELGMGFRPGDGAAAAAAASANGGQAFLAEVPDSEEGESGWTDTESDSDSEPETQRRGRGRRPVAMQKRPFPYEIDEILGVRDLRKVLALLQKSDDPFIQQVALLTLSNNANYSCNQETIRKLGGLPIIANMINKTDPHIKEKALMAMNNLSENYENQGRLQVYMNKVMDDIMASNLNSAVQVVGLKFLTNMTITNDYQHLLVNSIANFFRLLSQGGGKIKVEILKILSNFAENPDMLKKLLSTQVPASFSSLYNSYVESEILINALTLFEIIYDNLRAEVFNYREFNKGSLFYLCTTSGVCVKKIRALANHHDLLVKVKVIKLVNKF

SEQ ID NO: 2159 - DNA, 2858 bp, Homo sapiens
cttaaagccctgaccgtcgttctccgtcctcctctgggtaccaactctattgcgcagctcgctgccgtgcgtttaacccaggcgaggaggaggaggagaaaattcccccagattcgggcaggcccgcaccccacattccgtcctgttttgagaggaggagggaagagaaataaacgtggcagcgcatagaaggccagcagggagactgctttccagacacctccggcccacacagccgttcaccccccgtcttttcagtcctggaaaaggaattcggtctgtccttaggatgaagctctaactgaactgaagtaaggagaaacagccttgaatctttggagggtctgtcttccttttgggctctgtgcaactgcagctacagtggaaaaaagcaaactgctcttgatcccaggccctgcctaagcctcagcagaacttgtaagcctaaactgaagagcctcacccggacgagcaggcatcccttaaccttaagcaatccagttccacgccctggatcagtgaataaccccagctgcaccatgagccgcgttcgggatgctggctgtgtagcggcggggatagtgataggggctggtgcctggtactgtgtctacaaatacaccagggggagagaccagaccaagaagagaatggccaagcccaaaaaccgggctgtggctgggactggagccagggctagagctgggctaagagccggattcacaatcgaccttgggtcaggattcagtcccccaaccccagtccgtgctgaagcagaggacagggcccaggatgaagcctctgctctggacacagttggagctgaggcagtggccccagctgcatccagcgctgaggctcagagtggggcaggcagtcaggcccaagaggcagatggagccggggttgggcctaaggccgaatcagtagttggggctgcaatggcttctgcaatagcaccacctcccggggtgacagaggcccttggggctgcagaagcccctgcaatggcaggggctcccaaagtggcagaagctcccagagaagcggagacttccagggcagcggtgcctcctgggacagtggtgcctaccgaagcggcagcacccactgaggtgaccgagggtcctggggtagcagcacctaccaaggtagctgaagctcccggggtggcatcgcctaccgaggcagctgaggctcctgtgcccgcaacgcctactggggctgcagcacctactggggctgcagagtctcctggaacttctggttcccctagaacagcggtggttcctggaacatcagctgccaagaaagcaacccctggggctcacactggggctataccgaaagccacatcagcgactggagcggtacccaaaggtggaggcaagggtgtaaccaggtcccggaatgggggcaagggcaagggcaagaaaagcaaagttgaagtagacgaactggggatgggcttccgtcctggagatggggctgcagcagctgctgcagcctctgctaatggcggacaggctttcctggcagaggtccctgattctgaggaaggggagtccgggtggactgacacagagtcagattcagactctgagcccgagacccagcgcagagggaggggaagaagacccgttgccatgcagaagcgcccctttccttatgaaattgatgagattctgggtgtccgcgatctcaggaaggtccttgccttgcttcagaaatctgatgatcctttcatccaacaggtagctttgctcactctgagcaacaatgccaattattcatgcaatcaagagacaatccgcaaattgggaggcctcccaattattgcaaacatgatcaacaaaactgatccacacattaaggaaaaagccttaatggccatgaataacctgagtgagaattatgaaaatcagggccggcttcaggtgtacatgaataaagtgatggatgatatcatggcctctaacctgaactcagcagttcaagtagttggactaaaatttctaacaaacatgactattactaatgactaccagcacctgcttgtcaattccattgcaaactttttccgtttgctatctcagggaggtggaaaaatcaaggttgagattttgaaaatcctttcgaattttgctgaaaatccagatatgttgaagaaacttctcagtacccaagtgccagcatcatttagttccctctataattcttacgtggaatcagaaatccttattaatgcccttactctatttgagattatctatgacaatctcagagcagaagtgtttaactatagagaattcaataaaggttcccttttttacttatgcactacatctggagtgtgtgttaagaaaattagagccttagcaaatcaccatgacctcttagtgaaagtgaaagttataaaactagtgaacaaattctgattggttatgtaccgtcaaaagacttgaagaaatttcatgattttgcagtgtggaagcgttgaaaattgaaagttactgcttttccacttgctcatatagtaaagggatcctttcagctgccagtgttgaataatgtatcatccagagtgatgttatctgtgacagtcaccagctttaagctgaaccattttatgaataccaaataaatagacctcttgtactgaaaacatatttgtgactttaatcgtgctgcttggatagaaatatttttactggttcttctgaattgacagtaaacctgtccattatgaatggcctactgttctattatttgttttgacttgaatttatccaccaaagacttcatttgtgtatcatcaataaagttgtatgtttcaactgacaaaaaaaaaaaaaaaa

SEQ ID NO: 2160 - protein, 632 aa, Homo sapiens; identical to SEQ ID NO: 2158

SEQ ID NO: 2161 - DNA, 2062 bp, Homo sapiens
tccaggtttgttctggaaaacactaggtctgagagacagcaacaacaaaagtatactctaccattaaagaaataatgccgtatatgtagtagcacttttcaaagaaggaagaaaggtgggagtcatttccagggtaattttgacaagaggaactgtcattatgaacatggtgggtatgaacttctgccttcacgctgccaggagaatgatggaagcatggagatgagggatgtccacaaggaccgccaactaagacacactccttatagaatccaatgcaacaggaagctagtgaaatgacatagtgaagatcaaatccatattaccatttggagaaatagaaaacctccagagagaaaaatgaggcggaacacacaagatgaaaacatgaggaaatggttcaaggtcacaattccttatgggataaagtatgacaaggcatggctaatgaattcaatccagagcaattgcagtgtccccttcactccggttgatttccactacatccgaaatcgggcatgcttctttgtccaggttgctagtgctgcctctgcattgaaggatgtcagttataagatttatgatgatgagaaccaaaagatatgtatatttgtcagtcattttactgcgccctactctgtgaagaataagttgaagccaggccaaatggagatgctaaagctgaccatgaacaaacggtacaatgtctcccagcaagctcttgatctccagaatctccgctttgacccagacttgatgggccgtgacattgatataatcctgaatcgaagaaactgcatggctgccaccctgaagatcactgaaagaaatttccctgagctgttgtctttgaacttgtgcaacaacaaactgtaccagctggatggcctttctgacattacagagaaggctcccaaagtcaagaccctgaatctctccaaaaataagctggagtcggcgtgggagttgggcaaggtgaaagggctgaagctcgaagagctatggctagaagggaacccgttgtgcagcaccttctcggaccagtctgcctatgtaagtgccatccgggattgtttccccaagttgttacgcctggacggccgagagttatccgcaccagtgattgttgacattgacagctctgagacaatgaaaccctgcaaggaaaactttactggatctgagaccctaaagcatttagtcctgcaattcctgcagcagagcaacttgtgcaagtacttcaaggatagcaggaatataaaaattctcaaagacccctacctgcagaggaagctgctaaagcacacaaaatgtccacgaaacgtggactccctcagtgcattgcctgaaactcagcatgacttcacctccatcctggtggacatgtggtaccagaccgtgaacacctgcttcctccctcgggcaggcccagagagccagaggtggtggtgtttgttgtctctgaagtggaaggatggtctcagggttctgatcttgccttcatgtggaccttcatcactacctctggccgcaattccagtctgtgcatcatgaatgataagctgtttctgagggatgccagcccccaagagactcagagtgccttctccatcccagtgtccacactctcctccagctctgagccctccctctcctaggagcacaggaaatggtgcaggctttctctgcccagtctgggatgaaactagagtggtctcagaagtgccttcaggacaataagtggaactacattagagctggtcaggtcttcactatgctccagactgagggcaagatcccagtggaggccttcaagcaaatcccctaaaaggagccctttgatgtcatctttgtcttccttctcatcctctttgtttcctcttttcaccagcctaagaccactctaaggactggggttggaggcctggctgaccaagaagccaaagttaacttgcaggccacaggacatagccacctgaagagccagttgttctgtgtatttgccccactcatgatcaccgtttattttcataataaacagtgacgttacatgttgtatgtt

SEQ ID NO: 2162 - protein, 397 aa, Homo sapiens
MRRNTQDENMRKWFKVTIPYGIKYDKAWLMNSIQSNCSVPFTPVDFHYIRNRACFFVQVASAASALKDVSYKIYDDENQKICIFVSHFTAPYSVKNKLKPGQMEMLKLTMNKRYNVSQQALDLQNLRFDPDLMGRDIDIILNRRNCMAATLKITERNFPELLSLNLCNNKLYQLDGLSDITEKAPKVKTLNLSKNKLESAWELGKVKGLKLEELWLEGNPLCSTFSDQSAYVSAIRDCFPKLLRLDGRELSAPVIVDIDSSETMKPCKENFTGSETLKHLVLQFLQQSNLCKYFKDSRNIKILKDPYLQRKLLKHTKCPRNVDSLSALPETQHDFTSILVDMWYQTVNTCFLPRAGPESQRWWCLLSLKWKDGLRVLILPSCGPSSLPLAAIPVCAS

SEQ ID NO: 2163 - DNA, 3448 bp, Homo sapiens
gtccgcgcgcctcgctgcgatggcggcggcgccgagcacagtcaccccgctggcggcggagtcttcccctcaggaagctaccgtctctgccgcctcctcctcctcctacaccgcctgcgcggcagcggcggcggcggcggcggcggcggcagtaattgttcctgcctcctccgccacctccgcccctgcctgcccgcctgccggtggctgtggcgacggcggcggcggcggctttggcggctccactatggcggcggcggggagggggggcagtagttttaaagtagacacccgcccttgcctcagagaagatggagtcttgctctgtcaccaggctggagtgcagtggcgcaatctcggctcactgcagcctccacctcccgggttcaagcgactcccctgcctcagcctcccaaatagctgggactacagacgccatttggaatgaacaggaaaaggctgaactttttacagataagttttgtcaagtatgtggagtgatgctacagtttgaatcacaaagaatttcacattatgagggtgaaaaacatgctcaaaatgttagtttttattttcaaatgcatggggaacaaaatgaagtgcctggtaagaaaatgaagatgcatgttgagaattttcaggtgcataggtatgaaggagtggacaaaaacaaattttgtgatctctgcaacatgatgtttagctctccacttattgctcagtctcactatgtgggaaaggtccatgctaaaaaactgaagcaattaatggaggaacatgatcaggcatctccatcaggatttcaaccagagatggcatttagtatgagaacctatgtttgccatatttgtagtattgcttttacatctttagatatgttccggtcccacatgcaaggaagtgaacatcaaattaaagaatccattgttatcaatctagtgaagaattcaaggaagacacaagactcttaccaaaatgagtgtgcagattacatcaatgtgcagaaagccagaggactagaggccaagacttgtttcagaaagatggaagagagttctttggaaacccgtagatacagagaagtggtcgattccagacccagacatagaatgtttgaacaaagactcccatttgagactttccggacatacgcagcaccatacaatatttcacaagcaatggaaaagcagttacctcattcaaagaagacatatgactctttccaagatgaacttgaagattacatcaaagtacagaaagccagaggactagatccaaagacttgtttcagaaagatgagagagaactctgtggatactcatgggtacagagaaatggttgattctggacccagatcaagaatgtgtgagcaaagattttcacatgaggcttcccagacctaccaacgaccataccatatttcaccagtggaaagccagttacctcagtggctaccaacccattcaaagaggacatatgattctttccaagatgaacttgaagattacataaaagtgcagaaagccagaggactagagccaaaaacttgtttcagaaagataggagatagctctgtagaaacacacaggaacagagaaatggttgatgtcagacccagacatagaatgttggagcaaaagctcccatgtgagactttccagacctattcaggaccatatagtatttcacaagtagtggaaaaccagttacctcattgcttaccagctcatgatagcaaacagagactagattctattagctactgtcaactcaccagagactgtttcccagaaaaaccagtacccttgagccttaatcagcaagaaaataactctggctcatacagtgtagaatctgaagtttacaagcacctctcttcagaaaacaatactgctgaccatcaagcaggtcataaacagaaacatcagaagagaaaacgacacctagaagaaggcaaagaaaggccagagaaagagcagtccaagcataaaaggaaaaagagttatgaagatacagatttagacaaagacaagagcatcagacaaaggaaaagagaggaggatagagtcaaggtcagttcaggaaagcttaagcatcgaaaaaagaaaaaaagccatgatgtaccctccgagaaagaagaacgtaagcacaggaaagagaaaaagaaatctgttgaagaaaggacagaagaggaaatgctttgggatgagtctattcttggattttgaatgtttagttttgtttacccaaggttgaattgaaaaaaaaaaacagtcaatatggatttagaaaaaggaacacctgatgaagaaaaggagaggtagatacagtcagtgtcacttcaggacacttaggttttttttgtataaaaatttaaattgaattaaaagaaggaaaaaaaaagcccaaacttaacctctgagaaaagaacataagaactcaaggagaacataagagaaaaggaaacctgttacagaaaagacaagaatctgtgttttggaatgagtctattcttgggtattgaacttttagttttgtttgcccaaggattaattgaggaaatcagctaagaaaatggactttagacaaaagcaagaggatcagatgaagaaaaggagaggtagatacagtcagtgtcacttcaggaaagctatttaaaaaaacttgaaatttaattgaaagaagaaacaacaacaaaaaagcctaaacctagcctctgaacaacactaacatgagaacacaagaacttaagagaaaaagaaacctactcaagaaaagacagaagagacagtgatttgggatgagtctactctaggattttcaactttttagttttgttccttcaaagttgaaggaaaaaaagtttggttttataaaattcatgttattgtaatttttctaggtggatggctactttaatctctaaaaaagccaagtgaagtaaaagtattcagtatgccttttcctcaagttactttccttcattttcttaaaaaagaaaaaaaattattaaatgtttctcacatatctcacatataatgtaatttccctaaatgaagttgtctctacttctgctcatcaaattgctgtgatagtgaattatttattcatgggagataatttattttaaaggacagaattaccaagcgttacaaaatcagttctttccttggttttgtgttagtgttggtggtattttattgttgtttttctgtgtttatgtgtctcagctttctccaaggaatatgtatgaaataacttaaactgattttttctttgttaaatctaatttgcagtgtatttttgcattttctagttctgaaagtggaaaatgaaacagtctataataaacttagatgatatatagttttaaaacggtctcaaaaagtactgatataaggtcagtctatattctggaaatgtttatattaaagtgttttaatttcta

SEQ ID NO: 2164 - protein, 638 aa, Homo sapiens
MESCSVTRLECSGAISAHCSLHLPGSSDSPASASQIAGTTDAIWNEQEKAELFTDKFCQVCGVMLQFESQRISHYEGEKHAQNVSFYFQMHGEQNEVPGKKMKMHVENFQVHRYEGVDKNKFCDLCNMMFSSPLIAQSHYVGKVHAKKLKQLMEEHDQASPSGFQPEMAFSMRTYVCHICSIAFTSLDMFRSHMQGSEHQIKESIVINLVKNSRKTQDSYQNECADYINVQKARGLEAKTCFRKMEESSLETRRYREVVDSRPRHRMFEQRLPFETFRTYAAPYNISQAMEKQLPHSKKTYDSFQDELEDYIKVQKARGLDPKTCFRKMRENSVDTHGYREMVDSGPRSRMCEQRFSHEASQTYQRPYHISPVESQLPQWLPTHSKRTYDSFQDELEDYIKVQKARGLEPKTCFRKIGDSSVETHRNREMVDVRPRHRMLEQKLPCETFQTYSGPYSISQVVENQLPHCLPAHDSKQRLDSISYCQLTRDCFPEKPVPLSLNQQENNSGSYSVESEVYKHLSSENNTADHQAGHKQKHQKRKRHLEEGKERPEKEQSKHKRKKSYEDTDLDKDKSIRQRKREEDRVKVSSGKLKHRKKKKSHDVPSEKEERKHRKEKKKSVEERTEEEMLWDESILGF

SEQ ID NO: 2165 - DNA, 6122 bp, Homo sapiens
gagggcataattttttctcaattcatatttgcaaattgtttattgagagtcagtgttgtatagagggataaacatagatttggagatacagtcacttgccaagttgcaccgcagattcctctggtataaaatgaaaataatgtgactctacaggattgaataataattaactgaagtagtatatatagtacccatcacagaataggtttgtaacaaatgttaggtttgtaaaaatgttttgtcctgtcataattttaaaataggtaaattggacattttctgtttttctttataacataaatccgatattcacatgcagtttttttccaacttttattttaagttcatgggtgcatgtgcagatgtgaaggttcgttatataagtaaatgtgtgccatggtggttttgctgcacagatcatcccatcacctaggtattaagcccagcgttcattagcaattcttcctgacagctgcagttttgattatgtgcagctctcaattggcttttccccgtttaagatgttagaccagtggttctcagccttgactaattagaatcatgtgaggagcttttagaactcccattgctcaggccaaccctccaatcaattaaattaccatctctgggacttacacatttgtgttttgttttctcttttttgactccctaagtgatttttatatggagccaagattgaaaacagtgttagacacacactttcccaatttatgctttgaaaacaaagaccttagttcagagacttatgagatagggttatgattaggggaagagtaggccccacaagtttcagggtagtgaagattctgaagggtacaagcgataaaggagcctgagtttctgggtgaactcagaaacaaggaatcctagaagggctgagagcagaacagaacctcggaatagtctctgaaataaaagagtggagagtataagaaacagaatggaggcaggccccaggaggattcaatcaggaattctgaccttggggccataaataggtttcatatcttcacagaaagggtttacacaacttttgtatatcattttctgagatgtctgaatcctagaaaaagataaagaacatcagtatgtgaaaaagccaagggctaaggtaatggtaatcagactacagttctagaaatgcctctggatctttaatacatgactggcagctcttctaaacctctatgttacctctattagaatattatttctgatgtagtttgtggagaaacaaagcaggaatggaggagaacactgtatacagtatactttataagcactaaataaatatgtaaaaactctgaaatataatctgagtttatagtcataatgaagattattagctcaataatctagggtagaggtgtccaatctttcggcttccatgggccacgttggaagaagaattaccttgggccacacataaaatacactaacactaacaataactgatgagttaaaaaaaatcacataaaaatctcataatgttttaagaacatttgtgaatttgtgttgagtcacattcaaagacaccttgggccacatgtggcctgtgggctgcaagttggacaagcttgatctagggcaagtgctcaacagtggctgcacagttaaatcgtgtgtaaagctttcaaaaagtaagggtgcctaattccactcctagagattctgatttaattggtctgacatggagttgtaacatcaatatttttgaatttttccatatgattctaatgtgtaaccagcattgagaaccactaatccagaggaaaccaggactcctgcttatcttgcacaacttgggtaccctcaaaatatatggtattggcaaagttaatctgagcctaagttccagcacctgtaaaagatggtacgaatttcctaaaagaggttgttgtgaatatgtactctcctgggtttagtccttagctttgcaagaagtccaaaatcttcaagatgatcagcctcaaatcagggactcactaaccgcaaacaaacttgaaagtggctgataactaactggaaagatattactttaatatgtttctcacaaagcctgtgataatcatttgccatatttgtgatcatagaaatttcttgtccctgccctagaaacattgaatcatgttctccaggggagagcctgggaatctatatttttaactgacaccccagttgatttttatcaaagaagtctgggaaacattgtactttaagttattgtattgtcattctggtattgatttatggtaagaggagatacatatttccatttcctagtttttcttgatgtctgtcatccagggtatccttttcttggtatcaaagaatatgaaaaaccaattataatcagaaagtgacttagtatgcatgaaattagagcatagaaaaggatagttttgagggaacatttcattcatattttgacataacctgctgagttttcctgggcccgcaatagccagtagtgtgcagcctcattttcttcagagtcagcatctttctttccccttgcaagcagtctcctgtttctatgaatagtctttgctcagacaaggccaatatacttggtaataattaatttagcttctttgaaatgattaggtcactttttggtttaaaagattaccatggttgtccccaaaatctttgcatgtaccaatttatttcctcctccctagggtcagaatgattttatatttggcttatgaaatgtattaatttgcttcttctggtcaaagataaagtggaaggatgatgagatttttaaaaaattaatgtatcccttgcttctaattctacctacaaagtggaatagtgtgctagttactatatagttcccagtgtatagcttttgactcttttgaagtggtaactagtagttttgttttagaattttgctttcagcttttatcctgagagtggggctcactgaacctctctcctttctaaaatctgtggaaattacttttggtaactaaggcactgcagtgatctcaggtaagagagtaaaaaatttgcctttatttgtttttaatgttttgggacgtttcaggttttggttgggtggaaacagagttggggcaaacaaaaagaggctggttaagagattcagaggcaaaggttggttggccatgctaaatttcaggtgcctgttgcacctccatgtagcaacagtaagtagacagatagcagattcttagggaagaagttaagctagagaagcagtgtggtgtggtgtaaagaattctgggcattcaattaagaggtgtgggctctgagaggctaacactactactaacttgctctgtgactttgaccaagtcatttgacctctctgggccccatctttattggaaaatgtcaagtagatggtctctaataaatttttggtccagttctaacattatgtgattctaaatgtatttatactgaccttcttaacttgaactctttgttttttcagcatttagtatgagaacctatgtttgccatatttgtagtattgcttttacatctttagatatgttccggtcccacatgcaaggaagtgaacatcaaattaaagaatccattgttatcaatctagtgaagaattcaaggaagacacaagactcttaccaaaatgagtgtgcagattacatcaatgtgcagaaagccagaggactagaggccaagacttgtttcagaaagatggaagagagttctttggaaacccgtagatacagagaagtggtcgattccagacccagacatagaatgtttgaacaaagactcccatttgagactttccggacatacgcagcaccatacaatatttcacaagcaatggaaaagcagttacctcattcaaagaagacatatgactctttccaagatgaacttgaagattacatcaaagtacagaaagccagaggactagatccaaagacttgtttcagaaagatgagagagaactctgtggatactcatgggtacagagaaatggttgattctggacccagatcaagaatgtgtgagcaaagattttcacatgaggcttcccagacctaccaacgaccataccatatttcaccagtggaaagccagttacctcagtggctaccaacccattcaaagaggacatatgattctttccaagatgaacttgaagattacataaaagtgcagaaagccagaggactagagccaaaaacttgtttcagaaagataggagatagctctgtagaaacacacaggaacagagaaatggttgatgtcagacccagacatagaatgttggagcaaaagctcccatgtgagactttccagacctattcaggaccatatagtatttcacaagtagtggaaaaccagttacctcattgcttaccagctcatgatagcaaacagagactagattctattagctactgtcaactcaccagagactgtttcccagaaaaaccagtacccttgagccttaatcagcaagaaaataactctggctcatacagtgtagaatctgaagtttacaagcacctctcttcagaaaacaatactgctgaccatcaagcaggtcataaacagaaacatcagaagagaaaacgacacctagaagaaggcaaagaaaggccagagaaagagcagtccaagcataaaaggaaaaagagttatgaagatacagatttagacaaagacaagagcatcagacaaaggaaaagagaggaggatagagtcaaggtcagttcaggaaagcttaagcatcgaaaaaagaaaaaaagccatgatgtaccctccgagaaagaagaacgtaagcacaggaaagagaaaaagaaatctgttgaagaaaggacagaagaggaaatgctttgggatgagtctattcttggattttgaatgtttagttttgtttacccaaggttgaattgaaaaaaaaaaacagtcaatatggatttagaaaaaggaacacctgatgaagaaaaggagaggtagatacagtcagtgtcacttcaggacacttaggttttttttgtataaaaatttaaattgaattaaaagaaggaaaaaaaaagcccaaacttaacctctgagaaaagaacataagaactcaaggagaacataagagaaaaggaaacctgttacagaaaagacaagaatctgtgttttggaatgagtctattcttgggtattgaacttttagttttgtttgcccaaggattaattgaggaaatcagctaagaaaatggactttagacaaaagcaagaggatcagatgaagaaaaggagaggtagatacagtcagtgtcacttcaggaaagctatttaaaaaaacttgaaatttaattgaaagaagaaacaacaacaaaaaagcctaaacctagcctctgaacaacactaacatgagaacacaagaacttaagagaaaaagaaacctactcaagaaaagacagaagagacagtgatttgggatgagtctactctaggattttcaactttttagttttgttccttcaaagttgaaggaaaaaaagtttggttttataaaattcatgttattgtaatttttctaggtggatggctactttaatctctaaaaaagccaagtgaagtaaaagtattcagtatgccttttcctcaagttactttccttcattttcttaaaaaagaaaaaaaattattaaatgtttctcacatatctcacatataatgtaatttccctaaatgaagttgtctctacttctgctcatcaaattgctgtgatagtgaattatttattcatgggagataatttattttaaaggacagaattaccaagcgttacaaaatcagttctttccttggttttgtgttagtgttggtggtattttattgttgtttttctgtgtttatgtgtctcagctttctccaaggaatatgtatgaaataacttaaactgattttttctttgttaaatctaatttgcagtgtatttttgcattttctagttctgaaagtggaaaatgaaacagtctataataaacttagatgatatatagttttaaaacggtctcaaaaagtactgatataaggtcagtctatattctggaaatgtttatattaaagtgttttaatttcta

SEQ ID NO: 2166 - protein, 467 aa, Homo sapiens
MRTYVCHICSIAFTSLDMFRSHMQGSEHQIKESIVINLVKNSRKTQDSYQNECADYINVQKARGLEAKTCFRKMEESSLETRRYREVVDSRPRHRMFEQRLPFETFRTYAAPYNISQAMEKQLPHSKKTYDSFQDELEDYIKVQKARGLDPKTCFRKMRENSVDTHGYREMVDSGPRSRMCEQRFSHEASQTYQRPYHISPVESQLPQWLPTHSKRTYDSFQDELEDYIKVQKARGLEPKTCFRKIGDSSVETHRNREMVDVRPRHRMLEQKLPCETFQTYSGPYSISQVVENQLPHCLPAHDSKQRLDSISYCQLTRDCFPEKPVPLSLNQQENNSGSYSVESEVYKHLSSENNTADHQAGHKQKHQKRKRHLEEGKERPEKEQSKHKRKKSYEDTDLDKDKSIRQRKREEDRVKVSSGKLKHRKKKKSHDVPSEKEERKHRKEKKKSVEERTEEEMLWDESILGF

SEQ ID NO: 2167 - DNA, 1123 bp, Homo sapiens
agcggtcgggtccgggcgcccgcgcagaatcagctgtctgagctgcccaggcggcgggggagcagcgagcgggcttcagcgagccgcaggaggcacaggcctgtcctgggtccccgcaggtctgcgcgtctgttgttcccagcgctctgagaggcctgaaaaggaagagcaacctgtccagaatccccgcaggaaaggaaaaggaggggaaatctcgacatggaaaaactcttcaatgaaaatgaaggaatgccttcgaatcaaggaaagatagacaatgaagaacagccaccgcacgagggaaagccagaagtagcttgtattctggaagacaagaagttagaaaacgagggaaacacagaaaacacgggcaagagagttgaggaaccgttaaaggataaagaaaagccagagagtgcgggaaaggcaaaaggagaaggaaagtcagagaggaagggaaagtcagagatgcagggaggatcaaagacagagggaaagccagagagagggggaagggcagagggtgaaggagagccagacagtgaaagagagccagagagtgagggagagccagaaagtgaaacaagggctgcaggaaagcgcccagctgaggatgatatacccaggaaagccaaaagaaaaaccaacaaggggctggctcagtacctcaagcaatataaggaagccatacatgatatgaatttcagcaatgaggacatgataagagaatttgacaacatggctagggtggaggataaaaggagaaaaagcaaacagaaattgggggcgtttttgtggatgcaaagaaatttacaggaccccttctatcctaggggtccaagggaattcaggggtggctgcagggccccacgaagggacactgaagacattccttatgtgtagtgtccctggcaggcatttgtcaggccatatgttttaaccttatggtaatactttgctttagtcgttcctcctgctaccagtagcgttttgacccacctgccagtgtttgcttgctctatgtttcagtagcagattttcacacatgtgcattgcagagacgtcatgattcgtggaaaaataaagcagcttataatatcaaaaaaaaaaaaaaaaaaaaaaa

SEQ ID NO: 2168 - protein, 227 aa, Homo sapiens
MEKLFNENEGMPSNQGKIDNEEQPPHEGKPEVACILEDKKLENEGNTENTGKRVEEPLKDKEKPESAGKAKGEGKSERKGKSEMQGGSKTEGKPERGGRAEGEGEPDSEREPESEGEPESETRAAGKRPAEDDIPRKAKRKTNKGLAQYLKQYKEAIHDMNFSNEDMIREFDNMARVEDKRRKSKQKLGAFLWMQRNLQDPFYPRGPREFRGGCRAPRRDTEDIPYV

SEQ ID NO: 2169 - DNA, 1532 bp, Homo sapiens
gggggagcagcgagcgggcttcagcgagccgcaggaggcacaggcctgtcctgggtccccgcaggtctgcgcgtctgttgttcccagcgctcttggaggcctgcaaaggaagagcaacctgtccagactccccgcaggacaggaaaaagagaaatctcgacatggaaaaaccctacaataaaaatgaaggaaacctggaaaacgagggaaagccagaagatgaagtagagcctgatgatgaaggaaagtcagacgaggaagaaaagccagacgcggaggggaagacagaatgcgagggaaagcgaaaggctgagggagagccaggtgatgagggacaactggaagataagggaagccaggaaaagcagggcaagtccgaaggtgagggcaagccacaaggcgagggcaagccagcctcccaggcaaagccagagggccagccgcgggccgccgaaaagcgcccggctggagattatgtgccccggaaagcaaaaagaaaaacagacagggggacggacgattcccccaaggactctcaggaggacttacaggaaaggcatctgagcagtgaggagatgatgagagaatgtggagatgtgtcaagggctcaggaggagctaaggaaaaaacagaaaatgggtggttttcattggatgcaaagagatgtacaggatccattcgcccaaggggacaacggggtgtcaggggagtgaggggtggaggtaggggccaaagaggcttacacgatatcccatacctttaatgcctttggccttccattctgacttctctgatgagattattgtcaaccctgctttccctggtagatatttgccaggcccaatgctttaaccttaagctgatatttttgctttagatgtcaatctcgttaccagcagccttttgacccaactacagcgctctatattttagtagaggattttcacccatgtgcatggaaaagatgttcatgacacattgtaaaaaataaataaataaagaacagtttgcagaacctcgtatacggttatcagccaatatttataaaaatgtaaatgtttgtataatgcatttctgcgcaaagaaaaccctgaaagcatgtacactaaaaagcaggcaatggttattcctgaagggtagccaagaataggtctcacctgtattcaaaaatgagtcctaccacctcttgtatgtacctccatgatattcctctgctgctgtgcacatccctatgtcttccctaggtcgagccaggtcagtgggcactgttgctaggtcctctatcatgttcctgggtcttctaacatgagtgctgggtctgcatactcagacccatactaaaatataatactaaatatttgtcatactgaaaaataaataaaagctgaatacaatacatactaagaaattgaactgtttggtgcgcttacaaaggcaataaagacactcagaattcctgttatcagaacataagatgacaggtaaaattcatattatctctgggactaaaagctaaaggaatcaacctggaa

SEQ ID NO: 2170 - protein, 183 aa, Homo sapiens
MEKPYNKNEGNLENEGKPEDEVEPDDEGKSDEEEKPDAEGKTECEGKRKAEGEPGDEGQLEDKGSQEKQGKSEGEGKPQGEGKPASQAKPEGQPRAAEKRPAGDYVPRKAKRKTDRGTDDSPKDSQEDLQERHLSSEEMMRECGDVSRAQEELRKKQKMGGFHWMQRDVQDPFAQGDNGVSGE

SEQ ID NO: 2171 - DNA, 857 bp, Homo sapiens
atggtaattggaaatctgagctcacagtgacgtgacccttaggagacccagagccaatgcgtggattagtccctcctcctagttgcagtctggtagttgtcgctggccgtgtgacggctcgctgttgccctgaaggcaggcgagccagctgcccaggaaaggtggaaagtggtagaagctgacccctgagccctggcaggtctttaagtgcgtttgtgcagccgatttcaaggctaagagagaaagactgcctctgatccctgaaggaagaaaaaaaaaaaaaaaacaggaaaaaaactcaacatggaaaatgtccccaaggaaaacaaagttgtggagaaggccccagtgcagaatgaagcccccgctttaggaggtggtgaataccaggagcctggaggaaatgttaaaggggtttgggctccacctgccccgggttttggagaggatgtgcccaataggcttgtcgataacattgatatgatagatggagatggagatgatatggaacggttcatggaggagatgagagagctaaggaggaaaattagggaacttcagttgaggtacagtctgcgcattcttataggggaccctcctcaccatgatcatcatgatgagttttgccttatgccttgaatcttgaggttaataatcataaaatccctgctttctaaattcgcatttttcctggtgtacctttaatgtgaaccttttggcattcttctgcaattttctgattggagattgcattttgacctagtctgtaagtttttctgtcagaagaggactttcatcaactttcatggaaagatgtttattgcatactgtaaagttaataaagcaatttaaaagca

SEQ ID NO: 2172 - protein, 111 aa, Homo sapiens
MENVPKENKVVEKAPVQNEAPALGGGEYQEPGGNVKGVWAPPAPGFGEDVPNRLVDNIDMIDGDGDDMERFMEEMRELRRKIRELQLRYSLRILIGDPPHHDHHDEFCLMP

SEQ ID NO: 2173 - DNA, 1463 bp, Homo sapiens
atgtacaaagctttttggaaccatctgaaagaacagctattgagtactcctcctgacttcacttgtgctcttgaacttctaaaagaagttaaggagaaccacctaagaaatgagatagaagagctctggacacagatctcctcaagcaggaagcagaacatggggccctggatgtccctcatctttctaactacattctcaatttgatagccttgctatgtgcaccagttcgagatgaagtgatacagaaactagagaccataacagatccggtgcagttactgaggggcatcttccatgttctgggcctaatgaaaatggacatggtgaactataccattcagagctttcaaccctacctgcaggagcattccatccagtatgaacaagataaattccaggaactccgtgataaacagcccagtctcctcaattataccacaaaatggctaaccaaggcagccacagacatcactacactgtgtctgagttctcctgactcacctagctcctcctgcagcatggcatgttcacttccaaactggggaggtaacaactcagagcccaccagtccaacaatggtgctataccaaggctacctgaacctcctcctctgggatcctgaaaatgaagaattatctgagactctgctgatggacagaatctggctccaggaactggcattccagttgcaccagttaactgtcctggcctcagtcttgctagtggccagaagcttctctggtgaagttttattcagatcacctgaatttgtggatatactgaaatgcaccaccaaggccctaactgaggaatttatctccagacctaaagaagctatgctgagtgtgaatgaacaggtgtctcaggaaatctatcaaggccttaaggacatgggcctcactactctgagcagtgaaaacacagcatctcttctaggccaactccagaacatcaccaaggaagagagtggcattcgtagcatcgtggatcagcggatctgtttgtttcttaaatgctgtttgcttcatggcatgcaggagtctctgctacactttcctggaggcctcattctcattgaaggggagctggcagaactgggttggaagtttgtcattctgaagtatcataatcagcaggtatttggcccgtactatgctgagatcctaaaaaacatcatccatccagctcaagcacaagaaacagatagtgctgcaccccagccatggcaacaggagagaaagctgaatgagaatccagtgggccctccggtttcccttcactggctgatcattcttcagtatgctggcctgagccagaatcagggcatcaggcattcagctaaggacaggtctcagcttccacgggatttctctttctttcaagtgattctaggagtcactcctagtctggggctccaactgccaggttatgaatatcagctgactcagcatcacaaatga

SEQ ID NO: 2174 - DNA, 3848 bp, Homo sapiens
agacgcagaggcgaggccgccagtcgaggacgaggaggagataacatcaagatgccgaagactgaggaaactgtgctccagaatgatcccagtgtagcagagaatggggcccctgagcctaaaacaccagggcagagccagaaaagcaagagtttctgtttagatgaccagtctcctgacctgatgtcttttctgtcacagatctgatagagacagttaatgaagtttccaagctgagcatttcacatgaaattgtagtaaaccaagatttctatgtggaagagaccattttgcctccaaacggtgtagaaggcaggtttgcggaggcaatgtacaatgctttttggaaccatctgaaagaacagctattgagtactcctcctgacttcacttgtgcccttgaacttctaaaagatgttaaggagaccttgctatcactgctattaccatggcagaaccgcctaagaaatgagatagaagaagctctggacacagatctcctcaagcaggaagcagaacatggggccctggatgtccctcatctttctaactacattctcaatttgatggctctgctatgtgcaccggttcgagatgaagcgatacagaaactagagaccataagagatccagtgcagttactgaggggcatcctccgtgttctgggcctaatgaaaatggacatggtgaactataccatccagagctttcgaccctacctgcaggaacattccatccagtatgaacaagctaaattccaggaactccttgataaacagcccagtctcctcgattataccacaaaatggctaaccaaagcagccacagacatcactacactatgtccgagttctcctgactcacctagctcctcctgcagcatggcgtgttcacttccaagcggggcaggtaacaattcagagccccccagtccaacaatggtgctataccaaggctacctgaacctcctcctctgggatcttgaaaacgtagaattcccagagactctgctgatggacagaatccggctccaggaactggcattccagttgcaccagttaactgtcctggcctcagtcttgctagtggccagaagcttctctggtgaagttttattcagatcacctgaatttgtggatagactgaaatgcaccaccaaggccctaactgaggaatttatctccaggcctgaagagactatgctgagtgtgagtgaacaggtgtctcaggaagtccatcaaggccttaaggacatgggcctcactactctgagcagtgaaaacacagcatctcttctaggccaactccagaacatcaccaagaaagagaactgcattcgtagcattgttggagtctctgctacactttcctggaggcctcattctcattgaaaaggagttggcagaactgggctggaagtttctcaatctgatgcatcataatcagcagagtcatttttcacaaaacgaaatctttccagaagatcacgaataagagagatcaaagctaggcagcttgagttgaagtagagctggaagaaggagttttgaggactgtttcaaaaccactggactagatgatctctaaaggatcttatccaggacgcttcattgcatttggtcttcatttctccttagtctcctccaggctgacatttcctcaatctttattggtcttccacagccctgacacttttggagataccagtcagcatttccaagttcgttctgtgagactgtagtgtcaggacaaagcaacaacaaaatgtgctctactctaaagaagtgtgggacatacagaactgaagttgcagaatgccatgaccatggtagcacttttcaaggaagaaagaaaggtgggagttctttccgggataattttgacaagaggagctgtcattatgaacatggtgggtatgagcgcccgccttcacactgccaggagaatgatggaagcgtggagatgagggatgtccacaaggaccaacaactaagacacactccttatagcatccgatgcgaaagaagaatgaaatggcatagtgaagacgaaatccgtattaccacgtggagaaatagaaaacctccggagagaaaaatgagtcagaacacacaggatggatacacaaggaactggtttaaggtcacaattccttacgggataaagtatgacaaggcatggctaatgaattcaatccagagccattgcagtgaccgcttcactccggttgatttccactacgtccgaaatcgggcatgcttctttgtccaggatgctagcgctgcctccgcattgaaggatgtcagttataagatttatgatgatgagaaccaaaagatatgtatatttgtcaatcattctactgcgccctactctgtgaagaataagttgaagccaggccaaatggagatgctaaagctgaccatgaacaaacggtacaatgtctcccagcaagctcttgatctccagaatctccgctttgacccagacttgatgggccgtgacattgatataatcctgaatcgaagaaactgcatggctgccaccctgaagatcattgaaagaaatttccctgagctgttgtctttgaacttgtgcaacaacaagctgtaccagctggatggcctttctgacattacagagaaggctcccaaagtcaagaccctgaatctctccaaaaataagctggagtcggcgtgggagttgggcaaggtgaaagggctgaagctcgaagagctatggctagaagggaacccgttgtgcagcaccttctcggaccagtccgcctatgtaagtgccatccgggattgtttccccaagttgttacgcctggacggccgagagttatccgcaccagtgattgttgacattgacagctctgagacaatgaaaccctgcaaggaaaactttactggatctgagaccctaaagcatttagtcctgcaattcctgcagcagtattactcgatctatgactctggagatcgacagggtctcctcggtgcttaccacgatgaggcctgcttctccttggctattcccttcgaccccaaggactcagccccgagcagcttgtgcaagtactttgaggatagcaggaatatgaaaacactcaaggacccctacctgaagggggaactgctgaggcgcacaaaacgtgacattgtggactccctcagtgcgttgcccaaaactcagcatgacctcagctccatcctggtggacgtgtggtgccagacggaaaggatgctctgcttttctgtcaatggggttttcaaggaagtggaaggacagtctcagggttctgttctcgccttcacccggaccttcattgctacccctggcagcagttccagtctgtgcatcgtgaatgacgagctgtttgtgagggatgccagcccccaagagactcagagtgccttctccatcccagtgtccacactctcctccagctctgagccctccctctcccaggagcagcaggaaatggtgcaggctttctctgcccagtctgggatgaaactggagtggtctcagaagtgccttcaggacaatgagtggaactacactagagctggccaggccttcactatgctccagaccgagggcaagatccccgcagaggccttcaagcaaatctcctaaaaggagccctccgatgtcttctttgtcttcgttcacatcctctttgtttcctcttttcaccagcctaaggcctggctgaccaggaagccaacgttaacttgcaggccacgtgacataaccacccaaagagccagttgctctgtgtattcgccccactcatgatcaccattttattttcataataaagagtgacgttacacgtt

SEQ ID NO: 2175 - protein, 626 aa, Homo sapiens
MCSTLKKCGTYRTEVAECHDHGSTFQGRKKGGSSFRDNFDKRSCHYEHGGYERPPSHCQENDGSVEMRDVHKDQQLRHTPYSIRCERRMKWHSEDEIRITTWRNRKPPERKMSQNTQDGYTRNWFKVTIPYGIKYDKAWLMNSIQSHCSDRFTPVDFHYVRNRACFFVQDASAASALKDVSYKIYDDENQKICIFVNHSTAPYSVKNKLKPGQMEMLKLTMNKRYNVSQQALDLQNLRFDPDLMGRDIDIILNRRNCMAATLKIIERNFPELLSLNLCNNKLYQLDGLSDITEKAPKVKTLNLSKNKLESAWELGKVKGLKLEELWLEGNPLCSTFSDQSAYVSAIRDCFPKLLRLDGRELSAPVIVDIDSSETMKPCKENFTGSETLKHLVLQFLQQYYSIYDSGDRQGLLGAYHDEACFSLAIPFDPKDSAPSSLCKYFEDSRNMKTLKDPYLKGELLRRTKRDIVDSLSALPKTQHDLSSILVDVWCQTERMLCFSVNGVFKEVEGQSQGSVLAFTRTFIATPGSSSSLCIVNDELFVRDASPQETQSAFSIPVSTLSSSSEPSLSQEQQEMVQAFSAQSGMKLEWSQKCLQDNEWNYTRAGQAFTMLQTEGKIPAEAFKQIS

SEQ ID NO: 2176 - DNA, 2346 bp, Homo sapiens
ttgtggcaagattctgaggggaagtgtagctcccaggttggttccaagtcttcttccaattaggatcttatccaggacgcttcattgcatttggtcttcatttctccttagtctcctccaggctgacatttcctcaatctttattggtcttccacagccctgacacttttggagataccagtcagcatttccaagttcgttctgtgagactgtagtgtcaggacaaagcaacaacaaaatgtgctctactctaaagaagtgtgggacatacagaactgaagttgcagaatgccatgaccatggtagcacttttcaaggaagaaagaaaggtgggagttctttccgggataattttgacaagaggagctgtcattatgaacatggtgggtatgagcgcccgccttcacactgccaggagaatgatggaagcgtggagatgagggatgtccacaaggaccaacaactaagacacactccttatagcatccgatgcgaaagaagaatgaaatggcatagtgaagacgaaatccgtattaccacgtggagaaatagaaaacctccggagagaaaaatgagtcagaacacacaggatggatacacaaggaactggtttaaggtcacaattccttacgggataaagtatgacaaggcatggctaatgaattcaatccagagccattgcagtgaccgcttcactccggttgatttccactacgtccgaaatcgggcatgcttctttgtccaggatgctagcgctgcctccgcattgaaggatgtcagttataagatttatgatgatgagaaccaaaagatatgtatatttgtcaatcattctactgcgccctactctgtgaagaataagttgaagccaggccaaatggagatgctaaagctgaccatgaacaaacggtacaatgtctcccagcaagctcttgatctccagaatctccgctttgacccagacttgatgggccgtgacattgatataatcctgaatcgaagaaactgcatggctgccaccctgaagatcattgaaagaaatttccctgagctgttgtctttgaacttgtgcaacaacaagctgtaccagctggatggcctttctgacattacagagaaggctcccaaagtcaagaccctgaatctctccaaaaataagctggagtcggcgtgggagttgggcaaggtgaaagggctgaagctcgaagagctatggctagaagggaacccgttgtgcagcaccttctcggaccagtccgcctatgtaagtgccatccgggattgtttccccaagttgttacgcctggacggccgagagttatccgcaccagtgattgttgacattgacagctctgagacaatgaaaccctgcaaggaaaactttactggatctgagaccctaaagcatttagtcctgcaattcctgcagcagtattactcgatctatgactctggagatcgacagggtctcctcggtgcttaccacgatgaggcctgcttctccttggctattcccttcgaccccaaggactcagccccgagcagcttgtgcaagtactttgaggatagcaggaatatgaaaacactcaaggacccctacctgaagggggaactgctgaggcgcacaaaacgtgacattgtggactccctcagtgcgttgcccaaaactcagcatgacctcagctccatcctggtggacgtgtggtgccagacggaaaggatgctctgcttttctgtcaatggggttttcaaggaagtggaaggacagtctcagggttctgttctcgccttcacccggaccttcattgctacccctggcagcagttccagtctgtgcatcgtgaatgacgagctgtttgtgagggatgccagcccccaagagactcagagtgccttctccatcccagtgtccacactctcctccagctctgagccctccctctcccaggagcagcaggaaatggtgcaggctttctctgcccagtctgggatgaaactggagtggtctcagaagtgccttcaggacaatgagtggaactacactagagctggccaggccttcactatgctccagaccgagggcaagatccccgcagaggccttcaagcaaatctcctaaaaggagccctccgatgtcttctttgtcttcgttcacatcctctttgtttcctcttttcaccagcctaaggcctggctgaccaggaagccaacgttaacttgcaggccacgtgacataaccacccaaagagccagttgctctgtgtattcgccccactcatgatcaccattttattttcataataaagagtgacgttacacgttaaaaaaaaaaaaaaaaaaaaaaaa

SEQ ID NO: 2177 - protein, 626 aa, Homo sapiens; identical to SEQ ID NO: 2175

SEQ ID NO: 2178 - DNA, 2887 bp, Homo sapiens
cctcctcctctgggatcttgaaaacgtagaattcccagagactctgctgatggacagaatccggctccaggaactggcattccagttgcaccagttaactgtcctggcctcagtcttgctagtggccagaagcttctctggtgaagttttattcagatcacctgaatttgtggatagactgaaatgcaccaccaaggccctaactgaggaatttatctccaggcctgaagagactatgctgagtgtgagtgaacaggtgtctcaggaagtccatcaaggccttaaggacatgggcctcactactctgagcagtgaaaacacagcatctcttctaggccaactccagaacatcaccaagaaagagaactgcattcgtagcattgttggagtctctgctacactttcctggaggcctcattctcattgaaaaggagttggcagaactgggctggaagtttctcaatctgatgcatcataatcagcagagtcatttttcacaaaacgaaatctttccagaagatcacgaataagagagatcaaagctaggcagcttgagttgaagtagagctggaagaaggagttttgaggactgtttcaaaaccactggactagatgatctctaaaggatcttatccaggacgcttcattgcatttggtcttcatttctccttagtctcctccaggctgacatttcctcaatctttattggtcttccacagccctgacacttttggagataccagtcagcatttccaagttcgttctgtgagactgtagtgtcaggacaaagcaacaacaaaatgtgctctactctaaagaagtgtgggacatacagaactgaagttgcagaatgccatgaccatggtagcacttttcaaggaagaaagaaaggtgggagttctttccgggataattttgacaagaggagctgtcattatgaacatggtgggtatgagcgcccgccttcacactgccaggagaatgatggaagcgtggagatgagggatgtccacaaggaccaacaactaagacacactccttatagcatccgatgcgaaagaagaatgaaatggcatagtgaagacgaaatccgtattaccacgtggagaaatagaaaacctccggagagaaaaatgagtcagaacacacaggatggatacacaaggaactggtttaaggtcacaattccttacgggataaagtatgacaaggcatggctaatgaattcaatccagagccattgcagtgaccgcttcactccggttgatttccactacgtccgaaatcgggcatgcttctttgtccaggatgctagcgctgcctccgcattgaaggatgtcagttataagatttatgatgatgagaaccaaaagatatgtatatttgtcaatcattctactgcgccctactctgtgaagaataagttgaagccaggccaaatggagatgctaaagctgaccatgaacaaacggtacaatgtctcccagcaagctcttgatctccagaatctccgctttgacccagacttgatgggccgtgacattgatataatcctgaatcgaagaaactgcatggctgccaccctgaagatcattgaaagaaatttccctgagctgttgtctttgaacttgtgcaacaacaagctgtaccagctggatggcctttctgacattacagagaaggctcccaaagtcaagaccctgaatctctccaaaaataagctggagtcggcgtgggagttgggcaaggtgaaagggctgaagctcgaagagctatggctagaagggaacccgttgtgcagcaccttctcggaccagtccgcctatgtaagtgccatccgggattgtttccccaagttgttacgcctggacggccgagagttatccgcaccagtgattgttgacattgacagctctgagacaatgaaaccctgcaaggaaaactttactggatctgagaccctaaagcatttagtcctgcaattcctgcagcagtattactcgatctatgactctggagatcgacagggtctcctcggtgcttaccacgatgaggcctgcttctccttggctattcccttcgaccccaaggactcagccccgagcagcttgtgcaagtactttgaggatagcaggaatatgaaaacactcaaggacccctacctgaagggggaactgctgaggcgcacaaaacgtgacattgtggactccctcagtgcgttgcccaaaactcagcatgacctcagctccatcctggtggacgtgtggtgccagacggaaaggatgctctgcttttctgtcaatggggttttcaaggaagtggaaggacagtctcagggttctgttctcgccttcacccggaccttcattgctacccctggcagcagttccagtctgtgcatcgtgaatgacgagctgtttgtgagggatgccagcccccaagagactcagagtgccttctccatcccagtgtccacactctcctccagctctgagccctccctctcccaggagcagcaggaaatggtgcaggctttctctgcccagtctgggatgaaactggagtggtctcagaagtgccttcaggacaatgagtggaactacactagagctggccaggccttcactatgctccagaccgagggcaagatccccgcggaggccttcaagcaaatctcctaaaaggagccctccgatgtcttctttgtcttcgttcacatcctctttgtttcctcttttcaccagcctaaggcctggctgaccaggaagccaacgttaacttgcaggccacgtgacataaccacccaaagagccagttgctctgtgtattcgccccactcatgatcaccattttattttcataataaagagtgacgttacacgttgta

SEQ ID NO: 2179 - protein, 626 aa, Homo sapiens; identical to SEQ ID NO: 2175

SEQ ID NO: 2180 - DNA, 2325 bp, Homo sapiens
ttgtggcaagattctgaggggaagtgtagctcccaggttggttccaagtcttcttccaattaggatcttatccaggacgcttcattgcatttggtcttcatttctccttagtctcctccaggctgacatttcctcaatctttattggtcttccacagccctgacacttttggagataccagtcagcatttccaagttcgttctgtgagactgtagtgtcaggacaaagcaacaacaaaatgtgctctactctaaagaagtgtgggacatacagaactgaagttgcagaatgccatgaccatggtagcacttttcaaggaagaaagaaaggtgggagttctttccgggataattttgacaagaggagctgtcattatgaacatggtgggtatgagcgcccgccttcacactgccaggagaatgatggaagcgtggagatgagggatgtccacaaggaccaacaactaagacacactccttatagcatccgatgcgaaagaagaatgaaatggcatagtgaagacgaaatccgtattaccacgtggagaaatagaaaacctccggagagaaaaatgagtcagaacacacaggatggatacacaaggaactggtttaaggtcacaattccttacgggataaagtatgacaaggcatggctaatgaattcaatccagagccattgcagtgaccgcttcactccggttgatttccactacgtccgaaatcgggcatgcttctttgtccaggatgctagcgctgcctccgcattgaaggatgtcagttataagatttatgatgatgagaaccaaaagatatgtatatttgtcaatcattctactgcgccctactctgtgaagaataagttgaagccaggccaaatggagatgctaaagctgaccatgaacaaacggtacaatgtctcccagcaagctcttgatctccagaatctccgctttgacccagacttgatgggccgtgacattgatataatcctgaatcgaagaaactgcatggctgccaccctgaagatcattgaaagaaatttccctgagctgttgtctttgaacttgtgcaacaacaagctgtaccagctggatggcctttctgacattacagagaaggctcccaaagtcaagaccctgaatctctccaaaaataagctggagtcggcgtgggagttgggcaaggtgaaagggctgaagctcgaagagctatggctagaagggaacccgttgtgcagcaccttctcggaccagtccgcctatgtaagtgccatccgggattgtttccccaagttgttacgcctggacggccgagagttatccgcaccagtgattgttgacattgacagctctgagacaatgaaaccctgcaaggaaaactttactggatctgagaccctaaagcatttagtcctgcaattcctgcagcagtattactcgatctatgactctggagatcgacagggtctcctcggtgcttaccacgatgaggcctgcttctccttggctattcccttcgaccccaaggactcagccccgagcagcttgtgcaagtactttgaggatagcaggaatatgaaaacactcaaggacccctacctgaagggggaactgctgaggcgcacaaaacgtgacattgtggactccctcagtgcgttgcccaaaactcagcatgacctcagctccatcctggtggacgtgtggtgccagacggaaaggatgctctgcttttctgtcaatggggttttcaaggaagtggaaggacagtctcagggttctgttctcgccttcacccggaccttcattgctacccctggcagcagttccagtctgtgcatcgtgaatgacgagctgtttgtgagggatgccagcccccaagagactcagagtgccttctccatcccagtgtccacactctcctccagctctgagccctccctctcccaggagcagcaggaaatggtgcaggctttctctgcccagtctgggatgaaactggagtggtctcagaagtgccttcaggacaatgagtggaactacactagagctggccaggccttcactatgctccagaccgagggcaagatccccgcggaggccttcaagcaaatctcctaaaaggagccctccgatgtcttctttgtcttcgttcacatcctctttgtttcctcttttcaccagcctaaggcctggctgaccaggaagccaacgttaacttgcaggccacgtgacataaccacccaaagagccagttgctctgtgtattcgccccactcatgatcaccattttattttcataataaagagtgacgttacacgttgta

SEQ ID NO: 2181 - protein, 626 aa, Homo sapiens; identical to SEQ ID NO: 2175

SEQ ID NO: 2182 - DNA, 666 bp, Homo sapiens
gggtggcttagcactgcagggctctgcgcgggaacgctaacctggtccggagcgagtctgggtctcagccccgcgaacagcctttcacgagtcttcaagctttcaggctatcttctagtcaagatgagtgataagccagacttgtcggaagtggagaagtttgacaggtcaaaactgaagaaaactaatactgaagaaaaaaatactcttccctcaaaggaaactatccagcaagagaaagagtgtgttcaaacatcataaaatggggatcgcctcccaacagcagatttcgacattacctgagagtcttgattttaggcttgttttttgtaaacccatgtgtttgtagagattttaggcgtcttcggatatcttctcacctatgttccctggctaagaagtcagaggtagccaatgtttccttaaattcatttttaaacttaccattggtgcatatgttccagatggcagatgctgtcaataatctcaccattgatgacctttgtgtatgtagttcttgcatcctatactggataagcctgttttaacctgctatgatgggtgcttccattgcttcataatcttcatgaagttgcatgcttttgcagcttttcacagtttatttgcatttctaatgtagtaataaagtaaccaatataatcatta

SEQ ID NO: 2183 - protein, 45 aa, Homo sapiens
MSDKPDLSEVEKFDRSKLKKTNTEEKNTLPSKETIQQEKECVQTS

SEQ ID NO: 2184 - DNA, 1548 bp, Homo sapiens
atgggtcccgccatgcctcccagtaagatgccagaaagctcaggagttagtgtctccagtggactgagtcagtgttactggggcagtggtttctccaagccctttaggaagatgatgacctcgacttttctctgcctgacatcctattgaaagaggagaccatggaagatgaagagctgaccaacctgagctggctgcatgagagcaagaacttgctgaagagctttggggagtcgatcctcgagtgtcagcccggtccagggcctggacgatgacagccaccgtccccacccactctgatatgccctaggatgccaggcagaaccccaactgcaatccccccttactcctttagctgcctcatatttatggccatcgaggactctccaaccaagcgcctgcctgtgaaagatatttacaactggatcttgaaacattttccatattttgcaaatgcacctactgggtggaaatactcagtgagacacaatttgtcattgaataaggattttaagaaagtggacgaagagaggagtcagagtattgggaaagggtcgttgtggtgcatagacccagagtatagacaaaatctaactcaggctttgaaaaagacactttatctcccacacccacatccacacgtgttcaatacacctcccacctgtcctcaggcatatcaaagcacatcaggtctacccgtctggccgggcagtaccttcttcaagagaaatggagcccttctccaagatcctgacattgatgctaccagggccatgggactccccctgaaatacaagcaggttttcctccaggagtgatacaaaacggagcgcgggtcctgagctgagaggactgtttcctggtgtgcggcagctgccgatcagtcccattgagatgacggctgccatgatgtacggcatcaccagctgccggatgcggactgagagcgagccatcgtgtggctccccggtggttagcggagaccctaaggaggatcacaactgcaccaatgccaaatcctccaacgcccggagcaccttgcccaccagcgactccatcccctcctcctccttggccgacgaccactacaagtttgccagcaaggagagccaggagggcaatgagggcagcgaggggagcttccggagccacgagagccacagcgacagggaagaggacgacaggaaacacagccagaaggagcccagggatgctctgggggacagcgggtacgcatcccagcacaagaaacgccaggactttgctaaggccaggaaggtccccagcgacacactgcccctcaaaaagagacgcactgtaaagcaccgcccccgcaccgccccccaccagggcgaagaagaggagattaaagaagcggcggggtcgctcctgcacttagcagagatccgatcctgtttgaataacatcaccaatcggacggcaaaggggcaggaagagcaaaacgaaatcacaaaaaaattaaaaacaagtcactgttttgttttgaacttaaggccatttggtttcagcatgtcaggagatttctaa

SEQ ID NO: 2185 - DNA, 3615 bp, Homo sapiens
atgacattgtggactccctcagtgtgttgtccaaaactcagcatgacctcagctccttcctggtggacatgtgttaccagaaggcaagcacctgcttactcccttggacaggccctgagagccagaggtgggtaggaggttaagggggatcctgagcactggagctcttccctttcagaaatggatgctctacttttctgtctacggtgtgttgaaagaagaacacagtgatggtagcagctctcctcaaggagaaaataaaggtggagattcttcccaggggaattttggaaaggagaaccttcatgatgaacatgatggcaacccctctaccttacaacccgatagtaggagtgtgaaatgccatagtgaataccaagatagaattcctccagagagagaagtggagaagaacacacagaatggagacccagggacctggttcaaggtcacaattccttatgggataaagtatgataagagttggatagtgaattcaatccagagccattgcagtgtccccttcactccagtcgctttccactacaacaaaaatcgggcccatttctttattcaggatgctagtgctgcctgtgcattaaagaaagtcaactgcaagattcatgatgaggaaaaccaaaaggtatttgtttttgtcaatctttctactaaaccccagtctatccagaaaatgttgaaaccaaaagagatggcatagctaaagctgaccctgaacaaatgatatgatgtctcccagcaagctcttgatctccagaggctccgctttgacccaggtatggctgacagcagcaattctagggcaagtaggggcagagcagtctgcctggaaaggagacttatatggacggcaactttgggagggttggtgctggtgctggtccagtcaggccccttacagccttctgatgcccttctctcggcttcctggagacttggtgaaacatcatattgatataatcctgaatcaaagaaactacatggctgccactctgaagatcattgaaaggaatttccctgagctattatctttgaacttgtgcgacaacaaactgtaccacctggatggcctgcctgacattatagagaaggctcccaaagtcaagaccctgaatctctccaaaaataagctgaagtcggcttgggagttgggcaaggtgaaagggttgaagctcgaagagctatggctggaagggaactcattgtgcagcaccttctctgaccagtccgcctatgtaagtatcatccgggaatatttccccaagttgttatgcctggatggccaggagttagcatctccaattataattggcattgaagcccctgagataataaaaccttgtaaggaaagctataaaggatctgagaccataaagagtctggtgcttcagttcctgcttcagtattacttgatctatgactctgaagatcgaacgggtctcctcagtgtttaccatgacaaggcctgcttctccctgaccattaccctcaaccctgaggacccagaaccgagcagcttggaaaaatacttcaaggatagcaggaatataaagaatatcaaggacccttgcctgaggattcagctgctgaagcacacaaaacgtgagattgtggactccctcagtgtattgcccagaactcagcatgaccttaactcctatgtggtagacttgtgcatccaaacggtgagcacctgcttcctccctcagtcaggcccagagagctgaagtaggtaggaagtaggtaggtgggtaggaggatcatgaaggctctagttttttcttcttccctttcaggaaaggatgctcgtcttttctgtcaatggagtatttaaggaaggtgagtgtctatagattcttctctccagatcactcattactcccttccccaggctgggcttactccaagaactctctcagcttcccaagttgctcttctccccttcccttgcattcttcctctccgtttgtgttcttcctctcctggcaactttctgttatctttgtgttctttcctttttgttcccttccctttgtgttcttcctctcccccaattttgttcccaaacatcattacttcctgacctacatccatgcctgtctgcacctgcaccactcaggcgttagggacacagcctgtagagtttgatggctctcatcccaggttgttactttgcgaacttgggacattgtcctgttacctaacccctcagtttcctcatttgcaaaatggggttggtaagctcatctcttgggtgactgtgtaaaatgaatcaagcgaactcatgtttgtcaagagacctgacacatgttagggggttctatccctgggtgccgcttgttcctatttttgccctctcagtccctgaaactccctcctgactctcactgaaaagttgtcccagcctggctcccttcagggtgccaaaagattatctccctgactggagaaccctgtatgaatgtgtaaagcatgtgcaactgtaaggaggtatcattgtttgttgtttctaaagtggaaagagagtctccaggttctgttcttgccttcacccgaaccttcatcttgacttctgtcggcaattccaagtaagtgctgtgctgtgggtgggagcacccatcctgtcctggagccaatggtgtggtaatgtggtggtgcagtcctcgggatgttctcagtaccatagaaagccaactggtagatccaaggagaggtctagattatgagaataccagattctctttttggccacaatacttactaattagctgtgtatctttttgtccagttgtaagatttctctgtgaaacagtccttttctgaaaatgggatgtctacttcttttgtaaagtgtaaatgcattggggttaaatctacaaatctaaggaaactggtaggcaatctctccaaaggtggactctgcagcaggggtaaagcctaccagccaaggaatccgaaaggtgggcagagcaggggcttggaaggaatctggttcctcagtggcagtggaagcaggatcattgttgaaagtgtggggttgtccatttttccagttgtctgagagcttgtctttccttcagtctgtatattgtgaatgacaagctgattgtgaggaatgccagcacgaaggagacccagagtgccttctccatcccagtgcctgcaccctcctccagctccttgcctaccctctcccagaagcagcaggaaatggtggagactgtctccacccagtctgggatgaaacttgagcagtctcagaagtgccttcaggacagtgagtagaactacaccaaagctgaccaggttttcactattctccagaccgaaggcaagatctcagtggaggccttcaagcaaatcccctaaaaggagcccttcgatgtcttctttgtcctcattcacatcctctttgtttcctctttttaccagcctaaggccgtgcccaggactggggttggcagcctggctcaccggaaagccaaagttaacttgcaggccgggtaacataaccacttgaagaaccagttgttctgtgtattcgccccactcatgatcaccatttattttcataataaagagtgatgttacatgttg

SEQ ID NO: 2186 - DNA, 3004 bp, Homo sapiens
ctggaaacccatgtgcatttcagttcaggaaagaatggtaggcttggtggggggagctcccgcaaaaggggaactaatacagaaacactctggtatttgtctgcctctcttgttccagcgccgttttccctatatccggaattcgtccctgcgcattccaatacctgaagcggccacagggtacaggacagggagccctccgacagaaaagagtcgcggcgctaaacaaagcctgatatcactccgcttccataagccggatccccataaactacgctctagctcctcccactgccgttgtgggtaacgcggacgtggaagaacctcgtctgcggaggaaaaggtagatgttaaatggtaactacgcgcgaggttctgaggagccctgggaacaggaaggagaaaagaataccaaaagtgacaacagtttgccaatcgcagtctttaatctgataaagcggttatctcgtcttgagtcccaggtgccgagtcaatccccatacacagccgccgccattgcctcgagtccttgtgtctgactgtctgttcctgctgctgtatgacacagcacctcgaggcaaggaaataagaaaactgcctctgatccaagcagagaaggtctgcctgtagatctgctgtagggcttgtcaccattggaagcaaggtcctacttcagtggcagatctggtggccttggagtggctgaagaccaccaccctccacagggctgggcccatgcacagccatccttccctaccttgagtgagcttcctctgcatgttttctatatcactggcagagcctgtagttggaaaggggacagagtgactactggactttgtgtgaaaacaccaaccgggacaaaacttcagtcaaggctgagacgggtgggggtatataacttgtccttacgttaaacttggaacatggttgactctgggacagaagcaagggctagaggaaaggctgaggctggcctgcaagatggaatcagtggtcctgccactgctagagtgaatggtaaaacccaggccgaggcagtggctgaggcagaactgaaaacagaatcagtgacccaggccaaagctggtgatggagcaatgaccaggacacatacagtgacctacagggaggctatggctgtgacaagggaagtgatcaaggtggaagatacaactaagactagagtcatggttgagactaagacaaaacccctggcagaacgcagtatagtgccacaaaccaagtcaaaggccatgcctatgtctagggtcagtactgtaaccaagtctgaagtcaaggttgttgctgtcattgaggcaaatattaggtcctatgccaagtcacatgataaggccaatactgggtccagacctgacagaagggaagagaccagcattgggatgaaatccagtgatgaggatgaagaaaatatatgctcctggttctggactggagaagagcctagtgtagggtcctggttctggcctgaagaagagacctctcttcaagtttataagcccctacctaagatccaggaaaagcccaagcccacacacaaacccacacttactataaaacaaaaggtaatagcatggtcaagggccaggtatattgtcctagttccagttgaaggaggggagcaatccttgcctccagaaggaaactggaccctggttgagaccttgattgaaactcctctggggattcgacctttgaccaagatcccaccttatcatgggccttattaccagaccttagctgagatcaaaaaacagattaggcaaagggaaaagtatgggcctaatccgaaggcctgccactgcaaatcacgtggctttagtttagagcctaaagagtttgataaacttgttgccctccttaagttaactaaggatcctttcattcatgaaatagctacaatgataatgggcatcagtcctgcttatccatttactcaagatataattcatgatgtaggtattactgttatgattgaaaacttggtcaataatcccaatgttaaagaacaccctggagctttaagtatggtggatgacagctctgagtcttccgaagaaccaaaatcaggggagtcatatatacatcaagtttgtaaaggcataatctcttgccccttgaactcccctgtgcagctggctggactgaaattactagggcacttgagtataaaatttgaagatcactatgtgattaccagttatattccagatttcctcaccttgttaaacaagggaagtgtcaaaaccaagttttatgttttaaaagtgttttcgtgtttgtctaaaaatcacgccaatacaagagaattgatcagtgccaaagtactgtcatcattggttgcaccctttaacaagaatgagtcaaaggccaatattcttaatattattgaaatatttgagaatataaattttcagttcaaaacaaaggcaaagctatttaccaaggaaaagttcactaaatctgagcttatttcaatattccaggaagcaaaacagtttggtcagaaactccaagacttagcagagcacagtgatcccgaagtgagagataaagtcatacgattaatactaaaactctgaatacccctctgttctcataaagcctcaaacagttttttggagttgcaatatgaaaccaatgcatattgtaattataaattcaatacttatgttttccatgttgattgagggaggcaattttatggataccaattaatcttgagatcctgaacatgtgctgatttttattgtgctatatagtatataaattgagatatttttggtatttctgcaacgtgacctgataatgaatctattcatcctgagtaagctatacttctgtgctttatattgatatgtgtattcttttgagattttatttacatgttgttaataaagttgcatgctaaaactggtgaaaaaaaaaaaaaaaaaaaaaaaaaaaaaaaaaaaaaaaaaaaaaaaaaaaaaaaaaaaaaaaa

SEQ ID NO: 2187 - protein, 558 aa, Homo sapiens
MVDSGTEARARGKAEAGLQDGISGPATARVNGKTQAEAVAEAELKTESVTQAKAGDGAMTRTHTVTYREAMAVTREVIKVEDTTKTRVMVETKTKPLAERSIVPQTKSKAMPMSRVSTVTKSEVKVVAVIEANIRSYAKSHDKANTGSRPDRREETSIGMKSSDEDEENICSWFWTGEEPSVGSWFWPEEETSLQVYKPLPKIQEKPKPTHKPTLTIKQKVIAWSRARYIVLVPVEGGEQSLPPEGNWTLVETLIETPLGIRPLTKIPPYHGPYYQTLAEIKKQIRQREKYGPNPKACHCKSRGFSLEPKEFDKLVALLKLTKDPFIHEIATMIMGISPAYPFTQDIIHDVGITVMIENLVNNPNVKEHPGALSMVDDSSESSEEPKSGESYIHQVCKGIISCPLNSPVQLAGLKLLGHLSIKFEDHYVITSYIPDFLTLLNKGSVKTKFYVLKVFSCLSKNHANTRELISAKVLSSLVAPFNKNESKANILNIIEIFENINFQFKTKAKLFTKEKFTKSELISIFQEAKQFGQKLQDLAEHSDPEVRDKVIRLILKL

SEQ ID NO: 2188 - DNA, 5985 bp, Homo sapiens
gcactttcgcgccgtatccctccgccccccttcccgacaccctcgcggagagcggttcttgccgcatcctgcgcagcccctgcccagtttggtgcagaggcgtggggggcgggactcgtctttgccattcggatcgctgggaaagcggtgggaatccaactgaagagcagccagaggagagctgaagagaggagggggaggccgatgacctgggctctgggcctctgaaggtctggcgtattctgacaggacacagtgagcatctgtagaggagaggcttgaaataaaggaggagcacgaatattccctggatttctggaggcctgctttaaggctggccagttctgcaagaaaggcaaggaggaggagactggctcacacctctggaggacccccttctgtcagctgtggggcttgacactacttgaacaagaaaaggagggggaaactgcaccacataagtgaagatccacctccagtggctgctctgctggtggtggggttgctgctgacaaccaccctcaacgggtctgcacccatccaggaaatctctgtcttcctcaagcttggttgtgcctgttctacactctatctgtattattgaattactgactgagactgtgtttgggaaggaggctgagtgactactggactggatattgactctaactcttgtttccaagcttatatcctcaatcacctaaagatcagagtgtgaagaaacaaacctgtgacagatctgtggttgaggtttagactgggggaggagtatagtactggactttctttgtaacttgtaccatgactggggcagagattgagtctggtgcccaggtcaagcctgaaaagaagcctggggaagaggttgtaggtggggctgagatagagaatgatgtccctctggtggtcagacccaaggttaggacccaggcccagataatgcctggggcaaggcccaagaataagtccaaggttatgcctggagcaagcaccaaagttgagacaagtgcagtgggtggggcacgccctaagagtaaggccaaggcaatacctgtttcacgatttaaggaagaagcccagatgtgggctcagcccaggtttggtgctgaaagattgtctaagacagagagaaactcccagaccaatatcatagcctctccacttgtcagtactgattctgtcttggttgctaaaacaaagtacctgtctgaggatagagaactggttaatacagacactgagagctttcctagaaggaaggcccattaccaagcaggattccagccttcttttaggtcaaaggaggagaccaatatggggtcctggtgctgtcctaggcctacatccaaacaagaagcctctcctaattctgatttcaaatgggtagacaaatctgtgagttccttgttctggagtggagatgaggtcactgcaaaatttcatcctgggaatagggtaaaagacagtaacagatccatgcacatggccaatcaagaggctaataccatgtctaggtcccaaactaaccaggagctctatattgcatctagttctggttctgaggatgagtctgttaagacaccctggttctgggccagagataaaaccaatacctggtctgggcccagggaagatcccaatagcaggtccaggtttaggtctaagaaagaagtctatgttgaatcaagttctggatctgagcatgaagaccatttggagtcctggtttggggctggaaaggaggccaaattcaggtccaaaatgagagctgggaaggaggccaataacagggccaggcacagggccaagcgagaagcttgcattgatttcatgcctgggtctatagatgtaattaaaaaagagtcctgtttctggcctgaagaaaatgctaataccttttcaaggcccatgatcaagaaagaggccagggccagagcaatgacaaaggaagaggccaaaaccaaggcccgagccagggccaagcaagaagccaggtcagaggaggaagccctcattgggacctggttctgggctacagacgagtccagcatggcagatgaagccagcatagagtccagtctacaagtggaggatgagtccataattgggagttggttctggactgaagaagaggccagtatggggactggggctagcagtaaatccagaccaaggactgatggggagcgtattggtgattccttatttggggctagggaaaagaccagtatgaaaactggggctgaggccacctctgaatctatactagcagctgatgatgaacaggtcattattggttcctggttctgggctggtgaagaggtcaaccaagaggctgaggaagagaccatttttgggtcgtggttctgggtcattgatgcggccagtgtggaatctggtgttggggtcagctgtgagtccaggacaaggtctgaggaagaagaggtcattggtccctggttttggtctggagaacaagttgatatagaggctggaatcggagaagaggccaggccaggagctgaagaagagacaatattcgggtcctggttttgggctgaaaaccagacctatatggattgtagggctgaaactagctgtgacaccatgcaaggggctgaggaggaggagcccattattgggtcctggttttggaccagagtagaagcttgtgtggagggtgatgtcaacagcaagtctagcctggaggacaaggaagaggccatgataccatgttttggagccaaagaagaggtcagtatgaagcatgggactggtgtcagatgcagatttatggcaggggctgaggagaccaataataagtcttgcttctgggcagaaaaagaaccctgtatgtatcctgccggtggaggaagttggaagtctaggccagaggaggaagaggacattgtcaattcgtggttctggtccagaaaatacacaaagccagaggccattatagggtcctggttatgggctacagaagagagtaatatagatgggactggagaaaaggccaagttactgactgaagaggagaccataatcaattcctggttctggaaagaagatgaagccatttcagaggctactgacagagaagagtccaggccagaagctgaggagggggacattattggttcttggttctgggctggagaagaggacagactagagccagctgctgagactagagaagaagacaggctagcagctgagaaagaaggtattgttgggtcctggtttggggccagagaagagaccattagaagagaggctgggtcttgcagcaaatccagtcctaaagctgaagaggaagaagtcattattgggtcctggttctgggaagaagaggccagtccggaggcagtggcaggagtcggctttgagtcaaagcctgggactgaggaggaagaaatcactgttgggtcctggttctggcctgaagaagaagccagtatacaggctggatctcaggcagtagaggaaatggagtcagagactgaagaggaaaccatttttgggtcctggttctgggatggaaaagaagtcagtgaagaagcaggaccatgctgtgtatccaagccagaggatgatgaagagatgattgttgagtcctggttctggtctagagacaaagccattaaggaaactggaactgtggccacctgtgagtccaagccagaaaatgaggaaggggccattgttgggtcttggtttgaggctgaagatgaggtagataacaggactgacaatggaagcaactgtgggtccaggacattagctgatgaagatgaggccatagtggggtcctggttctgggcaggagatgaggcccattttgaatcaaatcctagccccgtgttcagggccatttgcaggtccacgtgttcagttgaacaggagcctgatccttcacgcaggcctcagagttgggaggaggtcactgttcagttcaagcctggtccatggggtagggtcggcttcccatctataagcccctttagatttccgaaagaggcagcatctttattctgtgaaatgtttgggggcaaacccaggaacatggtacttagcccagaaggggaagatcaggaatctttgcttcagcctgatcagcctagtcctgagttcccatttcagtatgatccttcctacaggtcagtccaggaaattcgagagcatcttagggccaaggagagtacagagcctgagagttcatcctgtaactgcatacaatgtgagctgaaaattggttctgaagagtttgaagaactccttttattaatggaaaaaattcgggatccttttattcatgaaatatctaaaatcgcaatgggtatgagaagtgcttctcaatttacccgagatttcattcgagattcaggtgttgtctcacttattgaaaccttgcttaattatccgtcctcccgagttagaacaagttttttggaaaatatgattcgcatggccccaccttatccgaatctaaacataattcagacatacatatgtaaagtgtgtgaggaaacccttgcttatagcgtggattccccggaacagctgtctggaataaggatgattagacatctcactactactactgactatcacacactggttgccaattatatgtctgggtttctctccttattagctacaggcaatgccaaaacaaggtttcatgttttgaaaatgctactgaatttgtctgaaaatcttttcatgacaaaagaactactcagtgctgaagcagtgtcagaatttataggcctctttaacagggaagagacaaatgacaatattcaaattgttcttgcaatatttgagaatattggcaacaatatcaaaaaagaaacagtgttctctgatgatgatttcaatattgagccgcttatttctgcattccacaaagttgagaaatttgctaaggaactgcaaggcaaaacagacaatcaaaatgaccctgaaggggaccaagaaaattagtaatggttaattgctggcctcagattgtccttatgttcctgagttatgatccttgagtaatgctttgattttaatagttggttctgtgttgcaacatatatctttagtgctgacactaactttgtccaactctgtctgtaagctggagcatttttctgatgccagctgaatattagagctgaaaacacatttgttgatatttgtcttgtccacattgtgatgttcagtatttgagcttatagtgaactgagcaatcataaataagccacccttctgattgtcgttctactgtatatatatatatatttgagtgttgtttgtgtttcaataaagtcctatgttaaagttggcagaaatcacccttcttcttgaaattaaaatacagacccaatgataacacatgaacacacatagagataattaatatatgaataatatgttcctttcaaaagtttttttctcagctttaaacgcaaaaattaccaggggctgctatgtagggcatacttcagagaaaaagtagctacttcggttggactctgaagtttgggaaagatattggtggtgtaaaaaaaaaaaaaagcatggagttaggaaaaattttcctatgggagtgaggtatcctgtttgcctagagtgagtgagaggaatatattgagcaacatagaggatgacataagttttaaagagctgaggatttgcattttacagctcaaagtacaactgctgcttccatactacctaaagggcaaaagaataagacaggaaagcatagggatttgattgagtcaggaagacaatttaatcatgatggtaccatggtaagtgttaaggcaacatcatacagccattaaacatgatgatgtatagggttttaggaaaagccctgacatttttgatatttcatataatagagaacactggtgtcatacatgggaagtatgatcccatttgaaaaataaatgtgaataaattgaccaaaaaaaaaaaaaaaaa

SEQ ID NO: 2189 - protein, 1395 aa, Homo sapiens
MTGAEIESGAQVKPEKKPGEEVVGGAEIENDVPLVVRPKVRTQAQIMPGARPKNKSKVMPGASTKVETSAVGGARPKSKAKAIPVSRFKEEAQMWAQPRFGAERLSKTERNSQTNIIASPLVSTDSVLVAKTKYLSEDRELVNTDTESFPRRKAHYQAGFQPSFRSKEETNMGSWCCPRPTSKQEASPNSDFKWVDKSVSSLFWSGDEVTAKFHPGNRVKDSNRSMHMANQEANTMSRSQTNQELYIASSSGSEDESVKTPWFWARDKTNTWSGPREDPNSRSRFRSKKEVYVESSSGSEHEDHLESWFGAGKEAKFRSKMRAGKEANNRARHRAKREACIDFMPGSIDVIKKESCFWPEENANTFSRPMIKKEARARAMTKEEAKTKARARAKQEARSEEEALIGTWFWATDESSMADEASIESSLQVEDESIIGSWFWTEEEASMGTGASSKSRPRTDGERIGDSLFGAREKTSMKTGAEATSESILAADDEQVIIGSWFWAGEEVNQEAEEETIFGSWFWVIDAASVESGVGVSCESRTRSEEEEVIGPWFWSGEQVDIEAGIGEEARPGAEEETIFGSWFWAENQTYMDCRAETSCDTMQGAEEEEPIIGSWFWTRVEACVEGDVNSKSSLEDKEEAMIPCFGAKEEVSMKHGTGVRCRFMAGAEETNNKSCFWAEKEPCMYPAGGGSWKSRPEEEEDIVNSWFWSRKYTKPEAIIGSWLWATEESNIDGTGEKAKLLTEEETIINSWFWKEDEAISEATDREESRPEAEEGDIIGSWFWAGEEDRLEPAAETREEDRLAAEKEGIVGSWFGAREETIRREAGSCSKSSPKAEEEEVIIGSWFWEEEASPEAVAGVGFESKPGTEEEEITVGSWFWPEEEASIQAGSQAVEEMESETEEETIFGSWFWDGKEVSEEAGPCCVSKPEDDEEMIVESWFWSRDKAIKETGTVATCESKPENEEGAIVGSWFEAEDEVDNRTDNGSNCGSRTLADEDEAIVGSWFWAGDEAHFESNPSPVFRAICRSTCSVEQEPDPSRRPQSWEEVTVQFKPGPWGRVGFPSISPFRFPKEAASLFCEMFGGKPRNMVLSPEGEDQESLLQPDQPSPEFPFQYDPSYRSVQEIREHLRAKESTEPESSSCNCIQCELKIGSEEFEELLLLMEKIRDPFIHEISKIAMGMRSASQFTRDFIRDSGVVSLIETLLNYPSSRVRTSFLENMIRMAPPYPNLNIIQTYICKVCEETLAYSVDSPEQLSGIRMIRHLTTTTDYHTLVANYMSGFLSLLATGNAKTRFHVLKMLLNLSENLFMTKELLSAEAVSEFIGLFNREETNDNIQIVLAIFENIGNNIKKETVFSDDDFNIEPLISAFHKVEKFAKELQGKTDNQNDPEGDQEN

SEQ ID NO: 2190 - DNA, 3582 bp, Homo sapiens
gcctactttggtgcagaggcgtggggggcgggacgcgtctttcccgttcggatcgcggggaaagcagtggctccaagtgagccagaggagagctgaggagaggagggggaggccgacgacctgggccctgggcctctgaaggtctggcgtattctgacaggacacagtgagcgtctgtagaggagaggcttgaaataaaggagcacgaatattgcctggatttctggaggcctactttaaggctggccaattctgcaagaaaggcaaggaggaggagactggctcacagctctggaggacccccttctgtcagctgtggggcttgacaccacttgaacaagaaaaggagggggaaactgcaccacatcagtgaagatccacctccagtggctgctctgctggtggtggagttgctgctgacaaccaccctcaacgggtctgcacccatccaggaaatatctgtcttcctttagcttggttgtacctgttctcactctatctgtattattgaattattgactgagactgtgtttgggaaggaggctgagtgactactggactggatattgactctaactcttattcccaagcttatatccttaatcacctaaagatcagagtgtgaagaaacaaacctgtgacagatctgtggttgaggtttagactacgggaggagtatattacctgactttctttgtaacttgtaccatgactggggcagagattgagcctagtgcccaggccaagcctgaaaagaaggctggggaagaggttatcgctgggcctgagagagagaatgatgtccctctggtggtcagacccaaggttaggacccaggcaactactggggcaaggcccaaaactgagaccaagtctgtgcctgcggcaaggcccaaaactgaggcccaagcaatgtctggggcaaggcccaaaactgaggtccaagtaatgggtggtgcaagacccaaaacggaggctcaaggaatcacaggggccaggcccaaaaccgatgccagggcagtaggtggcgctcgttctaaaactgatgccaaggcaatccctggagcaaggcccaaggatgaggcccaggcatgggcccagagtgaatttgggactgaagcagtgtcacaggcagaaggagtgtcccagactaatgccgttgcttggccactggccactgctgagtctggatcagttactaaatctaagggcctgtctatggatagagaactagtcaatgtggatgctgaaacctttcctggcacccagggtcagaaaggaatccagccctggtttggaccaggggaggagactaatatggggtcttggtgctattccaggcccagggccagagaggaggcctctaatgagtctgggttctggtcagcagatgagacctctacagcgtcttctttctggactggagaagagacaagtgtcagatcatggcccagggaagagtccaataccaggtccaggcacagggctaaacatcagactaatcccaggtccaggcccagatccaagcaagaagcctatgttgattcctggtctggatctgaggatgaggccagcaacccattctccttctgggttggagaaaataccaataacttgttcaggcccagagtcagggaggaggcaaatatcaggtccaagctcaggacaaatagagaagattgttttgaatctgagtctgaagatgagttctataagcagtcctgggttttgcctggagaagaggccaatagtagattcaggcacagagacaaagaagatcctaatactgccttgaaactcagggcccagaaagatgttgacagtgatagggtcaaacaagaacccaggtttgaggaggaagtcattattgggtcctggttctgggcagaaaaagaggccagtttggagggtggagcttcagcaatctgtgaatctgagccaggaactgaggagggggccattggcggatccgcgtactgggctgaggaaaagtccagtttgggggctgtggccagagaagaggccaagccggagtctgaagaagaggccatatttgggtcctggttctgggacagagatgaggcctgctttgacctaaatccctgtcctgtgtacaaggtcagtgataggttcagagatgcagctgaggagcttaatgcatcctccaggccccaaacctgggacgaggtcactgttgaattcaaacctggtctttttcatggggttggcttccgatccacaagcccctttggaattcccgaagaggcttctgaaatgcttgaggcaaagcccaagaacctggaacttagcccagaaggagaagagcaggaatctttgcttcagcctgatcagcctagtcctgagttcacatttcagtatgatccttcctaccggtcagtccgggaaattcgagagcatcttagggccagggagagtgcagagtctgagagttggtcctgcagctgcatacaatgtgagctgaaaattggttctgaagagtttgaagaattccttttattaatggacaaaattcgggatccttttattcatgaaatatctaaaattgcaatgggtatgagaagtgcttctcaatttacccgagatttcattcgagattcaggtgttgtctcacttattgaaaccttgcttaattatccatcctctagagttaggacaagttttttggaaaatatgattcacatggctccaccttatccaaatctaaacatgattgagacattcatatgtcaagtgtgtgaggaaacccttgcacatagtgtggattcccttgagcagctgactggaataaggatgcttagacacctcactatgactattgactatcacacactgattgccaactatatgtccgggtttctctccttattaaccacagccaatgcgagaacgaagtttcacgttctgaaaatgctattgaatttgtctgaaaatcctgctgtggcaaaaaaactattcagtgccaaagctctttcaatatttgtgggtctctttaacatagaagagacaaatgataatattcaaattgttattaaaatgtttcagaatatcagtaacattataaaaagtggaaagatgtccttaattgatgatgatttcagtcttgagccgcttatttctgcatttcgtgaatttgaggagttagctaagcaactacaagcccaaatagacaaccaaaatgatcctgaggtgggacaacaaagttaatatgattaaccacctgccgctgatcagccttatgttcccaaagagccctgagtagtgctttggtgttcacagtctgtttttttgttgtaacttatattttttaatgctgatgttaactttgtcaaactcttgttttgagctggatcattttgtggatgccaaatgaatatcaaaactgaaaacacatttgttgatatttgtcttgctgtccagattgcggtatttttcagtattaagttttcaatgaactgtgtcacctaagtaagctaccctgctattcgttgtttaaatatatggttctctatttgagtctgtgttttcaataaagttctatgttaaaattggcaaaaaaaaaaa

SEQ ID NO: 2191 - protein, 838 aa, Homo sapiens
MTGAEIEPSAQAKPEKKAGEEVIAGPERENDVPLVVRPKVRTQATTGARPKTETKSVPAARPKTEAQAMSGARPKTEVQVMGGARPKTEAQGITGARPKTDARAVGGARSKTDAKAIPGARPKDEAQAWAQSEFGTEAVSQAEGVSQTNAVAWPLATAESGSVTKSKGLSMDRELVNVDAETFPGTQGQKGIQPWFGPGEETNMGSWCYSRPRAREEASNESGFWSADETSTASSFWTGEETSVRSWPREESNTRSRHRAKHQTNPRSRPRSKQEAYVDSWSGSEDEASNPFSFWVGENTNNLFRPRVREEANIRSKLRTNREDCFESESEDEFYKQSWVLPGEEANSRFRHRDKEDPNTALKLRAQKDVDSDRVKQEPRFEEEVIIGSWFWAEKEASLEGGASAICESEPGTEEGAIGGSAYWAEEKSSLGAVAREEAKPESEEEAIFGSWFWDRDEACFDLNPCPVYKVSDRFRDAAEELNASSRPQTWDEVTVEFKPGLFHGVGFRSTSPFGIPEEASEMLEAKPKNLELSPEGEEQESLLQPDQPSPEFTFQYDPSYRSVREIREHLRARESAESESWSCSCIQCELKIGSEEFEEFLLLMDKIRDPFIHEISKIAMGMRSASQFTRDFIRDSGVVSLIETLLNYPSSRVRTSFLENMIHMAPPYPNLNMIETFICQVCEETLAHSVDSLEQLTGIRMLRHLTMTIDYHTLIANYMSGFLSLLTTANARTKFHVLKMLLNLSENPAVAKKLFSAKALSIFVGLFNIEETNDNIQIVIKMFQNISNIIKSGKMSLIDDDFSLEPLISAFREFEELAKQLQAQIDNQNDPEVGQQS

SEQ ID NO: 2192 - DNA, 3494 bp, Homo sapiens
gcctactttggtgcagaggcgtggggggcgggacgcgtctttcccgttcggatcgcggggaaagcagtggctccaagtgagccagaggagagctgaggagaggagggggaggccgacgacctgggccctgggcctctgaaggcctactttaaggctggccaattctgcaagaaaggcaaggaggaggagactggctcacagctctggaggacccccttctgtcagctgtggggcttgacaccacttgaacaagaaaaggagggggaaactgcaccacatcagtgaagatccacctccagtggctgctctgctggtggtggagttgctgctgacaaccaccctcaacgggtctgcacccatccaggaaatatctgtcttcctttagcttggttgtacctgttctcactctatctgtattattgaattattgactgagactgtgtttgggaaggaggctgagtgactactggactggatattgactctaactcttattcccaagcttatatccttaatcacctaaagatcagagtgtgaagaaacaaacctgtgacagatctgtggttgaggtttagactacgggaggagtatattacctgactttctttgtaacttgtaccatgactggggcagagattgagcctagtgcccaggccaagcctgaaaagaaggctggggaagaggttatcgctgggcctgagagagagaatgatgtccctctggtggtcagacccaaggttaggacccaggcaactactggggcaaggcccaaaactgagaccaagtctgtgcctgcggcaaggcccaaaactgaggcccaagcaatgtctggggcaaggcccaaaactgaggtccaagtaatgggtggtgcaagacccaaaacggaggctcaaggaatcacaggggccaggcccaaaaccgatgccagggcagtaggtggcgctcgttctaaaactgatgccaaggcaatccctggagcaaggcccaaggatgaggcccaggcatgggcccagagtgaatttgggactgaagcagtgtcacaggcagaaggagtgtcccagactaatgccgttgcttggccactggccactgctgagtctggatcagttactaaatctaagggcctgtctatggatagagaactagtcaatgtggatgctgaaacctttcctggcacccagggtcagaaaggaatccagccctggtttggaccaggggaggagactaatatggggtcttggtgctattccaggcccagggccagagaggaggcctctaatgagtctgggttctggtcagcagatgagacctctacagcgtcttctttctggactggagaagagacaagtgtcagatcatggcccagggaagagtccaataccaggtccaggcacagggctaaacatcagactaatcccaggtccaggcccagatccaagcaagaagcctatgttgattcctggtctggatctgaggatgaggccagcaacccattctccttctgggttggagaaaataccaataacttgttcaggcccagagtcagggaggaggcaaatatcaggtccaagctcaggacaaatagagaagattgttttgaatctgagtctgaagatgagttctataagcagtcctgggttttgcctggagaagaggccaatagtagattcaggcacagagacaaagaagatcctaatactgccttgaaactcagggcccagaaagatgttgacagtgatagggtcaaacaagaacccaggtttgaggaggaagtcattattgggtcctggttctgggcagaaaaagaggccagtttggagggtggagcttcagcaatctgtgaatctgagccaggaactgaggagggggccattggcggatccgcgtactgggctgaggaaaagtccagtttgggggctgtggccagagaagaggccaagccggagtctgaagaagaggccatatttgggtcctggttctgggacagagatgaggcctgctttgacctaaatccctgtcctgtgtacaaggtcagtgataggttcagagatgcagctgaggagcttaatgcatcctccaggccccaaacctgggacgaggtcactgttgaattcaaacctggtctttttcatggggttggcttccgatccacaagcccctttggaattcccgaagaggcttctgaaatgcttgaggcaaagcccaagaacctggaacttagcccagaaggagaagagcaggaatctttgcttcagcctgatcagcctagtcctgagttcacatttcagtatgatccttcctaccggtcagtccgggaaattcgagagcatcttagggccagggagagtgcagagtctgagagttggtcctgcagctgcatacaatgtgagctgaaaattggttctgaagagtttgaagaattccttttattaatggacaaaattcgggatccttttattcatgaaatatctaaaattgcaatgggtatgagaagtgcttctcaatttacccgagatttcattcgagattcaggtgttgtctcacttattgaaaccttgcttaattatccatcctctagagttaggacaagttttttggaaaatatgattcacatggctccaccttatccaaatctaaacatgattgagacattcatatgtcaagtgtgtgaggaaacccttgcacatagtgtggattcccttgagcagctgactggaataaggatgcttagacacctcactatgactattgactatcacacactgattgccaactatatgtccgggtttctctccttattaaccacagccaatgcgagaacgaagtttcacgttctgaaaatgctattgaatttgtctgaaaatcctgctgtggcaaaaaaactattcagtgccaaagctctttcaatatttgtgggtctctttaacatagaagagacaaatgataatattcaaattgttattaaaatgtttcagaatatcagtaacattataaaaagtggaaagatgtccttaattgatgatgatttcagtcttgagccgcttatttctgcatttcgtgaatttgaggagttagctaagcaactacaagcccaaatagacaaccaaaatgatcctgaggtgggacaacaaagttaatatgattaaccacctgccgctgatcagccttatgttcccaaagagccctgagtagtgctttggtgttcacagtctgtttttttgttgtaacttatattttttaatgctgatgttaactttgtcaaactcttgttttgagctggatcattttgtggatgccaaatgaatatcaaaactgaaaacacatttgttgatatttgtcttgctgtccagattgcggtatttttcagtattaagttttcaatgaactgtgtcacctaagtaagctaccctgctattcgttgtttaaatatatggttctctatttgagtctgtgttttcaataaagttctatgttaaaattggcaaaaaaaaaaa

SEQ ID NO: 2193 - protein, 838 aa, Homo sapiens; identical to SEQ ID NO: 2191

SEQ ID NO: 2194 - DNA, 4004 bp, Homo sapiens
gagaggagtgttttcttgcatccagaaaagacctgagaggcggacgacacctgtgctccgcagagcagaacgtgggaggaacggcgggatgttaaggagctcaagaagcagagagtctacctgcccgacgcgttcgtggagaggagcagcggttgctgttggaggaggtgggtgcaaggacggcagatggcatccctgagaggtggtgactgagactagatgcgggtgcaggtccatctccactggtggctgtggtggctttggattgttggaagaccatcaccttcagcaggtctgcacttgggaacaatcattctcccccagcccgagcgtgcctctgccctctgtatcattgacagaggctgtatgtttggaaagagaactttgtgactgcagaactgacagttgactctaattcttgctaccaagtttttccccgacccagtgaaagagtgttaagacttcgacctaggacacattgagaaccaaggccaagactggacagggccatataactgggcttcaaccatggctgggactaagaataagacaagagcccaggccaaaactgaaaaaaaggctgctatacaagctaaagctggagcagagagggaggctactggtgttgttaggcctgtagccaagaccagggccaaagcaaaagccaagacagggtctaagacagatgcagtagcagagatgaaggcagtgtctaagaacaaggttgttgctgagacgaaggaaggagctctgtcagagcctaagactctgggcaaagccatgggagatttcactcccaaggctgggaatgagtccaccagctccacatgtaaaaatgaggctggtactgatgcctggttctgggctggggaagaggccactatcaattcctggttctggaatggagaagaggctggtaatagtttcagcactaagaatgataaacctgaaattggtgcccaggtctgtgctgaggagttggaacctgcggctggggccgattgcaaacctaggtcaggggctgaggaggaggaggaagagaatgttattgggaactggttttgggaaggagatgatactagttttgaccctaatcctaaacctgtgagcaggatagttaagcctcagcctgtgtatgaaattaatgaaaaaaataggcccaaggactggtctgaggtaactatctggcccaatgcccctgctgtaactccagctgtgttaggatttagatcacaggcaccatctgaggcaagccctccttcatatattgttctggcctccgctgaagaaaatgcctgttctttgcctgtggcaacagcttgccgcccttctaggaacactcgctcatgctcacagcctatccctgagtgtcgttttgattctgacccctgcatccagaccatagatgagattagacgtcaaatcaggatcagggaggtaaatgggattaagccatttgcttgtccttgcaaaatggaatgctatatggattctgaggaatttgaaaaacttgttagcttacttaagtcaactactgatcctcttattcataaaatagcacggattgcaatgggtgtccataatgttcacccatttgcccaagagtttattaacgaagtaggtgtagtgacacttattgaaagcttgctcagttttccttcccctgaaatgagaaaaaagactgtaattactctgaatcctccttctggggatgaaagacaacgcaaaattgaattacatgttaagcatatgtgtaaagaaaccatgtcatttcctttgaactcaccgggacagcaatctggattaaagatactaggacaactgactactgattttgtccatcactacattgttgccaattacttttcagagcttttccatttgctgtcctcaggaaattgcaaaaccagaaatcttgttttgaaactacttttaaatatgtctgaaaatccaactgcagccagagacatgatcaatatgaaggcattggcagcattaaaactcatctttaaccagaaagaggcaaaagccaatcttgttagtggtgtggccatatttattaacataaaggagcatatcagaaaaggctcaattgtagttgttgatcacttgagttataatacactcatggccattttcagggaagttaaagagattattgaaacaatgtaaaatgagccagagatagaacattttaagccatcttcaaactctagcaggctgtacattacagtgtacacattatacactgcatctttaacacagagtcacctgtgacaggctctaggtttgagctagactattttgggggtatcaaatgaatattataccttgggctgaaaatgtttgatttttatcttgtctagattggcatatttttaacattttacttaagatagcaaaccagttcgttttaagtaagctaacttgttcattagtatctgtggcttaaaatggcaaaaaagaaaatatccttgagtttgtaatctagttacagaagtaaggcatacacacacacaaagataacagtacctagagagagagtgtgtgtgagtgtgcgtgtctctgtgtgtgcacgtgcacgctcatggccaaatgtgcgcactctacataaaggaggcaggagttcctataggctatttaatgtaagagaaactatttttctcctgttccagctgtatcagatactcgttccgcaacacagaaatgactcagaatctcagacaaaatgtattatttgttcaattttaattttgctactacattcataactcttaaattgttaggctgtttcatttacatcaaagttatctcacaaaagagaaggcaggaaacgttttgtgagtgcctattctatgtcaaacactgtgttggcaccatattttacaagtttttttcctcttctcacagtgatcttgtgagttagttacttatatttttattagaactcattattctgggtaccctccaatgagaattagagaggttaaataccttttcctagattcccacagcaggaaggtggcatagctgttttgtctgacaccagaacccatctcaccacactgctttacagtcttcctgaaggacattttgaggtgggggggccttcaaagctcagagactggtttgaatggtttaattttgcaatggatcatgtccatgccaggtgttacaattcttaacttcctccaaattcgtgtgtccattagacatttggctacatctggctggaggtcaggagaaaattctgaggtaaatagatggattttatctggcagtgtcgaaaatagtaggagcctaaaactttgttcaatgagtaagatgtagatttggagtcatcagcaggggaaacttgttagatgtcctttgtatctttttctatccatttgtattttttctttcccaaagagctgaaatcattttataccctgaatttaaaaggtaattgcttttttcctccttgcgaaatcataccttaatttttttttttttttttttaccatttatgatttattctcctatgtgtcatatgaaaggccaaggggctttatcttttactagtaggcaagcctgggcatttctgcatttgtgccagctaacactacaaaatagacttaattagagaaatttagacccagaattgcagcttcaacaacacaaaacaggaaagctagaagaggttgctgtgtcaacctacaagatagtgattcttggaagttggtatggaccagaaagcattcccaggacatttaggctatggctgagttctctaagactcagggtgggaattataatccctggtctaagctgatatgaaagtttctatgtgtgaaaatatggagttatatgctttgagattttctgccagttaaactaaaacaagatcatactgtaaatgtttgtaacttgcttccccccactgtatactgtaaacatctttgcatgtcaataaatatgcctctacaacataaaaaaaaaaaaaaataaaaaaaaaaaaaaaa

SEQ ID NO: 2195 - protein, 547 aa, Homo sapiens
MAGTKNKTRAQAKTEKKAAIQAKAGAEREATGVVRPVAKTRAKAKAKTGSKTDAVAEMKAVSKNKVVAETKEGALSEPKTLGKAMGDFTPKAGNESTSSTCKNEAGTDAWFWAGEEATINSWFWNGEEAGNSFSTKNDKPEIGAQVCAEELEPAAGADCKPRSGAEEEEEENVIGNWFWEGDDTSFDPNPKPVSRIVKPQPVYEINEKNRPKDWSEVTIWPNAPAVTPAVLGFRSQAPSEASPPSYIVLASAEENACSLPVATACRPSRNTRSCSQPIPECRFDSDPCIQTIDEIRRQIRIREVNGIKPFACPCKMECYMDSEEFEKLVSLLKSTTDPLIHKIARIAMGVHNVHPFAQEFINEVGVVTLIESLLSFPSPEMRKKTVITLNPPSGDERQRKIELHVKHMCKETMSFPLNSPGQQSGLKILGQLTTDFVHHYIVANYFSELFHLLSSGNCKTRNLVLKLLLNMSENPTAARDMINMKALAALKLIFNQKEAKANLVSGVAIFINIKEHIRKGSIVVVDHLSYNTLMAIFREVKEIIETM

SEQ ID NO: 2196 - DNA, 1011 bp, Homo sapiens
atgtcctgcccaagcactgtcattcttttactctgcatcaaacaggaacaaagatggcagtgtcttcataattcacccactcaaagttccacttttggagaacccaacagacctatcacgcagacaggagactttaacaaccacctggagcctgtgggaagggacagcacccaagacacggggtcccacaggcccctttccggaatcagggccccgagtagcgaacgcggcccacctctcgtgggctgggcacagagctgggacgccggctccccccggccttcccgggagccccccacaatggctcccgctccgccatttctcccgcaggagctcccccacagccctttccgggcacagacaccgtcgagggcggggcgccggcgcctgcaaagctggcttggaggcggtcagcgcggttctcctccagacgatctgacggtgcctctcaagccagcccctcagcccttggcctggctcggcctgcaccggtcaccgcctccccatcgccaggggtctcgagcactgcgcacctctctccggcgaccggctccgaccggatcgtctcctccttgccaggatgtcagggtcggcggggcaggctgccagccggtccaccctggcggaccaccccaagctcacgcacccccacttgccttcagaggcccagggcccaggtcgtcgacctccccctcctctcctcagctctcctctggcggctcctcacttcgattctcaccgctttccccgctatcagaatggcaaagacgcgtcccgccccccacgcctctgcaccaaactgggcaggggctgcgcaggatgctgcaagaaccgctctctccgcgagggtgtcgggaaggggggcggagggatacggcgcgaaagtgctcgacgcccccctctcaggcccaccttagttccgacccagaggtgggcggggccatgacgagccccagcctgggcctgcgggttggcaccaggctgcctcaggaggacccccgcggaccctaa

SEQ ID NO: 2197 - protein, 336 aa, Homo sapiens
MSCPSTVILLLCIKQEQRWQCLHNSPTQSSTFGEPNRPITQTGDFNNHLEPVGRDSTQDTGSHRPLSGIRAPSSERGPPLVGWAQSWDAGSPRPSREPPTMAPAPPFLPQELPHSPFRAQTPSRAGRRRLQSWLGGGQRGSPPDDLTVPLKPAPQPLAWLGLHRSPPPHRQGSRALRTSLRRPAPTGSSPPCQDVRVGGAGCQPVHPGGPPQAHAPPLAFRGPGPRSSTSPSSPQLSSGGSSLRFSPLSPLSEWQRRVPPPTPLHQTGQGLRRMLQEPLSPRGCREGGRRDTARKCSTPPSQAHLSSDPEVGGAMTSPSLGLRVGTRLPQEDPRGP

SEQ ID NO: 2198 - DNA, 6514 bp, Homo sapiens
ccaggagctgccttggcagtcacgccccttccttccgaggagctttctggctgcctaaactggtagaccccctgaattactcctccatctccgctctctttcgcctcctcttctcttagttctctccgcctccccctcaactaccaccacctccagtcagtctcgcctccggctatccgctgctccaccctctggcccggtatcctgcctgtccgctgccaccaaggagagcccggacggagcagcgaggaggggagcagccgggagttggggcttcccccctgcccatccctggccgctggcccgggaccgaagccacttgagcgagcagagagtcgtcaccttgtcttctttgccttcagggagctgctaagaaggacaaataagatagcagagtgaaagagcttttgtctccttagaaggaaggctgagaaactaaaggccagcgcaggacatctcattgccattgtcagccaggaactcgcagcctcacagccctacttcttctctgacctctggggggtccttgcccttgctacaatctccaccatccactagattgtctcctgcccgacaccccttggtcccaaaccagggagaccattcagctcacctgcctaggccgcagcagcatttccttcctaatcaggctcaccagggggatcattaccgtctctcccaacctggcctgagtcagcagcagcagcaacagcagcagcagcaccatcatcaccatcaccaccaacaacagcagcagcagcagccacagcagcagccaggagaagcctattcagctatgcctcgggctcagccatcctctgcttcttatcagccagtgccagcagacccttttgccattgtttccagagcccagcagatggttgagatcctctcagacgagaaccggaacttgaggcaagagttggaaggatgctatgagaaggtggcaagactgcagaaggtggagacagaaatccagcgcgtctcggaggcatatgagaacctcgtgaagtcatcctccaaaagagaggccctagagaaagccatgagaaacaagctagagggcgagattcggaggatgcatgatttcaacagggatctgagagagcgtctagagactgccaacaagcagcttgcagagaaggaatatgaggggtcagaggacaccagaaaaaccatctcgcagctctttgcaaaaaataaagaaagccagcgtgagaaggagaagctggaagcggagctggccactgcccgttctaccaatgaggaccaaagacgacacatcgaaatccgagatcaggccctgagtaatgcccaggccaaggtggtaaagctggaagaagagctgaaaaagaagcaagtgtacgttgacaaggtggagaagatgcagcaggcccttgtacagctccaggcagcatgtgaaaaacgtgagcagctagagcaccgtctccggacacgactggagagggaactggaatccctgagaatccagcagcgtcagggcaactgtcagcccaccaacgtttcagaatacaatgctgctgcactgatggagctccttcgggagaaagaggagaggattctggctctggaagctgatatgacaaagtgggagcagaaatatttggaggagaatgtgatgagacattttgctctggatgctgctgcaactgtggctgctcagagggacacaacagtcatcagtcactctcctaacaccagctatgacacagctctagaagctcgcatccagaaagaggaggaagaaatcttgatggccaataagcgttgccttgacatggagggcaggattaagaccctccatgcccagattattgagaaggatgccatgatcaaagtactccagcagcgttcccggaaggagccgagcaagacagagcagctgtcgtgcatgcggccagcgaagtctctgatgtccatttccaatgctggatcaggcttgctctcccactcatccaccctgactggctcccccatcatggaagaaaagcgagacgacaagagctggaaggggagcctaggcattctcctgggtggagactaccgtgctgaatatgtcccttccacaccctcgcctgtgccaccctcgactcccctgctctcggctcactccaagacaggcagccgagactgcagtacccaaactgaacgtgggacggaatcgaacaaaactgcagctgttgctcccatctctgttcctgctccagttgctgctgccgccactgctgccgccatcactgccactgctgccaccatcaccaccaccatggtagctgctgctccagttgctgttgctgctgctgctgctccagctgctgctgctgccccgtctccagccactgccgctgctactgctgctgctgtttctccagctgctgctggtcagattccagctgctgcctctgttgcctcagctgctgccgttgctccttctgctgctgctgctgctgctgttcaggttgctccagctgctccggctccagttccagctccggctctggttccggttccagctccagcagcggctcaggcttctgctcctgctcagactcaggcaccaacttcagctccggctgtggctccaactccagctccaactccaactccagctgtggctcaggctgaggttcctgcaagtccagctaccggtcctggaccacatcgtttgtctataccaagtttgacctgcaatccagacaaaacagatgggcctgtgttccactccaatactctggaaagaaaaactcccattcagatcctgggacaagagcctgatgcagagatggtggaatatctcatctaaacggccaaatcaagagctgcagattatcagcaaaaatgcttttaatcattttcccccttttattggttcttgttttgagggtgaggacaagggttgtggggaggggatgttttttaacaggactttttattggaacaatgtactacttgagtaataccatgtgaacaccagtctattttggtatgcttagggagtacctctaaagacagattaatcagaatgtgctctaaagcttattgtttgaatttatacgaatactgggactgttaacaggtggctatacatcgacgttttcaatgtgcttaaatttgtttaaattttccatattctagatcattttttattgaagagcacagtatgtgtggaagacagtgtataacacgtagtttggaagtgggaagctagagagaattgagtgtgtgctgttttgtatagttactatcctgtgcagcagctggagaaagcactcacctcaggcttacaaaagggaatagtttcaggagctatgtaagctggaaaaaaggtagggagttttggggtgcagaagggtactggagctaattttttcttccagtttcccagctaccctgccccagggaattgtgtttgtcttcatttcagtggtgctttggaaatggattcttttggttccctcctggaggttcatacattcatatatatgctctggagtaatttatgcatttggataattaatatattgctttcagatgctgggagagtacattaactgagtgatgcgcaacttcctctctcttagggaattagaccatcagaggccttgatggagagttgcatggggtgctatatgcagacttccatggtttgtgtgtagccatgaacacagcttgcttgcatttagtaagaccaatcagcttagtgtttatttcttctacagcacagattcactggctgggtctccagtctcaaattgccaatcatttgcaaagtgaggaaggatctttgttgacaggttgaatgctttgaatttctggtgactactttgaaataacttgttttgtttgtcaaattctaagcatatgtcttaaaaggcatttttgactatcacctccaagggaatagcttgagaaacccaaagtactatgctgcagtcgggggagaggtggattgcagcagtatcctcaactacctcttctcactgtcagtgacaccatcttggaatacctttgggaagcagcaggaaatgtgcatgtgggtagagatcaaaggaggcaatggctccaagccttgccatagggctgcctccaaggacacagaaggatgccagttgccacaggtccctgccctgtgtcacctgtctgcccttcattaaggtgagaaatctgcagatagcatcattaagatcagttttaaggggtatagggagggtgagggaagtggggggtgttaggtaagggttgggggtagaggttttgggatgtcttagttagaaaccagattaatagaagagtaggcctgatatattacatcatgagccatagtggtgggaaagaactttagcaatatagccctacctcctcattttagtgatgaggaatctgagaactggagaggttcagtgactttttgaaagtcatacaacacagctaaccattatgccaatcaccatgcttattttgggaaactctttatcttttttaaattccattttatgaaaaggcatcttcatggtccagggaatatgtatcttgtaaaatgtacctggttggagtagcttgtccagtcttgacaaactactgaatttctgtcttgcctctccttcagtgccttttaaaaggttttcccttttctgatctgcatttcaacatagagtcacataaatgtccccctgagaaaccaatcccacttctttctaggagattgggtatcttagataatcttttggggttcctctgtgagtataggaatggtatccttcctaattatcttccaaaggaattattttgtgtgtgtgcctgtgtgtgtgtagagacataaaggagggtgatgtgattttcagctagtcctttcacattttcaataatgaggtaatcatgttacatacacattagtcctcagttataaagtgaatctcagatagaaattaaaagtgcagttgtgttaagactctttcatactaccctttagtcataaggagaaaaaaacactcaaatagtagaagcagcaagtagcaaacttcaggagagctactttctatccaaataatttaaaaaacacttttcacctactcctttcatggttataacacattggcagactttttgctggctctgggagccatgattttaatcacattctgcaaggtgacaaatgtcatacattccacattgtgtggtagccatctctttagactcatgtgttttggggaaaggaagaagttcttggctgagtactattttgaactttccagaaccctctcacaccagagacagttcttctctgttcagtttccaatccccgataatttgctaaaataacattgtacatccaagagagggaagaagagtatgtcagtatattatgcagaagatagatacagccttttcagaagatctccactagtttttgttccaaaaattcaagtttatgggagaaatctcaattagccaccttttcacagttgtgtggatataacatttgggggatctttctggactcctacctatctgtgcattttaccggcacctcaggaaaggagggtgaccaggttgtcttagcttgtactgcttggtgatctctgaggaccttctaattcagttgtaccccagtgttccatgtatagaaaaacttcattagaacaaactttacttgatatgaaactcctattaacagtctttttttgaaataaaaagtagcttgagctttcttttaaaatcatgtatcttgattgttgatttaatgaaggatttccttttaatgctgcttttgagcttcaaggtaataggacagcaggaacctaaaatatctgccatcatctgccataggaaagatacccagagacccatcatgttctctttttgttgttacactgttgggtgggtataacaattggaaaatgaacaaactgattgattgtgcaaactactttttatgacaagcctaaaccctcataatgcggcagcttaaagtgtatacatatgcactaactttgatcaattatattctcatatctgttagctacacagtctcctattatctcaattgcttatgtgcatatggaatatgttacttaaaacgtgtgcattcttactgaaaatgttttcaaaggaaggtatcagctgtgggctaattgccaccaatttcagcctgccacgattcttggaaatatgtcttccaagtgccatccatcatcagtaggacaagtgtcgggagtttgtttatttttttccagtagcaacgatgggttacatggagccatgaaacctccttctggcctcccttgtgattaatggcatgtgtttgtaaaatggatagctggggttggcagatggctagagaagaatcgcctttggtttaaaatgtatgtggtcccctaatgattgtgaccccattctgtaatcaactgagctagttccaataaagttaagcaggtttaaatccactttgtgcctatcttttcactgacaataaagttagctattttaaaatgca

SEQ ID NO: 2199 - protein, 675 aa, Homo sapiens
MPRAQPSSASYQPVPADPFAIVSRAQQMVEILSDENRNLRQELEGCYEKVARLQKVETEIQRVSEAYENLVKSSSKREALEKAMRNKLEGEIRRMHDFNRDLRERLETANKQLAEKEYEGSEDTRKTISQLFAKNKESQREKEKLEAELATARSTNEDQRRHIEIRDQALSNAQAKVVKLEEELKKKQVYVDKVEKMQQALVQLQAACEKREQLEHRLRTRLERELESLRIQQRQGNCQPTNVSEYNAAALMELLREKEERILALEADMTKWEQKYLEENVMRHFALDAAATVAAQRDTTVISHSPNTSYDTALEARIQKEEEEILMANKRCLDMEGRIKTLHAQIIEKDAMIKVLQQRSRKEPSKTEQLSCMRPAKSLMSISNAGSGLLSHSSTLTGSPIMEEKRDDKSWKGSLGILLGGDYRAEYVPSTPSPVPPSTPLLSAHSKTGSRDCSTQTERGTESNKTAAVAPISVPAPVAAAATAAAITATAATITTTMVAAAPVAVAAAAAPAAAAAPSPATAAATAAAVSPAAAGQIPAAASVASAAAVAPSAAAAAAVQVAPAAPAPVPAPALVPVPAPAAAQASAPAQTQAPTSAPAVAPTPAPTPTPAVAQAEVPASPATGPGPHRLSIPSLTCNPDKTDGPVFHSNTLERKTPIQILGQEPDAEMVEYLI

SEQ ID NO: 2200 - DNA, 4520 bp, Homo sapiens
taggaacaggggagagtgcacctgctaccagtcaagctcagccagactgcaagaggaggcgaggcggagccagccgagggagtgaaccatggacaagttgaaatgcccgagtttcttcaagtgcagggagaaggagaaagtgtcggcttcatcagagaatttccatgttggtgaaaatgatgagaatcaggaccgtggtaactggtccaaaaaatcggattatcttctatctatgattggatacgcagtgggattaggaaatgtgtggagatttccatatctgacctacagcaatggtggaggcgccttcttgataccttatgcaattatgttagcattggctggtttacctttgttctttctggagtgttcactgggacaatttgctagcttaggtccagtttcagtttggaggattcttccattgtttcaaggtgtgggaattacaatggtcctgatctccatttttgtgacaatctattacaatgtcataattgcctatagtctttactacatgtttgcttcttttcaaagtgaactaccatggaaaaattgttcttcgtggtcagataaaaactgtagcagatcaccaatagtaactcactgtaatgtgagtacagtgaataaaggaatacaagagatcatccaaatgaataaaagctgggtagacatcaacaattttacctgcatcaacggcagtgaaatttatcagccagggcagcttcccagtgaacaatattggaataaagtggcgctccaacggtcaagtggaatgaatgagactggagtaattgtttggtatttagcactttgtcttcttctggcttggctcatagttggagcagcactatttaaaggaatcaaatcgtctggcaaggtggtatattttacagctcttttcccctatgtggtcctactcatcctgttagtacgaggtgcaactctggagggtgcttcaaaaggcatttcatactatattggagcccagtcaaattttacaaaacttaaggaagctgaggtatggaaagatgctgccactcagatattttactccctttcagtggcttggggtggcttagttgctctatcatcttacaataagttcaaaaacaactgcttctctgatgccattgtggtttgtttgacaaactgtctcactagcgtgtttgctggatttgctattttttctatattgggacacatggcccatatatctggaaaggaagtttctcaagttgtaaaatcaggttttgatttggcattcattgcctatccagaggctctagcccaactcccaggtggtccattttggtccatattattttttttcatgcttttaactttgggtctcgattctcagtttgcttcgattgaaacgatcacaacaacaattcaagatttatttcccaaagtgatgaagaaaatgagggttcccataactttgggctgctgcttggttttgtttctccttggtctcgtctgtgtgactcaggctggaatttactgggttcatctgattgaccacttctgtgctggatggggcattttaattgcagctatactggagctagttggaatcatctggatttatggagggaacagattcattgaggatacagaaatgatgattggagcaaagaggtggatattctggctatggtggagagcttgctggtttgtaattacgcctatccttttgattgcaatatttatctggtcattggtgcaatttcatagacctaattatggcgcaattccataccctgactggggagttgctttaggctggtgtatgattgttttctgcattatttggataccaattatggctatcataaaaataattcaggctaaaggaaacatctttcaacgccttataagttgctgcagaccagcttctaactggggtccatacctggaacaacatcgtggggaaagatataaagacatggtagatcctaaaaaagaggctgaccatgaaatacctactgttagtggcagcagaaaaccggaatgagatctcattgaaaaaaatatatgattgtataatgtgattttttttagaatagggggaaccttatttatttgtgtgttaactgaataggaaaatgtacatactatgttcatgatagtgtgatttttttcacatttaagcaggaatgcaatataaaaatgtgaatctcttaattctcagccatgtgcttattatatttctttttagattgtctatctgtataacacacacacacacacctaagagtctctatttcacaattatatttttgtaaatagtatatgcatttttaatacattggaggctttattttgaactaatttcttagagaatagttatattttctattacacaagtttaaaaatattattaacttgtattttcttaatatacaatctatcttttccacaaatatgagtgggaaataaatcagcacatttgaaagaaagtgttaaaactgaaggcctcacttaattagaaacgtgataaatatatggacaaatggactatacatactataagaggactgtagtttaatactttttacccaaatatgtttaaaaacatcgtgcatttgttacagctcatgttttctatatgaacttagtcattaatgttctttataaaaagtgaaataagatggaaaaattaggatcctacagccagtacgtgataaatctagaaaattgagttttgagtacctcttttcccatatacaatcttccttccttaggtaatttggaagaaaactatgacccatttaatttctattgtgtttcaccaaattcagtgttgttcattatacctctctgaaatataggtttaatttcaaatagaatatggacttaaatgttaatgagaaactggctttaatcaattctagcattttattactgtaatacagggctgatagagtgattttgtcttatatgagtcagttactacttacaggtgataacttgcatactattggaagataaagttgtcaaacttgtcaagaatgagaaaagccaaattagaaaatcctatgtcctagtttccttaccaaggataattaaatatatcactaagagctttatatattgattatatattgttgacaactggtttaagcatcatagcctatgatgataaacactgcctatatatgtaaatagcttttcatcaattcttaaatttcttaacctaggcttcagggagcatatgaaaccaaaattatatggaacattttctgtgtgtacatgtacatgcatttttctagggagagagtccgtaggtttatcagaatatcaaggaaaactgtgacccaaagaagtttaagaatcacatacagtgctgctggctttttgtgcttggcaaatgagtgacaatagaagaaataatttttcttacacattttaaaacgttttctcttccttgtgattgaagatgaaaggagtaagaaattaaggcatttgtttaatttatactggtaacttatttaggggggaggggacatgaaggtaggtaaataggtaggcctctaattgaaccacctctctaagttatgtacgtatatataagctgaaattgtgtttgacattctgagggttttctttttctttttcctttttttttttttttggtggggggctgggggtcagagtcttgttctgttgcctgggctggagtgcagtggcatgatctcagctcactgcaacctctgccttctggattcaagtgattctcctgcctcagcctcttgagtagctgggactacaggtgcccgccaccacaccagctaatttttgtatttttagtagaggcgaagtttccccatgttggccaggctggtcttgaactcccgacctcaagtgatctgtctacctcggcctcctaaagtgctgagattacaggtgtgagccaccgtgcccggcccattctaagggttttctttgaagacaggtcaaatgctgttagtaagtttcaggagattgttaattcctcagttataccagattttataaaatatttgagaatagatggctaacaagaggttagaaatacttttccttaattttaatccacagtatgttacatgcattctaccactacattttggtgctatttaaggtgtgcaattttctataggtgacttttgcaattcagggaagatttgggcatattaaatgaaagaatatctaattgggggaggtgtgaagggaaagaaattcttttcaaaagctgaccacaaagagtagttaaaagtttttgtcactatcttcacaagtgtgtaaagcacagatttcaacagagtgcttggcatattgtagggtgctcaatggtggtttttattattattactcagattccacagtggcaagaaacatcattctacataatggaaaacatttacatcaaatcccacttactttaatgcgaacttggagataatttatggtattgtattgtaaaccattaatgaaaactttttcacagttgagtgaaattaaaatcactatatctc

SEQ ID NO: 2201 - protein, 642 aa, Homo sapiens
MDKLKCPSFFKCREKEKVSASSENFHVGENDENQDRGNWSKKSDYLLSMIGYAVGLGNVWRFPYLTYSNGGGAFLIPYAIMLALAGLPLFFLECSLGQFASLGPVSVWRILPLFQGVGITMVLISIFVTIYYNVIIAYSLYYMFASFQSELPWKNCSSWSDKNCSRSPIVTHCNVSTVNKGIQEIIQMNKSWVDINNFTCINGSEIYQPGQLPSEQYWNKVALQRSSGMNETGVIVWYLALCLLLAWLIVGAALFKGIKSSGKVVYFTALFPYVVLLILLVRGATLEGASKGISYYIGAQSNFTKLKEAEVWKDAATQIFYSLSVAWGGLVALSSYNKFKNNCFSDAIVVCLTNCLTSVFAGFAIFSILGHMAHISGKEVSQVVKSGFDLAFIAYPEALAQLPGGPFWSILFFFMLLTLGLDSQFASIETITTTIQDLFPKVMKKMRVPITLGCCLVLFLLGLVCVTQAGIYWVHLIDHFCAGWGILIAAILELVGIIWIYGGNRFIEDTEMMIGAKRWIFWLWWRACWFVITPILLIAIFIWSLVQFHRPNYGAIPYPDWGVALGWCMIVFCIIWIPIMAIIKIIQAKGNIFQRLISCCRPASNWGPYLEQHRGERYKDMVDPKKEADHEIPTVSGSRKPE

SEQ ID NO: 2202 - DNA, 10805 bp, Homo sapiens
gactgcttgcattaaaggacttcctcatcctttttttcatgaaactgagcttgcttaatcagagatggagcaaactgactgcaaaccctaccagcctctaccaaaagtcaagcatgaaatggatctagcttacaccagttcttctgatgagagtgaagatggaagaaaaccaagacagtcatacaactccagggagaccctgcacgagtataaccaggagctgaggatgaattacaatagccagagtagaaagaggaaagaagtagaaaaatctactcaagagatggaattctgtgaaacctctcacactctgtgctctggctaccaaacagacatgcacagcgtttctcggcatggctaccagctagagatgggatctgatgtggacacagagacagaaggtgctgcctcacctgaccatgcactaagaatgtggataaggggaatgaaatcagagcatagttcctgtttgtccagccgggccaactctgcattatccttgactgacactgaccatgaaaggaagtctgatggggaaaatggtttcaaattctctcctgtttgttgtgacatggaggctcaagctgggtctactcaagatgtgcagagcagcccacacaaccagttcaccttcagacccctcccaccgccacctccgcctcctcatgcctgcacctgtgccaggaagccaccccctgcagcggactctcttcagaggagatcaatgactacccgcagccagcccagcccagctgctccagctcccccaaccagcacgcaggattcagtccatctgcataacagctgggtcctgaacagcaacataccattggagaccaggcatttcctgttcaaacatggatctggttcctctgcgatcttcagtgcagccagtcagaactaccctctgacatccaataccgtgtactcgccccctcccaggcctcttcctcgaagcaccttttcccgacctgcctttacctttaacaaaccttacaggtgctgcaactggaagtgcacagcattgagcgccactgcaatcacagtgactttggccttgttactagcctatgtgattgcagtgcatttgttcggcctgacttggcagttgcaaccagttgaaggagagctgtatgcaaatggagttagcaaagggaacagggggaccgagtccatggacactacttactctccaattggaggaaaagtttctgataaatcagagaaaaaagtgtttcagaagggacgggcgatagacactggagaagttgacattggtgcacaggtcatgcagaccattccacctggtttattctggcgtttccagattactatccaccatccaatatatctgaagttcaatatttctttagccaaggactctctgctgggaatttatggcagaagaaacattccacctacacatactcagtttgattttgtaaaactaatggatggcaaacagctggtcaagcaggactccaagggctctgatgatacacagcactcccctcggaacctgatcttaacttcgcttcaggagacaggtttcatagagtatatggatcaaggaccttggtatctggcgttttacaatgatggaaaaaagatggagcaagtattcgtgttaactacagcaattgaaataatggatgactgttcaaccaattgcaatggaaatggagagtgtatctctggccattgtcattgtttcccaggattccttggacctgactgtgctagagattcctgccctgtgctgtgtggtgggaatggagaatacgagaaaggacactgtgtctgccggcatggctggaaggggccagagtgtgacgttccggaagaacaatgcattgatccaacatgctttggccacggcacctgcatcatgggagtctgcatctgtgtgccaggatacaaaggagaaatatgcgaggaagaggactgcctagacccaatgtgttccaaccatggcatctgtgtaaaaggagaatgtcactgttctactggctggggaggagttaactgtgaaacaccacttcctgtatgtcaagagcagtgctcaggacacggaacttttcttctggacgctggagtatgcagctgtgatcccaagtggacaggatctgactgctcaacagagctgtgtaccatggagtgtggtagccatggagtctgctcaagaggaatttgccagtgtgaagaaggctgggtaggaccaacatgtgaggaacgctcctgtcattctcattgtactgagcatggccaatgcaaagatggaaaatgtgagtgtagccctggatgggagggcgaccactgcacaattgctcactacttagatgctgtccgagatggctgcccagggctctgctttggaaatggacgatgtaccctggatcaaaatggttggcactgtgtgtgtcaggtgggttggagtgggacaggctgcaatgttgtcatggaaatgctttgtggagataacttggacaatgatggagatggtttaaccgactgtgtggatcctgactgttgtcaacaaagcaactgttatataagtcctctctgccagggctcaccagatcctcttgacctcattcagcaaagccaaactctcttctctcagcacacttcaagacttttttatgatcgaatcaaattcctcattggcaaggacagtactcatgtcattcctcctgaggtgtcatttgacagcaggcgtgcctgtgtgattcgaggccaagtggtggccatagatggaactcctctagtgggagtgaatgtcagtttcttgcaccacagtgattatgggtttaccatcagccggcaagatggaagctttgacctcgtggccatcggtggcatctctgtcatcttaatcttcgaccgatcccctttcctgcctgagaagagaacactctggttgccttggaatcagtttattgtggtagagaaagtcaccatgcagagagttgtatcagacccgccatcctgcgatatctccaactttatcagcccaaaccctattgtgcttccttcaccgctcacatcatttggagggtcctgtccagagaggggaactattgttcctgagctgcaggttgtacaggaggaaattcccattccctccagctttgtgaggctgagttacctgagcagccgcacccctgggtataaaaccctgctacggatccttctgacacattcaacgattcctgtaggcatgataaaagtacacctcacagtagctgtggaagggcgactcacacagaagtggtttcccgccgcaattaatcttgtctacacatttgcttggaacaagaccgacatctatggacagaaggtttggggcctggcagaggctttggtatctgtgggatatgaatatgaaacgtgccctgactttattctctgggagcaaaggacagtcgttttacaaggttttgagatggatgcttctaacctaggaggctggtctttgaataagcatcacattttgaatcctcaaagtggaatcatacataaagggaatggagaaaatatgttcatttcccagcagcccccagtcatatcaaccataatgggtaatggacaccaaaggagtgtagcctgcaccaactgcaatggcccagcccacaacaacaaactctttgctcctgtcgccttagcttctggccctgatggcagtgtgtatgttggcgacttcaattttgtaaggagaatatttccctcgggaaactccgttagtattttggaattaagcacaagtcctgctcacaaatactatctggctatggaccctgtgtctgaatcactctatctatcagacaccaatactcgcaaagtctacaagttgaaatctcttgtggagacgaaagatctgtccaagaattttgaagtggtggcaggaactggtgatcagtgccttccctttgaccagagtcattgtggagatggtgggagagcatcggaagcttcactgaatagccctcgaggcatcacagttgataggcatggatttatttactttgtggatgggactatgattcgcaaaattgatgagaatgctgtgatcacaactgtaatcggctcaaatggtctgacttccacacaaccactgagctgtgactcaggaatggacatcactcaggtgcgattagagtggccaacagaccttgcagtaaatcctatggacaattcattgtatgtcttggataacaacattgtgctgcaaatttctgagaacaggcgtgttcggatcatcgcaggacgccccattcactgccaggtgccaggcatcgatcatttcctggtcagcaaggtagcaattcactccactctagagtcagcgagggccatcagtgtctcccacagcgggctgctcttcatagctgaaacagacgagaggaaagtaaaccgcattcagcaagtaaccaccaatggggagatctacatcatcgctggtgcccccactgactgtgactgcaaaattgatccaaactgtgactgtttttcaggtgatggtggctatgccaaagatgcaaagatgaaagccccttcctccttagcagtgtcgcctgatggaaccctctatgtggcagacctcggaaatgttcgaattcgtaccatcagcaggaaccaagcccacctgaatgacatgaacatttatgagattgcttcacccgctgatcaggaactgtaccagttcactgtaaatggaacccacctacacaccctgaacttgataacaagggactatgtttataacttcacctacaattctgaaggtgacttgggcgcgattaccagcagcaatggcaattcagtgcacattcgccgtgatgcaggcggaatgccgctatggcttgtggtgcctggcggacaagtatactggctgactataagcagcaatggagtcctgaaaagagtgtcagcccaaggctataatctggccttaatgacctatccaggaaacacagggcttctggctaccaaaagtaacgaaaatggatggacaaccgtttatgagtatgaccccgagggacacctgaccaatgcaacgtttcccactggagaggtcagcagcttccacagtgacctggagaagctgacaaaagtggagctagatacttccaaccgtgaaaatgtcctcatgtcaaccaacttgacggcaactagtaccatatatattttaaaacaagaaaatactcaaagtacctatcgggtgaatccagatggttccctgcgtgtcacttttgccagcgggatggagatcggcctcagctcagagccccacatcctggcaggggcagtcaaccctaccctgggcaaatgcaacatctcattgcccggagagcacaatgcaaacctcatcgagtggcggcagaggaaggagcaaaacaaaggcaatgtttcggcttttgaaaggaggctgagggcccacaacagaaacctactctccatagattttgatcatataacccgcacaggaaagatctatgatgaccatcgaaaattcacccttcgaattctttatgaccagactgggcgacccattctgtggtctcctgtaagcagatataatgaagtgaacatcacatattcaccttcgggattggtgacgtttattcaaagaggaacgtggaatgaaaaaatggaatatgaccagagtgggaaaattatttcaagaacttgggctgatgggaaaatttggagctatacctacttagaaaaatctgtgatgcttctcctacacagccagcggcgttacatctttgagtatgaccaaccagattgtctgctctcagtcaccatgcctagcatggtgcgtcacagcttacaaaccatgctttcagtgggctactaccggaacatctacaccccaccggacagtagcacttcttttatccaagactatagtcgagatggccgattgctacagaccctgcatctggggacagggcgcagagtcttatacaagtacaccaagcaagcaaggctttctgaggttctctatgataccactcaggtcacattaacatatgaagagtcttctggagtgattaagacaatacacctgatgcatgacggattcatctgcacaatcagatacaggcaaacaggacctcttattggacgccagattttcagattcagtgaagaaggccttgtgaatgcacggttcgactacagctacaacaatttccgagtcacaagcatgcaagctgtaatcaatgaaacccctttgcctatagatctttaccgatatgttgatgtctctggcagaacagagcagtttggaaaattcagtgtaattaattacgatttaaatcaggtcataactactacagtgatgaaacacaccaaaatcttcagtgccaatggacaagtcattgaagtccaatatgaaatcctaaaggcaattgcctactggatgaccattcaatatgataatgtgggccgcatggtaatatgtgacataagggtaggagtagatgccaatataacaaggtacttctatgaatacgatgctgatgggcaacttcagactgtttctgtaaatgacaaaacccagtggcgttatagttacgatctgaatggaaacatcaacctcttaagccatgggaagagtgctcgtcttactcctctccgatatgacctccgagaccgcatcaccagattaggagaaattcagtataaaatggatgaagatggctttctgaggcagaggggaaatgatatttttgaatataattctaatggcctgctgcagaaagcctacaataaggcttctggctggactgtgcagtattactatgatgggcttgggcgacgtgtcgcgagtaagtccagcctagggcagcaccttcagttcttttatgcagaccttaccaaccccataagagttactcatttgtacaaccacacaagctcggagattacatctctgtattatgatctccaaggtcaccttattgccatggagttaagcagtggtgaagaatattatgtagcctgtgataatacaggtaccccactagctgtgttcagcagccgaggtcaggtcataaaggagatactatacacaccttatggcgatatctatcatgacacttaccctgactttcaggtcattattggttttcatggaggactctatgatttccttactaaattagtgcacctggggcaaagggattatgatgttgttgctggcagatggacaacgcctaatcatcacatatggaaacagttgaacctccttcctaaaccattcaacctctactcctttgaaaataactacccagttggcaaaattcaagatgttgcaaagtataccacagacatcagaagttggttggagctatttggtttccaattacacaatgtactacctggatttcccaaacctgaattagaaaatttagaattaacttacgagcttctacggcttcagacaaaaactcaagagtgggatcctggaaagactatcctgggcattcagtgtgaactccagaaacagctcaggaatttcatttccttggaccaactacctatgactccccgatacaatgatggacggtgccttgaaggagggaagcaaccaaggtttgctgctgtcccttctgtttttgggaaaggtataaaatttgccatcaaggatggcatagtaacagctgatattataggagtagccaatgaagatagcaggcggcttgctgccattctcaataatgcccattacctggaaaacctacattttaccatagaggggagggacactcactacttcattaagcttgggtctctggaggaagacctggtgctcatcggtaacactggggggaggcggattctggagaatggtgtcaatgtcactgtgtcccagatgacttctgtgttgaatgggaggactagacggtttgcagatattcagctccagcatggagccctgtgcttcaacatccggtatgggacaactgtcgaagaggaaaagaatcacgtgttggagattgccagacagcgcgcagtggcccaggcctggactaaggaacaaagaaggctgcaagagggggaagaggggattagggcatggacagaaggggaaaagcagcagcttttgagcactgggcgggtacaaggttacgatgggtattttgttttgtctgttgagcagtatttagaactttctgacagtgccaataatattcactttatgagacagagcgaaataggcaggaggtaacaaaaatatctctgcctttgcgtcaccaaagactgcctgtttttaaaacataaaatggtttattgtattggttttctagatcagaactctgtatatgtaaatatggaggaaaaacatatccaactgcctttcaatgtgacggaagatggtattttaatattgtttgtttaaactctttaagaaatgacagagatttttagttcttgtgtggcagtattcaaaataacacaagtagaactcaaacagctaaaaacagttttcagaaagcaccactttcaatttgccgagccatgcatatgttccaatatccagaaagaacccaaggttctctatctctattgtgagaagcagtttcatccttaactgttggcagaacttacgggctatttgaataggtggtgcaatagtatctgaaacttgcctttcgaaagactgccagccctttgacgttttccagatctgttataggaaacttaaaaacaggtgtaaaatgtcttcagccaccatctcctagagtgaggacccaattgcccttccttcttgattattcctccttgcttgttaaagtaaatgccatattgttgtgctgtgttttggcgtgtggtggctgggttctgtctaccatgcttccctgtgggtgtggtaaccagactgtatagccgctatttgctcgtgtgtacatgataccaaagcagctggccagcgtgacctctctcacacgacctgttttgactcaattttttactaaaagttgttcagctgtattggtatcatgtaaacatagcttttattaacctgggtaggaatttctcatttatatataggatgtgttttggtcatagtttcacattagtgattcagtatctatacactgacccaatggttttgtgcacatgaacggtaatttacttaaaagtatgattctggtacaaaaacaaacaaaggctttagcaggcatacgtgtctgggatgccgatacatacattaactactactgcagaaattcataagagccaaaaccttaaaaaaatagacctggtacttaagtgaaagtactaaagggaagaccagaccaaacatcacagcagttgctgccacattgtttcagcccacttagatttatctttcaaatgtacaattctgtattgaacatctcccagccatcttcaggaaatcgaatcaagtaaatcctttccaaccgaaaacatttcaactaactatagagaggcagactcatttttactaaaataatttatacagttagttattttcgttctccgtacttacccatttatctttatttaatcgtctctactgcctaggaaaataactattttccaggacgggttatttgttctgcgatcatttaaaatttggagaaaggtcaggattagtgttaatatcagctgcagtttctcaatctctaggaatcctgcagtaaaacaagccccttggtgagctggaagatttgtgcccagtgacaaagagatagtttgtaaaatgctgtgtaattgtaagttaccacaaatgaaaatacatgacagcacaatgtggcccgtagaaaattcccctgagccagcttctgcactttcatcaccgaatctgaacatttgctatgtctgaaggcaaatttatgatggaatgttagtttggattctttccagatgctacctaaatgcagtgtggggtcattgccttgctttgcgatgacagtttctttgaaaatatgcaaagtcataagctcatgttaaggtttttcaagagtctgcctcctactacacaaaggaaagcaagggaaaggaaatgaccctggcaaacagtagggaagggtgtattcaaacatttcattttcaaaaccttcgggttagaataccacttacacatgtattctgagagacagaattcatgaggaactcatctctctttataactggaaacacaccagcttgatatattgctaatccatactaaaatcatattattgggttttttctgaatcaggcctgtattaatggtacagtatttattcagaatggaattctaaaattactaacaaacttgttgaaaatttgaatacctccacaccaacctaaaaatggaccttaagttcctagaacctctgatgttcttttaaattaatggaaaaataatttgtgaactgtatatagagagtgcattcataaatgtgattatgtattttatcacaaatccaaaatgtcaatattagagtctattttgcttatattttaagcaattatacgtttttgcaattcattgatgatgtatcattttcaaactgctttaaatatccattagaaacaaatatttgaagcttttacttaatagtgattaccttgaactgtgcatttctagtttgtaatacgtatttggttggttcgtgcctttagtttgttaaagttacatttgtattatattcaggaaatgcactttttattacttacagctgtggttttaatactgccttgaactattattattctttttacaactcctaaagcttgagggaggaaagaaaaaaaaaacaaaactactaatcagtagt

SEQ ID NO: 2203 - protein, 2725 aa, Homo sapiens
MEQTDCKPYQPLPKVKHEMDLAYTSSSDESEDGRKPRQSYNSRETLHEYNQELRMNYNSQSRKRKEVEKSTQEMEFCETSHTLCSGYQTDMHSVSRHGYQLEMGSDVDTETEGAASPDHALRMWIRGMKSEHSSCLSSRANSALSLTDTDHERKSDGENGFKFSPVCCDMEAQAGSTQDVQSSPHNQFTFRPLPPPPPPPHACTCARKPPPAADSLQRRSMTTRSQPSPAAPAPPTSTQDSVHLHNSWVLNSNIPLETRHFLFKHGSGSSAIFSAASQNYPLTSNTVYSPPPRPLPRSTFSRPAFTFNKPYRCCNWKCTALSATAITVTLALLLAYVIAVHLFGLTWQLQPVEGELYANGVSKGNRGTESMDTTYSPIGGKVSDKSEKKVFQKGRAIDTGEVDIGAQVMQTIPPGLFWRFQITIHHPIYLKFNISLAKDSLLGIYGRRNIPPTHTQFDFVKLMDGKQLVKQDSKGSDDTQHSPRNLILTSLQETGFIEYMDQGPWYLAFYNDGKKMEQVFVLTTAIEIMDDCSTNCNGNGECISGHCHCFPGFLGPDCARDSCPVLCGGNGEYEKGHCVCRHGWKGPECDVPEEQCIDPTCFGHGTCIMGVCICVPGYKGEICEEEDCLDPMCSNHGICVKGECHCSTGWGGVNCETPLPVCQEQCSGHGTFLLDAGVCSCDPKWTGSDCSTELCTMECGSHGVCSRGICQCEEGWVGPTCEERSCHSHCTEHGQCKDGKCECSPGWEGDHCTIAHYLDAVRDGCPGLCFGNGRCTLDQNGWHCVCQVGWSGTGCNVVMEMLCGDNLDNDGDGLTDCVDPDCCQQSNCYISPLCQGSPDPLDLIQQSQTLFSQHTSRLFYDRIKFLIGKDSTHVIPPEVSFDSRRACVIRGQVVAIDGTPLVGVNVSFLHHSDYGFTISRQDGSFDLVAIGGISVILIFDRSPFLPEKRTLWLPWNQFIVVEKVTMQRVVSDPPSCDISNFISPNPIVLPSPLTSFGGSCPERGTIVPELQVVQEEIPIPSSFVRLSYLSSRTPGYKTLLRILLTHSTIPVGMIKVHLTVAVEGRLTQKWFPAAINLVYTFAWNKTDIYGQKVWGLAEALVSVGYEYETCPDFILWEQRTVVLQGFEMDASNLGGWSLNKHHILNPQSGIIHKGNGENMFISQQPPVISTIMGNGHQRSVACTNCNGPAHNNKLFAPVALASGPDGSVYVGDFNFVRRIFPSGNSVSILELSTSPAHKYYLAMDPVSESLYLSDTNTRKVYKLKSLVETKDLSKNFEVVAGTGDQCLPFDQSHCGDGGRASEASLNSPRGITVDRHGFIYFVDGTMIRKIDENAVITTVIGSNGLTSTQPLSCDSGMDITQVRLEWPTDLAVNPMDNSLYVLDNNIVLQISENRRVRIIAGRPIHCQVPGIDHFLVSKVAIHSTLESARAISVSHSGLLFIAETDERKVNRIQQVTTNGEIYIIAGAPTDCDCKIDPNCDCFSGDGGYAKDAKMKAPSSLAVSPDGTLYVADLGNVRIRTISRNQAHLNDMNIYEIASPADQELYQFTVNGTHLHTLNLITRDYVYNFTYNSEGDLGAITSSNGNSVHIRRDAGGMPLWLVVPGGQVYWLTISSNGVLKRVSAQGYNLALMTYPGNTGLLATKSNENGWTTVYEYDPEGHLTNATFPTGEVSSFHSDLEKLTKVELDTSNRENVLMSTNLTATSTIYILKQENTQSTYRVNPDGSLRVTFASGMEIGLSSEPHILAGAVNPTLGKCNISLPGEHNANLIEWRQRKEQNKGNVSAFERRLRAHNRNLLSIDFDHITRTGKIYDDHRKFTLRILYDQTGRPILWSPVSRYNEVNITYSPSGLVTFIQRGTWNEKMEYDQSGKIISRTWADGKIWSYTYLEKSVMLLLHSQRRYIFEYDQPDCLLSVTMPSMVRHSLQTMLSVGYYRNIYTPPDSSTSFIQDYSRDGRLLQTLHLGTGRRVLYKYTKQARLSEVLYDTTQVTLTYEESSGVIKTIHLMHDGFICTIRYRQTGPLIGRQIFRFSEEGLVNARFDYSYNNFRVTSMQAVINETPLPIDLYRYVDVSGRTEQFGKFSVINYDLNQVITTTVMKHTKIFSANGQVIEVQYEILKAIAYWMTIQYDNVGRMVICDIRVGVDANITRYFYEYDADGQLQTVSVNDKTQWRYSYDLNGNINLLSHGKSARLTPLRYDLRDRITRLGEIQYKMDEDGFLRQRGNDIFEYNSNGLLQKAYNKASGWTVQYYYDGLGRRVASKSSLGQHLQFFYADLTNPIRVTHLYNHTSSEITSLYYDLQGHLIAMELSSGEEYYVACDNTGTPLAVFSSRGQVIKEILYTPYGDIYHDTYPDFQVIIGFHGGLYDFLTKLVHLGQRDYDVVAGRWTTPNHHIWKQLNLLPKPFNLYSFENNYPVGKIQDVAKYTTDIRSWLELFGFQLHNVLPGFPKPELENLELTYELLRLQTKTQEWDPGKTILGIQCELQKQLRNFISLDQLPMTPRYNDGRCLEGGKQPRFAAVPSVFGKGIKFAIKDGIVTADIIGVANEDSRRLAAILNNAHYLENLHFTIEGRDTHYFIKLGSLEEDLVLIGNTGGRRILENGVNVTVSQMTSVLNGRTRRFADIQLQHGALCFNIRYGTTVEEEKNHVLEIARQRAVAQAWTKEQRRLQEGEEGIRAWTEGEKQQLLSTGRVQGYDGYFVLSVEQYLELSDSANNIHFMRQSEIGRR

SEQ ID NO: 2204 - DNA, 2358 bp, Homo sapiens
cccagcaggcagtgcagcctagagacgctgacaaaggagcggaggagcagtcgcagctgctttccgaggaagccggtgttgccgagattgccaaaatgctttggagtttttaactgaatctaagaaaagtccaaaatagatttgagactgtaaaaacagaaactgcagcaagggggattcagtgccaatgcatcaacaaaaaagacaaccagagttagtggaaggaaatcttcctgttttcgtgttccccacggagctcatattttatgcagatgatcagtcaacacataagcaagtgttgacactgtacaatccctatgagtttgccttaaagttcaaagttttgtgtactactccaaataagtatgttgtcgttgatgctgcaggtgcagtaaagcctcagtgttgtgtggatattgtgattcgtcatcgagatgttcgatcctgtcactatggtgtaatagacaaattccgtctccaagtttccgagcaaagccaaaggaaggctttgggaagaaaagaggttgttgctactcttctcccatcagcaaaagaacaacaaaaggaagaagaggaaaaaagattaaaggaacatttaactgaaagtttattttttgagcagtcgtttcaaccagaaaacagagctgtatcctcaggacctagtttactaactgtcttcctgggagtggtgtgcattgcagccctgatgctgcctacactgggggatgtggaatcgctggtgcctctctacctccacttaagtgtgaatcaaaaattagtggctgcttatatcttaggtcttatcacaatggccatacttagaacatgagcaaggatttcaattgacttctgaagtaaatctgtcttgaaaatatgaatgtggactgccttttatctctatttcactccattaacatgcaacaaactattgaatgatttcaaataattgcaaatgtataatatatattttaaattataatttaatttgaaggactgcagaacattattttacagacagcaaggatgcttctgagtgacacctaggaaattatttgaagaaattctttttatatctatacctgttgtgtaagaaactttaaaacatttgttattttctcacctttttttctaattcactttgattgctaggggtcatgtatgcttcgaagttacaggactaaaagagcaaactgaccggcctaaaactaaaatgacatttattccctagctacaaacatcagcgttattatgttaattataccttgccctctatcattataaatggttgccatggtgtttctaaaaataagtgttttaccattaatgtgtagagggcaaacaaagcataaagtactaagggatcatgcttatcctagggtctcacagaagagaggacatatttaattaatcttgtgaattacagaacaggttgtggtccagacaccaagaatcataggggtttttttttaaaaaacctaatagaagtagggtgacctctctctttggtctaagagttctaaaggaaggtaggcatctgtttaattagttggttcaccctggctttacctctggttaatgctttgtgttaataggaaggaaaaatcactttatcttttcttccaagcccctccctgcctgacttacccagactgggattaccagataccaggtgatttatgtggagatgatttttcacctttaaactctaagccaagtgtaagaaactcttgatagctatgtctattttatatcagtcactgagacttttttttaagtttttatttattattaagacaactttgccaaaaaagtcccctaagcacaactatttacatttctttatagcctcttctgatctctaacacatatgcagttttaactgttattttcatagtaactgatcttttgtctaaggatttttacctgaaagcacaatgtattgagtctcttgaaaatcatctttcagatctttttacagaatgaacttatgcactgctactgtagtattctcaaggaatatatgtaaacacaaatgtatgcctgaggttggtttttgcagaaaacagtctctgcttctaaaaacttctatgtctagtcttccataggaaatcctcactgtttaaccatgtgaggagcctaagtcattaaacggatcatgtctgtacattgtgtaatgaatgaaaagcacataaatgtaatctactttgaactttgtaaaaatgatgtgtggaggctattcttgtttctccatctcaagtcctgtgtgtgcacgtgtgtgcaagtgcacatgtgtgtgtgtaataacacattgtaaagaacagaaattactttaaaaaataaacagaaatggagacctga

SEQ ID NO: 2205 - protein, 213 aa, Homo sapiens
MHQQKRQPELVEGNLPVFVFPTELIFYADDQSTHKQVLTLYNPYEFALKFKVLCTTPNKYVVVDAAGAVKPQCCVDIVIRHRDVRSCHYGVIDKFRLQVSEQSQRKALGRKEVVATLLPSAKEQQKEEEEKRLKEHLTESLFFEQSFQPENRAVSSGPSLLTVFLGVVCIAALMLPTLGDVESLVPLYLHLSVNQKLVAAYILGLITMAILRT

SEQ ID NO: 2206 - DNA, 629 bp, Homo sapiens
atggctaaaggtgaccccaagaaaccaaatggcaagatgtctgcctatgccttctttgtgcagacgtgcagagaagaacgtaagaagaaataccaagaggtccctgtcaattttgcagaattttccaagaagtgctccaggaggtggaagacaatgtccaggaaagaaaagtctaaatttgataaactggcaaaggtggataaagtacgctatgatcgggaaatgaaggattatggaccagctaaaggaggcaagaagaagaaggattctaataccttcaaaaggccaccatctgaattcttcctgttctgttcagaattccaccccaagataaaatccacaaaccctggcatctctattggagacgtggcaaaaaagctggtgagatgtagaataacttaaatgacagtgaaaagcagccttacatcactaaggcggcaaaactgaaggaggagtatgagaaggatgttgctgagtataagtcgaaaggaaagtttgatggcgcaaagagtcctgctgaagttgcccagataaaggtggaagaggaagatgaagaagatgaggaggaagaagaggaggaggaggacgaggaggatgaatttaaaaactgtttatctgtctccttgtga

SEQ ID NO: 2207 - DNA, 1612 bp, Homo sapiens
atgggaacatatgcaagacatatcattatgtttaaaagcaaaggccacgcggaccccgtggggcggggcggaacctggcagggcgccagtgaccgctggggccagagccctgccgggaaaggagggcttccgccttgcagcgcagctcggatcagcagcagcccaggaggcctcccgcccgtactttcccgcgtccatccctctgtcccacggtcggtgagtcagcggagcctgatggaggccttgggctctgggcactatgtgggaggcagcatcaggtccatggcggcggcggccctgtctggcctggcggtgcggctgtcgcgcccgcaggggacccgcggctcttacggcgccttctgcaagacgctcacgcgcacgctgctcaccttcttcgacctggcctggcggctgcgcaagaacttcttttacttctatattctggcctcggtgattctcaacgtccacctgcaggtatatatttagagccactaactttgtggcatttgggggctcctcgtcaggatggctgacttccacccacctgctcacccaccctagagcaaagcgaccaactccgctcctgcatgcagacttgccactcattctttccattgcctcatcttttagtataaatgggtggcaaaaaaagaaaaaaacagcatttgtggaaagcctgaaatataacccaaatcgtctaagatagaatgaaaaattgactctcaaggaaatatttgaaggaacagaatacagcttaaaaatttgaaaatccttaaaaatatctgagaagtttttgcatccgtaaaacagaaaacagcacgaactttaggaaatgacaatgggcacagaatgcaataaaaaaaaaaaacggggaaaggtaactaaaaacttaaggaaagataaactgaacaagaatggctcagacagcaggcaaatctccccaattagaaacgaagtgaatagacccaattgaatgagatgaattctaagcaatagatggattgaataataagctggaggacattaataacatgttctggaaggcatacatttcttcaacccaaaggaaaaaaaatgacagaaagaaactacagggaagaacattaaaaactgtgcaagaaacttatgtttcacatatgaagcaacctcagatgtggcatggttttgaacagttgccgaaagtgtgagaaagggaatctgtttgaatattggcacatggatcaagactctggagtcggtgatgagaaaatccaatcagagcattccactttgctattcattgaaccaggtagccaacagaagagttaaaaattagtgatatgactatattcagggggaaggagagctgaggggggcggcaggaagtcagcagaaaatgcctcatgtcattaagtcaagaaatagtaataaaggcatgttattgaaaaagggggtgtaatctctaaacaagcacgtgtagaagtttgtgtttctgatttggggaagcaagagttgagaaggagggacagttctattacttttcattatatgtcctttttctactgtttgatttttaaaaactatacacatgtattgcttttgcttcgattaaaaatcaagacattaaaatgaa

SEQ ID NO: 2208 - protein, 161 aa, Homo sapiens
MGTYARHIIMFKSKGHADPVGRGGTWQGASDRWGQSPAGKGGLPPCSAARISSSPGGLPPVLSRVHPSVPRSVSQRSLMEALGSGHYVGGSIRSMAAAALSGLAVRLSRPQGTRGSYGAFCKTLTRTLLTFFDLAWRLRKNFFYFYILASVILNVHLQVYI

SEQ ID NO: 2209 - DNA, 1190 bp, Homo sapiens
gatgagaccagaggccgaactcaggttctgatggccgagctgccccacaggatcatcaaggaaacccagcgtttgctggcagagccagttcctggcatcaaagcagaaccagatgaaagcaacgcccgttattttcatgtggtcattgctggggaatcaaaggattccccctttgagggagggacttttaaacgtgaactattacttgcagaagaatacccaatggcagcccctaaagtacgtttcatgaccaaaatttatcatccaaatgtagacaagttggaaagaataagtttagatattttgaaagataagtggtccccagccctgcagatccgcacagttctgctatcgatccaggccttgttaaatgctcccaatccagatgatccattagcaaatgatgtagtggagcagtggaagaccaacgaagcccaagccattgaaacagctagagcatggactaggctatatgccatgaatagtatttaaattgatccaatcattaagtgtgcatcacttctcctgttctgccaagacttcttcctttttgcttgcatttaatggacatagtcttagaaacattacagaataaaaaaacccagacatcttcagttatttggtgattaaatgtacattagcaaatctatgtcttgtcctgattcactgtcataaagcatgagcagaggctagacgtatcatccggattgttgtgaaacgtttaaaagcagtggtccctccctgcttttattcatttcccccatcctggtttaagtataaagcactgtgaatgaaggtagttgtcaggttagctgcaagggtgtgggtgtttttctttattttatttttttgaggggggtaagtagttttattttaattttatgggctcctttccccgcctttttggtgatctaattggattggttaaaagcagctaaccagttctttagaaatatgctctctatccaagtctaactttatttagacactgtagatggacaagcttgattgtttgaaccaaaatgggaacatttaacaagcatcactgccctcactaataacattgtgactttgctgtcaagtgtagagtccccccttcaaaataagcttgtgaccattttgtatggcttgtctggaaacttctgtaaatcttatgttttactaaaatattttttgttattgtaaaaaaa

SEQ ID NO: 2210 - protein, 153 aa, Homo sapiens
MAELPHRIIKETQRLLAEPVPGIKAEPDESNARYFHVVIAGESKDSPFEGGTFKRELLLAEEYPMAAPKVRFMTKIYHPNVDKLERISLDILKDKWSPALQIRTVLLSIQALLNAPNPDDPLANDVVEQWKTNEAQAIETARAWTRLYAMNSI

SEQ ID NO: 2211 - DNA, 1988 bp, Homo sapiens
atgaaaagtaacacaagaaataagaaagaagggacatgtcaggcaacagtgacatcaagaaaagaagagaagagcccggtttatcgcgaggggcagtccccagggctgccgaatccagcagcgatggagagcggcaccgggccctgcggagaagagcgcccacgtgaagtccagcagacgacagtcactgagggggctgccaaaatcccagcgccaacgaggtcttttataaccttgtgcaggaattcagtcgggacatgacgtgctgtgatcatccagtttgctcgcattcagcttggggccaaaggaatccagatcaaggtgccaggagagaaggatacacaaaaggtggtcgtggacttgtcaaagcaagaggaggaaaaggttgaaccgaaagggagtgaaaacctggcctcaggagaccagcctcgcacagcgaccgtgtgggagatctgtgaggaaggcctgcatgtgctggaaggcctggcagcttcaggcctactttccattcgatttgccctagaggtgactggggctcagatctgtggttgcaaacgatacctctgcgggggctgtggatctcatacgctggaatgtgcagctcaatgacgggcccacctggtacagcccagccaagtagatgcctggatgctgatgtaccagcaccagagggtgtcagagaggttcgacgtcatccatctggacccctatggcagtcctgcccccttcctggatgcagctgtgctggctgtgagtgaaggagagttgctgtgcgtgacccgcacggacacggcggtgctggcgcggaacagtggggagatgtgttacagcaaattcggtgccatggccctcaagagccgggcctgccacgagatggccctgagaattgtcctgcacagcctggacctccgcgccaactgttaccagcgcttcgtggtaccgctgcttagcatcagcgccgacttctacgtgcgtgtttttgtccgtgtcttcaccggccagcccaaggttaaggcctcagccagcaagcaggccctggtgttccactgagtgggctgcgggtgcttccaccttcagcgcctcggcaaagcgtcaggagtcccccgcggccgggtcaagtcctctgtagcctgtgttccccccgtgaccccgagcgtgaacactgtgggcagcgacaccagcttggttgctccatgtgggcagagcccatccatgacctggatttcgtgggctgtgtcctagaggctgtgagcgctaaccccggccgcttccacacctcggagcggatgccagagggtcctgagcgtcatgactgaggagctcccacaggtgcctctgtactacaccctggaccagctgagcagcaccatcctctgcaacacgcccagcctcctgccgtggcggtcggccctcctccacgctcacttccgggtttcgctctcccacgcctgtaagaacgctgtgaagacgtatgccccgcctccgccctctgaaacatcatgcgctgctggaagaaggaatgtccggtgaaacaggagcgactctcagagaccagcccagcgtcccgcattctcagtgtggagcccaggctgcaggccaacttcaccatccgggaagatgccaaccccagctcccgccagcgacgactcaagcgcttccgggccaacccggaagccaactggagcccgcagcctcatgcctggccagggagcaaggctgctggcgaagctatggaggagagacgcaggctgcttcctaaggagtggaaggagccgcctgaggacagggcccagcgagctgccctgctcaagacatttccttgcaaaaggggggttaaggagggtacctgtcaatgcggggaccagtgctgctactcccacagccctctgacacccggggtctctgctgatgctgcgcttcactgtccagagacctccaatcacagaccccctggacctggggctgccactgggcccggaatagactga

SEQ ID NO: 2212 - DNA, 2303 bp, Homo sapiens
cgcttcccgccgcccgagcttcggaaacttcccggccgcgacgcagggaaccggcgcggagaaccgagcagagcggagcgcccgtggtccagcgtgtagggagccgatcgcccatggagggtctgggccgctcgtgcctgtggctgcgtcgggagctgtcgcccccgcggccgcggctcctgctcctggactgccgcagccgcgagctgtacgagtcggcgcgcatcggtggggcgctgagcgtggccctgccggcgctcctgctgcgccgcctgcggaggggcagcctgtcggtgcgcgcgctcctgcctgggccgccgctgcagccgcccccgcctgcccccgtgctcctgtacgaccagggcgggggccggcgccggcgcggggaggccgaggccgaggccgaggagtgggaggccgagtcggtgctgggcaccctgctgcagaagctgcgagaggaaggctacctggcctactacctccagggaggcttcagcagattccaggccgagtgccctcacctgtgtgagaccagccttgctggccgtgccggctccagcatggcgccggtgcccggtccagtgcccgtggtggggttgggcagcctgtgcctgggctccgactgctctgatgcggaatccgaggctgaccgcgactccatgagctgtggcctggattcggagggtgccacacccccaccagtggggctgcgggcatccttccctgtccagatcctgcccaacctctatctgggcagtgcccgggattccgccaatttggagagcctggccaaactgggcatccgctacatcctcaatgtcacccccaacctcccaaacttcttcgagaagaatggtgactttcactacaagcagatccccatctccgaccactggagccagaacctgtcgcggttctttccggaggccattgagttcattgatgaggccttgtcccagaactgcggggtgctcgtccactgcttggcgggggtcagccgttctgtcaccgtcactgtggcctacctcatgcagaagctccacctctctctcaacgatgcctatgacctggtcaagaggaagaagtctaacatctcccccaacttcaacttcatggggcagttgctggactttgagcgcagcttgcggctggaggagcgccactcgcaggagcagggcagtggggggcaggcatctgcggcctccaacccgccctccttcttcaccacccccaccagtgatggcgccttcgagctggcccccacctagggccccgtggccggcaggccggcccctgccccacccccacccacgggtgtccctgcccactcgtgtggcaagggaggggagggcaggagggctcggcctgagcagggtgctggggggagagcgcaatacctcacgcgggctgccgtcctaatcaacgtgcctatggcgggaccacgctcggagcctgcctcttctgcgactgttactttttctttgcgggatgggggtgggggttccctctccaggtggttgtccaagcccaggtcccggccctgggtgctcagccagctcggctaggccctgcgcctccctgcgcttcccccttcaggaagggtgtgtgccacctcgttgcactggatcccagtggctgcttgggggagaggcgtttgccatcactggtgttgtcacctccctgtttctccaccaagggcttgggcctctcggggctggggcctcccaggggatggggacccagaggtgcagtggccgcccacatccatggcctaggagctactgggcaggttcccggccacacatctggtgggctgttttgtttttttttttcctcttcccccagatgtcttgacgggatcactggggctctttgtgagtgagggtggccaaactaccgccggaggagatggggtctcagagcgagagctgcggagggggaggggaagaagaaggcctcacttttgctgctgcggggcccacacagccgctgctactttggggggtggggaaggggccaagctgcagacacacacagtcattcatttctgtccacacccctgtgggtggcgggtgtgcgtgtgtgtgcttgtgtgtgcgcacgtgtcggcgctcacacacacatgctagcccactgatgcacccagcccagggctggcagtctttgcagcgtggggccgtctcaccctggagcctggagaggatctatgcttgtttgtttttgtaatccatatcatagttgctttctttaattgttccttctgaataaacagtttatttaagataaaaaaaaaaaaaaaaaaa

SEQ ID NO: 2213 - protein, 384 aa, Homo sapiens
MEGLGRSCLWLRRELSPPRPRLLLLDCRSRELYESARIGGALSVALPALLLRRLRRGSLSVRALLPGPPLQPPPPAPVLLYDQGGGRRRRGEAEAEAEEWEAESVLGTLLQKLREEGYLAYYLQGGFSRFQAECPHLCETSLAGRAGSSMAPVPGPVPVVGLGSLCLGSDCSDAESEADRDSMSCGLDSEGATPPPVGLRASFPVQILPNLYLGSARDSANLESLAKLGIRYILNVTPNLPNFFEKNGDFHYKQIPISDHWSQNLSRFFPEAIEFIDEALSQNCGVLVHCLAGVSRSVTVTVAYLMQKLHLSLNDAYDLVKRKKSNISPNFNFMGQLLDFERSLRLEERHSQEQGSGGQASAASNPPSFFTTPTSDGAFELAPT

SEQ ID NO: 2214 - DNA, 531 bp, Homo sapiens
atgaaggccccgggcacacgactagagtaccaggtggtgggtcgctgcctgcccgcccccaaatgccacacaccgcccctctaccgcatgcgaatctttgctcctaatcatgtcgtcgctaagtcccacttctggtacttcgtatctcagttaaagaagctgaagaagtcttcaggggagattgtctactgtgggcaggtgtttgagaagcgccccctgcgggtgaagaacttcggcatctggctgcgctatgactcccggcgcggcacccacaacatataccgggaataccgggacctgaccaccgcgggcgctgtcaccaagtgctatcgagacatgggcgcccggcaccgcgcccgggcccactccatccagatcaggaaggtggaggacatcgcagccagcaagtgccgccggccgaccgtcaagcagttccacgactccaagatcaagttcccgctgccccacagggtcctgcgccgtcagcacaaaccacgcttcaccaccaagaggcccgataccttcttctaa

SEQ ID NO: 2215 - protein, 176 aa, Homo sapiens
MKAPGTRLEYQVVGRCLPAPKCHTPPLYRMRIFAPNHVVAKSHFWYFVSQLKKLKKSSGEIVYCGQVFEKRPLRVKNFGIWLRYDSRRGTHNIYREYRDLTTAGAVTKCYRDMGARHRARAHSIQIRKVEDIAASKCRRPTVKQFHDSKIKFPLPHRVLRRQHKPRFTTKRPDTFF

SEQ ID NO: 2216 - DNA, 1525 bp, Homo sapiens
atgatctcaataaaaggaatgctctggctgctgggtagagaagaaagcgaggacatgctgctgctgaagaaacacacggaggacatcagcagcgtctacgagatccgcgagaggctcggctcgggtgccttctccgaggtggtgctggcccaggagcggggctccgcacacctcgtggccctcaagtgcatccccaagaaggccctccggggcaaggaggccctggtggagaacgagatcgcagtgctccgtaggatcagtcaccccaacatcgtcgctctggaggatgtccacgagagcccttcccacctctacctggccatggaactggtgacgggtggcgagctgtttgaccgcatcatggagcgcggctcctacacagagaaggatgccagccatctggtgggtcaggtccttggcgccgtctcctacctgcacagcctggggatcgtgcaccgggacctcaagcccgaaaacctcctgtatgccacgccctttgaggactcgaagatcatggtctctgactttggactctccaaaatccaggctgggaacatgctaggcaccgcctgtgggacccctggatatgccgagccagtgacactgagcggcatggctgcgtgtgtgcctgtgcgtgcgtctgtctgtctctggcccccagccccagagctcttggagcagaaaccctacgggaaggccgtagatgtgtgggccctgggcgtcatctcctacatcctgctgtgtgggtacccccccttctacgacgagagcgaccctgagctcttcagccagatcctgagggccagctatgagtttgactctcctttctgggatgacatctcagaatcagccaaagacttcatccggcaccttctggagcgagacccccagaagaggttcacctgccaacaggccttgcggcacctttggatctctggggacacagccttcgacagggacatcttaggctctgtcagtgagcagatccggaagaactttgctcggacacactggaagcgagccttcaatgccacctcgttcctgcgccacatccggaagctggggcagatcccagagggcgagggggcctctgagcagggcatggcccgccacagccactcaggcctccgtgctggccagccccccaagtggtgatgcccaggcagatgccgaggccaagtggactgacccccagatttccttcccttggatgctttcggtcccctcccccaacccctccccctggggctggcctctgctggattttgagatttgagggtgtggcgcatggcgctggggttggaatggggcacccccaagtctgtccccaggctctgccctgcctgggggcagtggctcccctcccctgttgcctctcccgcccctgccccccccgccccgccaaaagccgagggggtgctggcaggcgggcctcaggggctgtctttcctgcacggctgttgtgtgcttcgctgagtgtgggtggtcctgcttgtgtcatggtcatggccttccagccccctcc

SEQ ID NO: 2217 - protein, 366 aa, Homo sapiens
MLLLKKHTEDISSVYEIRERLGSGAFSEVVLAQERGSAHLVALKCIPKKALRGKEALVENEIAVLRRISHPNIVALEDVHESPSHLYLAMELVTGGELFDRIMERGSYTEKDASHLVGQVLGAVSYLHSLGIVHRDLKPENLLYATPFEDSKIMVSDFGLSKIQAGNMLGTACGTPGYAEPVTLSGMAACVPVRASVCLWPPAPELLEQKPYGKAVDVWALGVISYILLCGYPPFYDESDPELFSQILRASYEFDSPFWDDISESAKDFIRHLLERDPQKRFTCQQALRHLWISGDTAFDRDILGSVSEQIRKNFARTHWKRAFNATSFLRHIRKLGQIPEGEGASEQGMARHSHSGLRAGQPPKW

SEQ ID NO: 2218 - DNA, 585 bp, Homo sapiens
atgcacctgcgacccccgcgcgcagccacctgccaagaccgcggccacccacgcggccgcagacgcagcccagccctcggcgccgcggagcagggggacctggcagcctgggccgcccgcgtcccgagctgcgtggaccgagcgcgtgcgggcagggggcgcgccaggcgtgacaggtgtgctgcggacgcgcaaggctgcggcggccgcgggccggatccgagcggctgcagccgccgccgccgggaaggagagggcgaggcgcgcccgagccgccgccgccgccgccaccgccgccgccgccaccaccgccaccggagtcgcgggccagccgggcagcctccgcgggccccggccggggcggggggcgcgggccacaggcccctgctccggccgccgcttgcagaccgcgggcgccgatgtcgcccgcgccccgctaggctgagcctcgggtcgggcgaggagccgccgcagccgccgccgcccgagccgcgggcaggagcctcgggagccgccgccgccgccgccgccgcccggccgggccccgccgccgcccgcgcgcccccgggcccccgacacacatga

SEQ ID NO: 2219 - protein, 194 aa, Homo sapiens
MHLRPPRAATCQDRGHPRGRRRSPALGAAEQGDLAAWAARVPSCVDRARAGRGRARRDRCAADAQGCGGRGPDPSGCSRRRREGEGEARPSRRRRRHRRRRHHRHRSRGPAGQPPRAPAGAGGAGHRPLLRPPLADRGRRCRPRPARLSLGSGEEPPQPPPPEPRAGASGAAAAAAAARPGPAAARAPPGPRHT

SEQ ID NO: 2220 - DNA, 3917 bp, Homo sapiens
tagtcggagcgaggtggcgagtcgctgagcccgccgcggccccgagagcggctgcagccgccgccgccgggaaggagagggcgaggcgcgcccgagccgccgccgccgccgccaccgccgccgccgccaccaccgccaccggagtcgcgggccagccgggcagcctccgcgggccccggccggggcggggggcgcgggccacaggcccctgctccggccgtcgtttgcagaccgcgggcgccgatgtcgcccgcgccccgttaggatgagtctcgggtcgggcgaggagccgccgcagccgccgccgcccgagccgcgggcaggagcctcgggagccgccgccgccgccgccgccgcccggccgggccccgacgccgcccgcgcgcccccgggcccccgacacacatgagattcttcaggctcactttcaagtgcttcgtggactgcttctgactgcgccgcccgcgccccgcaccccgccgtccgcccgccgccccgtcccccggcccggccgccccccggcccccggccggcccgcgccctcggggccctccccggtgccgccggtgccccccgcctgaccgccgccccccgtgaggcgccgcgaccccggcccggccgtgcggcccgccggggccatggcgaagaagagcgccgagaacggcatctatagcgtgtccggcgacgagaagaagggccccctcatcgcgcccgggcccgacggggccccggccaagggcgacggccccgtgggcctggggacacccggcggccgcctggccgtgccgccgcgcgagacctggacgcgccagatggacttcatcatgtcgtgcgtgggcttcgccgtgggcttgggcaacgtgtggcgcttcccctacctgtgctacaagaacggcggaggtgtgttccttattccctacgtcctgatcgccctggttggaggaatccccattttcttcttagagatctcgctgggccagttcatgaaggccggcagcatcaatgtctggaacatctgtcccctgttcaaaggcctgggctacgcctccatggtgatcgtcttctactgcaacacctactacatcatggtgctggcctggggcttctattacctggtcaagtcctttaccaccacgctgccctgggccacatgtggccacacctggaacactcccgactgcgtggagatcttccgccatgaagactgtgccaatgccagcctggccaacctcacctgtgaccagcttgctgaccgccggtcccctgtcatcgagttctgggagaacaaagtcttgaggctgtctgggggactggaggtgccaggggccctcaactgggaggtgaccctttgtctgctggcctgctgggtgctggtctacttctgtgtctggaagggggtcaaatccacgggaaagatcgtgtacttcactgctacattcccctacgtggtcctggtcgtgctgctggtgcgtggagtgctgctgcctggcgccctggatggcatcatttactatctcaagcctgactggtcaaagctggggtcccctcaggtgtggatagatgcggggacccagattttcttttcttacgccattggcctgggggccctcacagccctgggcagctacaaccgcttcaacaacaactgctacaaggacgccatcatcctggctctcatcaacagtgggaccagcttctttgctggcttcgtggtcttctccatcctgggcttcatggctgcagagcagggcgtgcacatctccaaggtggcagagtcagggccgggcctggccttcatcgcctacccgcgggctgtcacgctgatgccagtggccccactctgggctgccctgttcttcttcatgctgttgctgcttggtctcgacagccagtttgtaggtgtggagggcttcatcaccggcctcctcgacctcctcccggcctcctactacttccgtttccaaagggagatctctgtggccctctgttgtgccctctgctttgtcatcgatctctccatggtgactgatggcgggatgtacgtcttccagctgtttgactactactcggccagcggcaccaccctgctctggcaggccttttgggagtgcgtggtggtggcctgggtgtacggagctgaccgcttcatggacgacattgcctgtatgatcgggtaccgaccttgcccctggatgaaatggtgctggtccttcttcaccccgctggtctgcatgggcatcttcatcttcaacgttgtgtactacgagccgctggtctacaacaacacctacgtgtacccgtggtggggtgaggccatgggctgggccttcgccctgtcctccatgctgtgcgtgccgctgcacctcctgggctgcctcctcagggccaagggcaccatggctgagcgctggcagcacctgacccagcccatctggggcctccaccacttggagtaccgagctcaggacgcagatgtcaggggcctgaccaccctgaccccagtgtccgagagcagcaaggtcgtcgtggtggagagtgtcatgtgacaactcagctcacatcaccagctcacctctggtagccatagcagcccctgcttcagccccaccgcacccctccagggggcctgcctttccctgacacttttggggtctgcctgggggaggaggggagaaagcaccatgagtgctcactaaaacaactttttccatttttaataaaacgccaaaaatatcacaacccaccaaaaatagatgcctctccccctccagccctagccgagctggtcctaggccccgcctagtgccccacccccacccacagtgctgcactcctcctgcccctgccacgcccaccccctgcccacctctccaggctctgctctgcagcacacccgtgggtgacccctcaccccagaagcagcagtggcagcttgggaaatgtgaggaagggaaggagggagagacgggagggaggagagagaggagaagggaggcaggggaggggcagcagaaccaaggcaaatatttcagctgggctatacccctctccccatccctgttatagaagcttagagagccagccagcaatggaaccttctggttcctgcgccaatcgccaccagtatcaattgtgtgagcttgggtgcgagtgcacgcgtgcgtgagtacggagagtatatatagatctctatctcttagcaaaggtgaatgccagatgtaaatggcgcctctgggcaaaggaggcttgtattttgcacattttataaaaacttgagagaatgagatttctgcttgtatatttctaaaaagaggaaggagcccaaaccatcctctccttaccactcccatccctgtgagccctaccttacccctctgcccctagccaaggagtgtgaatttatagatctaactttcataggcaaaacaaaagcttcgagctgttgcgtgtgtgagtctgttgtgtggatgtgcgtgtgtggtccccagccccagactggattggaaaagtgcatggtgggggcctcggggctgtccccacgctgtccctttgccacaagtctgtggggcaagaggctgcaatattccgtcctgggtgtctgggctgctaacctggcctgctcaggcttcccaccctgtgcggggcacacccccaggaagggaccctggacacggctcccacgtccaggcttaaggtggatgcacttcccgcacctccagtcttctgtgtagcagctttaacccacgtttgtctgtcacgtccagtcccgagacggctgagtgaccccaagaaaggcttccccgacacccagacagaggctgcagggctggggctgggtgagggtggcgggcctgcggggacattctactgtgctaaaaagccactgcagacatagcaataaaaacatgtcattttcc

SEQ ID NO: 2221 - protein, 635 aa, Homo sapiens
MAKKSAENGIYSVSGDEKKGPLIAPGPDGAPAKGDGPVGLGTPGGRLAVPPRETWTRQMDFIMSCVGFAVGLGNVWRFPYLCYKNGGGVFLIPYVLIALVGGIPIFFLEISLGQFMKAGSINVWNICPLFKGLGYASMVIVFYCNTYYIMVLAWGFYYLVKSFTTTLPWATCGHTWNTPDCVEIFRHEDCANASLANLTCDQLADRRSPVIEFWENKVLRLSGGLEVPGALNWEVTLCLLACWVLVYFCVWKGVKSTGKIVYFTATFPYVVLVVLLVRGVLLPGALDGIIYYLKPDWSKLGSPQVWIDAGTQIFFSYAIGLGALTALGSYNRFNNNCYKDAIILALINSGTSFFAGFVVFSILGFMAAEQGVHISKVAESGPGLAFIAYPRAVTLMPVAPLWAALFFFMLLLLGLDSQFVGVEGFITGLLDLLPASYYFRFQREISVALCCALCFVIDLSMVTDGGMYVFQLFDYYSASGTTLLWQAFWECVVVAWVYGADRFMDDIACMIGYRPCPWMKWCWSFFTPLVCMGIFIFNVVYYEPLVYNNTYVYPWWGEAMGWAFALSSMLCVPLHLLGCLLRAKGTMAERWQHLTQPIWGLHHLEYRAQDADVRGLTTLTPVSESSKVVVVESVM

SEQ ID NO: 2222 - DNA, 1324 bp, Homo sapiens
cttccggtttccggccgcggtatgaggggcggggccggggctgctgtgggagagttcggttgctgcggcggggcctgcacgttgactgtgggaaactcggaaacaagctcacatcttcctgtgggaaaccttctagcaacaggatgagtctgcagtggactgcagttgccaccttcctctatgcggaggtctttgttgtgttgcttctctgcattcccttcatttctcctaaaagatggcagaagattttcaagtcccggctggtggagttgttagtgtcctatggcaacaccttctttgtggttctcattgtcatccttgtgctgttggtcatcgatgccgtgcgcgaaattcggaagtatgatgatgtgacggaaaaggtgaacctccagaacaatcccggggccatggagcacttccacatgaagcttttccgtgcccagaggaatctctacattgctggcttttccttgctgctgtccttcctgcttagacgcctggtgactctcatttcgcagcaggccacgctgctggcctccaatgaagcctttaaaaagcaggcggagagtgctagtgaggcggccaagaagtacatggaggagaatgaccagctcaagaagggagctgctgttgacggaggcaagttggatgtcgggaatgctgaggtgaagttggaggaagagaacaggagcctgaaggctgacctgcagaagctaaaggacgagctggccagcactaagcaaaaactagagaaagctgaaaaccaggttctggccatgcggaagcagtctgagggcctcaccaaggagtacgaccgcttgctggaggagcacgcaaagctgcaggctgcagtagatggtcccatggacaagaaggaagagtaagggcctccttcctcccctgcctgcagctggcttccacctggcacgtgcctgctgcttcctgagagcccggcctctccctccagtacttctgtttgtgcccttctgcttcccccattcccttccacagctcatagctcgtcatctcggcccttgtccacactctccaagcacattacaggggacctgattgctacacgttcagaatgcgtttgctgtcatcctgcttggcctggccaggcctggcacagccttggcttccacgcctgagcgtggagagcacgagttagttgtagtccggcttgcggtggggctgacttcctgttggtttgagcccctttttgttttgccctctgggtgttttctttggtcccgcaggagggtgggtggagcaggtggactggagtttctcttgagggcaataaaagttgtcatggtgtgta

SEQ ID NO: 2223 - protein, 246 aa, Homo sapiens
MSLQWTAVATFLYAEVFVVLLLCIPFISPKRWQKIFKSRLVELLVSYGNTFFVVLIVILVLLVIDAVREIRKYDDVTEKVNLQNNPGAMEHFHMKLFRAQRNLYIAGFSLLLSFLLRRLVTLISQQATLLASNEAFKKQAESASEAAKKYMEENDQLKKGAAVDGGKLDVGNAEVKLEEENRSLKADLQKLKDELASTKQKLEKAENQVLAMRKQSEGLTKEYDRLLEEHAKLQAAVDGPMDKKEE

SEQ ID NO: 2224 - DNA, 3616 bp, Homo sapiens
gcggacggacgcgcctggtgccccggggaggggcgccaccgggggaggaggaggaggagaaggtggagaggaagagacgccccctctgcccgagacctctcaaggccctgacctcaggggccagggcactgacaggacaggagagccaagttcctccacttgggctgcccgaagaggccgcgaccctggagggccctgagcccaccgcaccaggggccccagcaccaccccgggggcctaaagcgacagtctcaggggccatcgcaaggtttccagttgcctagacaacaggcccagggtcagagcaacaatccttccagccacctgcctcaactgctgccccaggcaccagccccagtccctacgcggcagccagcccaggtgacatgccggtgctctccaggccccggccctggcgggggaacacgctgaagcgcacggccgtgctcctggccctcgcggcctatggagcccacaaagtctaccccttggtgcgccagtgcctggccccggccaggggtcttcaggcgcccgccggggagcccacgcaggaggcctccggggtcgcggcggccaaagctggcatgaaccgggtattcctgcagcggctcctgtggctcctgcggctgctgttcccccgggtcctgtgccgggagacggggctgctggccctgcactcggccgccttggtgagccgcaccttcctgtcggtgtatgtggcccgcctggacggaaggctggcccgctgcatcgtccgcaaggacccgcgggcttttggctggcagctgctgcagtggctcctcatcgccctccctgctaccttcgtcaacagtgccatccgttacctggagggccaactggccctgtcgttccgcagccgtctggtggcccacgcctaccgcctctacttctcccagcagacctactaccgggtcagcaacatggacgggcggcttcgcaaccctgaccagtctctgacggaggacgtggtggcctttgcggcctctgtggcccacctctactccaacctgaccaagccactcctggacgtggctgtgacttcctacaccctgcttcgggcggcccgctcccgtggagccggcacagcctggccctcggccatcgccggcctcgtggtgttcctcacggccaacgtgctgcgggccttctcgcccaagttcggggagctggtggcagaggaggcgcggcggaagggggagctgcgctacatgcactcgcgtgtggtggccaactcggaggagatcgccttctatgggggccatgaggtggagctggccctgctacagcgctcctaccaggacctggcctcgcagatcaacctcatccttctggaacgcctgtggtatgttatgctggagcagttcctcatgaagtatgtgtggagcgcctcgggcctgctcatggtggctgtccccatcatcactgccactggctactcagagtcagatgcagaggccgtgaagaaggcagccttggaaaagaaggaggaggagctggtgagcgagcgcacagaagccttcactattgcccgcaacctcctgacagcggctgcagatgccattgagcggatcatgtcgtcgtacaaggaggtgacggagctggctggctacacagcccgggtgcacgagatgttccaggtatttgaagatgttcagcgctgtcacttcaagaggcccagggagctagaggacgctcaggcggggtctgggaccataggccggtctggtgtccgtgtggagggccccctgaagatccgaggccaggtggtggatgtggaacaggggatcatctgcgagaacatccccatcgtcacgccctcaggagaggtggtggtggccagcctcaacatcagggtggaggaaggcatgcatctgctcatcacaggccccaatggctgcggcaagagctccctgttccggatcctgggtgggctctggcccacgtacggtggtgtgctctacaagcccccaccccagcgcatgttctacatcccgcagaggccctacatgtctgtgggctccctgcgtgaccaggtgatctacccggactcagtggaggacatgcaaaggaagggctactcggagcaggacctggaagccatcctggacgtcgtgcacctgcaccacatcctgcagcgggagggaggttgggaggctatgtgtgactggaaggacgtcctgtcgggtggcgagaagcagagaatcggcatggcccgcatgttctaccacaggcccaagtacgccctcctggatgaatgcaccagcgccgtgagcatcgacgtggaaggcaagatcttccaggcggccaaggacgcgggcattgccctgctctccatcacccaccggccctccctgtggaaataccacacacacttgctacagttcgatggggagggcggctggaagttcgagaagctggactcagctgcccgcctgagcctgacggaggagaagcagcggctggagcagcagctggcgggcattcccaagatgcagcggcgcctccaggagctctgccagatcctgggcgaggccgtggccccagcgcatgtgccggcacctagcccgcaaggccctggtggcctccagggtgcctccacctgacacaaccgtccccggcccctgccccgcccccaagctcggatcacatgaaggagacagcagcacccacccatgcacgcaccccgcccctgcatgcctggcccctcctcctagaaaacccttcccgccctcgggaaagtagatgtggagggtggcgccctgcgtaaccctcgccctgtccctcccactccctgggggcgctgttccacagtgactgggccctgtccagggcagtgagtcctctactttgctccgcggaggaagctggggtacaaggggcccagtgctggccacacagcagcgcagccgagccccaggagcccgtcaggccacagcccctggcactgcaggtggcctccctccagagactcgagtccccatgattccctcctcgtcagtctctcaaagaccccatggtccatcccctgagggtggtcagccaaggctcccgttccgtgggatgccataaaagccgcccagtgggacccacagtcacacagagcgcctcacctgcatcctctcccccacaagagccccaaagatcccacgggagaggggagagggacgcacagcactgcctgccaagcgagaatgcaggccccgccccctcggcccctcaccacctctttctacagcctaatttattggattccctattcgtagccatctccgtggccaatgtgactaccgtgccagcagcgggggcggcccagcctctgagtcccgtggggccccggctcccaccggtgccaaacccagcccctgcggccgtcaccccgccagcctacactgccagccgccaccggggcacacgggcctctgcttgccagccaggagtgcggacaccatgttcccagctcagtgccaaagaggggtcaccagggggagctgtctgcggagccagcgcctgcccgagagagaccccaccgccaccgtgtgcctttcccgggccctcagccctcgggccgggcaccacccccagtccccccagtaaa

SEQ ID NO: 2225 - protein, 745 aa, Homo sapiens [sequence omitted]

SEQ ID NO: 2226 - DNA, 6145 bp, Homo sapiens
gctcctggcaccgccagctgctacttggccctcgccggtggcccaccaggacaatgcccccccgcagccatctcatgcccatcgccactgccctggggcagctgaactgagcgtatgtgccacgccgcccaggagacccctctgctgcaccacttcatggcccccgtgatggctcgctggcctcccttcggcctctgcctcctcctgctgctgctgtccccaccgccactgcccttgacaggggcccatcgcttctccgcacctaataccactctcaaccacttggcactggcacctggccgaggcacactctatgtcggcgcagtgaaccgcctcttccagctcagccccgagctgcagctcgaggccgtggctgtcactggccctgtaatcgacagccctgactgcgtgcccttccgtgacccagccgagtgcccacaggcccagctcactgacaatgccaaccagctgctgctggtgagcagccgcgcccaggagctggtggcctgcgggcaggtgcggcagggcgtgtgtgagacacggcgccttggggatgtggccgaggtgctgtaccaggctgaggaccctggtgacgggcagtttgtggctgccaataccccgggagtggcaacggtggggctggtggtgcccttgcccggccgggacctcctgcttgtggccagaggcctggcgggcaagctgtcggcaggggtgccacccctggccatccgccagctggccgggtctcagcccttctccagcgagggcctgggccgcctggtggtgggcgacttctccgactacaacaacagctacgtcggggcctttgccgacgcccgctccgcctacttcgtgttccgccgccgcggggcccgggcccaggctgagtaccgctcctacgtggcccgcgtctgcctgggggacaccaacctgtactcctacgtggaggtccccctcgcctgccagggccagggcctcatccaggccgccttccttgccccgggcaccttgctaggggtgtttgccgcgggcccaaggggcacccaggcggcgctctgtgccttccccatggtggagctgggtgccagcatggagcaggcccggagactctgctacacggcgggcggccggggccccagcggcgcagaggaagccaccgtggagtacggcgtcacgtcgcgctgcgtcaccctgccccttgattcccccgagtcgtacccctgtggcgacgagcacacccccagccccattgctggccgccagcccctggaggtccagcctctgctgaagctcgggcagccggtcagcgccgtggcagctctccaggcagatgggcacatgatagccttcctgggggacacccagggccagctgtacaaggtctttctccacggctcccagggccaggtttaccactcccagcaagtggggcctccaggctcagccatcagcccagacctgctgctggacagcagtggcagtcacctctatgtcctgactgcccaccaggtggaccggatacctgtggcagcctgcccccagttccctgactgtgccagctgcctccaggcccaggacccgctgtgtggctggtgtgtcctccagggcaggtgtacccggaagggccagtgcgggcgggcaggccagctgaaccagtggctgtggagttatgaggaggacagccactgcctgcacatccagagcctgctgccgggccaccacccccgccaggagcagggccaggtcactttgtctgtcccccggctgcccatcctggatgcagatgaatacttccattgtgcgttcggggactatgacagcttggctcatgtggaagggccccacgtggcctgtgtcacccctccccaagaccaggtgccacttaaccctccaggcacagaccacgtcactgtgcccctggccctgatgttcgaggacgtgactgtggctgccaccaacttctccttttatgactgcagtgccgtccaggccttggaggcggctgccccgtgtcgcgcttgcgtgggcagcatctggcggtgtcactggtgcccgcagagtagccactgcgtgtacggagagcactgcccagagggcgagaggaccatctacagcgcccaggaggtggacatccaggtgcgtggcccaggggcttgcccacaggtcgaaggcctggcaggtccccacctggtgcctgtgggctgggagagccatttggccctacgcgtgcggaaccttcaacatttccgaggcctgcctgcctccttccactgctggctggagctgcctggagaacttcggggactgccggccaccctggaggagacagcaggggattcaggcctcatccactgccaggcccaccagttttatccctccatgtcccagcgggagctcccagtgcccatctacgtcacccagggtgaagcccagaggctggacaacacccatgctctttatgtgatcctgtacgactgcgccatgggccacccggactgcagccactgccaagcggccaacaggagcctgggctgcctgtggtgtgctgacggccagcctgcctgtcgctatgggcccttgtgcccgccgggggctgtggagctgctgtgtcctgcgcccagcattgatgcagtcgagcccctgaccggtccccctgagggaggcttggccctcaccatcctgggctccaacctgggccgggccttcgccgatgtgcagtacgccgtgagcgtggccagccggccctgcaaccctgagccctctctctaccgcacgtcggcccggattgtgtgtgtgacatctcctgcccccaatggcaccactgggcccgtccgggtggccattaagagccagccaccaggcatctcaagccagcacttcacctaccaggaccctgtcctgctgagcctgagtcctcgctggggcccccaggcagggggcacccagctcaccatccgaggtcagcacctccagacaggtggcaacaccagtgccttcgtgggtggccaaccctgtcccatcctggagccagtgtgtccggaggccatcgtgtgccgtaccaggccccaggctgccccaggagaagcagcggtccttgtggtctttggccatgcccagcgcacactgctcgccagccccttccgctacaccgccaacccccagcttgtagcggcggagcccagtgccagcttccgggggggtgggcgactgatccgtgtcaggggcaccggcctagacgtggtgcagcggcccctactgtctgtgtggctggaggctgacgcagaggtgcaggcttccagggcccagccccaggacccacagccaaggaggagctgtggagcccctgctgcggacccccaggcttgtatccagctcggtggggggctgctgcagtgctccaccgtctgctccgtcaactcgtccagcctcctcctgtgccggagccctgctgtaccagacagagcccacccgcagcgggtcttcttcaccctagacaacgtgcaagtggacttcgccagtgccagtgggggccagggcttcctgtaccagcccaacccccgcctggcacccctcagccgcgaggggcctgcccgcccctaccgcctcaagccaggccatgtcctggatgtggagggcgagggcctcaacctgggcatcagcaaggaggaggtgcgcgtgcacatcggccgcggcgagtgcctggtgaagacgctcacgcgcacccacctgtactgcgagccgcctgcgcacgccccgcagcctgccaatggctccggcctgccacagttcgtggtgcagatgggcaatgtgcagctggccctgggccctgtgcagtacgaggctgaacccccgctgtctgcctttcccgtggaggcccaggcaggcgtgggcatgggtgctgcagtgctgattgccgccgtgctcctcctcaccctcatgtacaggcacaagagcaagcaggccctgcgggactaccagaaggtgctagtgcagctggagagcctggagaccggcgtgggagaccagtgccgcaaggagttcacagacctcatgacggagatgaccgacctcagcagcgacctggagggcagcgggatccccttcctggactaccgcacctacgccgagcgcgccttcttccctggccatggcggttgcccgctgcagcccaagcctgaggggccaggggaggacggccactgtgccactgtgcgccagggcctcacgcagctctccaacctgctcaacagcaagctcttcctcctcacgctcatccacaccctggaggagcagcccagcttttcccagagggatcgctgccatgtggcttcgctgctgtcgctagcgctacacggcaagctggagtacctgacggacatcatgaggaccctgctgggtgacctggcggcccattacgtgcacaggaaccccaagctcatgctacgcaggacagagaccatggtggagaaactgctcaccaactggctgtccatctgcctgtacgccttcctgagggaggtggctggtgaaccactgtacatgctcttccgggccatccagtaccaggtggacaaaggccccgtggacgccgtgacaggcaaggccaaacggaccctgaatgatagccgcttgctgcgggaggacgtggagttccagcccctgacgctgatggtgctggtggggcccggggctggcggggccgcaggcagcagcgagatgcagcgcgtgccagcccgggtgctcgacacggacaccatcacccaggtcaaggagaaggtgttggaccaagtctacaagggcacccccttctcccagaggccctcagtgcatgccctagaccttgagtggcgctcaggcctggctggtcacctgaccctatcggacgaagacttgacctccgtgacccaaaaccactggaagagactcaacaccttgcaacactacaaggtcccagatggagcaacagtggggctcgtccctcagctgcaccgtggcagcaccatctcccagagcctggcccagaggtgccccttgggagagaacatacccacgctggaggatggcgaggaggggggggtgtgcctctggcacctggtgaaagccaccgaggagccagaaggggccaaggtgcggtgcagcagcctgcgggagcgcgagccagcaagggccaaggccattccggaaatctacctcacccgtctgctgtccatgaagggcacgctgcagaagtttgtggacgacaccttccaggccattctcagcgtgaaccggcccatccccatcgccgtcaagtacctgtttgaccttctggatgagctagcagagaagcacggcatcgaggacccagggaccctgcacatctggaagaccaacagtctgctgctgcggttctgggtgaatgccttgaagaacccacagctcatctttgatgtacgggtgtcggacaatgtggacgccatccttgctgtcatcgcccagaccttcattgactcctgtaccacctcggagcataaagtgggccgggattccccagtgaacaaactgctctacgcccgggagatcccacgctacaagcagatggtggagaggtactatgcggacattcgccagagctctccggcgagctaccaggagatgaactctgctttggctgagctctccgggaactacacttctgctccccactgtctggaggctctgcaagaactctacaaccacatccacaggtactatgatcagattatcagtgccctggaggaggaccctgtgggccagaagctgcagctggcctgccgcctgcagcaggtcgccgccctggtggaaaacaaagtgactgacctgtgagctctggctcagacagcagcaagccggatccaccaacaccgcagcgccttatgaccccggaaccgagccagccactgaggggagctggcagagcctgggggcacagggtgcaaagccaggcactgtgcccagcagtgggctccctgcctgccacctcccctgccagcccacccaccttccccccacctgagattgtttctaatttataaggatccccctccttccccctctccccattgtatttatttgcctgctggaaaatcacatccggaaataaaatagaaatatgtctttttatttt

SEQ ID NO: 2227 - protein, 1909 aa, Homo sapiens
MCHAAQETPLLHHFMAPVMARWPPFGLCLLLLLLSPPPLPLTGAHRFSAPNTTLNHLALAPGRGTLYVGAVNRLFQLSPELQLEAVAVTGPVIDSPDCVPFRDPAECPQAQLTDNANQLLLVSSRAQELVACGQVRQGVCETRRLGDVAEVLYQAEDPGDGQFVAANTPGVATVGLVVPLPGRDLLLVARGLAGKLSAGVPPLAIRQLAGSQPFSSEGLGRLVVGDFSDYNNSYVGAFADARSAYFVFRRRGARAQAEYRSYVARVCLGDTNLYSYVEVPLACQGQGLIQAAFLAPGTLLGVFAAGPRGTQAALCAFPMVELGASMEQARRLCYTAGGRGPSGAEEATVEYGVTSRCVTLPLDSPESYPCGDEHTPSPIAGRQPLEVQPLLKLGQPVSAVAALQADGHMIAFLGDTQGQLYKVFLHGSQGQVYHSQQVGPPGSAISPDLLLDSSGSHLYVLTAHQVDRIPVAACPQFPDCASCLQAQDPLCGWCVLQGRCTRKGQCGRAGQLNQWLWSYEEDSHCLHIQSLLPGHHPRQEQGQVTLSVPRLPILDADEYFHCAFGDYDSLAHVEGPHVACVTPPQDQVPLNPPGTDHVTVPLALMFEDVTVAATNFSFYDCSAVQALEAAAPCRACVGSIWRCHWCPQSSHCVYGEHCPEGERTIYSAQEVDIQVRGPGACPQVEGLAGPHLVPVGWESHLALRVRNLQHFRGLPASFHCWLELPGELRGLPATLEETAGDSGLIHCQAHQFYPSMSQRELPVPIYVTQGEAQRLDNTHALYVILYDCAMGHPDCSHCQAANRSLGCLWCADGQPACRYGPLCPPGAVELLCPAPSIDAVEPLTGPPEGGLALTILGSNLGRAFADVQYAVSVASRPCNPEPSLYRTSARIVCVTSPAPNGTTGPVRVAIKSQPPGISSQHFTYQDPVLLSLSPRWGPQAGGTQLTIRGQHLQTGGNTSAFVGGQPCPILEPVCPEAIVCRTRPQAAPGEAAVLVVFGHAQRTLLASPFRYTANPQLVAAEPSASFRGGGRLIRVRGTGLDVVQRPLLSVWLEADAEVQASRAQPQDPQPRRSCGAPAADPQACIQLGGGLLQCSTVCSVNSSSLLLCRSPAVPDRAHPQRVFFTLDNVQVDFASASGGQGFLYQPNPRLAPLSREGPARPYRLKPGHVLDVEGEGLNLGISKEEVRVHIGRGECLVKTLTRTHLYCEPPAHAPQPANGSGLPQFVVQMGNVQLALGPVQYEAEPPLSAFPVEAQAGVGMGAAVLIAAVLLLTLMYRHKSKQALRDYQKVLVQLESLETGVGDQCRKEFTDLMTEMTDLSSDLEGSGIPFLDYRTYAERAFFPGHGGCPLQPKPEGPGEDGHCATVRQGLTQLSNLLNSKLFLLTLIHTLEEQPSFSQRDRCHVASLLSLALHGKLEYLTDIMRTLLGDLAAHYVHRNPKLMLRRTETMVEKLLTNWLSICLYAFLREVAGEPLYMLFRAIQYQVDKGPVDAVTGKAKRTLNDSRLLREDVEFQPLTLMVLVGPGAGGAAGSSEMQRVPARVLDTDTITQVKEKVLDQVYKGTPFSQRPSVHALDLEWRSGLAGHLTLSDEDLTSVTQNHWKRLNTLQHYKVPDGATVGLVPQLHRGSTISQSLAQRCPLGENIPTLEDGEEGGVCLWHLVKATEEPEGAKVRCSSLREREPARAKAIPEIYLTRLLSMKGTLQKFVDDTFQAILSVNRPIPIAVKYLFDLLDELAEKHGIEDPGTLHIWKTNSLLLRFWVNALKNPQLIFDVRVSDNVDAILAVIAQTFIDSCTTSEHKVGRDSPVNKLLYAREIPRYKQMVERYYADIRQSSPASYQEMNSALAELSGNYTSAPHCLEALQELYNHIHRYYDQIISALEEDPVGQKLQLACRLQQVAALVENKVTDL

SEQ ID NO: 2228 - DNA, 2264 bp, Homo sapiens
cccaggaccttgtgggctgggcagcggcctccggccgggaggcaccagctcttcgaacaatgtttaaaagtctcttctgttcatcctaccggggtgccgtctcctgccggtcttttcatctcaccagggccctcgcccgggcaccccccggccaatggaccacagctgcacccggttcatccaccgccggggaccacccactcggacccgagccggcttcaagaggggcaagaggccaaggatccagcagaggcctcgggctcgagtctcagggaccatccctgcgtcacgtctgcacccagcaccggcctcacagcccggcccctgccctgcaccaggccactgccctgttggcccggcccacgagaggccaatggggagcagccaggaggagggactccggtgtcagccaagccagccagaccacgacgcagatggacactgtgggccggacctggagggggcagaaagagcctctgccacacccggaccccctgggctcctgaacagccaccggcctgcagactcggatgacactaacgccgccgggccctcagctgccctcctggaggggctcctgctggggggtgggaagccatcgccccacagcacccggccggggcccttcttctacattggaggcagcaacggggccacaatcatcagctcctactgcaaaagcaagggctggcagcgcatccatgacagccgccgggacgactacacgctgaagtggtgtgaggtcaagagccgagacagctacggcagcttccgggaaggagagcagctgctgtaccagcttcccaacaacaagctcctcaccaccaagatcgggctgctcagcacccttcggggacgggcacgggccatgagcaaggccagcaaggtgccggggggggtccaggccaggctggaaaaggacgcagcagcgcccgccctggaggacctcccgtggacaagcccaggatacctcaggccacagagggtcctgagaatggaagagtttttcccagagacctaccgcctggacctcaaacacgagagagaggcctttttcaccttgtttgatgaaacccagatatggatctgcaagcccacagcctccaaccagggcaaaggcatcttcctgctccggaaccaggaggaagttgccgccctgcaggccaagacccggagcatggaggacgaccccatccaccacaagacgccgttccgggggcctcaggcgcgggtggtgcagaggtacatccagaacccgctgctggtggacgggagaaagtttgacgtgcgctcctacctgctcattgcctgcaccacaccctacatgatcttctttggccacggctatgctcgcctcacccttagcctttacgacccccattccagcgacctcggcggccacttgaccaaccagttcatgcagaagaagagccctctgtacatgctgctgaaggagcacacggtgtggagcatggaacacctcaaccgctacatcagtgacacgttctggaaggcccggggcctcgccaaggactgggtcttcaccaccctcaagaagcggatgcagcagatcatggcccactgctttctggccgccaagcccaagctggactgcaagctgggttactttgacctcattggctgtgacttcctgattgatgacaacttcaaggtatggctgctggagatgaattctaacccagccctgcacaccaactgcgaggtcctgaaggaggtcatcccaggtgtggtcatcgagaccctggacctggtgctcgagaccttccggaagagcctgcgcggccagaagatgttgcctctgctgtcccagcgccgcttcgtgctcctgcacaacggtgaggccgacccgcggccgcacctggggggctcgtgcagcctccgccgctggccgcccctgcccacccgccaggccaagtcctccgggccacccatgccgcatgccccagaccagccgggcgcccgcaggcctgcgccacctcccttggtgccgcagcgtccccggccacccggccccgacctggacagcgcccacgatggggagccccaggccccgggcacggagcagtcgggcacaggcaacaggcacccggcgcaagagccttccccggggacagccaaggaggaacgcgaggagcctgagaacgcgaggccctaggggcagccacccgcgcccagcgccccgcgccccgcgccccagccgtgctgcctgccctcagggacctataaagcccactttgctacaa

SEQ ID NO: 2229 - protein, 673 aa, Homo sapiens
MDHSCTRFIHRRGPPTRTRAGFKRGKRPRIQQRPRARVSGTIPASRLHPAPASQPGPCPAPGHCPVGPAHERPMGSSQEEGLRCQPSQPDHDADGHCGPDLEGAERASATPGPPGLLNSHRPADSDDTNAAGPSAALLEGLLLGGGKPSPHSTRPGPFFYIGGSNGATIISSYCKSKGWQRIHDSRRDDYTLKWCEVKSRDSYGSFREGEQLLYQLPNNKLLTTKIGLLSTLRGRARAMSKASKVPGGVQARLEKDAAAPALEDLPWTSPGYLRPQRVLRMEEFFPETYRLDLKHEREAFFTLFDETQIWICKPTASNQGKGIFLLRNQEEVAALQAKTRSMEDDPIHHKTPFRGPQARVVQRYIQNPLLVDGRKFDVRSYLLIACTTPYMIFFGHGYARLTLSLYDPHSSDLGGHLTNQFMQKKSPLYMLLKEHTVWSMEHLNRYISDTFWKARGLAKDWVFTTLKKRMQQIMAHCFLAAKPKLDCKLGYFDLIGCDFLIDDNFKVWLLEMNSNPALHTNCEVLKEVIPGVVIETLDLVLETFRKSLRGQKMLPLLSQRRFVLLHNGEADPRPHLGGSCSLRRWPPLPTRQAKSSGPPMPHAPDQPGARRPAPPPLVPQRPRPPGPDLDSAHDGEPQAPGTEQSGTGNRHPAQEPSPGTAKEEREEPENARP

SEQ ID NO: 2230 - DNA, 356 bp, Homo sapiens
cggcatcttcccttcagggccctcgcccgggcaccccccggccaatggaccacagctgcacccggttcatccaccgccggggaccacccactcggacccgagccggcttcaagaggggcaagaggccaaggatccagcagaggcctcgggctcgagtctcagggaccatccctgcgtcacgtctgcacccagcaccggcctcacagcccggcccctgccctgcaccaggccactgccctgttggcccggcccacgagaggccaatggggagcagccaggaggagggactccggtgtcagccaagccaccgtgctgcctgccctcagggacctataaagcccactttgctacaaaca

SEQ ID NO: 2231 - protein, 103 aa, Homo sapiens
MDHSCTRFIHRRGPPTRTRAGFKRGKRPRIQQRPRARVSGTIPASRLHPAPASQPGPCPAPGHCPVGPAHERPMGSSQEEGLRCQPSHRAACPQGPIKPTLLQ

SEQ ID NO: 2232 - DNA, 886 bp, Homo sapiens
tcaaccgctacatcagtgacacgttctggaaggcccggggcctcgccaaggactgggtcttcaccaccctcaagtgcctgacacaggacaggagctgcacgagtttgttgagtgagtttctggctgtgaacctgtgaggctgagtgcacgaacgtgtgggcaggtgtggctgtacagaagcggatgcagcagatcatggcccactgctttctggccgccaagcccaagctggactgcaagctgggttactttgacctcattggctgtgacttcctgattgatgacaacttcaaggtatggctgctggagatgaattctaacccagccctgcacaccaactgcgaggtcctgaaggaggtcatcccaggtgtggtcatcgagaccctggacctggtgctcgagaccttccggaagagcctgcgcggccagaagatgttgcctctgctgtcccagcgccgcttcgtgctcctgcacaacggtgaggccgacccgcggccgcacctggggggctcgtgcagcctccgccgctggccgcccctgcccacccgccaggccaagtcctccgggccacccatgccgcatgccccagaccagccgggcgcccgcaggcctgcgccacctcccttggtgccgcagcgtccccggccacccggccccgacctggacagcgcccacgatggggagccccaggccccgggcacggagcagtcgggcacaggcaacaggcacccggcgcaagagccttccccggggacagccaaggaggaacgcgaggagcctgagaacgcgaggccctaggggcagccacccgcgcccagcgccccgcgccccgcgccccagccgtgctgcctgccctcagggacctataaagcccactttgctacaa

SEQ ID NO: 2233 - protein, 204 aa, Homo sapiens
MQQIMAHCFLAAKPKLDCKLGYFDLIGCDFLIDDNFKVWLLEMNSNPALHTNCEVLKEVIPGVVIETLDLVLETFRKSLRGQKMLPLLSQRRFVLLHNGEADPRPHLGGSCSLRRWPPLPTRQAKSSGPPMPHAPDQPGARRPAPPPLVPQRPRPPGPDLDSAHDGEPQAPGTEQSGTGNRHPAQEPSPGTAKEEREEPENARP

SEQ ID NO: 2234 - DNA, 1131 bp, Homo sapiens
cgagcatggcacagcacggggcgatgggcgcgtttcgggccctgtgcggcctggcgctgctgtgcgcgctcagcctgggtcagcgccccaccgggggtcccgggtgcggccctgggcgcctcctgcttgggacgggaacggacgcgcgctgctgccgggttcacacgacgcgctgctgccgcgattacccgggcgaggagtgctgttccgagtgggactgcatgtgtgtccagcctgaattccactgcggagacccttgctgcacgacctgccggcaccacccttgtcccccaggccagggggtacagtcccaggggaaattcagttttggcttccagtgtatcgactgtgcctcggggaccttctccgggggccacgaaggccactgcaaaccttggacagactgcacccagttcgggtttctcactgtgttccctgggaacaagacccacaacgctgtgtgcgtcccagggtccccgccggcagagccgcttgggtggctgaccgtcgtcctcctggccgtggccgcctgcgtcctcctcctgacctcggcccagcttggactgcacatctggcagctgaggagtcagtgcatgtggccccgaggtctgtcacagcctggtgcggggaggtgggagcatggctgcctgctgaccgtggcccccctgcagagacccagctgctgctggaggtgccgccgtcgaccgaagacgccagaagctgccagttccccgaggaagagcggggcgagcgatcggcagaggagaaggggcggctgggagacctgtgggtgtgagcctggccgtcctccggggccaccgaccgcagccagcccctccccaggagctccccaggccgcaggggctctgcgttctgctctgggccgggccctgctcccctggcagcagaagtgggtgcaggaaggtggcagtgaccagcgccctggaccatgcagttcggcggccgcggctgggccctgcaggagggagagagagacacagtcatggcccccttcctcccttgctggccctgatggggtggggtcttaggacgggaggctgtgtccgtgggtgtgcagtgcccagcacgggacccggctgcaggggaccttcaataaacacttgtccagtg

SEQ ID NO: 2235 - protein, 347 aa, Homo sapiens
MAQHGAMGAFRALCGLALLCALSLGQRPTGGPGCGPGRLLLGTGTDARCCRVHTTRCCRDYPGEECCSEWDCMCVQPEFHCGDPCCTTCRHHPCPPGQGVQSQGKFSFGFQCIDCASGTFSGGHEGHCKPWTDCTQFGFLTVFPGNKTHNAVCVPGSPPAEPLGWLTVVLLAVAACVLLLTSAQLGLHIWQLRSQCMWPRGLSQPGAGRWEHGCLLTVAPLQRPSCCWRCRRRPKTPEAASSPRKSGASDRQRRRGGWETCGCEPGRPPGPPTAASPSPGAPQAAGALRSALGRALLPWQQKWVQEGGSDQRPGPCSSAAAAGPCRRERETQSWPPSSLAGPDGVGS

SEQ ID NO: 2236 - DNA, 1199 bp, Homo sapiens
gtctacaccccctcctcacacgcacttcacctgggtcgggattctcaggtcatgaacggtcccagccacctccgggcagggcgggtgaggacggggacggggcgtgtccaactggctgtgggctcttgaaacccgagcatggcacagcacggggcgatgggcgcgtttcgggccctgtgcggcctggcgctgctgtgcgcgctcagcctgggtcagcgccccaccgggggtcccgggtgcggccctgggcgcctcctgcttgggacgggaacggacgcgcgctgctgccgggttcacacgacgcgctgctgccgcgattacccgggcgaggagtgctgttccgagtgggactgcatgtgtgtccagcctgaattccactgcggagacccttgctgcacgacctgccggcaccacccttgtcccccaggccagggggtacagtcccaggggaaattcagttttggcttccagtgtatcgactgtgcctcggggaccttctccgggggccacgaaggccactgcaaaccttggacagactgcacccagttcgggtttctcactgtgttccctgggaacaagacccacaacgctgtgtgcgtcccagggtccccgccggcagagccgcttgggtggctgaccgtcgtcctcctggccgtggccgcctgcgtcctcctcctgacctcggcccagcttggactgcacatctggcagctgaggagtcagtgcatgtggccccgagagacccagctgctgctggaggtgccgccgtcgaccgaagacgccagaagctgccagttccccgaggaagagcggggcgagcgatcggcagaggagaaggggcggctgggagacctgtgggtgtgagcctggccgtcctccggggccaccgaccgcagccagcccctccccaggagctccccaggccgcaggggctctgcgttctgctctgggccgggccctgctcccctggcagcagaagtgggtgcaggaaggtggcagtgaccagcgccctggaccatgcagttcggcggccgcggctgggccctgcaggagggagagagagacacagtcatggcccccttcctcccttgctggccctgatggggtggggtcttaggacgggaggctgtgtccgtgggtgtgcagtgcccagcacgggacccggctgcaggggaccttcaataaacacttgtccagtg

SEQ ID NO: 2237 - protein, 241 aa, Homo sapiens; identical to SEQ ID NO: 4

SEQ ID NO: 2238 - DNA, 988 bp, Homo sapiens
gtctacaccccctcctcacacgcacttcacctgggtcgggattctcaggtcatgaacggtcccagccacctccgggcagggcgggtgaggacggggacggggcgtgtccaactggctgtgggctcttgaaacccgagcatggcacagcacggggcgatgggcgcgtttcgggccctgtgcggcctggcgctgctgtgcgcgctcagcctgggtcagcgccccaccgggggtcccgggtgcggccctgggcgcctcctgcttgggacgggaacggacgcgcgctgctgccgggttcacacgacgcgctgctgccgcgattacccgggcgaggagtgctgttccgagtgggactgcatgtgtgtccagcctgaattccactgcggagacccttgctgcacgacctgccggcaccacccttgtcccccaggccagggggtacagtcccaggggaaattcagttttggcttccagtgtatcgactgtgcctcggggaccttctccgggggccacgaaggccactgcaaaccttggacagactgctgctggaggtgccgccgtcgaccgaagacgccagaagctgccagttccccgaggaagagcggggcgagcgatcggcagaggagaaggggcggctgggagacctgtgggtgtgagcctggccgtcctccggggccaccgaccgcagccagcccctccccaggagctccccaggccgcaggggctctgcgttctgctctgggccgggccctgctcccctggcagcagaagtgggtgcaggaaggtggcagtgaccagcgccctggaccatgcagttcggcggccgcggctgggccctgcaggagggagagagagacacagtcatggcccccttcctcccttgctggccctgatggggtggggtcttaggacgggaggctgtgtccgtgggtgtgcagtgcccagcacgggacccggctgcaggggaccttcaataaacacttgtccagtg

SEQ ID NO: 2239 - protein, 255 aa, Homo sapiens; identical to SEQ ID NO: 6

SEQ ID NO: 2240 - DNA, 666 bp, Homo sapiens
caggtcgccggcaggggcggggaaaccaggctggcggggatcagaaaggttttctatgcaaagtctgcggccacattggtgtccccagtgcagggggcggcgtttatagcaccttgtcccatgggggccccttggagggcgggggtcagccaatcactcctccatcccactgcctccgggtggtatctgcgagtccccgagaggtctccacaaattctggccacccccagagagcctcaaccatggagccccgtgctggggaaccccacagaatggggacagggacccctcggctcagcacaccccacctggctggcttcaggtgtgaaactcaccatgggctgcaggcctgtgggctcccctcccccttgcttgcagctctccaggacccccctcaggccaacctgggaagttccccggggcttgggaggggcaccaggaggagctggtggggagacgagagggtgctggcgcctcctcgggacagtgtcagccgcccccgcgggcacccagggcccggtctctcagagccaccttcatccgtcacaccagacagatccaggtcccggagggagttgaggaggagcccctcgcagagctcttgggagactttgagaggcctggagatcttcagccccgaggctgggagggggtctgggcccctgg

SEQ ID NO: 2241 - protein, 140 aa, Homo sapiens
MEPRAGEPHRMGTGTPRLSTPHLAGFRCETHHGLQACGLPSPLLAALQDPPQANLGSSPGLGRGTRRSWWGDERVLAPPRDSVSRPRGHPGPGLSEPPSSVTPDRSRSRRELRRSPSQSSWETLRGLEIFSPEAGRGSGP

SEQ ID NO: 2242 - DNA, 1103 bp, Homo sapiens
ccgcaaggaaaacccagactctggcgacagcagagacgaggatgtgcgtgggggctcggcggctgggccgcgggccgtgtgcggctctgctcctcctgggcctggggctgagcaccgtgacggggctccactgtgtcggggacacctaccccagcaacgaccggtgctgccacgagtgcaggccaggcaacgggatggtgagccgctgcagccgctcccagaacacggtgtgccgtccgtgcgggccgggcttctacaacgacgtggtcagctccaagccgtgcaagccctgcacgtggtgtaacctcagaagtgggagtgagcggaagcagctgtgcacggccacacaggacacagtctgccgctgccgggcgggcacccagcccctggacagctacaagcctggagttgactgtgccccctgccctccagggcacttctccccaggcgacaaccaggcctgcaagccctggaccaactgcaccttggctgggaagcacaccctgcagccggccagcaatagctcggacgcaatctgtgaggacagggaccccccagccacgcagccccaggagacccagggccccccggccaggcccatcactgtccagcccactgaagcctggcccagaacctcacagggaccctccacccggcccgtggaggtccccgggggccgtgcggttgccgccatcctgggcctgggcctggtgctggggctgctgggccccctggccatcctgctggccctgtacctgctccggagggaccagaggctgccccccgatgcccacaagccccctgggggaggcagtttccggacccccatccaagaggagcaggccgacgcccactccaccctggccaagatctgacctgggcccaccaaggtggacgctgggccccgccaggctggagcccggagggtctgctgggcgagcagggcaggtgcaggccgcctgccccgccacgctcctgggccaactctgcaccgttctaggtgccgatggctgcctccggctctctgcttacgtatgccatgcatacctcctgccccgcgggaccacaataaaaaccttggcagacgggagtctccgaccggc

SEQ ID NO: 2243 - protein, 277 aa, Homo sapiens; identical to SEQ ID NO: 10

SEQ ID NO: 2244 - DNA, 1707 bp, Homo sapiens
cagagacgaggatgtgcgtgggggctcggcggctgggccgcgggccgtgtgcggctctgctcctcctgggcctggggctgagcaccgtgacggggctccactgtgtcggggacacctaccccagcaacgaccggtgctgccacgagtgcaggccaggcaacgggatggtgagccgctgcagccgctcccagaacacggtgtgccgtccgtgcgggccgggcttctacaacgacgtggtcagctccaagccgtgcaagccctgcacgtggtgtaacctcagtgagctcccacctggccccacagccccacccagcacagggggcggcagcctggcacccacattcccacgcagcagcatggggctcccacagccgcagaaacgaacctcaaaccacagcggggtctgctccgccacaggggtccttcgaggagctgaggcgtctcccaggggcaccccctctccctccgggggcccagactcggcccaggccacgtggagtcggggagaccacgctggccatgtggcctggccttgctggcctgagcagtgaggctggggggttgggccatggagaccctgccgcaggcggggctggcggctggaggcggtggaggggtagggaagggtggctggggctgccacggaaccagccccaggttgtggccaggaagggagggcccaggagcctcgggggctgcaggggctccaagtctcaggggaggccgcagacccctgcccacggccctctgtgtggtggggaggccaacctgtcctccagtgcccacgcttcctgaggaccctgtccacagcccccacctgaccacccccccatccggcccctgctcaggaagtgggagtgagcggaagcagctgtgcacggccacacaggacacagtctgccgctgccgggcgggcacccagcccctggacagctacaagcctggagttgactgtgccccctgccctccagggcacttctccccaggcgacaaccaggcctgcaagccctggaccaactgcaccttggctgggaagcacaccctgcagccggccagcaatagctcggacgcaatctgtgaggacagggaccccccagccacgcagccccaggagacccagggccccccggccaggcccatcactgtccagcccactgaagcctggcccagaacctcacagggaccctccacccggcccgtggaggtccccgggggccgtgcggttgccgccatcctgggcctgggcctggtgctggggctgctgggccccctggccatcctgctggccctgtacctgctccggagggaccagaggctgccccccgatgcccacaagccccctggtgagtgcctcatggccctgccgcactgctcctggcgggtgaggcccacccaccaatctctccttttttcctccccagggggaggcagtttccggacccccatccaagaggagcaggccgacgcccactccaccctggccaagatctgacctgggcccaccaaggtggacgctgggccccgccaggctggagcccggagggtctgctgggcgagcagggcaggtgcaggccgcctgccccgccacgctcctgggccaactctgcaccgttctaggtgccgatggctgcctccggctctctgcttacgtatgccatgcatacctcctgccccgcgggaccacaataaaaaccttggcagacggga

SEQ ID NO: 2245 - protein, 307 aa, Homo sapiens
METLPQAGLAAGGGGGVGKGGWGCHGTSPRLWPGREGPGASGAAGAPSLRGGRRPLPTALCVVGRPTCPPVPTLPEDPVHSPHLTTPPSGPCSGSGSERKQLCTATQDTVCRCRAGTQPLDSYKPGVDCAPCPPGHFSPGDNQACKPWTNCTLAGKHTLQPASNSSDAICEDRDPPATQPQETQGPPARPITVQPTEAWPRTSQGPSTRPVEVPGGRAVAAILGLGLVLGLLGPLAILLALYLLRRDQRLPPDAHKPPGECLMALPHCSWRVRPTHQSLLFSSPGGGSFRTPIQEEQADAHSTLAKI

SEQ ID NO: 2246 - DNA, 1738 bp, Homo sapiens
gaaaagggcagtgagtccttcgccccgcggcgccgtgcgcacgtcagccttcagggtgattccgctcctccagaggggcaggcgcgggtgtggggggtggggcccaggcccatcctgaggggtcccaggcatgaggggctctgagctgtgtcctggggtggtctgggccatggggaggttctggatcatgtcttgagaggtctgggctgtgtggggggtccaggccatgtcctgggggtctgggctgtgtctgtggggagtcagggccatccatgtattgggggtctggggcaggggggggtccaggctgtcttggggagtccgggctgtgtggaggggtccaagctatgcctttggggatcaggcctgtgggaggctctgggttatgtcttggcgggggtccaggctgtgtcttaggggctgggccatgttctggggacgtgtgaatcctggagggtggggccccggtctcgcgggtggctgtgtccctcgagttcaggcagcacctctcggaactttctggatttgcgtgctggcgtctgtcggcctcgatacccacaggctgcgcccctctcagcacaggaagtcctggagaacctgaaggaccgctggtaccaggcggacagcccccctgcagacctgctgctgacggaggaggagaccgactggcaggggccgggcatcgtcgggaggtcggggcaggtcctgcgggagccccagcctgggtgtgggctgacccattcccgtctcgcagaccaggacggtgacaagcagctctctgtgcccgagttcatctccctgcccgtgggcaccgtggagaaccagcagggccaggacattgacgacaactgggtgaaagacagaaaaaaggagtttgaggagctcattgactccaaccacgacggcatcgtgaccgccgaggagctggagagctacatggaccccatgaacgagtacaacgcgctgaacgaggccaagcagatgatcgccgtcgccgacgagaaccagaaccaccacctggagcccgaggaggtgctcaagtacagcgagttcttcacgggcagcaagctggtggactacgcgcgcagcgtgcacgaggagttttgagcgcccggccgcgccccgcgccgccccccacgcaccaccggggcggcctcgcgggtgactccgggctccgtggctgtcccggaccccacctcttccctgccgcccgccaccggccgaccgaccgcggctgccccagttgatgagcggcgtgtcccctctgcagcgcgcaccccggcggggctttggctgtgacgcggtcggggcgcggggctgggctgtggccccgcggcgccgcctcctccctggtccctcgaaatcgtggcatctcacttctgagaacgaaatctcgcttcagtcactctgccgaaggcgctgacggcatcgcggccggaacctctgggcccggcccctcccagggccgccgctccgtgggaaaaaacagctcctccatttccttgaaaactgaacgattattaaaaatagattaaacttcgctggaaatgagtagccaggaagttcaggggagggtgccgggtccttcccgggcctggcgtgtcggagccacccaggtcccgcagctgccgctgagaaaatgcaaatatttgttgtgacaagaatcacatacatttactttaaatatagttgccttttttggtcagcttcattctttgggcgtgaaacaaaacacaac

SEQ ID NO: 2247 - protein, 124 aa, Homo sapiens
MSWGSGLCLWGVRAIHVLGVWGRGGSRLSWGVRAVWRGPSYAFGDQACGRLWVMSWRGSRLCLRGWAMFWGRVNPGGWGPGLAGGCVPRVQAAPLGTFWICVLASVGLDTHRLRPSQHRKSWRT

SEQ ID NO: 2248 - DNA, 3100 bp, Homo sapiens
ttgggtcttttctgcccaggacatggcccacctggacctagagctctgtgacatttctgtgaagcctccgtctacctttgggactcagcagaggtgtgtttagaattcactctgcgttttgggggtccccatgcatgctgaggtgctgttccctgcccacccgtgtccgatccgtcttggcctccccgacctcagggtgcctaggaccccccgacctctttgggtatttggtttctggctcaggaagagcagctgccgggtcctggaggaggggcctgggaagcgctggcaggcgtcactcctgcgacctcccacccctccctgcatggctcctgcgagggtcaccgcgtgagtccgggggctgctgtcctcgcgcctcagacctgattctggggaccgcggtgaaggcgtggcaggcgggcatcactcccttcccccgcctccatcgctgcctctctctgggtctgcgtcctcttctcacagggacagcagtcgttgactctccctgatccaggagggtctctccagatccttccctaacagcagaggcccggctcgtggggagggactgggactcaaggcttcttcaccagcctgaggttggtgctggggctcggcggcggctgtgagaatcctgtgctggagaaagcgtctctcggccggcctgtctggggcgtctgtgcctctcctggatgggtctcagtttggccccgtccatccatcccaggagctgcggtggagcagacagggaggggtgccccaggaaccacagccccgtcactcctgtcttcctttaagtgaaccggtcgtgtagatggaggttgttcagaaagggataagatgggacggcagctgggcctcatcccgcagtgagcgcgacgcagaggctgccgggcttgtggcaggggcttcggccagggcagagtcgggcctcacgtgcagggggctgagtgtgggcctcaacactggacttggccactgactgcagtgagccccaagatggggcaggaggtggtgtttctgtcctggagacccagggtggcttgggtccttgggatgtgtggggacctcggggtgagggcccgttggggccgggtgggcacggcaggagagcgggggccacacacccagaggcagtgccgtgtcccggctgggagggttcctgggaagctctgctcagccccagtctcagtcatttctagaaactgtgttttcctccctgtgacgtcacacgtgaaggaaacggaaaagggcagtgagtccttcgccccgcggcgccgtgcgcacgtcagccttcagggtgattccgctcctccagaggggcaggcgcgggtgtggggggtggggcccaggcccatcctgaggggtcccaggcatgaggggctctgagctgtgtcctggggtggtctgggccatggggaggttctggatcatgtcttgagaggtctgggctgtgtggggggtccaggccatgtcctgggggtctgggctgtgtctgtggggagtcagggccatccatgtattgggggtctggggcaggggggggtccaggctgtcttggggagtccgggctgtgtggaggggtccaagctatgcctttggggatcaggcctgtgggaggctctgggttatgtcttggcgggggtccaggctgtgtcttaggggctgggccatgttctggggacgtgtgaatcctggagggtggggccccggtctcgcgggtggctgtgtccctcgagttcaggcagcacctctcggaactttctggatttgcgtgctggcgtctgtcggcctcgatacccacaggctgcgcccctctcagcacaggaagtcctggagaacctgaaggaccgctggtaccaggcggacagcccccctgcagacctgctgctgacggaggaggagttcctgtcgttcctccaccccgagcacagccggggaatgctcaggttcatggtgaaggagatcgtccgggacctgggtgaggctgggtccagcctggccggcacgccaggacccaggaccgactggcaggggccgggcatcgtcgggaggtcggggcaggtcctgcgggagccccagcctgggtgtgggctgacccattcccgtctcgcagaccaggacggtgacaagcagctctctgtgcccgagttcatctccctgcccgtgggcaccgtggagaaccagcagggccaggacattgacgacaactgggtgaaagacagaaaaaaggagtttgaggagctcattgactccaaccacgacggcatcgtgaccgccgaggagctggagagctacatggaccccatgaacgagtacaacgcgctgaacgaggccaagcagatgatcgccgtcgccgacgagaaccagaaccaccacctggagcccgaggaggtgctcaagtacagcgagttcttcacgggcagcaagctggtggactacgcgcgcagcgtgcacgaggagttttgagcgcccggccgcgccccgcgccgccccccacgcaccaccggggcggcctcgcgggtgactccgggctccgtggctgtcccggaccccacctcttccctgccgcccgccaccggccgaccgaccgcggctgccccagttgatgagcggcgtgtcccctctgcagcgcgcaccccggcggggctttggctgtgacgcggtcggggcgcggggctgggctgtggccccgcggcgccgcctcctccctggtccctcgaaatcgtggcatctcacttctgagaacgaaatctcgcttcagtcactctgccgaaggcgctgacggcatcgcggccggaacctctgggcccggcccctcccagggccgccgctccgtgggaaaaaacagctcctccatttccttgaaaactgaacgattattaaaaatagattaaacttcgctggaaatgagtagccaggaagttcaggggagggtgccgggtccttcccgggcctggcgtgtcggagccacccaggtcccgcagctgccgctgagaaaatgcaaatatttgttgtgacaagaatcacatacatttactttaaatatagttgccttttttggtcagcttcattctttgggcgtgaaacaaaacacaac

SEQ ID NO: 2249 - protein, 175 aa, Homo sapiens
MLRFMVKEIVRDLGEAGSSLAGTPGPRTDWQGPGIVGRSGQVLREPQPGCGLTHSRLADQDGDKQLSVPEFISLPVGTVENQQGQDIDDNWVKDRKKEFEELIDSNHDGIVTAEELESYMDPMNEYNALNEAKQMIAVADENQNHHLEPEEVLKYSEFFTGSKLVDYARSVHEEF

SEQ ID NO: 2250 - DNA, 3870 bp, Homo sapiens
ttaatttttaattgtttaagagtgagggcctcactgttgcccaggctggagtgcagtggtgcgatctcagctcacctgtagcctccacatcctgggctcaatctatcctccttggaggacagaaaaataaaggtgtaagatacgttcctgccaggaacggcccatatcatgtgaccagcccccatgggggcggcctcctgagtgactgggaccaccagtgtgtgccaccatgcccagctgattcaaaaacatatattttgtagacacaaggtctccccatgttgcctaggtaggtctcaaactcttggatttcagagggttcaagtgacccgctcggcctccccccgtcctggggttgcaggcgcgagtgacccgcctgccttggcctctccccatcctggggttgcaggcatgagcccctgtgcctggccttgaccttctagaatgacgcggagacttttgagcctgttggctctgcctgctcttttcccagttcacgtactcttatctggagtttggtcctgtccgttctaaatcctgcaaattggacattaaaaaaactaaaagtaagaggatctccctgtgttgcccaggctggtctcaaagtcctgggctaaagggatctgcctgccgcagcctcccagcatgccgggattacaggcacaagccccagtgcccggccaaattggacgttattacttcctttccaaaagagtggtttacattttcctccccacacacggttcgtgcctccaccccggtcccgcgttccctgctgtcctgactgcgtctttaagcttcatcccgttggtccggcctgttggcgatgtgcttggggcaggaggccttgcccgtgcccgccccccaactctgattgtgtctgtctttccttggtgccactttatttgggtcttttctgcccaggacatggcccacctggacctagagctctgtgacatttctgtgaagcctccgtctacctttgggactcagcagaggtgtgtttagaattcactctgcgttttgggggtccccatgcatgctgaggtgctgttccctgcccacccgtgtccgatccgtcttggcctccccgacctcagggtgcctaggaccccccgacctctttgggtatttggtttctggctcaggaagagcagctgccgggtcctggaggaggggcctgggaagcgctggcaggcgtcactcctgcgacctcccacccctccctgcatggctcctgcgagggtcaccgcgtgagtccgggggctgctgtcctcgcgcctcagacctgattctggggaccgcggtgaaggcgtggcaggcgggcatcactcccttcccccgcctccatcgctgcctctctctgggtctgcgtcctcttctcacagggacagcagtcgttgactctccctgatccaggagggtctctccagatccttccctaacagcagaggcccggctcgtggggagggactgggactcaaggcttcttcaccagcctgaggttggtgctggggctcggcggcggctgtgagaatcctgtgctggagaaagcgtctctcggccggcctgtctggggcgtctgtgcctctcctggatgggtctcagtttggccccgtccatccatcccaggagctgcggtggagcagacagggaggggtgccccaggaaccacagccccgtcactcctgtcttcctttaagtgaaccggtcgtgtagatggaggttgttcagaaagggataagatgggacggcagctgggcctcatcccgcagtgagcgcgacgcagaggctgccgggcttgtggcaggggcttcggccagggcagagtcgggcctcacgtgcagggggctgagtgtgggcctcaacactggacttggccactgactgcagtgagccccaagatggggcaggaggtggtgtttctgtcctggagacccagggtggcttgggtccttgggatgtgtggggacctcggggtgagggcccgttggggccgggtgggcacggcaggagagcgggggccacacacccagaggcagtgccgtgtcccggctgggagggttcctgggaagctctgctcagccccagtctcagtcatttctagaaactgtgttttcctccctgtgacgtcacacgtgaaggaaacggaaaagggcagtgagtccttcgccccgcggcgccgtgcgcacgtcagccttcagggtgattccgctcctccagaggggcaggcgcgggtgtggggggtggggcccaggcccatcctgaggggtcccaggcatgaggggctctgagctgtgtcctggggtggtctgggccatggggaggttctggatcatgtcttgagaggtctgggctgtgtggggggtccaggccatgtcctgggggtctgggctgtgtctgtggggagtcagggccatccatgtattgggggtctggggcaggggggggtccaggctgtcttggggagtccgggctgtgtggaggggtccaagctatgcctttggggatcaggcctgtgggaggctctgggttatgtcttggcgggggtccaggctgtgtcttaggggctgggccatgttctggggacgtgtgaatcctggagggtggggccccggtctcgcgggtggctgtgtccctcgagttcaggcagcacctctcggaactttctggatttgcgtgctggcgtctgtcggcctcgatacccacaggctgcgcccctctcagcacaggaagtcctggagaacctgaaggaccgctggtaccaggcggacagcccccctgcagacctgctgctgacggaggaggagttcctgtcgttcctccaccccgagcacagccggggaatgctcaggttcatggtgaaggagatcgtccgggacctggaccaggacggtgacaagcagctctctgtgcccgagttcatctccctgcccgtgggcaccgtggagaaccagcagggccaggacattgacgacaactgggtgaaagacagaaaaaaggagtttgaggagctcattgactccaaccacgacggcatcgtgaccgccgaggagctggagagctacatggaccccatgaacgagtacaacgcgctgaacgaggccaagcagatgatcgccgtcgccgacgagaaccagaaccaccacctggagcccgaggaggtgctcaagtacagcgagttcttcacgggcagcaagctggtggactacgcgcgcagcgtgcacgaggagttttgagcgcccggccgcgccccgcgccgccccccacgcaccaccggggcggcctcgcgggtgactccgggctccgtggctgtcccggaccccacctcttccctgccgcccgccaccggccgaccgaccgcggctgccccagttgatgagcggcgtgtcccctctgcagcgcgcaccccggcggggctttggctgtgacgcggtcggggcgcggggctgggctgtggccccgcggcgccgcctcctccctggtccctcgaaatcgtggcatctcacttctgagaacgaaatctcgcttcagtcactctgccgaaggcgctgacggcatcgcggccggaacctctgggcccggcccctcccagggccgccgctccgtgggaaaaaacagctcctccatttccttgaaaactgaacgattattaaaaatagattaaacttcgctggaaatgagtagccaggaagttcaggggagggtgccgggtccttcccgggcctggcgtgtcggagccacccaggtcccgcagctgccgctgagaaaatgcaaatatttgttgtgacaagaatcacatacatttactttaaatatagttgccttttttggtcagcttcattctttgggcgtgaaacaaaacacaac

SEQ ID NO: 2251 - protein, 130 aa, Homo sapiens
MLRFMVKEIVRDLDQDGDKQLSVPEFISLPVGTVENQQGQDIDDNWVKDRKKEFEELIDSNHDGIVTAEELESYMDPMNEYNALNEAKQMIAVADENQNHHLEPEEVLKYSEFFTGSKLVDYARSVHEEF

SEQ ID NO: 2252 - DNA, 675 bp, Homo sapiens
gactgtgagctgcttgtccccatcctgcggccgtcctggggacacagagccctccgtggtgcccggggattggattggagccaggacctcacttcctcctctgcccctgcccctgcccctcccagcacctggcccacaccctgcagcccgcccccggccgaccgaccgcggctgccccagttgatgagcggcgtgtcccctctgcagcgcgcaccccggcggggctttggctgtgacgcggtcggggcgcggggctgggctgtggccccgcggcgccgcctcctccctggtccctcgaaatcgtggcatctcacttctgagaacgaaatctcgcttcagtcactctgccgaaggcgctgacggcatcgcggccggaacctctgggcccggcccctcccagggccgccgctccgtgggaaaaaacagctcctccatttccttgaaaactgaacgattattaaaaatagattaaacttcgctggaaatgagtagccaggaagttcaggggagggtgccgggtccttcccgggcctggcgtgtcggagccacccaggtcccgcagctgccgctgagaaaatgcaaatatttgttgtgacaagaatcacatacatttactttaaatatagttgccttttttggtcagcttcattctttgggcgtgaaacaaaacacaac

SEQ ID NO: 2253 - protein, 58 aa, Homo sapiens
MSGVSPLQRAPRRGFGCDAVGARGWAVAPRRRLLPGPSKSWHLTSENEISLQSLCRRR

SEQ ID NO: 2254 - DNA, 1492 bp, Homo sapiens
cccgcaagaaagatggcagtggcctgatccgggcccgttggcggcgtcactgacgcttcgctccggtcctcggatcccgagcgcggggaggcagaccgggtggatgtgaacactgaccggaagatcagtgccaaggagatgcagcgctggatcatggagaagacggccgagcacttccaggaggccatggaggagagcaagacacacttccgcgccgtggaccctgacggggacggtcacgtgtcttgggacgagtataaggtgaagtttttggcgagtaaaggccatagcgagaaggaggttgccgacgccatcaggctcaacgaggaactcaaagtggatgaggaaacacaggaagtcctggagaacctgaaggaccgctggtaccaggcggacagcccccctgcagacctgctgctgacggaggaggagttcctgtcgttcctccaccccgagcacagccggggaatgctcaggttcatggtgaaggagatcgtccgggacctggaccaggacggtgacaagcagctctctgtgcccgagttcatctccctgcccgtgggcaccgtggagaaccagcagggccaggacattgacgacaactgggtgaaagacagaaaaaaggagtttgaggagctcattgactccaaccacgacggcatcgtgaccgccgaggagctggagagctacatggaccccatgaacgagtacaacgcgctgaacgaggccaagcagatgatcgccgtcgccgacgagaaccagaaccaccacctggagcccgaggaggtgctcaagtacagcgagttcttcacgggcagcaagctggtggactacgcgcgcagcgtgcacgaggagttttgagcgcccggccgcgccccgcgccgccccccacgcaccaccggggcggcctcgcgggtgactccgggctccgtggctgtcccggaccccacctcttccctgccgcccgccaccggccgaccgaccgcggctgccccagttgatgagcggcgtgtcccctctgcagcgcgcaccccggcggggctttggctgtgacgcggtcggggcgcggggctgggctgtggccccgcggcgccgcctcctccctggtccctcgaaatcgtggcatctcacttctgagaacgaaatctcgcttcagtcactctgccgaaggcgctgacggcatcgcggccggaacctctgggcccggcccctcccagggccgccgctccgtgggaaaaaacagctcctccatttccttgaaaactgaacgattattaaaaatagattaaacttcgctggaaatgagtagccaggaagttcaggggagggtgccgggtccttcccgggcctggcgtgtcggagccacccaggtcccgcagctgccgctgagaaaatgcaaatatttgttgtgacaagaatcacatacatttactttaaatatagttgccttttttggtcagcttcattctttgggcgtgaaacaaaacacaac

SEQ ID NO: 2255 - protein, 240 aa, Homo sapiens
MQRWIMEKTAEHFQEAMEESKTHFRAVDPDGDGHVSWDEYKVKFLASKGHSEKEVADAIRLNEELKVDEETQEVLENLKDRWYQADSPPADLLLTEEEFLSFLHPEHSRGMLRFMVKEIVRDLDQDGDKQLSVPEFISLPVGTVENQQGQDIDDNWVKDRKKEFEELIDSNHDGIVTAEELESYMDPMNEYNALNEAKQMIAVADENQNHHLEPEEVLKYSEFFTGSKLVDYARSVHEEF

SEQ ID NO: 2256 - DNA, 1641 bp, Homo sapiens
gttcgcaccgcccccgcccgcaagaaagatggcagtggcctgatccgggcccgttggcggcgtcactgacgcttcgctccggtcctcggatcccgagcgcggggaggcagaccgactgtgagctgcttgtccccatcctgcggccgtcctggggacacagagccctccgtggtgcccggggattggattggagccaggacgcggagccgcggcggagccggaggaagctgatggtcatcttttccaaggtggatgtgaacactgaccggaagatcagtgccaaggagatgcagcgctggatcatggagaagacggccgagcacttccaggaggccatggaggagagcaagacacacttccgcgccgtggaccctgacggggacggtcacgtgtcttgggacgagtataaggtgaagtttttggcgagtaaaggccatagcgagaaggaggttgccgacgccatcaggctcaacgaggaactcaaagtggatgaggaaacacaggaagtcctggagaacctgaaggaccgctggtaccaggcggacagcccccctgcagacctgctgctgacggaggaggagttcctgtcgttcctccaccccgagcacagccggggaatgctcaggttcatggtgaaggagatcgtccgggacctggaccaggacggtgacaagcagctctctgtgcccgagttcatctccctgcccgtgggcaccgtggagaaccagcagggccaggacattgacgacaactgggtgaaagacagaaaaaaggagtttgaggagctcattgactccaaccacgacggcatcgtgaccgccgaggagctggagagctacatggaccccatgaacgagtacaacgcgctgaacgaggccaagcagatgatcgccgtcgccgacgagaaccagaaccaccacctggagcccgaggaggtgctcaagtacagcgagttcttcacgggcagcaagctggtggactacgcgcgcagcgtgcacgaggagttttgagcgcccggccgcgccccgcgccgccccccacgcaccaccggggcggcctcgcgggtgactccgggctccgtggctgtcccggaccccacctcttccctgccgcccgccaccggccgaccgaccgcggctgccccagttgatgagcggcgtgtcccctctgcagcgcgcaccccggcggggctttggctgtgacgcggtcggggcgcggggctgggctgtggccccgcggcgccgcctcctccctggtccctcgaaatcgtggcatctcacttctgagaacgaaatctcgcttcagtcactctgccgaaggcgctgacggcatcgcggccggaacctctgggcccggcccctcccagggccgccgctccgtgggaaaaaacagctcctccatttccttgaaaactgaacgattattaaaaatagattaaacttcgctggaaatgagtagccaggaagttcaggggagggtgccgggtccttcccgggcctggcgtgtcggagccacccaggtcccgcagctgccgctgagaaaatgcaaatatttgttgtgacaagaatcacatacatttactttaaatatagttgccttttttggtcagcttcattctttgggcgtgaaacaaaacacaac

SEQ ID NO: 2257 - protein, 259 aa, Homo sapiens
MVIFSKVDVNTDRKISAKEMQRWIMEKTAEHFQEAMEESKTHFRAVDPDGDGHVSWDEYKVKFLASKGHSEKEVADAIRLNEELKVDEETQEVLENLKDRWYQADSPPADLLLTEEEFLSFLHPEHSRGMLRFMVKEIVRDLDQDGDKQLSVPEFISLPVGTVENQQGQDIDDNWVKDRKKEFEELIDSNHDGIVTAEELESYMDPMNEYNALNEAKQMIAVADENQNHHLEPEEVLKYSEFFTGSKLVDYARSVHEEF

SEQ ID NO: 2258 - DNA, 2033 bp, Homo sapiens
ggaggagagatggtggcgccggcgtcccctccgtgaggtcgcgcccgttcgcaccgcccccgcccgcaagaaagatggcagtggcctgatccgggcccgttggcggcgtcactgacgcttcgctccggtcctcggatcccgagcgcggggaggcagaccgactgtgagctgcttgtccccatcctgcggccgtcctggggacacagagccctccgtggtgcccggggattggattggagccaggacctcacttcctcctctgcccctgcccctgcccctcccagcacctggcccacaccctgcagcccgccccatggtctggccctgggtggcgatggcgtccaggtggggtcccctcattggcctggctccgtgctgcctctggctcctgggggcagtccttctgatggacgcgtctgcacggcctgccaaccactcgtccactcgagagagagtagccaacagggaggagaatgagatcctgcccccagaccacctgaacggggtgaagctggagatggacgggcacctcaatcgcggcttccaccaggaggtcttcctaggcaaggacctgggtggctttgatgaggacgcggagccgcggcggagccggaggaagctgatggtcatcttttccaaggtggatgtgaacactgaccggaagatcagtgccaaggagatgcagcgctggatcatggagaagacggccgagcacttccaggaggccatggaggagagcaagacacacttccgcgccgtggaccctgacggggacggtcacgtgtcttgggacgagtataaggtgaagtttttggcgagtaaaggccatagcgagaaggaggttgccgacgccatcaggctcaacgaggaactcaaagtggatgaggaaacacaggaagtcctggagaacctgaaggaccgctggtaccaggcggacagcccccctgcagacctgctgctgacggaggaggagttcctgtcgttcctccaccccgagcacagccggggaatgctcaggttcatggtgaaggagatcgtccgggacctggaccaggacggtgacaagcagctctctgtgcccgagttcatctccctgcccgtgggcaccgtggagaaccagcagggccaggacattgacgacaactgggtgaaagacagaaaaaaggagtttgaggagctcattgactccaaccacgacggcatcgtgaccgccgaggagctggagagctacatggaccccatgaacgagtacaacgcgctgaacgaggccaagcagatgatcgccgtcgccgacgagaaccagaaccaccacctggagcccgaggaggtgctcaagtacagcgagttcttcacgggcagcaagctggtggactacgcgcgcagcgtgcacgaggagttttgagcgcccggccgcgccccgcgccgccccccacgcaccaccggggcggcctcgcgggtgactccgggctccgtggctgtcccggaccccacctcttccctgccgcccgccaccggccgaccgaccgcggctgccccagttgatgagcggcgtgtcccctctgcagcgcgcaccccggcggggctttggctgtgacgcggtcggggcgcggggctgggctgtggccccgcggcgccgcctcctccctggtccctcgaaatcgtggcatctcacttctgagaacgaaatctcgcttcagtcactctgccgaaggcgctgacggcatcgcggccggaacctctgggcccggcccctcccagggccgccgctccgtgggaaaaaacagctcctccatttccttgaaaactgaacgattattaaaaatagattaaacttcgctggaaatgagtagccaggaagttcaggggagggtgccgggtccttcccgggcctggcgtgtcggagccacccaggtcccgcagctgccgctgagaaaatgcaaatatttgttgtgacaagaatcacatacatttactttaaatatagttgccttttttggtcagcttcattctttgggcgtgaaacaaaacacaac

SEQ ID NO: 2259 - protein, 362 aa, Homo sapiens; identical to SEQ ID NO: 12

SEQ ID NO: 2260 - DNA, 1185 bp, Homo sapiens
gaaaagggcagtgagtccttcgccccgcggcgccgtgcgcacgtcagccttcagggtgattccgctcctccagaggggcaggcgcgggtgtggggggtggggcccaggcccatcctgaggggtcccaggcatgaggggctctgagctgtgtcctggggtggtctgggccatggggaggttctggatcatgtcttgagaggtctgggctgtgtggggggtccaggccatgtcctgggggtctgggctgtgtctgtggggagtcagggccatccatgtattgggggtctggggcaggggggggtccaggctgtcttggggagtccgggctgtgtggaggggtccaagctatgcctttggggatcaggcctgtgggaggctctgggttatgtcttggcgggggtccaggctgtgtcttaggggctgggccatgttctggggacgtgtgaatcctggagggtggggccccggtctcgcgggtggctgtgtccctcgagttcaggcagcacctctcggaactttctggatttgcgtgctggcgtctgtcggcctcgatacccacaggctgcgcccctctcagcacaggaagtcctggagaacctgaaggaccgctggtaccaggcggacagcccccctgcagacctgctgctgacggaggaggagttcctgtcgttcctccaccccgagcacagccggggaatgctcaggttcatggtgaaggagatcgtccgggacctggaccaggacggtgacaagcagctctctgtgcccgagttcatctccctgcccgtgggcaccgtggagaaccagcagggccaggacattgacgacaactcgaaatcgtggcatctcacttctgagaacgaaatctcgcttcagtcactctgccgaaggcgctgacggcatcgcggccggaacctctgggcccggcccctcccagggccgccgctccgtgggaaaaaacagctcctccatttccttgaaaactgaacgattattaaaaatagattaaacttcgctggaaatgagtagccaggaagttcaggggagggtgccgggtccttcccgggcctggcgtgtcggagccacccaggtcccgcagctgccgctgagaaaatgcaaatatttgttgtgacaagaatcacatacatttactttaaatatagttgccttttttggtcagcttca

SEQ ID NO: 2261 - protein, 66 aa, Homo sapiens
MLRFMVKEIVRDLDQDGDKQLSVPEFISLPVGTVENQQGQDIDDNSKSWHLTSENEISLQSLCRRR

SEQ ID NO: 2262 - DNA, 1710 bp, Homo sapiens
gaaaagggcagtgagtccttcgccccgcggcgccgtgcgcacgtcagccttcagggtgattccgctcctccagaggggcaggcgcgggtgtggggggtggggcccaggcccatcctgaggggtcccaggcatgaggggctctgagctgtgtcctggggtggtctgggccatggggaggttctggatcatgtcttgagaggtctgggctgtgtggggggtccaggccatgtcctgggggtctgggctgtgtctgtggggagtcagggccatccatgtattgggggtctggggcaggggggggtccaggctgtcttggggagtccgggctgtgtggaggggtccaagctatgcctttggggatcaggcctgtgggaggctctgggttatgtcttggcgggggtccaggctgtgtcttaggggctgggccatgttctggggacgtgtgaatcctggagggtggggccccggtctcgcgggtggctgtgtccctcgagttcaggcagcacctctcggaactttctggatttgcgtgctggcgtctgtcggcctcgatacccacaggctgcgcccctctcagcacaggaagtcctggagaacctgaaggaccgctggtaccaggcggacagcccccctgcagacctgctgctgacggaggaggagaccgactggcaggggccgggcatcgtcgggaggtcggggcaggtcctgcgggagccccagcctgggtgtgggctgacccattcccgtctcgcagaccaggacggtgacaagcagctctctgtgcccgagttcatctccctgcccgtgggcaccgtggagaaccagcagggccaggacattgacgacaactgggtgaaagacagaaaaaaggagtttgaggagctcattgactccaaccacgacggcatcgtgaccgccgaggagctggagagctacatggaccccatgaacgagtacaacgcgctgaacgaggccaagcagatgatcgccgtcgccgacgagaaccagaaccaccacctggagcccgaggaggtgctcaagtacagcgagttcttcacgggcagcaagctggtggactacgcgcgcagcgtgcacgaggagttttgagcgcccggccgcgccccgcgccgccccccacgcaccaccggggcggcctcgcgggtgactccgggctccgtggctgtcccggaccccacctcttccctgccgcccgccaccggccgaccgaccgcggctgccccagttgatgagcggcgtgtcccctctgcagcgcgcaccccggcggggctttggctgtgacgcggtcggggcgcggggctgggctgtggccccgcggcgccgcctcctccctggtccctcgaaatcgtggcatctcacttctgagaacgaaatctcgcttcagtcactctgccgaaggcgctgacggcatcgcggccggaacctctgggcccggcccctcccagggccgccgctccgtgggaaaaaacagctcctccatttccttgaaaactgaacgattattaaaaatagattaaacttcgctggaaatgagtagccaggaagttcaggggagggtgccgggtccttcccgggcctggcgtgtcggagccacccaggtcccgcagctgccgctgagaaaatgcaaatatttgttgtgacaagaatcacatacatttactttaaatatagttgccttttttggtcagcttc

SEQ ID NO: 2263 - protein, 124 aa, Homo sapiens; identical to SEQ ID NO: 2247

SEQ ID NO: 2264 - DNA, 3072 bp, Homo sapiens
ttgggtcttttctgcccaggacatggcccacctggacctagagctctgtgacatttctgtgaagcctccgtctacctttgggactcagcagaggtgtgtttagaattcactctgcgttttgggggtccccatgcatgctgaggtgctgttccctgcccacccgtgtccgatccgtcttggcctccccgacctcagggtgcctaggaccccccgacctctttgggtatttggtttctggctcaggaagagcagctgccgggtcctggaggaggggcctgggaagcgctggcaggcgtcactcctgcgacctcccacccctccctgcatggctcctgcgagggtcaccgcgtgagtccgggggctgctgtcctcgcgcctcagacctgattctggggaccgcggtgaaggcgtggcaggcgggcatcactcccttcccccgcctccatcgctgcctctctctgggtctgcgtcctcttctcacagggacagcagtcgttgactctccctgatccaggagggtctctccagatccttccctaacagcagaggcccggctcgtggggagggactgggactcaaggcttcttcaccagcctgaggttggtgctggggctcggcggcggctgtgagaatcctgtgctggagaaagcgtctctcggccggcctgtctggggcgtctgtgcctctcctggatgggtctcagtttggccccgtccatccatcccaggagctgcggtggagcagacagggaggggtgccccaggaaccacagccccgtcactcctgtcttcctttaagtgaaccggtcgtgtagatggaggttgttcagaaagggataagatgggacggcagctgggcctcatcccgcagtgagcgcgacgcagaggctgccgggcttgtggcaggggcttcggccagggcagagtcgggcctcacgtgcagggggctgagtgtgggcctcaacactggacttggccactgactgcagtgagccccaagatggggcaggaggtggtgtttctgtcctggagacccagggtggcttgggtccttgggatgtgtggggacctcggggtgagggcccgttggggccgggtgggcacggcaggagagcgggggccacacacccagaggcagtgccgtgtcccggctgggagggttcctgggaagctctgctcagccccagtctcagtcatttctagaaactgtgttttcctccctgtgacgtcacacgtgaaggaaacggaaaagggcagtgagtccttcgccccgcggcgccgtgcgcacgtcagccttcagggtgattccgctcctccagaggggcaggcgcgggtgtggggggtggggcccaggcccatcctgaggggtcccaggcatgaggggctctgagctgtgtcctggggtggtctgggccatggggaggttctggatcatgtcttgagaggtctgggctgtgtggggggtccaggccatgtcctgggggtctgggctgtgtctgtggggagtcagggccatccatgtattgggggtctggggcaggggggggtccaggctgtcttggggagtccgggctgtgtggaggggtccaagctatgcctttggggatcaggcctgtgggaggctctgggttatgtcttggcgggggtccaggctgtgtcttaggggctgggccatgttctggggacgtgtgaatcctggagggtggggccccggtctcgcgggtggctgtgtccctcgagttcaggcagcacctctcggaactttctggatttgcgtgctggcgtctgtcggcctcgatacccacaggctgcgcccctctcagcacaggaagtcctggagaacctgaaggaccgctggtaccaggcggacagcccccctgcagacctgctgctgacggaggaggagttcctgtcgttcctccaccccgagcacagccggggaatgctcaggttcatggtgaaggagatcgtccgggacctgggtgaggctgggtccagcctggccggcacgccaggacccaggaccgactggcaggggccgggcatcgtcgggaggtcggggcaggtcctgcgggagccccagcctgggtgtgggctgacccattcccgtctcgcagaccaggacggtgacaagcagctctctgtgcccgagttcatctccctgcccgtgggcaccgtggagaaccagcagggccaggacattgacgacaactgggtgaaagacagaaaaaaggagtttgaggagctcattgactccaaccacgacggcatcgtgaccgccgaggagctggagagctacatggaccccatgaacgagtacaacgcgctgaacgaggccaagcagatgatcgccgtcgccgacgagaaccagaaccaccacctggagcccgaggaggtgctcaagtacagcgagttcttcacgggcagcaagctggtggactacgcgcgcagcgtgcacgaggagttttgagcgcccggccgcgccccgcgccgccccccacgcaccaccggggcggcctcgcgggtgactccgggctccgtggctgtcccggaccccacctcttccctgccgcccgccaccggccgaccgaccgcggctgccccagttgatgagcggcgtgtcccctctgcagcgcgcaccccggcggggctttggctgtgacgcggtcggggcgcggggctgggctgtggccccgcggcgccgcctcctccctggtccctcgaaatcgtggcatctcacttctgagaacgaaatctcgcttcagtcactctgccgaaggcgctgacggcatcgcggccggaacctctgggcccggcccctcccagggccgccgctccgtgggaaaaaacagctcctccatttccttgaaaactgaacgattattaaaaatagattaaacttcgctggaaatgagtagccaggaagttcaggggagggtgccgggtccttcccgggcctggcgtgtcggagccacccaggtcccgcagctgccgctgagaaaatgcaaatatttgttgtgacaagaatcacatacatttactttaaatatagttgccttttttggtcagcttc

SEQ ID NO: 2265 - protein, 175 aa, Homo sapiens; identical to SEQ ID NO: 2249

SEQ ID NO: 2266 - DNA, 3842 bp, Homo sapiens
ttaatttttaattgtttaagagtgagggcctcactgttgcccaggctggagtgcagtggtgcgatctcagctcacctgtagcctccacatcctgggctcaatctatcctccttggaggacagaaaaataaaggtgtaagatacgttcctgccaggaacggcccatatcatgtgaccagcccccatgggggcggcctcctgagtgactgggaccaccagtgtgtgccaccatgcccagctgattcaaaaacatatattttgtagacacaaggtctccccatgttgcctaggtaggtctcaaactcttggatttcagagggttcaagtgacccgctcggcctccccccgtcctggggttgcaggcgcgagtgacccgcctgccttggcctctccccatcctggggttgcaggcatgagcccctgtgcctggccttgaccttctagaatgacgcggagacttttgagcctgttggctctgcctgctcttttcccagttcacgtactcttatctggagtttggtcctgtccgttctaaatcctgcaaattggacattaaaaaaactaaaagtaagaggatctccctgtgttgcccaggctggtctcaaagtcctgggctaaagggatctgcctgccgcagcctcccagcatgccgggattacaggcacaagccccagtgcccggccaaattggacgttattacttcctttccaaaagagtggtttacattttcctccccacacacggttcgtgcctccaccccggtcccgcgttccctgctgtcctgactgcgtctttaagcttcatcccgttggtccggcctgttggcgatgtgcttggggcaggaggccttgcccgtgcccgccccccaactctgattgtgtctgtctttccttggtgccactttatttgggtcttttctgcccaggacatggcccacctggacctagagctctgtgacatttctgtgaagcctccgtctacctttgggactcagcagaggtgtgtttagaattcactctgcgttttgggggtccccatgcatgctgaggtgctgttccctgcccacccgtgtccgatccgtcttggcctccccgacctcagggtgcctaggaccccccgacctctttgggtatttggtttctggctcaggaagagcagctgccgggtcctggaggaggggcctgggaagcgctggcaggcgtcactcctgcgacctcccacccctccctgcatggctcctgcgagggtcaccgcgtgagtccgggggctgctgtcctcgcgcctcagacctgattctggggaccgcggtgaaggcgtggcaggcgggcatcactcccttcccccgcctccatcgctgcctctctctgggtctgcgtcctcttctcacagggacagcagtcgttgactctccctgatccaggagggtctctccagatccttccctaacagcagaggcccggctcgtggggagggactgggactcaaggcttcttcaccagcctgaggttggtgctggggctcggcggcggctgtgagaatcctgtgctggagaaagcgtctctcggccggcctgtctggggcgtctgtgcctctcctggatgggtctcagtttggccccgtccatccatcccaggagctgcggtggagcagacagggaggggtgccccaggaaccacagccccgtcactcctgtcttcctttaagtgaaccggtcgtgtagatggaggttgttcagaaagggataagatgggacggcagctgggcctcatcccgcagtgagcgcgacgcagaggctgccgggcttgtggcaggggcttcggccagggcagagtcgggcctcacgtgcagggggctgagtgtgggcctcaacactggacttggccactgactgcagtgagccccaagatggggcaggaggtggtgtttctgtcctggagacccagggtggcttgggtccttgggatgtgtggggacctcggggtgagggcccgttggggccgggtgggcacggcaggagagcgggggccacacacccagaggcagtgccgtgtcccggctgggagggttcctgggaagctctgctcagccccagtctcagtcatttctagaaactgtgttttcctccctgtgacgtcacacgtgaaggaaacggaaaagggcagtgagtccttcgccccgcggcgccgtgcgcacgtcagccttcagggtgattccgctcctccagaggggcaggcgcgggtgtggggggtggggcccaggcccatcctgaggggtcccaggcatgaggggctctgagctgtgtcctggggtggtctgggccatggggaggttctggatcatgtcttgagaggtctgggctgtgtggggggtccaggccatgtcctgggggtctgggctgtgtctgtggggagtcagggccatccatgtattgggggtctggggcaggggggggtccaggctgtcttggggagtccgggctgtgtggaggggtccaagctatgcctttggggatcaggcctgtgggaggctctgggttatgtcttggcgggggtccaggctgtgtcttaggggctgggccatgttctggggacgtgtgaatcctggagggtggggccccggtctcgcgggtggctgtgtccctcgagttcaggcagcacctctcggaactttctggatttgcgtgctggcgtctgtcggcctcgatacccacaggctgcgcccctctcagcacaggaagtcctggagaacctgaaggaccgctggtaccaggcggacagcccccctgcagacctgctgctgacggaggaggagttcctgtcgttcctccaccccgagcacagccggggaatgctcaggttcatggtgaaggagatcgtccgggacctggaccaggacggtgacaagcagctctctgtgcccgagttcatctccctgcccgtgggcaccgtggagaaccagcagggccaggacattgacgacaactgggtgaaagacagaaaaaaggagtttgaggagctcattgactccaaccacgacggcatcgtgaccgccgaggagctggagagctacatggaccccatgaacgagtacaacgcgctgaacgaggccaagcagatgatcgccgtcgccgacgagaaccagaaccaccacctggagcccgaggaggtgctcaagtacagcgagttcttcacgggcagcaagctggtggactacgcgcgcagcgtgcacgaggagttttgagcgcccggccgcgccccgcgccgccccccacgcaccaccggggcggcctcgcgggtgactccgggctccgtggctgtcccggaccccacctcttccctgccgcccgccaccggccgaccgaccgcggctgccccagttgatgagcggcgtgtcccctctgcagcgcgcaccccggcggggctttggctgtgacgcggtcggggcgcggggctgggctgtggccccgcggcgccgcctcctccctggtccctcgaaatcgtggcatctcacttctgagaacgaaatctcgcttcagtcactctgccgaaggcgctgacggcatcgcggccggaacctctgggcccggcccctcccagggccgccgctccgtgggaaaaaacagctcctccatttccttgaaaactgaacgattattaaaaatagattaaacttcgctggaaatgagtagccaggaagttcaggggagggtgccgggtccttcccgggcctggcgtgtcggagccacccaggtcccgcagctgccgctgagaaaatgcaaatatttgttgtgacaagaatcacatacatttactttaaatatagttgccttttttggtcagcttc

SEQ ID NO: 2267 - protein, 130 aa, Homo sapiens; identical to SEQ ID NO: 2251

SEQ ID NO: 2268 - DNA, 647 bp, Homo sapiens
gactgtgagctgcttgtccccatcctgcggccgtcctggggacacagagccctccgtggtgcccggggattggattggagccaggacctcacttcctcctctgcccctgcccctgcccctcccagcacctggcccacaccctgcagcccgcccccggccgaccgaccgcggctgccccagttgatgagcggcgtgtcccctctgcagcgcgcaccccggcggggctttggctgtgacgcggtcggggcgcggggctgggctgtggccccgcggcgccgcctcctccctggtccctcgaaatcgtggcatctcacttctgagaacgaaatctcgcttcagtcactctgccgaaggcgctgacggcatcgcggccggaacctctgggcccggcccctcccagggccgccgctccgtgggaaaaaacagctcctccatttccttgaaaactgaacgattattaaaaatagattaaacttcgctggaaatgagtagccaggaagttcaggggagggtgccgggtccttcccgggcctggcgtgtcggagccacccaggtcccgcagctgccgctgagaaaatgcaaatatttgttgtgacaagaatcacatacatttactttaaatatagttgccttttttggtcagcttc

SEQ ID NO: 2269 - protein, 58 aa, Homo sapiens; identical to SEQ ID NO: 2253

SEQ ID NO: 2270 - DNA, 1464 bp, Homo sapiens
cccgcaagaaagatggcagtggcctgatccgggcccgttggcggcgtcactgacgcttcgctccggtcctcggatcccgagcgcggggaggcagaccgggtggatgtgaacactgaccggaagatcagtgccaaggagatgcagcgctggatcatggagaagacggccgagcacttccaggaggccatggaggagagcaagacacacttccgcgccgtggaccctgacggggacggtcacgtgtcttgggacgagtataaggtgaagtttttggcgagtaaaggccatagcgagaaggaggttgccgacgccatcaggctcaacgaggaactcaaagtggatgaggaaacacaggaagtcctggagaacctgaaggaccgctggtaccaggcggacagcccccctgcagacctgctgctgacggaggaggagttcctgtcgttcctccaccccgagcacagccggggaatgctcaggttcatggtgaaggagatcgtccgggacctggaccaggacggtgacaagcagctctctgtgcccgagttcatctccctgcccgtgggcaccgtggagaaccagcagggccaggacattgacgacaactgggtgaaagacagaaaaaaggagtttgaggagctcattgactccaaccacgacggcatcgtgaccgccgaggagctggagagctacatggaccccatgaacgagtacaacgcgctgaacgaggccaagcagatgatcgccgtcgccgacgagaaccagaaccaccacctggagcccgaggaggtgctcaagtacagcgagttcttcacgggcagcaagctggtggactacgcgcgcagcgtgcacgaggagttttgagcgcccggccgcgccccgcgccgccccccacgcaccaccggggcggcctcgcgggtgactccgggctccgtggctgtcccggaccccacctcttccctgccgcccgccaccggccgaccgaccgcggctgccccagttgatgagcggcgtgtcccctctgcagcgcgcaccccggcggggctttggctgtgacgcggtcggggcgcggggctgggctgtggccccgcggcgccgcctcctccctggtccctcgaaatcgtggcatctcacttctgagaacgaaatctcgcttcagtcactctgccgaaggcgctgacggcatcgcggccggaacctctgggcccggcccctcccagggccgccgctccgtgggaaaaaacagctcctccatttccttgaaaactgaacgattattaaaaatagattaaacttcgctggaaatgagtagccaggaagttcaggggagggtgccgggtccttcccgggcctggcgtgtcggagccacccaggtcccgcagctgccgctgagaaaatgcaaatatttgttgtgacaagaatcacatacatttactttaaatatagttgccttttttggtcagcttc

SEQ ID NO: 2271 - protein, 240 aa, Homo sapiens; identical to SEQ ID NO: 2255

SEQ ID NO: 2272 - DNA, 1613 bp, Homo sapiens
gttcgcaccgcccccgcccgcaagaaagatggcagtggcctgatccgggcccgttggcggcgtcactgacgcttcgctccggtcctcggatcccgagcgcggggaggcagaccgactgtgagctgcttgtccccatcctgcggccgtcctggggacacagagccctccgtggtgcccggggattggattggagccaggacgcggagccgcggcggagccggaggaagctgatggtcatcttttccaaggtggatgtgaacactgaccggaagatcagtgccaaggagatgcagcgctggatcatggagaagacggccgagcacttccaggaggccatggaggagagcaagacacacttccgcgccgtggaccctgacggggacggtcacgtgtcttgggacgagtataaggtgaagtttttggcgagtaaaggccatagcgagaaggaggttgccgacgccatcaggctcaacgaggaactcaaagtggatgaggaaacacaggaagtcctggagaacctgaaggaccgctggtaccaggcggacagcccccctgcagacctgctgctgacggaggaggagttcctgtcgttcctccaccccgagcacagccggggaatgctcaggttcatggtgaaggagatcgtccgggacctggaccaggacggtgacaagcagctctctgtgcccgagttcatctccctgcccgtgggcaccgtggagaaccagcagggccaggacattgacgacaactgggtgaaagacagaaaaaaggagtttgaggagctcattgactccaaccacgacggcatcgtgaccgccgaggagctggagagctacatggaccccatgaacgagtacaacgcgctgaacgaggccaagcagatgatcgccgtcgccgacgagaaccagaaccaccacctggagcccgaggaggtgctcaagtacagcgagttcttcacgggcagcaagctggtggactacgcgcgcagcgtgcacgaggagttttgagcgcccggccgcgccccgcgccgccccccacgcaccaccggggcggcctcgcgggtgactccgggctccgtggctgtcccggaccccacctcttccctgccgcccgccaccggccgaccgaccgcggctgccccagttgatgagcggcgtgtcccctctgcagcgcgcaccccggcggggctttggctgtgacgcggtcggggcgcggggctgggctgtggccccgcggcgccgcctcctccctggtccctcgaaatcgtggcatctcacttctgagaacgaaatctcgcttcagtcactctgccgaaggcgctgacggcatcgcggccggaacctctgggcccggcccctcccagggccgccgctccgtgggaaaaaacagctcctccatttccttgaaaactgaacgattattaaaaatagattaaacttcgctggaaatgagtagccaggaagttcaggggagggtgccgggtccttcccgggcctggcgtgtcggagccacccaggtcccgcagctgccgctgagaaaatgcaaatatttgttgtgacaagaatcacatacatttactttaaatatagttgccttttttggtcagcttc

SEQ ID NO: 2273 - protein, 259 aa, Homo sapiens; identical to SEQ ID NO: 2257

SEQ ID NO: 2274 - DNA, 2005 bp, Homo sapiens
ggaggagagatggtggcgccggcgtcccctccgtgaggtcgcgcccgttcgcaccgcccccgcccgcaagaaagatggcagtggcctgatccgggcccgttggcggcgtcactgacgcttcgctccggtcctcggatcccgagcgcggggaggcagaccgactgtgagctgcttgtccccatcctgcggccgtcctggggacacagagccctccgtggtgcccggggattggattggagccaggacctcacttcctcctctgcccctgcccctgcccctcccagcacctggcccacaccctgcagcccgccccatggtctggccctgggtggcgatggcgtccaggtggggtcccctcattggcctggctccgtgctgcctctggctcctgggggcagtccttctgatggacgcgtctgcacggcctgccaaccactcgtccactcgagagagagtagccaacagggaggagaatgagatcctgcccccagaccacctgaacggggtgaagctggagatggacgggcacctcaatcgcggcttccaccaggaggtcttcctaggcaaggacctgggtggctttgatgaggacgcggagccgcggcggagccggaggaagctgatggtcatcttttccaaggtggatgtgaacactgaccggaagatcagtgccaaggagatgcagcgctggatcatggagaagacggccgagcacttccaggaggccatggaggagagcaagacacacttccgcgccgtggaccctgacggggacggtcacgtgtcttgggacgagtataaggtgaagtttttggcgagtaaaggccatagcgagaaggaggttgccgacgccatcaggctcaacgaggaactcaaagtggatgaggaaacacaggaagtcctggagaacctgaaggaccgctggtaccaggcggacagcccccctgcagacctgctgctgacggaggaggagttcctgtcgttcctccaccccgagcacagccggggaatgctcaggttcatggtgaaggagatcgtccgggacctggaccaggacggtgacaagcagctctctgtgcccgagttcatctccctgcccgtgggcaccgtggagaaccagcagggccaggacattgacgacaactgggtgaaagacagaaaaaaggagtttgaggagctcattgactccaaccacgacggcatcgtgaccgccgaggagctggagagctacatggaccccatgaacgagtacaacgcgctgaacgaggccaagcagatgatcgccgtcgccgacgagaaccagaaccaccacctggagcccgaggaggtgctcaagtacagcgagttcttcacgggcagcaagctggtggactacgcgcgcagcgtgcacgaggagttttgagcgcccggccgcgccccgcgccgccccccacgcaccaccggggcggcctcgcgggtgactccgggctccgtggctgtcccggaccccacctcttccctgccgcccgccaccggccgaccgaccgcggctgccccagttgatgagcggcgtgtcccctctgcagcgcgcaccccggcggggctttggctgtgacgcggtcggggcgcggggctgggctgtggccccgcggcgccgcctcctccctggtccctcgaaatcgtggcatctcacttctgagaacgaaatctcgcttcagtcactctgccgaaggcgctgacggcatcgcggccggaacctctgggcccggcccctcccagggccgccgctccgtgggaaaaaacagctcctccatttccttgaaaactgaacgattattaaaaatagattaaacttcgctggaaatgagtagccaggaagttcaggggagggtgccgggtccttcccgggcctggcgtgtcggagccacccaggtcccgcagctgccgctgagaaaatgcaaatatttgttgtgacaagaatcacatacatttactttaaatatagttgccttttttggtcagcttc

SEQ ID NO: 2275 - protein, 362 aa, Homo sapiens; identical to SEQ ID NO: 12

SEQ ID NO: 2276 - DNA, 657 bp, Homo sapiens
ggaggagagatggtggcgccggcgtcccctccgtgaggtcgcgcccgttcgcaccgcccccgcccgcaagaaagatggcagtggcctgatccgggcccgttggcggcgtcactgacgcttcgctccggtcctcggatcccgagcgcggggaggcagaccgactgtgagctgcttgtccccatcctgcggccgtcctggggacacagagccctccgtggtgcccggggattggattggagccaggacctcacttcctcctctgcccctgcccctgcccctcccagcacctggcccacaccctgcagcccgccccatggtctggccctgggtggcgatggcgtccaggtggggtcccctcattggcctggctccgtgctgcctctggctcctgggggcagtccttctgatggacgcgtctgcacggcctgccaaccactcgtccactcgagagagagtagccaacagggaggagaatgagatcctgcccccagaccacctgaacggggtgaagctggagatggacgggcacctcaatcgcggcttccaccaggaggtcttcccaggtcccgcagctgccgctgagaaaatgcaaatatttgttgtgacaagaatcacatacatttactttaaatatagttgccttttttggtcagcttc

SEQ ID NO: 2277 - protein, 113 aa, Homo sapiens
MVWPWVAMASRWGPLIGLAPCCLWLLGAVLLMDASARPANHSSTRERVANREENEILPPDHLNGVKLEMDGHLNRGFHQEVFPGPAAAAEKMQIFVVTRITYIYFKYSCLFWS

SEQ ID NO: 2278 - DNA, 2121 bp, Homo sapiens
ggaggagagatggtggcgccggcgtcccctccgtgaggtcgcgcccgttcgcaccgcccccgcccgcaagaaagatggcagtggcctgatccgggcccgttggcggcgtcactgacgcttcgctccggtcctcggatcccgagcgcggggaggcagaccgactgtgagctgcttgtccccatcctgcggccgtcctggggacacagagccctccgtggtgcccggggattggattggagccaggacctcacttcctcctctgcccctgcccctgcccctcccagcacctggcccacaccctgcagcccgccccatggtctggccctgggtggcgatggcgtccaggtggggtcccctcattggcctggctccgtgctgcctctggctcctgggggcagtccttctgatggacgcgtctgcacggcctgccaaccactcgtccactcgagagagagtagccaacagggaggagaatgagatcctgcccccagaccacctgaacggggtgaagctggagatggacgggcacctcaatcgcggcttccaccaggaggtcttcctaggcaaggacctgggtggctttgatgaggacgcggagccgcggcggagccggaggaagctgatggtcatcttttccaaggtggatgtgaacactgaccggaagatcagtgccaaggagatgcagcgctggatcatggagaagacggccgagcacttccaggaggccatggaggagagcaagacacacttccgcgccgtggaccctgacggggacggtcacgtgtcttgggacgagtataaggtgaagtttttggcgagtaaaggccatagcgagaaggaggttgccgacgccatcaggctcaacgaggaactcaaagtggatgaggaaacacaggaagtcctggagaacctgaaggaccgctggtaccaggcggacagcccccctgcagacctgctgctgacggaggaggagttcctgtcgttcctccaccccgagcacagccggggaatgctcaggttcatggtgaaggagatcgtccgggacctggaccaggacggtgacaagcagctctctgtgcccgagttcatctccctgcccgtgggcaccgtggagaaccagcagggccaggacattgacgacaactgggtgaaagacagaaaaaaggagtttgaggagctcattgactccaaccacgacggcatcgtgaccgccgaggagctggagaacgtgcccacactcccgctgcagccaataggcaccttaaatagccacttcgtgcggctggccgcggagctcggagggggaaaggcgacgctgacctgtgccccgctcgcccgcagagctacatggaccccatgaacgagtacaacgcgctgaacgaggccaagcagatgatcgccgtcgccgacgagaaccagaaccaccacctggagcccgaggaggtgctcaagtacagcgagttcttcacgggcagcaagctggtggactacgcgcgcagcgtgcacgaggagttttgagcgcccggccgcgccccgcgccgccccccacgcaccaccggggcggcctcgcgggtgactccgggctccgtggctgtcccggaccccacctcttccctgccgcccgccaccggccgaccgaccgcggctgccccagttgatgagcggcgtgtcccctctgcagcgcgcaccccggcggggctttggctgtgacgcggtcggggcgcggggctgggctgtggccccgcggcgccgcctcctccctggtccctcgaaatcgtggcatctcacttctgagaacgaaatctcgcttcagtcactctgccgaaggcgctgacggcatcgcggccggaacctctgggcccggcccctcccagggccgccgctccgtgggaaaaaacagctcctccatttccttgaaaactgaacgattattaaaaatagattaaacttcgctggaaatgagtagccaggaagttcaggggagggtgccgggtccttcccgggcctggcgtgtcggagccacccaggtcccgcagctgccgctgagaaaatgcaaatatttgttgtgacaagaatcacatacatttactttaaatatagttgccttttttggtcagcttc

SEQ ID NO: 2279 - protein, 348 aa, Homo sapiens; identical to SEQ ID NO: 14

SEQ ID NO: 2280 - DNA, 1140 bp, Homo sapiens
ggaggagagatggtggcgccggcgtcccctccgtgaggtcgcgcccgttcgcaccgcccccgcccgcaagaaagatggcagtggcctgatccgggcccgttggcggcgtcactgacgcttcgctccggtcctcggatcccgagcgcggggaggcagaccgactgtgagctgcttgtccccatcctgcggccgtcctggggacacagagccctccgtggtgcccggggattggattggagccaggacctcacttcctcctctgcccctgcccctgcccctcccagcacctggcccacaccctgcagcccgccccatggtctggccctgggtggcgatggcgtccaggtggggtcccctcattggcctggctccgtgctgcctctggctcctgggggcagtccttctgatggacgcgtctgcacggcctgccaaccactcgtccactcgagagagagtagccaacagggaggagaatgagatcctgcccccagaccacctgaacggggtgaagctggagatggacgggcacctcaatcgcggcttccaccaggaggtcttcctaggcaaggacctgggtggctttgatgaggacgcggagccgcggcggagccggaggaagctgatggtcatcttttccaaggtggatgtgaacactgaccggaagatcagtgccaaggagatgcagcgctggatcatggagaagacggccgagcacttccaggaggccatggaggagagcaagacacacttccgcgccgtggaccctgacggggacggtcacgtgtcttgggacgagtataaggtgaagtttttggcgagtaaaggccatagcgagaaggaggttgccgacgccatcaggctcaacgaggaactcaaagtggatgaggaaacacaggaagtcctggagaacctgaaggaccgctggtaccaggcggacagcccccctgcagacctgctgctgacggaggaggagttcctgtcgttcctccaccccgagcacagccggggaatgctcaggttcatggtgaaggagatcgtccgggacctggaccaggacggtgacaagcagctctctgtgcccgagttcatctccctgcccgtgggcaccgtggagaaccagcagggccaggacattgacga

SEQ ID NO: 2281 - protein, 274 aa, Homo sapiens
MVWPWVAMASRWGPLIGLAPCCLWLLGAVLLMDASARPANHSSTRERVANREENEILPPDHLNGVKLEMDGHLNRGFHQEVFLGKDLGGFDEDAEPRRSRRKLMVIFSKVDVNTDRKISAKEMQRWIMEKTAEHFQEAMEESKTHFRAVDPDGDGHVSWDEYKVKFLASKGHSEKEVADAIRLNEELKVDEETQEVLENLKDRWYQADSPPADLLLTEEEFLSFLHPEHSRGMLRFMVKEIVRDLDQDGDKQLSVPEFISLPVGTVENQQGQDI

SEQ ID NO: 2282 - DNA, 761 bp, Homo sapiens
tcgccccgcggcgccgtgcgcacgtcagccttcagggtgattccgctcctccagaggggcaggcgcgggtgtggggggtggggcccaggcccatcctgaggggtcccaggcatgaggggctctgagctgtgtcctggggtggtctgggccatggggaggttctggatcatgtcttgagaggtctgggctgtgtggggggtccaggccatgtcctgggggtctgggctgtgtctgtggggagtcagggccatccatgtattgggggtctggggcaggggggggtccaggctgtcttggggagtccgggctgtgtggaggggtccaagctatgcctttggggatcaggcctgtgggaggctctgggttatgtcttggcgggggtccaggctgtgtcttaggggctgggccatgttctggggacgtgtgaatcctggagggtggggccccggtctcgcgggtggctgtgtccctcgagttcaggcagcacctctcggaactttctggatttgcgtgctggcgtctgtcggcctcgatacccacaggctgcgcccctctcagcacaggaagtcctggagaacctgaaggaccgctggtaccaggcggacagcccccctgcagacctgctgctgacggaggaggagttcctgtcgttcctccaccccgagcacagccggggaatgctcaggttcatggtgaaggagatcgtccgggacctggaccaggacggtgacaagcagctctctgtgcccgagttcatctcc

SEQ ID NO: 2283 - protein, 124 aa, Homo sapiens; identical to SEQ ID NO: 2247

SEQ ID NO: 2284 - DNA, 668 bp, Homo sapiens
ggaggagagatggtggcgccggcgtcccctccgtgaggtcgcgcccgttcgcaccgcccccgcccgcaagaaagatggcagtggcctgatccgggcccgttggcggcgtcactgacgcttcgctccggtcctcggatcccgagcgcggggaggcagaccgactgtgagctgcttgtccccatcctgcggccgtcctggggacacagagccctccgtggtgcccggggattggattggagccaggacctcacttcctcctctgcccctgcccctgcccctcccagcacctggcccacaccctgcagcccgccccatggtctggccctgggtggcgatggcgtccaggtggggtcccctcattggcctggctccgtgctgcctctggctcctgggggcagtccttctgatggacgcgtctgcacggcctgccaaccactcgtccactcgagagagagtagccaacagggaggagaatgagatcctgcccccagaccacctgaacggggtgaagctggagatggacgggcacctcaatcgcggcttccaccaggaggtcttcctaggcaaggacctgggtggctttgatgaggacgcggagccgcggcggagccggaggaagctgatggtcatcttttccaaggcctggccacgagctcaccttcccgcag

SEQ ID NO: 2285 - protein, 117 aa, Homo sapiens
MVWPWVAMASRWGPLIGLAPCCLWLLGAVLLMDASARPANHSSTRERVANREENEILPPDHLNGVKLEMDGHLNRGFHQEVFLGKDLGGFDEDAEPRRSRRKLMVIFSKAWPRAHLP

SEQ ID NO: 2286 - DNA, 2777 bp, Homo sapiens
ccggcgcgggcgccatgaagctgctgcggcgggcgtggcggcggcgggcggcgctaggcctgggcacgctggcgctgtgcggggcggcgctgctctacctggcgcgctgcgcggccgagcccggggaccccagggcgatgtcgggccgcagcccgcctccccccgcgcccgcgcgcgccgccgccttcctggcagtgctggtggccagcgcgccccgcgccgccgagcgccgcagcgtgatccgcagcacgtggcttgcgcggcgcggggccccgggcgacgtgtgggcgcgctttgccgtgggcacggccggcctgggcgccgaggagcggcgcgccctggagcgggagcaggcgcggcacggggacctgctgctgctgcccgcgctgcgcgacgcctacgaaaacctcacggccaaggtgctggccatgctggcctggctggacgagcacgtggccttcgagttcgtgctcaaggcggacgacgactccttcgcgcggctggacgcgctgctggccgagctgcgcgcccgcgagcccgcgcgccgccgccgcctctactggggcttcttctcgggccgcggccgcgtcaagccgggggggcgctggcgcgaggccgcctggcaactctgcgactactacctgccctacgcgctgggcggcggctacgtgctctcggccgacctggtgcactacctgcgcctcagccgcgactacctgcgcgcctggcacagcgaggacgtgtctctgggcgcctggctggcgccggtggacgtccagcgggagcacgacccgcgcttcgacaccgaataccggtcccgcggctgcagcaaccagtacctggtgacgcacaagcagagcctggaggacatgctggagaagcacgcgacgctggcgcgcgagggccgcctgtgcaagcgcgaggtgcagctgcgcctgtcctacgtgtacgactggtccgcgccgccctcgcagtgctgccagagaagggagggcatcccctgagccgccgcggcccggccctccgggacacctgcttcacccggcggcgccttggggcaggtgccgagcgggcgcactacgcccgggccccaaggcccccgtcccgcagccacgcttgtggtcgctgcgtcccggtctgcgtttgggagacccctgggggttgccggggcagcgcgccgtgtccaggtggaggtgcccgttcctggacctcagcgagcctgagccgggcccggccgcacgctgacccccgtgctgtccccgaccggctcacggggctgggctccgatcttccgtgtctcttatcagtggcgtttctcacgtctgcgtctcagatctaacgtggtttcacatcaatccgctttcatgggattttggtctctgtccagtgacttcgtggtaaatgtaactcagtgtttgcttgcgacttatttataaatattgtaagtttgtgtcgatgagtgtaagttggcagtgcgcacgtctcggtttttttacatgatttaaggaaagacttttatgtcagaacttggtgcctgtaccgtcaaccccgctgctgcccgtgtttaaacgcaggagaactttaaaactggccatctatcttttcagtgtacaagtcactgaacccattgtttctttctgaagagactttcctttcaaggcttcccatgggtccgcgccacacagggccggtgctgctttatttcagactctgccccaggttccaggaatccgaaccccggagtgctgacgcggttccccaacttccgccttaagaaaacaggaccagccggcaccaggcccgtctctcacgtactttaacacatccttgaaagcccctcgtttaatgagaaaagcgaacactgcggtccttgccaaagtaaaatgaagctgccccaggacaaggggttaccatgagctccctggagtccgacgcgggttttctctctgggggacctgggtggtccccgctgtggtctttgttgtcccactttgggaccgggtccagtctggggtctagtctcgagcatcagggtcaggctcggggcagggctgggttaggctccgggtcagtcttgccatgggtttgggagcaggtttgggttacttgcgtttgaaggcagcagtggtctcaggaggaagaaacgggggcgggagagagtggtgatctgtggtcagtgggtcagtgacctgcacggtgattctcccacctccaaaaggtaggggtgggactggaggcgtccctaggtcaggccgttgagttcgagctccgatgggccaccttgaatccaggactgaccgcccgtgtgtgcacagtttgttcttggacgaggactcgtgaggatcgagggctggggaccccggtgtgagcaggatggggccctgccctcccgtgggagttgtggactcgagcccaggggctgcccgtcacagcggtgtcccaggtccctgccatccgattttacctgggatgtcttctctggagtttggaattgcttgaggaaccctgcgtgtgcttggagaggccagagggcttgctgagaaccccatggacagtggagagcgggattcgaaccaagggctggactcccacacctctggcctgcgtcgcccagttctttgtggctctgaagaattggccgctgtggaaaagagcaaatgtccgagacccccaacaggaagagtctaaaaatccagtttgcaaccacttctgacctacaaaaaaatggaaatttagtgtttttcagcctaagacattaaatttcatatcagaacaaa

SEQ ID NO: 2287 - protein, 329 aa, Homo sapiens; identical to SEQ ID NO: 16

SEQ ID NO: 2288 - DNA, 1151 bp, Homo sapiens
atgtcagaacttggtgcctgtaccgtcaaccccgctgctgcccgtgtttaaacgcaggagaactttaaaactggccatctatcttttcagtgtacaagtcactgaacccattgtttctttctgaagagactttcctttcaaggcttcccatgggtccgcgccacacagggccggtgctgctttatttcagactctgccccaggttccaggaatccgaaccccggagtgctgacgcggttccccaacttccgccttaagaaaacaggaccagccggcaccaggcccgtctctcacgtactttaacacatccttgaaagcccctcgtttaatgagaaaagcgaacactgcggtccttgccaaagtaaaatgaagctgccccaggacaaggggttaccatgagctccctggagtccgacgcgggttttctctctgggggacctgggtggtccccgctgtggtctttgttgtcccactttgggaccgggtccagtctggggtctagtctcgagcatcagggtcaggctcggggcagggctgggttaggctccgggtcagtcttgccatgggtttgggagcaggtttgggttacttgcgtttgaaggcagcagtggtctcaggaggaagaaacgggggcgggagagagtggtgatctgtggtcagtgggtcagtgacctgcacggtgattctcccacctccaaaaggtaggggtgggactggaggcgtccctaggtcaggccgttgagttcgagctccgatgggccaccttgaatccaggactgaccgcccgtgtgtgcacagtttgttcttggacgaggactcgtgaggatcgagggctggggaccccggtgtgagcaggatggggccctgccctcccgtgggagttgtggactcgagcccaggggctgcccgtcacagcggtgtcccaggtccctgccatccgattttacctgggatgtcttctctggagtttggaattggcgtcgcccagttctttgtggctctgaagaattggccgctgtggaaaagagcaaatgtccgagacccccaacaggaagagtctaaaaatccagtttgcaaccacttctgacctacaaaaaaatggaaatttagtgtttttcagcctaagacattaaatttcatatcagaacaaa

SEQ ID NO: 2289 - protein, 76 aa, Homo sapiens [sequence omitted]

SEQ ID NO: 2290 - DNA, 682 bp, Homo sapiens
ctctgccagtctgcacgtgggtgagccggatggggcagtgccgtgtgctgtgacggggctggggctgagctttctgggggcgcctggcatcgccggccccgggtgcgggtcctgttagggacctatcccctgccccatggggggccttggactgggcatggggtccctgctgcacgcctggcctcaggcgccccctccccagccccagcagccactcctgggcctgtcctgggatgtgtgccctgaagcccctccccaccagcccccaccccgccccccatgcaccaccctccccagggctctctccgcagaccacagtgagctgcagggcaaggcccggctgcgggcccgggacgtggtgtgtgttctcatctgtattgagtccctgtgccagcgccacacgtgcctggaggccgtctcaggcctggagagcaacagcagggtcttcacgctacaggtgcaggggctgctgcagctgcaggctggacagtacgcttctgtgtttgtggacaatggctccggggccgtcctcaccatccaggcgggctccagcttctccgggctgctcctgggcacgtgagggcgcccaggggggctggcgaggagctgccgccggatcccggggaccctcctactgatgcccgtggtcaccacaataaagagccctccaccctccccactg

SEQ ID NO: 2291 - protein, 147 aa, Homo sapiens [sequence omitted]

SEQ ID NO: 2292 - DNA, 1041 bp, Homo sapiens
ctcgccgcgctgagccgcctcgggacggagccatgcggcgctgggcctgggccgcggtcgtggtcctcctcgggccgcagctcgtgctcctcgggggcgtcggggcccggcgggaggcacagaggacgcagcagcctggccagcgcgcagatccccccaacgccaccgccagcgcgtcctcccgcgaggggctgcccgaggcccccaagccatcccaggcctcaggacctgagttctccgacgcccacatgacatggctgaactttgtccggcggccggacgacggcgccttaaggaagcggtgcggaagcagggacaagaagccgcgggatctcttcggtcccccaggacctccaggtgcagaagtgaccgcggagactctgcttcacgagtttcaggagctgctgaaagaggccacggagcgccggttctcagggcttctggacccgctgctgccccagggggcgggcctgcggctggtgggcgaggcctttcactgccggctgcagggtccccgccgggtggacaagcggacgctggtggagctgcatggtttccaggctcctgctgcccaaggtgccttcctgcgaggctccggtctgagcctggcctcgggtcggttcacggcccccgtgtccggcatcttccagttctctgccagtctgcacgtggaccacagtgagctgcagggcaaggcccggctgcgggcccgggacgtggtgtgtgttctcatctgtattgagtccctgtgccagcgccacacgtgcctggaggccgtctcaggcctggagagcaacagcagggtcttcacgctacaggtgcaggggctgctgcagctgcaggctggacagtacgcttctgtgtttgtggacaatggctccggggccgtcctcaccatccaggcgggctccagcttctccgggctgctcctgggcacgtgagggcgcccaggggggctggcgaggagctgccgccggatcccggggaccctcctactgatgcccgtggtcaccacaataaagagccctccaccctccccac

SEQ ID NO: 2293 - protein, 302 aa, Homo sapiens
MRRWAWAAVVVLLGPQLVLLGGVGARREAQRTQQPGQRADPPNATASASSREGLPEAPKPSQASGPEFSDAHMTWLNFVRRPDDGALRKRCGSRDKKPRDLFGPPGPPGAEVTAETLLHEFQELLKEATERRFSGLLDPLLPQGAGLRLVGEAFHCRLQGPRRVDKRTLVELHGFQAPAAQGAFLRGSGLSLASGRFTAPVSGIFQFSASLHVDHSELQGKARLRARDVVCVLICIESLCQRHTCLEAVSGLESNSRVFTLQVQGLLQLQAGQYASVFVDNGSGAVLTIQAGSSFSGLLLGT

SEQ ID NO: 2294 - DNA, 518 bp, Homo sapiens
ccgcagaccacagtgagctgcagggcaaggcccggctgcgggcccgggacgtggtgtgtgttctcatctgtattgagtccctgtgccagcgccacacgtgagtgacctcagcccccgctccaggcggcagcccccggaccacccttggaggggctcacaggccacaggggtctctgggcactggagcaggtcttggccccctggacctgcaacgcctccctcttgccctgtggggctgtgttcaggtgcctggaggccgtctcaggcctggagagcaacagcagggtcttcacgctacaggtgcaggggctgctgcagctgcaggctggacagtacgcttctgtgtttgtggacaatggctccggggccgtcctcaccatccaggcgggctccagcttctccgggctgctcctgggcacgtgagggcgcccaggggggctggcgaggagctgccgccggatcccggggaccctcctactgatgcccgtggtcaccacaataaagagccctccaccctc

SEQ ID NO: 2295 - protein, 41 aa, Homo sapiens
MAPGPSSPSRRAPASPGCSWAREGAQGGWRGAAAGSRGPSY

SEQ ID NO: 2296 - DNA, 643 bp, Homo sapiens
ccttaaggaagcggtgcggaagcagggacaagaagccgcgggatctcttcggtcccccaggacctccaggtgcagaagtgaccgcggagactctgcttcacgagtttcaggagctgctgaaaggtcagccgccctgcactgcccagagaccagacgtgcctgggccctgtgctgaccctgctggccgcctgtgccctcctccccacagaggccacggagcgccggttctcagggcttctggacccgctgctgccccagggggcgggcctgcggctggtgggcgaggcctttcactgccggctgcagggtccccgccgggtggacaagcggacgctggtggagctgcatggtttccaggctcctgctgcccaaggtgccttcctgcgaggctccggtctgagcctggcctcgggtcggttcacggcccccgtgtccggcatcttccagttctctgccagtctgcacgtgggtgagccggatggggcagtgccgtgtgctgtgacggggctggggctgagctttctgggggcgcctggcatcgccggccccgggtgcgggtcctgttagggacctatcccctgccccatggggggccttggactgggcatggggtccctgctgcacgcctggcctcaggcgcccc

SEQ ID NO: 2297 - protein, 156 aa, Homo sapiens
LRKRCGSRDKKPRDLFGPPGPPGAEVTAETLLHEFQELLKGQPPCTAQRPDVPGPCADPAGRLCPPPHRGHGAPVLRASGPAAAPGGGPAAGGRGLSLPAAGSPPGGQADAGGAAWFPGSCCPRCLPARLRSEPGLGSVHGPRVRHLPVLCQSARG

SEQ ID NO: 2298 - DNA, 529 bp, Homo sapiens
ggggctcagggcatcaggctctggctgtgtccacagaagccccgcatgcctgccctgctggtggcattgggacgtcagggttctgactcccccaagggcggccgtgggtccttctcctggccggcgatgccttccctggttctgccctgagtgctccccgctgccctggggtcccagctctctgcagggtgcagcctcagtgcgctagccccgtcccgtcccttcagccatcccaggcctcaggacctgagttctccgacgcccacatgacatggctgaactttgtccggcggccggacgacggcgccttaaggaagcggtgcggaagcagggacaagaagccgcgggatctcttcggtcccccaggacctccaggtgcagaagtgaccgcggagactctgcttcacgagtttcaggagctgctgaaaggtcagccgccctgcactgcccagagaccagacgtgcctgggccctgtgctgaccctgctggccgcctgtgccctcctccccacagaggccacggagcgcc

SEQ ID NO: 2299 - protein, 86 aa, Homo sapiens
MTWLNFVRRPDDGALRKRCGSRDKKPRDLFGPPGPPGAEVTAETLLHEFQELLKGQPPCTAQRPDVPGPCADPAGRLCPPPHRGHG

SEQ ID NO: 2300 - DNA, 1573 bp, Homo sapiens
gggcctgtcccacaggggcgtggagctcgtggttctgagcagccagtctccccttgccagacgtggttccagacggggagacgcacctcgtccagaacgggattcagctgctcaacgggcatgcgccgggggccgtcccaaacctcgcagggctccagcaggccaaccggcaccacggactcctgggtggcgccctggcgaacttgtttgtgatagttgggtttgcagcctttgcttacacggtcaagtacgtgctgaggagcatcgcgcaggagtgaggcccaggcgccgagacccaaggcgccactgagggcaccgcgcaccagagcgtgacctcggcaggctggacacactgcccagcacaggcagacccaccaggctcctaggtttagcttttaaaaacctgaaaggggaagcaaaaaccaaaatgtgtgactgggctttggaggagactggagcctcagccctgtcctggccacgggccgctggggctggtgtgggtgggccttgtgtgctggatttgtagcttatcttccgtgttgtctttggacctgttttagtaaacccgtttttcattttattagatgtggtcacttagaaatgcaaacttgctgccgaccgcgggctgctcctgcgttcttggagctcctggcgcgtttctcggagctcccggctcctcagcgggtgggaacctcggggcccaggggtggagctggcgtccgcgggtgctggtctggcctggccgtgtggtgatgaggcttagcggggccagtgacggccgtggctcaggatccataagtcggggtttggtctcagcatttacaaatgtgtttacagtcagaatgaaacacattccttctagaaagtgcttgggggtttttgctgccctggaagccaggagcctgctcactccaaccacaagtcgcccttgactgcggcggccgcgagcggggcgggggctgccggtgccctccgcaggccgggcctcctgggcgcccctcggtgctgcaggctggggggccttgggtacctgcagagccttttctctgaattccttatgtccggtgggccagaagcccgtcctcctatgctggtggaaggcggaggaccggagtccctgcagaaggccccgtgcactcgggggcctccctcacatcccgtgccccctgcgctggccttcacagtaggtaatggctccggcccgggtgttcgctgtccacggaacatggcagaggggcaccccggcccggaaagacgccagagccagcaggggctgtttcgggccgcgtggctccccgggtctcggccgtctcccctcttctgcgtctgttccgtgacttcgcctgggtgggatgtaccgcaggtgcatcgcgtcgaggtggggcacggccgccggcaagaaacccaccctgtccggaggcgggcgtgagacaagcccagcccgcacgcgctcatctttcttcgttttttgatcagtttattcagaattgctctataatttaccaattgtatgtatttaacctattcttgtggaaaaaaaaggtctttcattatatctttatttctgaatttc

SEQ ID NO: 2301 - protein, 123 aa, Homo sapiens
MSGGPEARPPMLVEGGGPESLQKAPCTRGPPSHPVPPALAFTVGNGSGPGVRCPRNMAEGHPGPERRQSQQGLFRAAWLPGSRPSPLFCVCSVTSPGWDVPQVHRVEVGHGRRQETHPVRRRA

SEQ ID NO: 2302 - DNA, 1623 bp, Homo sapiens
gtcgtggagactgctttgctctgtggcctcgtgttccccgctgcctctcggtcttgcttttatccacatccagcctcatccacacccgccaggggctcctccttgggatcttggggtgggccaaggcggtaccagttgcacagacggcccgggccttgtcagcggggagcccggtgctttggtggcttgtttttccctgtctttaataggaatcaagtgtgatatcatgaattgatggggggaagattaagaaggctttgtaagactataagttagtttgctgtgaagagtgtgcttattaaatgctttctgcaacacgaagactgcagcccttgactttgaaatcatctgtttttagaatcttgaaagaattgaaattagttttctggctgattcccttcccttccttcctagaaaagacaactggcagtgcagagtttagcttttaaaaacctgaaaggggaagcaaaaaccaaaatgtgtgactgggctttggaggagactggagcctcagccctgtcctggccacgggccgctggggctggtgtgggtgggccttgtgtgctggatttgtagcttatcttccgtgttgtctttggacctgttttagtaaacccgtttttcattttattagatgtggtcacttagaaatgcaaacttgctgccgaccgcgggctgctcctgcgttcttggagctcctggcgcgtttctcggagctcccggctcctcagcgggtgggaacctcggggcccaggggtggagctggcgtccgcgggtgctggtctggcctggccgtgtggtgatgaggcttagcggggccagtgacggccgtggctcaggatccataagtcggggtttggtctcagcatttacaaatgtgtttacagtcagaatgaaacacattccttctagaaagtgcttgggggtttttgctgccctggaagccaggagcctgctcactccaaccacaagtcgcccttgactgcggcggccgcgagcggggcgggggctgccggtgccctccgcaggccgggcctcctgggcgcccctcggtgctgcaggctggggggccttgggtacctgcagagccttttctctgaattccttatgtccggtgggccagaagcccgtcctcctatgctggtggaaggcggaggaccggagtccctgcagaaggccccgtgcactcgggggcctccctcacatcccgtgccccctgcgctggccttcacagtaggtaatggctccggcccgggtgttcgctgtccacggaacatggcagaggggcaccccggcccggaaagacgccagagccagcaggggctgtttcgggccgcgtggctccccgggtctcggccgtctcccctcttctgcgtctgttccgtgacttcgcctgggtgggatgtaccgcaggtgcatcgcgtcgaggtggggcacggccgccggcaagaaacccaccctgtccggaggcgggcgtgagacaagcccagcccgcacgcgctcatctttcttcgttttttgatcagtttattcagaattgctctataatttaccaattgtatgtatttaacctattcttgtggaaaaaaaaggtctttcattatatctttatttctgaatttc

SEQ ID NO: 2303 - protein, 48 aa, Homo sapiens [sequence omitted]

SEQ ID NO: 2304 - DNA, 2444 bp, Homo sapiens
ttttttttttttttttttttcttgagacggagtctcgctgtgtctccaggctggagtgcagtggcgcaatctcggctcactgcaagctccgccccccggggttcacgccattctcctgtctcagcctcccaagtagctgggactacaggcgcccgccaccacgcccggctaatttttttttttgtatttttagtagagacggggtttcaccgtgttaaccaggatgtcttgatttcctgacctcgtgatccgcccgcctgggcctcccaaagtgctgggattacaggcgtgagccaccgcgcccggccgcagctgcctttcttctcagtaggcggggctgggtggagttcccaccttgtcccaggcactgtcgtggagactgctttgctctgtggcctcgtgttccccgctgcctctcggtcttgcttttatccacatccagcctcatccacacccgccaggggctcctccttgggatcttggggtgggccaaggcggtaccagttgcacagacggcccgggccttgtcagcggggagcccggtgctttggtggcttgtttttccctgtctttaataggaatcaagtgtgatatcatgaattgatggggggaagattaagaaggctttgtaagactataagttagtttgctgtgaagagtgtgcttattaaatgctttctgcaacacgaagactgcagcccttgactttgaaatcatctgtttttagaatcttgaaagaattgaaattagttttctggctgattcccttcccttccttcctagaaaagacaactggcagtgcagagtttagcatttaatttgaaagataaagtcttttgtgaattatttcctgaagtcgtggaggagattaaacaaaaacagaaagcacaagacgaactcagtagcagaccccagactctccccttgccagacgtggttccagacggggagacgcacctcgtccagaacgggattcagctgctcaacgggcatgcgccgggggccgtcccaaacctcgcagggctccagcaggccaaccggcaccacggactcctgggtggcgccctggcgaacttgtttgtgatagttgggtttgcagcctttgcttacacggtcaagtacgtgctgaggagcatcgcgcaggagtgaggcccaggcgccgagacccaaggcgccactgagggcaccgcgcaccagagcgtgacctcggcaggctggacacactgcccagcacaggcagacccaccaggctcctaggtttagcttttaaaaacctgaaaggggaagcaaaaaccaaaatgtgtgactgggctttggaggagactggagcctcagccctgtcctggccacgggccgctggggctggtgtgggtgggccttgtgtgctggatttgtagcttatcttccgtgttgtctttggacctgttttagtaaacccgtttttcattttattagatgtggtcacttagaaatgcaaacttgctgccgaccgcgggctgctcctgcgttcttggagctcctggcgcgtttctcggagctcccggctcctcagcgggtgggaacctcggggcccaggggtggagctggcgtccgcgggtgctggtctggcctggccgtgtggtgatgaggcttagcggggccagtgacggccgtggctcaggatccataagtcggggtttggtctcagcatttacaaatgtgtttacagtcagaatgaaacacattccttctagaaagtgcttgggggtttttgctgccctggaagccaggagcctgctcactccaaccacaagtcgcccttgactgcggcggccgcgagcggggcgggggctgccggtgccctccgcaggccgggcctcctgggcgcccctcggtgctgcaggctggggggccttgggtacctgcagagccttttctctgaattccttatgtccggtgggccagaagcccgtcctcctatgctggtggaaggcggaggaccggagtccctgcagaaggccccgtgcactcgggggcctccctcacatcccgtgccccctgcgctggccttcacagtaggtaatggctccggcccgggtgttcgctgtccacggaacatggcagaggggcaccccggcccggaaagacgccagagccagcaggggctgtttcgggccgcgtggctccccgggtctcggccgtctcccctcttctgcgtctgttccgtgacttcgcctgggtgggatgtaccgcaggtgcatcgcgtcgaggtggggcacggccgccggcaagaaacccaccctgtccggaggcgggcgtgagacaagcccagcccgcacgcgctcatctttcttcgttttttgatcagtttattcagaattgctctataatttaccaattgtatgtatttaacctattcttgtggaaaaaaaaggtctttcattatatctttatttctgaatttc

SEQ ID NO: 2305 - protein, 123 aa, Homo sapiens; identical to SEQ ID NO: 2301

SEQ ID NO: 2306 - DNA, 2416 bp, Homo sapiens
gcggccatcttggaggctgaggcggcggcggcggcgctgcggcgggttcggtgggcccaatcccggggcggtgcggctgtttcgggcgcgggccccgcttttccgcaccctgctccggcctcgactacggcgagcctgagcgcggcggcggcccacgcgcagcgacagggagaggtgagcgcgctcgcaggcctgcgccgggtcctcgggcccgctcgtcccccctgccggagccggccacagcggcggcccggggctgctggggaccctgcgcgacgcttctccgttcgcgcccgccgcccgcggggccccggcccgagcctgcctgcgcggaacccgagatgagcagcaccagcagtaagagggctccgaccacggcaacccagaggctgaagcaggactaccttcgcattaagaaagacccggtgccttacatctgtgccgagcccctcccttcgaatattctcgagtggcactatgtcgtccgaggcccagagatgaccccttatgaaggtggctattatcatggaaaactaatttttcccagagaatttcctttcaaacctcccagtatctatatgatcactcccaacgggaggtttaagtgcaacaccaggctgtgtctttctatcacggatttccacccggacacgtggaacccggcctggtctgtctccaccatcctgactgggctcctgagcttcatggtggagaagggccccaccctgggcagtatagagacgtcggacttcacgaaaagacaactggcagtgcagagtttagcatttaatttgaaagataaagtcttttgtgaattatttcctgaagtcgtggaggagattaaacaaaaacagaaagcacaagacgaactcagtagcagaccccagactctccccttgccagacgtggttccagacggggagacgcacctcgtccagaacgggattcagctgctcaacgggcatgcgccgggggccgtcccaaacctcgcagggctccagcaggccaaccggcaccacggactcctgggtggcgccctggcgaacttgtttgtgatagttgggtttgcagcctttgcttacacggtcaagtacgtgctgaggagcatcgcgcaggagtgaggcccaggcgccgagacccaaggcgccactgagggcaccgcgcaccagagcgtgacctcggcaggctggacacactgcccagcacaggcagacccaccaggctcctaggtttagcttttaaaaacctgaaaggggaagcaaaaaccaaaatgtgtgactgggctttggaggagactggagcctcagccctgtcctggccacgggccgctggggctggtgtgggtgggccttgtgtgctggatttgtagcttatcttccgtgttgtctttggacctgttttagtaaacccgtttttcattttattagatgtggtcacttagaaatgcaaacttgctgccgaccgcgggctgctcctgcgttcttggagctcctggcgcgtttctcggagctcccggctcctcagcgggtgggaacctcggggcccaggggtggagctggcgtccgcgggtgctggtctggcctggccgtgtggtgatgaggcttagcggggccagtgacggccgtggctcaggatccataagtcggggtttggtctcagcatttacaaatgtgtttacagtcagaatgaaacacattccttctagaaagtgcttgggggtttttgctgccctggaagccaggagcctgctcactccaaccacaagtcgcccttgactgcggcggccgcgagcggggcgggggctgccggtgccctccgcaggccgggcctcctgggcgcccctcggtgctgcaggctggggggccttgggtacctgcagagccttttctctgaattccttatgtccggtgggccagaagcccgtcctcctatgctggtggaaggcggaggaccggagtccctgcagaaggccccgtgcactcgggggcctccctcacatcccgtgccccctgcgctggccttcacagtaggtaatggctccggcccgggtgttcgctgtccacggaacatggcagaggggcaccccggcccggaaagacgccagagccagcaggggctgtttcgggccgcgtggctccccgggtctcggccgtctcccctcttctgcgtctgttccgtgacttcgcctgggtgggatgtaccgcaggtgcatcgcgtcgaggtggggcacggccgccggcaagaaacccaccctgtccggaggcgggcgtgagacaagcccagcccgcacgcgctcatctttcttcgttttttgatcagtttattcagaattgctctataatttaccaattgtatgtatttaacctattcttgtggaaaaaaaaggtctttcattatatctttatttctgaatttc

SEQ ID NO: 2307 - protein, 259 aa, Homo sapiens; identical to SEQ ID NO: 18

SEQ ID NO: 2308 - DNA, 2540 bp, Homo sapiens
gagcggccatcttggaggctgaggcggcggcggcggcgctgcggcgggttcggtgggcccaatcccggggcggtgcggctgtttcgggcgcgggccccgcttttccgcaccctgctccggcctcgactacggcgagcctgagcgcggcggcggcccacgcgcagcgacagggagaggtgagcgcgctcgcaggcctgcgccgggtcctcgggcccgctcgtcccccctgccggagccggccacagcggcggcccggggctgctggggaccctgcgcgacgcttctccgttcgcgcccgccgcccgcggggccccggcccgagcctgcctgcgcggaacccgaggtcggttacggcgggctcccggagctccgggtcagggtcatgtcggggacttgaccactcggccgggtttcccgtcagctgggacacttgcagctgccccaggacgggcagcctcgatcctgatgagcagcaccagcagtaagagggctccgaccacggcaacccagaggctgaagcaggactaccttcgcattaagaaagacccggtgccttacatctgtgccgagcccctcccttcgaatattctcgagtggcactatgtcgtccgaggcccagagatgaccccttatgaaggtggctattatcatggaaaactaatttttcccagagaatttcctttcaaacctcccagtatctatatgatcactcccaacgggaggtttaagtgcaacaccaggctgtgtctttctatcacggatttccacccggacacgtggaacccggcctggtctgtctccaccatcctgactgggctcctgagcttcatggtggagaagggccccaccctgggcagtatagagacgtcggacttcacgaaaagacaactggcagtgcagagtttagcatttaatttgaaagataaagtcttttgtgaattatttcctgaagtcgtggaggagattaaacaaaaacagaaagcacaagacgaactcagtagcagaccccagactctccccttgccagacgtggttccagacggggagacgcacctcgtccagaacgggattcagctgctcaacgggcatgcgccgggggccgtcccaaacctcgcagggctccagcaggccaaccggcaccacggactcctgggtggcgccctggcgaacttgtttgtgatagttgggtttgcagcctttgcttacacggtcaagtacgtgctgaggagcatcgcgcaggagtgaggcccaggcgccgagacccaaggcgccactgagggcaccgcgcaccagagcgtgacctcggcaggctggacacactgcccagcacaggcagacccaccaggctcctaggtttagcttttaaaaacctgaaaggggaagcaaaaaccaaaatgtgtgactgggctttggaggagactggagcctcagccctgtcctggccacgggccgctggggctggtgtgggtgggccttgtgtgctggatttgtagcttatcttccgtgttgtctttggacctgttttagtaaacccgtttttcattttattagatgtggtcacttagaaatgcaaacttgctgccgaccgcgggctgctcctgcgttcttggagctcctggcgcgtttctcggagctcccggctcctcagcgggtgggaacctcggggcccaggggtggagctggcgtccgcgggtgctggtctggcctggccgtgtggtgatgaggcttagcggggccagtgacggccgtggctcaggatccataagtcggggtttggtctcagcatttacaaatgtgtttacagtcagaatgaaacacattccttctagaaagtgcttgggggtttttgctgccctggaagccaggagcctgctcactccaaccacaagtcgcccttgactgcggcggccgcgagcggggcgggggctgccggtgccctccgcaggccgggcctcctgggcgcccctcggtgctgcaggctggggggccttgggtacctgcagagccttttctctgaattccttatgtccggtgggccagaagcccgtcctcctatgctggtggaaggcggaggaccggagtccctgcagaaggccccgtgcactcgggggcctccctcacatcccgtgccccctgcgctggccttcacagtaggtaatggctccggcccgggtgttcgctgtccacggaacatggcagaggggcaccccggcccggaaagacgccagagccagcaggggctgtttcgggccgcgtggctccccgggtctcggccgtctcccctcttctgcgtctgttccgtgacttcgcctgggtgggatgtaccgcaggtgcatcgcgtcgaggtggggcacggccgccggcaagaaacccaccctgtccggaggcgggcgtgagacaagcccagcccgcacgcgctcatctttcttcgttttttgatcagtttattcagaattgctctataatttaccaattgtatgtatttaacctattcttgtggaaaaaaaaggtctttcattatatctttatttctgaatttc

SEQ ID NO: 2309 - protein, 259 aa, Homo sapiens; identical to SEQ ID NO: 18

SEQ ID NO: 2310 - DNA, 2041 bp, Homo sapiens
gcgagcggccatcttggaggctgaggcggcggcggcggcgctgcggcgggttcggtgggcccaatcccggggcggtgcggctgtttcgggcgcgggccccgcttttccgcaccctgctccggcctcgactacggcgagcctgagcgcggcggcggcccacgcgcagcgacagggagaggcactatgtcgtccgaggcccagagatgaccccttatgaaggtggctattatcatggaaaactaatttttcccagagaatttcctttcaaacctcccagtatctatatgatcactcccaacgggaggtttaagtgcaacaccaggctgtgtctttctatcacggatttccacccggacacgtggaacccggcctggtctgtctccaccatcctgactgggctcctgagcttcatggtggagaagggccccaccctgggcagtatagagacgtcggacttcacggagattaaacaaaaacagaaagcacaagacgaactcagtagcagaccccagactctccccttgccagacgtggttccagacggggagacgcacctcgtccagaacgggattcagctgctcaacgggcatgcgccgggggccgtcccaaacctcgcagggctccagcaggccaaccggcaccacggactcctgggtggcgccctggcgaacttgtttgtgatagttgggtttgcagcctttgcttacacggtcaagtacgtgctgaggagcatcgcgcaggagtgaggcccaggcgccgagacccaaggcgccactgagggcaccgcgcaccagagcgtgacctcggcaggctggacacactgcccagcacaggcagacccaccaggctcctaggtttagcttttaaaaacctgaaaggggaagcaaaaaccaaaatgtgtgactgggctttggaggagactggagcctcagccctgtcctggccacgggccgctggggctggtgtgggtgggccttgtgtgctggatttgtagcttatcttccgtgttgtctttggacctgttttagtaaacccgtttttcattttattagatgtggtcacttagaaatgcaaacttgctgccgaccgcgggctgctcctgcgttcttggagctcctggcgcgtttctcggagctcccggctcctcagcgggtgggaacctcggggcccaggggtggagctggcgtccgcgggtgctggtctggcctggccgtgtggtgatgaggcttagcggggccagtgacggccgtggctcaggatccataagtcggggtttggtctcagcatttacaaatgtgtttacagtcagaatgaaacacattccttctagaaagtgcttgggggtttttgctgccctggaagccaggagcctgctcactccaaccacaagtcgcccttgactgcggcggccgcgagcggggcgggggctgccggtgccctccgcaggccgggcctcctgggcgcccctcggtgctgcaggctggggggccttgggtacctgcagagccttttctctgaattccttatgtccggtgggccagaagcccgtcctcctatgctggtggaaggcggaggaccggagtccctgcagaaggccccgtgcactcgggggcctccctcacatcccgtgccccctgcgctggccttcacagtaggtaatggctccggcccgggtgttcgctgtccacggaacatggcagaggggcaccccggcccggaaagacgccagagccagcaggggctgtttcgggccgcgtggctccccgggtctcggccgtctcccctcttctgcgtctgttccgtgacttcgcctgggtgggatgtaccgcaggtgcatcgcgtcgaggtggggcacggccgccggcaagaaacccaccctgtccggaggcgggcgtgagacaagcccagcccgcacgcgctcatctttcttcgttttttgatcagtttattcagaattgctctataatttaccaattgtatgtatttaacctattcttgtggaaaaaaaaggtctttcattatatctttatttctgaatttc

SEQ ID NO: 2311 - protein, 180 aa, Homo sapiens [sequence omitted]

SEQ ID NO: 2312 - DNA, 2393 bp, Homo sapiens
ggttccgccccgcgagcggccatcttggaggctgaggcggcggcggcggcgctgcggcgggttcggtgggcccaatcccggggcggtgcggctgtttcgggcgcgggccccgcttttccgcaccctgctccggcctcgactacggcgagcctgagcgcggcggcggcccacgcgcagcgacagggagagatgagcagcaccagcagtaagagggctccgaccacggcaacccagaggctgaagcaggactaccttcgcattaagaaagacccggtgccttacatctgtgccgagcccctcccttcgaatattctcgagtggtaaggctccgcgccactgatcgccctgcgctgactgtcgctgccacgcaggcctctgccggcccctgctgggcgagcctggtgccccagtcatggcattggcaaggtgctcctgcaccctcccccggggcactatgtcgtccgaggcccagagatgaccccttatgaaggtggctattatcatggaaaactaatttttcccagagaatttcctttcaaacctcccagtatctatatgatcactcccaacgggaggtttaagtgcaacaccaggctgtgtctttctatcacggatttccacccggacacgtggaacccggcctggtctgtctccaccatcctgactgggctcctgagcttcatggtggagaagggccccaccctgggcagtatagagacgtcggacttcacgaaaagacaactggcagtgcagagtttagcatttaatttgaaagataaagtcttttgtgaattatttcctgaagtcgtggaggagattaaacaaaaacagaaagcacaagacgaactcagtagcagaccccagactctccccttgccagacgtggttccagacggggagacgcacctcgtccagaacgggattcagctgctcaacgggcatgcgccgggggccgtcccaaacctcgcagggctccagcaggccaaccggcaccacggactcctgggtggcgccctggcgaacttgtttgtgatagttgggtttgcagcctttgcttacacggtcaagtacgtgctgaggagcatcgcgcaggagtgaggcccaggcgccgagacccaaggcgccactgagggcaccgcgcaccagagcgtgacctcggcaggctggacacactgcccagcacaggcagacccaccaggctcctaggtttagcttttaaaaacctgaaaggggaagcaaaaaccaaaatgtgtgactgggctttggaggagactggagcctcagccctgtcctggccacgggccgctggggctggtgtgggtgggccttgtgtgctggatttgtagcttatcttccgtgttgtctttggacctgttttagtaaacccgtttttcattttattagatgtggtcacttagaaatgcaaacttgctgccgaccgcgggctgctcctgcgttcttggagctcctggcgcgtttctcggagctcccggctcctcagcgggtgggaacctcggggcccaggggtggagctggcgtccgcgggtgctggtctggcctggccgtgtggtgatgaggcttagcggggccagtgacggccgtggctcaggatccataagtcggggtttggtctcagcatttacaaatgtgtttacagtcagaatgaaacacattccttctagaaagtgcttgggggtttttgctgccctggaagccaggagcctgctcactccaaccacaagtcgcccttgactgcggcggccgcgagcggggcgggggctgccggtgccctccgcaggccgggcctcctgggcgcccctcggtgctgcaggctggggggccttgggtacctgcagagccttttctctgaattccttatgtccggtgggccagaagcccgtcctcctatgctggtggaaggcggaggaccggagtccctgcagaaggccccgtgcactcgggggcctccctcacatcccgtgccccctgcgctggccttcacagtaggtaatggctccggcccgggtgttcgctgtccacggaacatggcagaggggcaccccggcccggaaagacgccagagccagcaggggctgtttcgggccgcgtggctccccgggtctcggccgtctcccctcttctgcgtctgttccgtgacttcgcctgggtgggatgtaccgcaggtgcatcgcgtcgaggtggggcacggccgccggcaagaaacccaccctgtccggaggcgggcgtgagacaagcccagcccgcacgcgctcatctttcttcgttttttgatcagtttattcagaattgctctataatttaccaattgtatgtatttaacctattcttgtggaaaaaaaaggtctttcattatatctttatttctgaatttc

SEQ ID NO: 2313 - protein, 207 aa, Homo sapiens; identical to SEQ ID NO: 22

SEQ ID NO: 2314 - DNA, 2312 bp, Homo sapiens
ggttccgccccgcgagcggccatcttggaggctgaggcggcggcggcggcgctgcggcgggttcggtgggcccaatcccggggcggtgcggctgtttcgggcgcgggccccgcttttccgcaccctgctccggcctcgactacggcgagcctgagcgcggcggcggcccacgcgcagcgacagggagagatgagcagcaccagcagtaagagggctccgaccacggcaacccagaggctgaagcaggactaccttcgcattaagaaagacccggtgccttacatctgtgccgagcccctcccttcgaatattctcgagtggttcaagcgattctcctggctcagcctcctgagtagctgggattacaggcactatgtcgtccgaggcccagagatgaccccttatgaaggtggctattatcatggaaaactaatttttcccagagaatttcctttcaaacctcccagtatctatatgatcactcccaacgggaggtttaagtgcaacaccaggctgtgtctttctatcacggatttccacccggacacgtggaacccggcctggtctgtctccaccatcctgactgggctcctgagcttcatggtggagaagggccccaccctgggcagtatagagacgtcggacttcacgaaaagacaactggcagtgcagagtttagcatttaatttgaaagataaagtcttttgtgaattatttcctgaagtcgtggaggagattaaacaaaaacagaaagcacaagacgaactcagtagcagaccccagactctccccttgccagacgtggttccagacggggagacgcacctcgtccagaacgggattcagctgctcaacgggcatgcgccgggggccgtcccaaacctcgcagggctccagcaggccaaccggcaccacggactcctgggtggcgccctggcgaacttgtttgtgatagttgggtttgcagcctttgcttacacggtcaagtacgtgctgaggagcatcgcgcaggagtgaggcccaggcgccgagacccaaggcgccactgagggcaccgcgcaccagagcgtgacctcggcaggctggacacactgcccagcacaggcagacccaccaggctcctaggtttagcttttaaaaacctgaaaggggaagcaaaaaccaaaatgtgtgactgggctttggaggagactggagcctcagccctgtcctggccacgggccgctggggctggtgtgggtgggccttgtgtgctggatttgtagcttatcttccgtgttgtctttggacctgttttagtaaacccgtttttcattttattagatgtggtcacttagaaatgcaaacttgctgccgaccgcgggctgctcctgcgttcttggagctcctggcgcgtttctcggagctcccggctcctcagcgggtgggaacctcggggcccaggggtggagctggcgtccgcgggtgctggtctggcctggccgtgtggtgatgaggcttagcggggccagtgacggccgtggctcaggatccataagtcggggtttggtctcagcatttacaaatgtgtttacagtcagaatgaaacacattccttctagaaagtgcttgggggtttttgctgccctggaagccaggagcctgctcactccaaccacaagtcgcccttgactgcggcggccgcgagcggggcgggggctgccggtgccctccgcaggccgggcctcctgggcgcccctcggtgctgcaggctggggggccttgggtacctgcagagccttttctctgaattccttatgtccggtgggccagaagcccgtcctcctatgctggtggaaggcggaggaccggagtccctgcagaaggccccgtgcactcgggggcctccctcacatcccgtgccccctgcgctggccttcacagtaggtaatggctccggcccgggtgttcgctgtccacggaacatggcagaggggcaccccggcccggaaagacgccagagccagcaggggctgtttcgggccgcgtggctccccgggtctcggccgtctcccctcttctgcgtctgttccgtgacttcgcctgggtgggatgtaccgcaggtgcatcgcgtcgaggtggggcacggccgccggcaagaaacccaccctgtccggaggcgggcgtgagacaagcccagcccgcacgcgctcatctttcttcgttttttgatcagtttattcagaattgctctataatttaccaattgtatgtatttaacctattcttgtggaaaaaaaaggtctttcattatatctttatttctgaatttc

SEQ ID NO: 2315 - protein, 275 aa, Homo sapiens; identical to SEQ ID NO: 20

SEQ ID NO: 2316 - DNA, 2134 bp, Homo sapiens
tggttccgccccgcgagcggccatcttggaggctgaggcggcggcggcggcgctgcggcgggttcggtgggcccaatcccggggcggtgcggctgtttcgggcgcgggccccgcttttccgcaccctgctccggcctcgactacggcgagcctgagcgcggcggcggcccacgcgcagcgacagggagaggcactatgtcgtccgaggcccagagatgaccccttatgaaggtggctattatcatggaaaactaatttttcccagagaatttcctttcaaacctcccagtatctatatgatcactcccaacgggaggtttaagtgcaacaccaggctgtgtctttctatcacggatttccacccggacacgtggaacccggcctggtctgtctccaccatcctgactgggctcctgagcttcatggtggagaagggccccaccctgggcagtatagagacgtcggacttcacgaaaagacaactggcagtgcagagtttagcatttaatttgaaagataaagtcttttgtgaattatttcctgaagtcgtggaggagattaaacaaaaacagaaagcacaagacgaactcagtagcagaccccagactctccccttgccagacgtggttccagacggggagacgcacctcgtccagaacgggattcagctgctcaacgggcatgcgccgggggccgtcccaaacctcgcagggctccagcaggccaaccggcaccacggactcctgggtggcgccctggcgaacttgtttgtgatagttgggtttgcagcctttgcttacacggtcaagtacgtgctgaggagcatcgcgcaggagtgaggcccaggcgccgagacccaaggcgccactgagggcaccgcgcaccagagcgtgacctcggcaggctggacacactgcccagcacaggcagacccaccaggctcctaggtttagcttttaaaaacctgaaaggggaagcaaaaaccaaaatgtgtgactgggctttggaggagactggagcctcagccctgtcctggccacgggccgctggggctggtgtgggtgggccttgtgtgctggatttgtagcttatcttccgtgttgtctttggacctgttttagtaaacccgtttttcattttattagatgtggtcacttagaaatgcaaacttgctgccgaccgcgggctgctcctgcgttcttggagctcctggcgcgtttctcggagctcccggctcctcagcgggtgggaacctcggggcccaggggtggagctggcgtccgcgggtgctggtctggcctggccgtgtggtgatgaggcttagcggggccagtgacggccgtggctcaggatccataagtcggggtttggtctcagcatttacaaatgtgtttacagtcagaatgaaacacattccttctagaaagtgcttgggggtttttgctgccctggaagccaggagcctgctcactccaaccacaagtcgcccttgactgcggcggccgcgagcggggcgggggctgccggtgccctccgcaggccgggcctcctgggcgcccctcggtgctgcaggctggggggccttgggtacctgcagagccttttctctgaattccttatgtccggtgggccagaagcccgtcctcctatgctggtggaaggcggaggaccggagtccctgcagaaggccccgtgcactcgggggcctccctcacatcccgtgccccctgcgctggccttcacagtaggtaatggctccggcccgggtgttcgctgtccacggaacatggcagaggggcaccccggcccggaaagacgccagagccagcaggggctgtttcgggccgcgtggctccccgggtctcggccgtctcccctcttctgcgtctgttccgtgacttcgcctgggtgggatgtaccgcaggtgcatcgcgtcgaggtggggcacggccgccggcaagaaacccaccctgtccggaggcgggcgtgagacaagcccagcccgcacgcgctcatctttcttcgttttttgatcagtttattcagaattgctctataatttaccaattgtatgtatttaacctattcttgtggaaaaaaaaggtctttcattatatctttatttctgaatttc

SEQ ID NO: 2317 - protein, 207 aa, Homo sapiens; identical to SEQ ID NO: 22

SEQ ID NO: 2318 - DNA, 2396 bp, Homo sapiens
aagctaggctggttccgccccgcgagcggccatcttggaggctgaggcggcggcggcggcgctgcggcgggttcggtgggcccaatcccggggcggtgcggctgtttcgggcgcgggccccgcttttccgcaccctgctccggcctcgactacggcgagcctgagcgcggcggcggcccacgcgcagcgacagggagagatgagcagcaccagcagtaagagggctccgaccacggcaacccagaggctgaagcaggactaccttcgcattaagaaagacccggtgccttacatctgtgccgagcccctcccttcgaatattctcgagtggcactatgtcgtccgaggcccagagatgaccccttatgaaggaatcccagttctggatcatctgcaactagggcagccagagtgcgggagtacatctgtagggtgggccctccatcatcgtgtcattgcccatgaccagcgttggggatgccagcaggccgtggtggctattatcatggaaaactaatttttcccagagaatttcctttcaaacctcccagtatctatatgatcactcccaacgggaggtttaagtgcaacaccaggctgtgtctttctatcacggatttccacccggacacgtggaacccggcctggtctgtctccaccatcctgactgggctcctgagcttcatggtggagaagggccccaccctgggcagtatagagacgtcggacttcacgaaaagacaactggcagtgcagagtttagcatttaatttgaaagataaagtcttttgtgaattatttcctgaagtcgtggaggagattaaacaaaaacagaaagcacaagacgaactcagtagcagaccccagactctccccttgccagacgtggttccagacggggagacgcacctcgtccagaacgggattcagctgctcaacgggcatgcgccgggggccgtcccaaacctcgcagggctccagcaggccaaccggcaccacggactcctgggtggcgccctggcgaacttgtttgtgatagttgggtttgcagcctttgcttacacggtcaagtacgtgctgaggagcatcgcgcaggagtgaggcccaggcgccgagacccaaggcgccactgagggcaccgcgcaccagagcgtgacctcggcaggctggacacactgcccagcacaggcagacccaccaggctcctaggtttagcttttaaaaacctgaaaggggaagcaaaaaccaaaatgtgtgactgggctttggaggagactggagcctcagccctgtcctggccacgggccgctggggctggtgtgggtgggccttgtgtgctggatttgtagcttatcttccgtgttgtctttggacctgttttagtaaacccgtttttcattttattagatgtggtcacttagaaatgcaaacttgctgccgaccgcgggctgctcctgcgttcttggagctcctggcgcgtttctcggagctcccggctcctcagcgggtgggaacctcggggcccaggggtggagctggcgtccgcgggtgctggtctggcctggccgtgtggtgatgaggcttagcggggccagtgacggccgtggctcaggatccataagtcggggtttggtctcagcatttacaaatgtgtttacagtcagaatgaaacacattccttctagaaagtgcttgggggtttttgctgccctggaagccaggagcctgctcactccaaccacaagtcgcccttgactgcggcggccgcgagcggggcgggggctgccggtgccctccgcaggccgggcctcctgggcgcccctcggtgctgcaggctggggggccttgggtacctgcagagccttttctctgaattccttatgtccggtgggccagaagcccgtcctcctatgctggtggaaggcggaggaccggagtccctgcagaaggccccgtgcactcgggggcctccctcacatcccgtgccccctgcgctggccttcacagtaggtaatggctccggcccgggtgttcgctgtccacggaacatggcagaggggcaccccggcccggaaagacgccagagccagcaggggctgtttcgggccgcgtggctccccgggtctcggccgtctcccctcttctgcgtctgttccgtgacttcgcctgggtgggatgtaccgcaggtgcatcgcgtcgaggtggggcacggccgccggcaagaaacccaccctgtccggaggcgggcgtgagacaagcccagcccgcacgcgctcatctttcttcgttttttgatcagtttattcagaattgctctataatttaccaattgtatgtatttaacctattcttgtggaaaaaaaaggtctttcattatatctttatttctgaatttc

SEQ ID NO: 2319 - protein, 207 aa, Homo sapiens
MPAGRGGYYHGKLIFPREFPFKPPSIYMITPNGRFKCNTRLCLSITDFHPDTWNPAWSVSTILTGLLSFMVEKGPTLGSIETSDFTKRQLAVQSLAFNLKDKVFCELFPEVVEEIKQKQKAQDELSSRPQTLPLPDVVPDGETHLVQNGIQLLNGHAPGAVPNLAGLQQANRHHGLLGGALANLFVIVGFAAFAYTVKYVLRSIAQE

SEQ ID NO: 2320 - DNA, 2198 bp, Homo sapiens
agcagaagctaggctggttccgccccgcgagcggccatcttggaggctgaggcggcggcggcggcgctgcggcgggttcggtgggcccaatcccggggcggtgcggctgtttcgggcgcgggccccgcttttccgcaccctgctccggcctcgactacggcgagcctgagcgcggcggcggcccacgcgcagcgacagggagagatgagcagcaccagcagtaagagggctccgaccacggcaacccagaggctgaagcaggactaccttcgcattaagaaagacccggtgccttacatctgtgccgagcccctcccttcgaatattctcgagtggcactatgtcgtccgaggcccagagatgaccccttatgaaggtggctattatcatggaaaactaatttttcccagagaatttcctttcaaacctcccagtatctatatgatcactcccaacgggaggtttaagtgcaacaccaggctgtgtctttctatcacggatttccacccggacacgtggaacccggcctggtctgtctccaccatcctgactgggctcctgagcttcatggtggagaagggccccaccctgggcagtatagagacgtcggacttcacggagattaaacaaaaacagaaagcacaagacgaactcagtagcagaccccagactctccccttgccagacgtggttccagacggggagacgcacctcgtccagaacgggattcagctgctcaacgggcatgcgccgggggccgtcccaaacctcgcagggctccagcaggccaaccggcaccacggactcctgggtggcgccctggcgaacttgtttgtgatagttgggtttgcagcctttgcttacacggtcaagtacgtgctgaggagcatcgcgcaggagtgaggcccaggcgccgagacccaaggcgccactgagggcaccgcgcaccagagcgtgacctcggcaggctggacacactgcccagcacaggcagacccaccaggctcctaggtttagcttttaaaaacctgaaaggggaagcaaaaaccaaaatgtgtgactgggctttggaggagactggagcctcagccctgtcctggccacgggccgctggggctggtgtgggtgggccttgtgtgctggatttgtagcttatcttccgtgttgtctttggacctgttttagtaaacccgtttttcattttattagatgtggtcacttagaaatgcaaacttgctgccgaccgcgggctgctcctgcgttcttggagctcctggcgcgtttctcggagctcccggctcctcagcgggtgggaacctcggggcccaggggtggagctggcgtccgcgggtgctggtctggcctggccgtgtggtgatgaggcttagcggggccagtgacggccgtggctcaggatccataagtcggggtttggtctcagcatttacaaatgtgtttacagtcagaatgaaacacattccttctagaaagtgcttgggggtttttgctgccctggaagccaggagcctgctcactccaaccacaagtcgcccttgactgcggcggccgcgagcggggcgggggctgccggtgccctccgcaggccgggcctcctgggcgcccctcggtgctgcaggctggggggccttgggtacctgcagagccttttctctgaattccttatgtccggtgggccagaagcccgtcctcctatgctggtggaaggcggaggaccggagtccctgcagaaggccccgtgcactcgggggcctccctcacatcccgtgccccctgcgctggccttcacagtaggtaatggctccggcccgggtgttcgctgtccacggaacatggcagaggggcaccccggcccggaaagacgccagagccagcaggggctgtttcgggccgcgtggctccccgggtctcggccgtctcccctcttctgcgtctgttccgtgacttcgcctgggtgggatgtaccgcaggtgcatcgcgtcgaggtggggcacggccgccggcaagaaacccaccctgtccggaggcgggcgtgagacaagcccagcccgcacgcgctcatctttcttcgttttttgatcagtttattcagaattgctctataatttaccaattgtatgtatttaacctattcttgtggaaaaaaaaggtctttcattatatctttatttctgaatttc

SEQ ID NO: 2321 - protein, 232 aa, Homo sapiens
MSSTSSKRAPTTATQRLKQDYLRIKKDPVPYICAEPLPSNILEWHYVVRGPEMTPYEGGYYHGKLIFPREFPFKPPSIYMITPNGRFKCNTRLCLSITDFHPDTWNPAWSVSTILTGLLSFMVEKGPTLGSIETSDFTEIKQKQKAQDELSSRPQTLPLPDVVPDGETHLVQNGIQLLNGHAPGAVPNLAGLQQANRHHGLLGGALANLFVIVGFAAFAYTVKYVLRSIAQE

SEQ ID NO: 2322 - DNA, 3702 bp, Homo sapiens
agcagaagctaggctggttccgccccgcgagcggccatcttggaggctgaggcggcggcggcggcgctgcggcgggttcggtgggcccaatcccggggcggtgcggctgtttcgggcgcgggccccgcttttccgcaccctgctccggcctcgactacggcgagcctgagcgcggcggcggcccacgcgcagcgacagggagagatgagcagcaccagcagtaagagggctccgaccacggcaacccagaggctgaagcaggactaccttcgcattaagaaagacccggtgccttacatctgtgccgagcccctcccttcgaatattctcgagtggcactatgtcgtccgaggcccagagatgaccccttatgaaggtggctattatcatggaaaactaatttttcccagagaatttcctttcaaacctcccagtatctatatgatcactcccaacgggaggtttaagtgcaacaccaggctgtgtctttctatcacggatttccacccggacacgtggaacccggcctggtctgtctccaccatcctgactgggctcctgagcttcatggtggagaagggccccaccctgggcagtatagagacgtcggacttcacggtaagttttagagcctctccctggtgggccgtcagccttgtgtctggggggctgttctctgttcctgagttgcagctgcctttttttttttttttttttttttcttgagacggagtctcgctgtgtctccaggctggagtgcagtggcgcaatctcggctcactgcaagctccgccccccggggttcacgccattctcctgtctcagcctcccaagtagctgggactacaggcgcccgccaccacgcccggctaatttttttttttgtatttttagtagagacggggtttcaccgtgttaaccaggatgtcttgatttcctgacctcgtgatccgcccgcctgggcctcccaaagtgctgggattacaggcgtgagccaccgcgcccggccgcagctgcctttcttctcagtaggcggggctgggtggagttcccaccttgtcccaggcactgtcgtggagactgctttgctctgtggcctcgtgttccccgctgcctctcggtcttgcttttatccacatccagcctcatccacacccgccaggggctcctccttgggatcttggggtgggccaaggcggtaccagttgcacagacggcccgggccttgtcagcggggagcccggtgctttggtggcttgtttttccctgtctttaataggaatcaagtgtgatatcatgaattgatggggggaagattaagaaggctttgtaagactataagttagtttgctgtgaagagtgtgcttattaaatgctttctgcaacacgaagactgcagcccttgactttgaaatcatctgtttttagaatcttgaaagaattgaaattagttttctggctgattcccttcccttccttcctagaaaagacaactggcagtgcagagtttagcatttaatttgaaagataaagtcttttgtgaattatttcctgaagtcgtggaggtaagaaagacggaagtgggtttcgccttcccctgcgttaaaacacttgagtttcacctctttccaaagagtaaaatctgtgtcctgaagctgcagacctccccaggggatggctcctctcccccaggagccccgaggcaggggaggcagaaagcctgggctctggggggtggcctgcggacagctgtgctggtgggccgggggctgggcctgtcccacaggggcgtggagctcgtggttctgagcagccagctgggtggtgtctggggatagctgggaggcacagcggctgccatgtgggactgggactggagtgctccctggtcttggcctctgtggctcagccttgctctggtctgcctgagtgcaggggccaaggggcacagggccagtgaggccggccacgctcgggccctcacctgtgagatggggtcggaatttgacacagcctagggcttggttcttggtggtggaccgtggactcctgagaacgggagtgctggtcctgaaaggcgctggttggagaccagctgcttttctcgctgtttttctcttaggagattaaacaaaaacagaaagcacaagacgaactcagtagcagaccccagactctccccttgccagacgtggttccagacggggagacgcacctcgtccagaacgggattcagctgctcaacgggcatgcgccgggggccgtcccaaacctcgcagggctccagcaggccaaccggcaccacggactcctgggtggcgccctggcgaacttgtttgtgatagttgggtttgcagcctttgcttacacggtcaagtacgtgctgaggagcatcgcgcaggagtgaggcccaggcgccgagacccaaggcgccactgagggcaccgcgcaccagagcgtgacctcggcaggctggacacactgcccagcacaggcagacccaccaggctcctaggtttagcttttaaaaacctgaaaggggaagcaaaaaccaaaatgtgtgactgggctttggaggagactggagcctcagccctgtcctggccacgggccgctggggctggtgtgggtgggccttgtgtgctggatttgtagcttatcttccgtgttgtctttggacctgttttagtaaacccgtttttcattttattagatgtggtcacttagaaatgcaaacttgctgccgaccgcgggctgctcctgcgttcttggagctcctggcgcgtttctcggagctcccggctcctcagcgggtgggaacctcggggcccaggggtggagctggcgtccgcgggtgctggtctggcctggccgtgtggtgatgaggcttagcggggccagtgacggccgtggctcaggatccataagtcggggtttggtctcagcatttacaaatgtgtttacagtcagaatgaaacacattccttctagaaagtgcttgggggtttttgctgccctggaagccaggagcctgctcactccaaccacaagtcgcccttgactgcggcggccgcgagcggggcgggggctgccggtgccctccgcaggccgggcctcctgggcgcccctcggtgctgcaggctggggggccttgggtacctgcagagccttttctctgaattccttatgtccggtgggccagaagcccgtcctcctatgctggtggaaggcggaggaccggagtccctgcagaaggccccgtgcactcgggggcctccctcacatcccgtgccccctgcgctggccttcacagtaggtaatggctccggcccgggtgttcgctgtccacggaacatggcagaggggcaccccggcccggaaagacgccagagccagcaggggctgtttcgggccgcgtggctccccgggtctcggccgtctcccctcttctgcgtctgttccgtgacttcgcctgggtgggatgtaccgcaggtgcatcgcgtcgaggtggggcacggccgccggcaagaaacccaccctgtccggaggcgggcgtgagacaagcccagcccgcacgcgctcatctttcttcgttttttgatcagtttattcagaattgctctataatttaccaattgtatgtatttaacctattcttgtggaaaaaaaaggtctttcattatatctttatttctgaatttc

SEQ ID NO: 2323 - protein, 173 aa, Homo sapiens
MSSTSSKRAPTTATQRLKQDYLRIKKDPVPYICAEPLPSNILEWHYVVRGPEMTPYEGGYYHGKLIFPREFPFKPPSIYMITPNGRFKCNTRLCLSITDFHPDTWNPAWSVSTILTGLLSFMVEKGPTLGSIETSDFTVSFRASPWWAVSLVSGGLFSVPELQLPFFFFFFFS

SEQ ID NO: 2324 - DNA, 2295 bp, Homo sapiens
cggaccgcgcaccggaagcagaagctaggctggttccgccccgcgagcggccatcttggaggctgaggcggcggcggcggcgctgcggcgggttcggtgggcccaatcccggggcggtgcggctgtttcgggcgcgggccccgcttttccgcaccctgctccggcctcgactacggcgagcctgagcgcggcggcggcccacgcgcagcgacagggagagatgagcagcaccagcagtaagagggctccgaccacggcaacccagaggctgaagcaggactaccttcgcattaagaaagacccggtgccttacatctgtgccgagcccctcccttcgaatattctcgagtggcactatgtcgtccgaggcccagagatgaccccttatgaaggtggctattatcatggaaaactaatttttcccagagaatttcctttcaaacctcccagtatctatatgatcactcccaacgggaggtttaagtgcaacaccaggctgtgtctttctatcacggatttccacccggacacgtggaacccggcctggtctgtctccaccatcctgactgggctcctgagcttcatggtggagaagggccccaccctgggcagtatagagacgtcggacttcacgaaaagacaactggcagtgcagagtttagcatttaatttgaaagataaagtcttttgtgaattatttcctgaagtcgtggaggagattaaacaaaaacagaaagcacaagacgaactcagtagcagaccccagactctccccttgccagacgtggttccagacggggagacgcacctcgtccagaacgggattcagctgctcaacgggcatgcgccgggggccgtcccaaacctcgcagggctccagcaggccaaccggcaccacggactcctgggtggcgccctggcgaacttgtttgtgatagttgggtttgcagcctttgcttacacggtcaagtacgtgctgaggagcatcgcgcaggagtgaggcccaggcgccgagacccaaggcgccactgagggcaccgcgcaccagagcgtgacctcggcaggctggacacactgcccagcacaggcagacccaccaggctcctaggtttagcttttaaaaacctgaaaggggaagcaaaaaccaaaatgtgtgactgggctttggaggagactggagcctcagccctgtcctggccacgggccgctggggctggtgtgggtgggccttgtgtgctggatttgtagcttatcttccgtgttgtctttggacctgttttagtaaacccgtttttcattttattagatgtggtcacttagaaatgcaaacttgctgccgaccgcgggctgctcctgcgttcttggagctcctggcgcgtttctcggagctcccggctcctcagcgggtgggaacctcggggcccaggggtggagctggcgtccgcgggtgctggtctggcctggccgtgtggtgatgaggcttagcggggccagtgacggccgtggctcaggatccataagtcggggtttggtctcagcatttacaaatgtgtttacagtcagaatgaaacacattccttctagaaagtgcttgggggtttttgctgccctggaagccaggagcctgctcactccaaccacaagtcgcccttgactgcggcggccgcgagcggggcgggggctgccggtgccctccgcaggccgggcctcctgggcgcccctcggtgctgcaggctggggggccttgggtacctgcagagccttttctctgaattccttatgtccggtgggccagaagcccgtcctcctatgctggtggaaggcggaggaccggagtccctgcagaaggccccgtgcactcgggggcctccctcacatcccgtgccccctgcgctggccttcacagtaggtaatggctccggcccgggtgttcgctgtccacggaacatggcagaggggcaccccggcccggaaagacgccagagccagcaggggctgtttcgggccgcgtggctccccgggtctcggccgtctcccctcttctgcgtctgttccgtgacttcgcctgggtgggatgtaccgcaggtgcatcgcgtcgaggtggggcacggccgccggcaagaaacccaccctgtccggaggcgggcgtgagacaagcccagcccgcacgcgctcatctttcttcgttttttgatcagtttattcagaattgctctataatttaccaattgtatgtatttaacctattcttgtggaaaaaaaaggtctttcattatatctttatttctgaatttc

SEQ ID NO: 2325 - protein, 259 aa, Homo sapiens; identical to SEQ ID NO: 18

SEQ ID NO: 2326 - DNA, 579 bp, Homo sapiens
gggcctgtcccacaggggcgtggagctcgtggttctgagcagccagtctccccttgccagacgtggttccagacggggagacgcacctcgtccagaacgggattcagctgctcaacgggcatgcgccgggggccgtcccaaacctcgcagggctccagcaggccaaccggcaccacggactcctgggtggcgccctggcgaacttgtttgtgatagttgggtttgcagcctttgcttacacggtcaagtacgtgctgaggagcatcgcgcaggagtgaggcccaggcgccgagacccaaggcgccactgagggcaccgcgcaccagagcgtgacctcggcaggctggacacactgcccagcacaggcagacccaccaggctcctaggtttagcttttaaaaacctgaaaggggaagcaaaaaccaaaatgtgtgactgggctttggaggagactggagcctcagccctgtcctggccacgggccgctggggctggtgtgggtgggccttgtgtgctggatttgtagcttatcttccgtgttgtctttggacctgttttagtaaacccgtttttcatttt

SEQ ID NO: 2327 - protein, 32 aa, Homo sapiens
MCDWALEETGASALSWPRAAGAGVGGPCVLDL

SEQ ID NO: 2328 - DNA, 1450 bp, Homo sapiens
ttttttttttttttttttttcttgagacggagtctcgctgtgtctccaggctggagtgcagtggcgcaatctcggctcactgcaagctccgccccccggggttcacgccattctcctgtctcagcctcccaagtagctgggactacaggcgcccgccaccacgcccggctaatttttttttttgtatttttagtagagacggggtttcaccgtgttaaccaggatgtcttgatttcctgacctcgtgatccgcccgcctgggcctcccaaagtgctgggattacaggcgtgagccaccgcgcccggccgcagctgcctttcttctcagtaggcggggctgggtggagttcccaccttgtcccaggcactgtcgtggagactgctttgctctgtggcctcgtgttccccgctgcctctcggtcttgcttttatccacatccagcctcatccacacccgccaggggctcctccttgggatcttggggtgggccaaggcggtaccagttgcacagacggcccgggccttgtcagcggggagcccggtgctttggtggcttgtttttccctgtctttaataggaatcaagtgtgatatcatgaattgatggggggaagattaagaaggctttgtaagactataagttagtttgctgtgaagagtgtgcttattaaatgctttctgcaacacgaagactgcagcccttgactttgaaatcatctgtttttagaatcttgaaagaattgaaattagttttctggctgattcccttcccttccttcctagaaaagacaactggcagtgcagagtttagcatttaatttgaaagataaagtcttttgtgaattatttcctgaagtcgtggaggagattaaacaaaaacagaaagcacaagacgaactcagtagcagaccccagactctccccttgccagacgtggttccagacggggagacgcacctcgtccagaacgggattcagctgctcaacgggcatgcgccgggggccgtcccaaacctcgcagggctccagcaggccaaccggcaccacggactcctgggtggcgccctggcgaacttgtttgtgatagttgggtttgcagcctttgcttacacggtcaagtacgtgctgaggagcatcgcgcaggagtgaggcccaggcgccgagacccaaggcgccactgagggcaccgcgcaccagagcgtgacctcggcaggctggacacactgcccagcacaggcagacccaccaggctcctaggtttagcttttaaaaacctgaaaggggaagcaaaaaccaaaatgtgtgactgggctttggaggagactggagcctcagccctgtcctggccacgggccgctggggctggtgtgggtgggccttgtgtgctggatttgtagcttatcttccgtgttgtctttggacctgttttagtaaacccgtttttcatttt

SEQ ID NO: 2329 - protein, 48 aa, Homo sapiens
MLSATRRLQPLTLKSSVFRILKELKLVFWLIPFPSFLEKTTGSAEFSI

SEQ ID NO: 2330 - DNA, 1422 bp, Homo sapiens
gcggccatcttggaggctgaggcggcggcggcggcgctgcggcgggttcggtgggcccaatcccggggcggtgcggctgtttcgggcgcgggccccgcttttccgcaccctgctccggcctcgactacggcgagcctgagcgcggcggcggcccacgcgcagcgacagggagaggtgagcgcgctcgcaggcctgcgccgggtcctcgggcccgctcgtcccccctgccggagccggccacagcggcggcccggggctgctggggaccctgcgcgacgcttctccgttcgcgcccgccgcccgcggggccccggcccgagcctgcctgcgcggaacccgagatgagcagcaccagcagtaagagggctccgaccacggcaacccagaggctgaagcaggactaccttcgcattaagaaagacccggtgccttacatctgtgccgagcccctcccttcgaatattctcgagtggcactatgtcgtccgaggcccagagatgaccccttatgaaggtggctattatcatggaaaactaatttttcccagagaatttcctttcaaacctcccagtatctatatgatcactcccaacgggaggtttaagtgcaacaccaggctgtgtctttctatcacggatttccacccggacacgtggaacccggcctggtctgtctccaccatcctgactgggctcctgagcttcatggtggagaagggccccaccctgggcagtatagagacgtcggacttcacgaaaagacaactggcagtgcagagtttagcatttaatttgaaagataaagtcttttgtgaattatttcctgaagtcgtggaggagattaaacaaaaacagaaagcacaagacgaactcagtagcagaccccagactctccccttgccagacgtggttccagacggggagacgcacctcgtccagaacgggattcagctgctcaacgggcatgcgccgggggccgtcccaaacctcgcagggctccagcaggccaaccggcaccacggactcctgggtggcgccctggcgaacttgtttgtgatagttgggtttgcagcctttgcttacacggtcaagtacgtgctgaggagcatcgcgcaggagtgaggcccaggcgccgagacccaaggcgccactgagggcaccgcgcaccagagcgtgacctcggcaggctggacacactgcccagcacaggcagacccaccaggctcctaggtttagcttttaaaaacctgaaaggggaagcaaaaaccaaaatgtgtgactgggctttggaggagactggagcctcagccctgtcctggccacgggccgctggggctggtgtgggtgggccttgtgtgctggatttgtagcttatcttccgtgttgtctttggacctgttttagtaaacccgtttttcatttt

SEQ ID NO: 2331 - protein, 259 aa, Homo sapiens; identical to SEQ ID NO: 18

SEQ ID NO: 2332 - DNA, 1546 bp, Homo sapiens
gagcggccatcttggaggctgaggcggcggcggcggcgctgcggcgggttcggtgggcccaatcccggggcggtgcggctgtttcgggcgcgggccccgcttttccgcaccctgctccggcctcgactacggcgagcctgagcgcggcggcggcccacgcgcagcgacagggagaggtgagcgcgctcgcaggcctgcgccgggtcctcgggcccgctcgtcccccctgccggagccggccacagcggcggcccggggctgctggggaccctgcgcgacgcttctccgttcgcgcccgccgcccgcggggccccggcccgagcctgcctgcgcggaacccgaggtcggttacggcgggctcccggagctccgggtcagggtcatgtcggggacttgaccactcggccgggtttcccgtcagctgggacacttgcagctgccccaggacgggcagcctcgatcctgatgagcagcaccagcagtaagagggctccgaccacggcaacccagaggctgaagcaggactaccttcgcattaagaaagacccggtgccttacatctgtgccgagcccctcccttcgaatattctcgagtggcactatgtcgtccgaggcccagagatgaccccttatgaaggtggctattatcatggaaaactaatttttcccagagaatttcctttcaaacctcccagtatctatatgatcactcccaacgggaggtttaagtgcaacaccaggctgtgtctttctatcacggatttccacccggacacgtggaacccggcctggtctgtctccaccatcctgactgggctcctgagcttcatggtggagaagggccccaccctgggcagtatagagacgtcggacttcacgaaaagacaactggcagtgcagagtttagcatttaatttgaaagataaagtcttttgtgaattatttcctgaagtcgtggaggagattaaacaaaaacagaaagcacaagacgaactcagtagcagaccccagactctccccttgccagacgtggttccagacggggagacgcacctcgtccagaacgggattcagctgctcaacgggcatgcgccgggggccgtcccaaacctcgcagggctccagcaggccaaccggcaccacggactcctgggtggcgccctggcgaacttgtttgtgatagttgggtttgcagcctttgcttacacggtcaagtacgtgctgaggagcatcgcgcaggagtgaggcccaggcgccgagacccaaggcgccactgagggcaccgcgcaccagagcgtgacctcggcaggctggacacactgcccagcacaggcagacccaccaggctcctaggtttagcttttaaaaacctgaaaggggaagcaaaaaccaaaatgtgtgactgggctttggaggagactggagcctcagccctgtcctggccacgggccgctggggctggtgtgggtgggccttgtgtgctggatttgtagcttatcttccgtgttgtctttggacctgttttagtaaacccgtttttcatttt

SEQ ID NO: 2333 - protein, 259 aa, Homo sapiens; identical to SEQ ID NO: 18

SEQ ID NO: 2334 - DNA, 1047 bp, Homo sapiens
gcgagcggccatcttggaggctgaggcggcggcggcggcgctgcggcgggttcggtgggcccaatcccggggcggtgcggctgtttcgggcgcgggccccgcttttccgcaccctgctccggcctcgactacggcgagcctgagcgcggcggcggcccacgcgcagcgacagggagaggcactatgtcgtccgaggcccagagatgaccccttatgaaggtggctattatcatggaaaactaatttttcccagagaatttcctttcaaacctcccagtatctatatgatcactcccaacgggaggtttaagtgcaacaccaggctgtgtctttctatcacggatttccacccggacacgtggaacccggcctggtctgtctccaccatcctgactgggctcctgagcttcatggtggagaagggccccaccctgggcagtatagagacgtcggacttcacggagattaaacaaaaacagaaagcacaagacgaactcagtagcagaccccagactctccccttgccagacgtggttccagacggggagacgcacctcgtccagaacgggattcagctgctcaacgggcatgcgccgggggccgtcccaaacctcgcagggctccagcaggccaaccggcaccacggactcctgggtggcgccctggcgaacttgtttgtgatagttgggtttgcagcctttgcttacacggtcaagtacgtgctgaggagcatcgcgcaggagtgaggcccaggcgccgagacccaaggcgccactgagggcaccgcgcaccagagcgtgacctcggcaggctggacacactgcccagcacaggcagacccaccaggctcctaggtttagcttttaaaaacctgaaaggggaagcaaaaaccaaaatgtgtgactgggctttggaggagactggagcctcagccctgtcctggccacgggccgctggggctggtgtgggtgggccttgtgtgctggatttgtagcttatcttccgtgttgtctttggacctgttttagtaaacccgtttttcatttt

SEQ ID NO: 2335 - protein, 180 aa, Homo sapiens [sequence omitted]

SEQ ID NO: 2336 - DNA, 1307 bp, Homo sapiens
gcgagcggccatcttggaggctgaggcggcggcggcggcgctgcggcgggttcggtgggcccaatcccggggcggtgcggctgtttcgggcgcgggccccgcttttccgcaccctgctccggcctcgactacggcgagcctgagcgcggcggcggcccacgcgcagcgacagggagagatgagcagcaccagcagtaagagggctccgaccacggcaacccagaggctgaagcaggactaccttcgcattaagaaagacccggtgccttacatctgtgccgagcccctcccttcgaatattctcgagtggttcaagcgattctcctggctcagcctcctgagtagctgggattacaggcactatgtcgtccgaggcccagagatgaccccttatgaaggtggctattatcatggaaaactaatttttcccagagaatttcctttcaaacctcccagtatctatatgatcactcccaacgggaggtttaagtgcaacaccaggctgtgtctttctatcacggatttccacccggacacgtggaacccggcctggtctgtctccaccatcctgactgggctcctgagcttcatggtggagaagggccccaccctgggcagtatagagacgtcggacttcacgaaaagacaactggcagtgcagagtttagcatttaatttgaaagataaagtcttttgtgaattatttcctgaagtcgtggaggagattaaacaaaaacagaaagcacaagacgaactcagtagcagaccccagactctccccttgccagacgtggttccagacggggagacgcacctcgtccagaacgggattcagctgctcaacgggcatgcgccgggggccgtcccaaacctcgcagggctccagcaggccaaccggcaccacggactcctgggtggcgccctggcgaacttgtttgtgatagttgggtttgcagcctttgcttacacggtcaagtacgtgctgaggagcatcgcgcaggagtgaggcccaggcgccgagacccaaggcgccactgagggcaccgcgcaccagagcgtgacctcggcaggctggacacactgcccagcacaggcagacccaccaggctcctaggtttagcttttaaaaacctgaaaggggaagcaaaaaccaaaatgtgtgactgggctttggaggagactggagcctcagccctgtcctggccacgggccgctggggctggtgtgggtgggccttgtgtgctggatttgtagcttatcttccgtgttgtctttggacctgttttagtaaacccgtttttcatttt

SEQ ID NO: 2337 - protein, 275 aa, Homo sapiens; identical to SEQ ID NO: 20

SEQ ID NO: 2338 - DNA, 1394 bp, Homo sapiens
cgccccgcgagcggccatcttggaggctgaggcggcggcggcggcgctgcggcgggttcggtgggcccaatcccggggcggtgcggctgtttcgggcgcgggccccgcttttccgcaccctgctccggcctcgactacggcgagcctgagcgcggcggcggcccacgcgcagcgacagggagagatgagcagcaccagcagtaagagggctccgaccacggcaacccagaggctgaagcaggactaccttcgcattaagaaagacccggtgccttacatctgtgccgagcccctcccttcgaatattctcgagtggtaaggctccgcgccactgatcgccctgcgctgactgtcgctgccacgcaggcctctgccggcccctgctgggcgagcctggtgccccagtcatggcattggcaaggtgctcctgcaccctcccccggggcactatgtcgtccgaggcccagagatgaccccttatgaaggtggctattatcatggaaaactaatttttcccagagaatttcctttcaaacctcccagtatctatatgatcactcccaacgggaggtttaagtgcaacaccaggctgtgtctttctatcacggatttccacccggacacgtggaacccggcctggtctgtctccaccatcctgactgggctcctgagcttcatggtggagaagggccccaccctgggcagtatagagacgtcggacttcacgaaaagacaactggcagtgcagagtttagcatttaatttgaaagataaagtcttttgtgaattatttcctgaagtcgtggaggagattaaacaaaaacagaaagcacaagacgaactcagtagcagaccccagactctccccttgccagacgtggttccagacggggagacgcacctcgtccagaacgggattcagctgctcaacgggcatgcgccgggggccgtcccaaacctcgcagggctccagcaggccaaccggcaccacggactcctgggtggcgccctggcgaacttgtttgtgatagttgggtttgcagcctttgcttacacggtcaagtacgtgctgaggagcatcgcgcaggagtgaggcccaggcgccgagacccaaggcgccactgagggcaccgcgcaccagagcgtgacctcggcaggctggacacactgcccagcacaggcagacccaccaggctcctaggtttagcttttaaaaacctgaaaggggaagcaaaaaccaaaatgtgtgactgggctttggaggagactggagcctcagccctgtcctggccacgggccgctggggctggtgtgggtgggccttgtgtgctggatttgtagcttatcttccgtgttgtctttggacctgttttagtaaacccgtttttcatttt

SEQ ID NO: 2339 - protein, 207 aa, Homo sapiens; identical to SEQ ID NO: 22

SEQ ID NO: 2340 - DNA, 1140 bp, Homo sapiens
tggttccgccccgcgagcggccatcttggaggctgaggcggcggcggcggcgctgcggcgggttcggtgggcccaatcccggggcggtgcggctgtttcgggcgcgggccccgcttttccgcaccctgctccggcctcgactacggcgagcctgagcgcggcggcggcccacgcgcagcgacagggagaggcactatgtcgtccgaggcccagagatgaccccttatgaaggtggctattatcatggaaaactaatttttcccagagaatttcctttcaaacctcccagtatctatatgatcactcccaacgggaggtttaagtgcaacaccaggctgtgtctttctatcacggatttccacccggacacgtggaacccggcctggtctgtctccaccatcctgactgggctcctgagcttcatggtggagaagggccccaccctgggcagtatagagacgtcggacttcacgaaaagacaactggcagtgcagagtttagcatttaatttgaaagataaagtcttttgtgaattatttcctgaagtcgtggaggagattaaacaaaaacagaaagcacaagacgaactcagtagcagaccccagactctccccttgccagacgtggttccagacggggagacgcacctcgtccagaacgggattcagctgctcaacgggcatgcgccgggggccgtcccaaacctcgcagggctccagcaggccaaccggcaccacggactcctgggtggcgccctggcgaacttgtttgtgatagttgggtttgcagcctttgcttacacggtcaagtacgtgctgaggagcatcgcgcaggagtgaggcccaggcgccgagacccaaggcgccactgagggcaccgcgcaccagagcgtgacctcggcaggctggacacactgcccagcacaggcagacccaccaggctcctaggtttagcttttaaaaacctgaaaggggaagcaaaaaccaaaatgtgtgactgggctttggaggagactggagcctcagccctgtcctggccacgggccgctggggctggtgtgggtgggccttgtgtgctggatttgtagcttatcttccgtgttgtctttggacctgttttagtaaacccgtttttcatttt

SEQ ID NO: 2341 - protein, 207 aa, Homo sapiens; identical to SEQ ID NO: 22

SEQ ID NO: 2342 - DNA, 1402 bp, Homo sapiens
aagctaggctggttccgccccgcgagcggccatcttggaggctgaggcggcggcggcggcgctgcggcgggttcggtgggcccaatcccggggcggtgcggctgtttcgggcgcgggccccgcttttccgcaccctgctccggcctcgactacggcgagcctgagcgcggcggcggcccacgcgcagcgacagggagagatgagcagcaccagcagtaagagggctccgaccacggcaacccagaggctgaagcaggactaccttcgcattaagaaagacccggtgccttacatctgtgccgagcccctcccttcgaatattctcgagtggcactatgtcgtccgaggcccagagatgaccccttatgaaggaatcccagttctggatcatctgcaactagggcagccagagtgcgggagtacatctgtagggtgggccctccatcatcgtgtcattgcccatgaccagcgttggggatgccagcaggccgtggtggctattatcatggaaaactaatttttcccagagaatttcctttcaaacctcccagtatctatatgatcactcccaacgggaggtttaagtgcaacaccaggctgtgtctttctatcacggatttccacccggacacgtggaacccggcctggtctgtctccaccatcctgactgggctcctgagcttcatggtggagaagggccccaccctgggcagtatagagacgtcggacttcacgaaaagacaactggcagtgcagagtttagcatttaatttgaaagataaagtcttttgtgaattatttcctgaagtcgtggaggagattaaacaaaaacagaaagcacaagacgaactcagtagcagaccccagactctccccttgccagacgtggttccagacggggagacgcacctcgtccagaacgggattcagctgctcaacgggcatgcgccgggggccgtcccaaacctcgcagggctccagcaggccaaccggcaccacggactcctgggtggcgccctggcgaacttgtttgtgatagttgggtttgcagcctttgcttacacggtcaagtacgtgctgaggagcatcgcgcaggagtgaggcccaggcgccgagacccaaggcgccactgagggcaccgcgcaccagagcgtgacctcggcaggctggacacactgcccagcacaggcagacccaccaggctcctaggtttagcttttaaaaacctgaaaggggaagcaaaaaccaaaatgtgtgactgggctttggaggagactggagcctcagccctgtcctggccacgggccgctggggctggtgtgggtgggccttgtgtgctggatttgtagcttatcttccgtgttgtctttggacctgttttagtaaacccgtttttcatttt

SEQ ID NO: 2343 - protein, 207 aa, Homo sapiens; identical to SEQ ID NO: 2319

SEQ ID NO: 2344 - DNA, 2708 bp, Homo sapiens
agcagaagctaggctggttccgccccgcgagcggccatcttggaggctgaggcggcggcggcggcgctgcggcgggttcggtgggcccaatcccggggcggtgcggctgtttcgggcgcgggccccgcttttccgcaccctgctccggcctcgactacggcgagcctgagcgcggcggcggcccacgcgcagcgacagggagagatgagcagcaccagcagtaagagggctccgaccacggcaacccagaggctgaagcaggactaccttcgcattaagaaagacccggtgccttacatctgtgccgagcccctcccttcgaatattctcgagtggcactatgtcgtccgaggcccagagatgaccccttatgaaggtggctattatcatggaaaactaatttttcccagagaatttcctttcaaacctcccagtatctatatgatcactcccaacgggaggtttaagtgcaacaccaggctgtgtctttctatcacggatttccacccggacacgtggaacccggcctggtctgtctccaccatcctgactgggctcctgagcttcatggtggagaagggccccaccctgggcagtatagagacgtcggacttcacggtaagttttagagcctctccctggtgggccgtcagccttgtgtctggggggctgttctctgttcctgagttgcagctgcctttttttttttttttttttttttcttgagacggagtctcgctgtgtctccaggctggagtgcagtggcgcaatctcggctcactgcaagctccgccccccggggttcacgccattctcctgtctcagcctcccaagtagctgggactacaggcgcccgccaccacgcccggctaatttttttttttgtatttttagtagagacggggtttcaccgtgttaaccaggatgtcttgatttcctgacctcgtgatccgcccgcctgggcctcccaaagtgctgggattacaggcgtgagccaccgcgcccggccgcagctgcctttcttctcagtaggcggggctgggtggagttcccaccttgtcccaggcactgtcgtggagactgctttgctctgtggcctcgtgttccccgctgcctctcggtcttgcttttatccacatccagcctcatccacacccgccaggggctcctccttgggatcttggggtgggccaaggcggtaccagttgcacagacggcccgggccttgtcagcggggagcccggtgctttggtggcttgtttttccctgtctttaataggaatcaagtgtgatatcatgaattgatggggggaagattaagaaggctttgtaagactataagttagtttgctgtgaagagtgtgcttattaaatgctttctgcaacacgaagactgcagcccttgactttgaaatcatctgtttttagaatcttgaaagaattgaaattagttttctggctgattcccttcccttccttcctagaaaagacaactggcagtgcagagtttagcatttaatttgaaagataaagtcttttgtgaattatttcctgaagtcgtggaggtaagaaagacggaagtgggtttcgccttcccctgcgttaaaacacttgagtttcacctctttccaaagagtaaaatctgtgtcctgaagctgcagacctccccaggggatggctcctctcccccaggagccccgaggcaggggaggcagaaagcctgggctctggggggtggcctgcggacagctgtgctggtgggccgggggctgggcctgtcccacaggggcgtggagctcgtggttctgagcagccagctgggtggtgtctggggatagctgggaggcacagcggctgccatgtgggactgggactggagtgctccctggtcttggcctctgtggctcagccttgctctggtctgcctgagtgcaggggccaaggggcacagggccagtgaggccggccacgctcgggccctcacctgtgagatggggtcggaatttgacacagcctagggcttggttcttggtggtggaccgtggactcctgagaacgggagtgctggtcctgaaaggcgctggttggagaccagctgcttttctcgctgtttttctcttaggagattaaacaaaaacagaaagcacaagacgaactcagtagcagaccccagactctccccttgccagacgtggttccagacggggagacgcacctcgtccagaacgggattcagctgctcaacgggcatgcgccgggggccgtcccaaacctcgcagggctccagcaggccaaccggcaccacggactcctgggtggcgccctggcgaacttgtttgtgatagttgggtttgcagcctttgcttacacggtcaagtacgtgctgaggagcatcgcgcaggagtgaggcccaggcgccgagacccaaggcgccactgagggcaccgcgcaccagagcgtgacctcggcaggctggacacactgcccagcacaggcagacccaccaggctcctaggtttagcttttaaaaacctgaaaggggaagcaaaaaccaaaatgtgtgactgggctttggaggagactggagcctcagccctgtcctggccacgggccgctggggctggtgtgggtgggccttgtgtgctggatttgtagcttatcttccgtgttgtctttggacctgttttagtaaacccgtttttcatttt

SEQ ID NO: 2345 - protein, 173 aa, Homo sapiens; identical to SEQ ID NO: 2323

SEQ ID NO: 2346 - DNA, 1204 bp, Homo sapiens
agcagaagctaggctggttccgccccgcgagcggccatcttggaggctgaggcggcggcggcggcgctgcggcgggttcggtgggcccaatcccggggcggtgcggctgtttcgggcgcgggccccgcttttccgcaccctgctccggcctcgactacggcgagcctgagcgcggcggcggcccacgcgcagcgacagggagagatgagcagcaccagcagtaagagggctccgaccacggcaacccagaggctgaagcaggactaccttcgcattaagaaagacccggtgccttacatctgtgccgagcccctcccttcgaatattctcgagtggcactatgtcgtccgaggcccagagatgaccccttatgaaggtggctattatcatggaaaactaatttttcccagagaatttcctttcaaacctcccagtatctatatgatcactcccaacgggaggtttaagtgcaacaccaggctgtgtctttctatcacggatttccacccggacacgtggaacccggcctggtctgtctccaccatcctgactgggctcctgagcttcatggtggagaagggccccaccctgggcagtatagagacgtcggacttcacggagattaaacaaaaacagaaagcacaagacgaactcagtagcagaccccagactctccccttgccagacgtggttccagacggggagacgcacctcgtccagaacgggattcagctgctcaacgggcatgcgccgggggccgtcccaaacctcgcagggctccagcaggccaaccggcaccacggactcctgggtggcgccctggcgaacttgtttgtgatagttgggtttgcagcctttgcttacacggtcaagtacgtgctgaggagcatcgcgcaggagtgaggcccaggcgccgagacccaaggcgccactgagggcaccgcgcaccagagcgtgacctcggcaggctggacacactgcccagcacaggcagacccaccaggctcctaggtttagcttttaaaaacctgaaaggggaagcaaaaaccaaaatgtgtgactgggctttggaggagactggagcctcagccctgtcctggccacgggccgctggggctggtgtgggtgggccttgtgtgctggatttgtagcttatcttccgtgttgtctttggacctgttttagtaaacccgtttttcatttt

SEQ ID NO: 2347 - protein, 232 aa, Homo sapiens; identical to SEQ ID NO: 2321

SEQ ID NO: 2348 - DNA, 1301 bp, Homo sapiens
cggaccgcgcaccggaagcagaagctaggctggttccgccccgcgagcggccatcttggaggctgaggcggcggcggcggcgctgcggcgggttcggtgggcccaatcccggggcggtgcggctgtttcgggcgcgggccccgcttttccgcaccctgctccggcctcgactacggcgagcctgagcgcggcggcggcccacgcgcagcgacagggagagatgagcagcaccagcagtaagagggctccgaccacggcaacccagaggctgaagcaggactaccttcgcattaagaaagacccggtgccttacatctgtgccgagcccctcccttcgaatattctcgagtggcactatgtcgtccgaggcccagagatgaccccttatgaaggtggctattatcatggaaaactaatttttcccagagaatttcctttcaaacctcccagtatctatatgatcactcccaacgggaggtttaagtgcaacaccaggctgtgtctttctatcacggatttccacccggacacgtggaacccggcctggtctgtctccaccatcctgactgggctcctgagcttcatggtggagaagggccccaccctgggcagtatagagacgtcggacttcacgaaaagacaactggcagtgcagagtttagcatttaatttgaaagataaagtcttttgtgaattatttcctgaagtcgtggaggagattaaacaaaaacagaaagcacaagacgaactcagtagcagaccccagactctccccttgccagacgtggttccagacggggagacgcacctcgtccagaacgggattcagctgctcaacgggcatgcgccgggggccgtcccaaacctcgcagggctccagcaggccaaccggcaccacggactcctgggtggcgccctggcgaacttgtttgtgatagttgggtttgcagcctttgcttacacggtcaagtacgtgctgaggagcatcgcgcaggagtgaggcccaggcgccgagacccaaggcgccactgagggcaccgcgcaccagagcgtgacctcggcaggctggacacactgcccagcacaggcagacccaccaggctcctaggtttagcttttaaaaacctgaaaggggaagcaaaaaccaaaatgtgtgactgggctttggaggagactggagcctcagccctgtcctggccacgggccgctggggctggtgtgggtgggccttgtgtgctggatttgtagcttatcttccgtgttgtctttggacctgttttagtaaacccgtttttcatttt

SEQ ID NO: 2349 - protein, 259 aa, Homo sapiens; identical to SEQ ID NO: 18

SEQ ID NO: 2350 - DNA, 869 bp, Homo sapiens
agcagaagctaggctggttccgccccgcgagcggccatcttggaggctgaggcggcggcggcggcgctgcggcgggttcggtgggcccaatcccggggcggtgcggctgtttcgggcgcgggccccgcttttccgcaccctgctccggcctcgactacggcgagcctgagcgcggcggcggcccacgcgcagcgacagggagagatgagcagcaccagcagtaagagggctccgaccacggcaacccagaggctgaagcaggactaccttcgcattaagaaagacccggtgccttacatctgtgccgagcccctcccttcgaatattctcgagtggcactatgtcgtccgaggcccagagatgaccccttatgaaggtggctattatcatggaaaactaatttttcccagagaatttcctttcaaacctcccagtatctatatgatcactcccaacgggaggtttaagtgcaacaccaggctgtgtctttctatcacggatttccacccggacacgtggaacccggcctggtctgtctccaccatcctgactgggctcctgagcttcatggtggagaagggccccaccctgggcagtatagagacgtcggacttcacgaaaagacaactggcagtgcagagtttagcatttaatttgaaagataaagtcttttgtgaattatttcctgaagtcgtggaggtaagaaagacggaagtgggtttcgccttcccctgcgttaaaacacttgagtttcacctctttccaaagagtaaaatctgtgtcctgaagctgcagacctccccaggggatggctcctctcccccaggagccccgaggcaggggaggcagaaagcctgggctctgggggg

SEQ ID NO: 2351 - protein, 220 aa, Homo sapiens
MSSTSSKRAPTTATQRLKQDYLRIKKDPVPYICAEPLPSNILEWHYVVRGPEMTPYEGGYYHGKLIFPREFPFKPPSIYMITPNGRFKCNTRLCLSITDFHPDTWNPAWSVSTILTGLLSFMVEKGPTLGSIETSDFTKRQLAVQSLAFNLKDKVFCELFPEVVEVRKTEVGFAFPCVKTLEFHLFPKSKICVLKLQTSPGDGSSPPGAPRQGRQKAWAL

SEQ ID NO: 2352 - DNA, 814 bp, Homo sapiens
gcgagcggccatcttggaggctgaggcggcggcggcggcgctgcggcgggttcggtgggcccaatcccggggcggtgcggctgtttcgggcgcgggccccgcttttccgcaccctgctccggcctcgactacggcgagcctgagcgcggcggcggcccacgcgcagcgacagggagagatgagcagcaccagcagtaagagggctccgaccacggcaacccagaggctgaagcaggactaccttcgcattaagaaagacccggtgccttacatctgtgccgagcccctcccttcgaatattctcgagtggcactatgtcgtccgaggcccagagatgaccccttatgaaggtaaggattctgtgcttaggagaagaacaccaggcggtttttatattctcagtcagccttgcctgttcaacatcttttatttgcaaacagcagcctttctactttggatgtgtgctagttaaattggcttagttggaactcctcctcgtctgcttctccacacgctggaagtgtttgctctgctgatgtgtctcagcctgcagggccgcctgtagcgtctgtgttcaccagcctctgacaccatagggccatagctgagaaaaccagaccggggtaaacactgaagctggcctgttctactatttcttaagacccagtgcatatcatcaaaggaaaggcacatatattcagttattcagtgtgccttctgtgctgggcgcccccagggtttcgcaatccccaggacggtctctgagctaagtggaagtacccctgtgtggtggcacctggggcttcggtaggct

SEQ ID NO: 2353 - protein, 97 aa, Homo sapiens
MSSTSSKRAPTTATQRLKQDYLRIKKDPVPYICAEPLPSNILEWHYVVRGPEMTPYEGKDSVLRRRTPGGFYILSQPCLFNIFYLQTAAFLLWMCAS

SEQ ID NO: 2354 - DNA, 1087 bp, Homo sapiens
ggcgctgcggcgggttcggtgggcccaatcccggggcggtgcggctgtttcgggcgcgggccccgcttttccgcaccctgctccggcctcgactacggcgagcctgagcgcggcggcggcccacgcgcagcgacagggagaggtgagcgcgctcgcaggcctgcgccgggtcctcgggcccgctcgtcccccctgccggagccggccacagcggcggcccggggctgctggggaccctgcgcgacgcttctccgttcgcgcccgccgcccgcggggccccggcccgagcctgcctgcgcggaacccgaggtcggttacggcgggctcccggagctccgggtcagggtcatgtcggggacttgaccactcggccgggtttcccgtcagctgggacacttgcagctgccccaggacgggcagcctcgatcctggttcgtcagtggatcacgggagtctgtgtcgggggagggctgccgtcgagcccgccgtcgcctcgcccctgaactgttagactccagactgccccgtaaaccccgagagaaacgagcgtgcccgggactgtgcttagggccagcgtttctgggaaacccgggcggtgacagtgggagaccaccgccggccggcgagtgagacacgagcccggaacaagtctctaagcggcgccgggcctcgccatccacacctgccagttccctgcatcctttcagcccctggccaggtgtcacctcctggcgtccttttcagtgcctgccacttagtgcgtgtgtatttaactctagtccggttgccatcctcttgccagacccagataggaagcggctgaaaggtcgggcctcagcccggtgggaggtgggcagcgaagagtgtacagcgggcttggctggggcaggtcggtggccccgcgccctgctccaggggaaccagactgtgtaatctggcttccgaagaaaggatcatgagcagcaccagcagtaagagggctccgaccacggcaacccagaggctgaagcaggactaccttcgcattaagaaagacccggtgccttacatctgtgccgagcccctcccttcgaatattctcgagtgg

SEQ ID NO: 2355 - protein, 43 aa, Homo sapiens
MSSTSSKRAPTTATQRLKQDYLRIKKDPVPYICAEPLPSNILE

SEQ ID NO: 2356 - DNA, 544 bp, Homo sapiens
gcttgcgcactggcgggcggctccgggcaccgttagtgggcgcgagagccccagaccccgaagccgcgcgcttccctccccatgtgccacggcccagggcggcaggcccggctgagggcgaccccggtggagaaagaaccccgaccctcccgcctcccggctcccgccttgtcctccgctcccacgccccacccggcccttaggggaggcgcggcgcggcccgggcatggagcgtcccgggcccctggaggctcagtggagggttgggctccagggagctcagagctctctcgttcagggacccgagagtgacacgcgtggcatctctttgcaacccacgtccgcgccgcagcaccctcccctgcaggtgcctgcccagccccgggatgcccctgacctccccttggacagactgcagaaagcgcggggcgctgcgtcctctccacctctctctgaccccagacacattgggagagagcggccgtggggcagaagccaggaggagtgtccacgcagcctcagcccgtgggaatccagcctgcct

SEQ ID NO: 2357 - protein, 105 aa, Homo sapiens
MERPGPLEAQWRVGLQGAQSSLVQGPESDTRGISLQPTSAPQHPPLQVPAQPRDAPDLPLDRLQKARGAASSPPLSDPRHIGRERPWGRSQEECPRSLSPWESSL

SEQ ID NO: 2358 - DNA, 903 bp, Homo sapiens
ggtgggacgctgggggcaggcgcgcagcccaccgcctccctgagaggccgctgaggacagcggggagctgagggtggtcccctggtgggggatcaggaggtggacctcgccacctggctgcctgtggccctctcctttgccccaaccctgactgcctctcaggaacaaccacaggtcagcaaggtggctgaatattgagggtcagtcccgctgtggctacgggcagagggcaggctgtgtccatgctcagccctgactctggccctctgggacaccttggtgggtctgagacgttgctgcaggccgtggggcagaagccaggaggagtgtccacgcagcctcagcccgtgggaatccagcctgcctccattactgccgtcaccggctccaccttcggagaacatctcagcatccagcctccttcctctgcctcctctcaggcctctgccgttcccatgcagggcaggccaaactgttttcacagcatggaaagttatgtgagggaagccacaccggccgcagatacaggcaccagcacatccactcgcatgcacactcacggctgtggcccgcggcagatggaggcccgctctgccttgtctgtccctcagtagtgtgcgatgacagcacacctgtgggggccctgcagctgggaagactgcagcgaggctcaactcagaggcccctgctcaggagcatggctgagtcacaccccagggagaaggtgccccggacaggtgtggccagcacgtcttgccaagaccccaccaccccacccacccgcatctgtggccttctggccatggagcaggtggggcgcggaggaactgagctgtggcctggggttccgtggagcaggttgagtatggaggaactggggttccgtggagcaggtggggcgca

SEQ ID NO: 2359 - protein, 80 aa, Homo sapiens
MTAHLWGPCSWEDCSEAQLRGPCSGAWLSHTPGRRCPGQVWPARLAKTPPPHPPASVAFWPWSRWGAEELSCGLGFRGAG

SEQ ID NO: 2360 - DNA, 3380 bp, Homo sapiens
ggaaccgagctgtggcctggggttccatggagcaggtggggcgcggaggaactgagctgtggcctggggttccgtggagcaggttgagtatggaggaactggggttccgtggagcaggtggggcgcagaggaaccgagctgtggaatggggttccgtggagcaggttgagtgtgccggtcgtggacgggtcgtgggcgggactccccagtgtgtcaccactgaggcatcttcgccctcttacgtgtctctgtttctctctctagaagtccaacacctccgagaggactcaaaacacagagtgaccagctcctatgtgcatttcctgggcgacagcgagactccatctcaataaataaaaaaaaaaaagagttgttatcagtagaagggaatgtctggttacagtatggcgttgtgcagatgaaggtcttatcgcagatgaagccaccaggtcacaagcctcagagagaatcaactataaatgcttctcatcagactcaaggcctgaggtgatgctgatgctgtgcctgaattccagcagggaggaggcatgagggcagtgctgtcacagaagacaacaccgctccctcgttacctgtggcccggccacctcagcggcccaaggaggctcacctggtcatggtgcagtgaccacaggacccccacatgccgggagctgggttcgccccaccccaccccctgcaccgggccagcgaggggatggcccagaagagggggaggaccatgtggattcaccagtgctggacatgtgctctgtggctaccccctctgcctactctctggcccgatacaggggtgtgggacaggcctgggtgactccagcatggctttcctctccaggacgtcaccggtggcagctgcttccttccagagccggcaggcaggaggccagaggctccatcctgcttcagagctgccagctgcccccgcaatggctgagcaccgaagcatggacgggagaatggaagcagccacacgggggggctctcacctccagatcgcctgggcctgtggctccccagaggccctgccacctgaagggatggcagcacagacccactcagcacaacgctgcctgcaaacagggccaggctgcagcccagacgccccccaggccggggccaccatcagcaccaccaccaccacccaaggaggggcaccaggaggggctggtggagctgcccgcctcgttccgggagctgctcaccttcttctgcaccaatgccaccatccacggcgccatccgcctggtctgctcccgcgggaaccgcctcaagacgacgtcctgggggctgctgtccctgggagccctggtcgcgctctgctggcagctggggctcctctttgagcgtcactggcaccgcccggtcctcatggccgtctctgtgcactcggagcgcaagctgctcccgctggtcaccctgtgtgacgggaacccacgtcggccgagtccggtcctccgccatctggagctgctggacgagtttgccagggagaacattgactccctgtacaacgtcaacctcagcaaaggcagagccgccctctccgccactgtcccccgccacgagccccccttccacctggaccgggagatccgtctgcagaggctgagccactcgggcagccgggtcagagtggggttcagactgtgcaacagcacgggcggcgactgcttttaccgaggctacacgtcaggcgtggcggctgtccaggactggtaccacttccactatgtggatatcctggccctgctgcccgcggcatgggaggacagccacgggagccaggacggccacttcgtcctctcctgcagttacgatggcctggactgccaggcccgacagttccggaccttccaccaccccacctacggcagctgctacacggtcgatggcgtctggacagctcagcgccccggcatcacccacggagtcggcctggtcctcagggttgagcagcagcctcacctccctctgctgtccacgctggccggcatcagggtcatggttcacggccgtaaccacacgcccttcctggggcaccacagcttcagcgtccggccagggacggaggccaccatcagcatccgagaggacgaggtgcaccggctcgggagcccctacggccactgcaccgccggcggggaaggcgtggaggtggagctgctacacaacacctcctacaccaggcaggcctgcctggtgtcctgcttccagcagctgatggtggagacctgctcctgtggctactacctccaccctctgccggcgggggctgagtactgcagctctgcccggcaccctgcctggggacactgcttctaccgcctctaccaggacctggagacccaccggctcccctgtacctcccgctgccccaggccctgcagggagtctgcattcaagctctccactgggacctccaggtggccttccgccaagtcagctggatggactctggccacgctaggtgaacaggggctgccgcatcagagccacagacagaggagcagcctggccaaaatcaacatcgtctaccaggagctcaactaccgctcagtggaggaggcgcccgtgtactcggtgccgcagctgctctcggccatgggcagcctctgcagcctgtggtttggggcctccgtcctctccctcctggagctcctggagctgctgctcgatgcttctgccctcaccctggtgctaggcggccgccggctccgcagggcgtggttctcctggcccagagccagccctgcctcaggggcgtccagcatcaagccagaggccagtcagatgcccccgcctgcaggcggcacgtcagatgacccggagcccagcgggcctcatctcccacgggtgatgcttccaggggttctggcgggagtctcagccgaagagagctgggctgggccccagccccttgagactctggacacctgaaccagacctgccagggctgtgcgatctcttggcctggtccttgcagctgtggcagcagcaggctccccagcggcccagggtgggccagaccagcagcccaggaagcagcacacgcggccgtggggaggcaggcaccgggcatgtcggcgcctctggtcaaaccacctacactgcctggggtgggtctcaaggaggcccggggcggaggggggttcccgcgtgcacacgagtgcggctggacgtgccgacacgcggtgatgtacccatgctccgtgtgtctgtgtctgcatgtccacacgtctgatgcacctgtgtacgtgtgtcaagcctagccacctcagctgcagggaggcagaaggcaaggcaggccccacggacacacttgggctgctctgaaataaagctgttgactccacctg

SEQ ID NO: 2361 - protein, 731 aa, Homo sapiens
MCSVATPSAYSLARYRGVGQAWVTPAWLSSPGRHRWQLLPSRAGRQEARGSILLQSCQLPPQWLSTEAWTGEWKQPHGGALTSRSPGPVAPQRPCHLKGWQHRPTQHNAACKQGQAAAQTPPRPGPPSAPPPPPKEGHQEGLVELPASFRELLTFFCTNATIHGAIRLVCSRGNRLKTTSWGLLSLGALVALCWQLGLLFERHWHRPVLMAVSVHSERKLLPLVTLCDGNPRRPSPVLRHLELLDEFARENIDSLYNVNLSKGRAALSATVPRHEPPFHLDREIRLQRLSHSGSRVRVGFRLCNSTGGDCFYRGYTSGVAAVQDWYHFHYVDILALLPAAWEDSHGSQDGHFVLSCSYDGLDCQARQFRTFHHPTYGSCYTVDGVWTAQRPGITHGVGLVLRVEQQPHLPLLSTLAGIRVMVHGRNHTPFLGHHSFSVRPGTEATISIREDEVHRLGSPYGHCTAGGEGVEVELLHNTSYTRQACLVSCFQQLMVETCSCGYYLHPLPAGAEYCSSARHPAWGHCFYRLYQDLETHRLPCTSRCPRPCRESAFKLSTGTSRWPSAKSAGWTLATLGEQGLPHQSHRQRSSLAKINIVYQELNYRSVEEAPVYSVPQLLSAMGSLCSLWFGASVLSLLELLELLLDASALTLVLGGRRLRRAWFSWPRASPASGASSIKPEASQMPPPAGGTSDDPEPSGPHLPRVMLPGVLAGVSAEESWAGPQPLETLDT

SEQ ID NO: 2362 - DNA, 2980 bp, Homo sapiens
ggaaccgagctgtggcctggggttccatggagcaggtggggcgcggaggaactgagctgtggcctggggttccgtggagcaggttgagtatggaggaactggggttccgtggagcaggtggggcgcagaggaaccgagctgtggaatggggttccgtggagcaggttgagtgtgccggtcgtggacgggtcgtgggcgggactccccagtgtgtcaccactgaggcatcttcgccctcttacgtgtctctgtttctctctctagaagtccaacacctccgagaggactcaaaacacagagtgaccagctcctatgtgcatttcctgggcgacagcgagactccatctcaataaataaaaaaaaaaaagagttgttatcagtagaagggaatgtctggttacagtatggcgttgtgcagatgaaggtcttatcgcagatgaagccaccaggtcacaagcctcagagagaatcaactataaatgcttctcatcagactcaaggcctgaggtgatgctgatgctgtgcctgaattccagcagggaggaggcatgaggacgtcaccggtggcagctgcttccttccagagccggcaggcaggaggccagaggctccatcctgcttcagagctgccagctgcccccgcaatggctgagcaccgaagcatggacgggagaatggaagcagccacacgggggggctctcacctccaggctgcagcccagacgccccccaggccggggccaccatcagcaccaccaccaccacccaaggaggggcaccaggaggggctggtggagctgcccgcctcgttccgggagctgctcaccttcttctgcaccaatgccaccatccacggcgccatccgcctggtctgctcccgcgggaaccgcctcaagacgacgtcctgggggctgctgtccctgggagccctggtcgcgctctgctggcagctggggctcctctttgagcgtcactggcaccgcccggtcctcatggccgtctctgtgcactcggagcgcaagctgctcccgctggtcaccctgtgtgacgggaacccacgtcggccgagtccggtcctccgccatctggagctgctggacgagtttgccagggagaacattgactccctgtacaacgtcaacctcagcaaaggcagagccgccctctccgccactgtcccccgccacgagccccccttccacctggaccgggagatccgtctgcagaggctgagccactcgggcagccgggtcagagtggggttcagactgtgcaacagcacgggcggcgactgcttttaccgaggctacacgtcaggcgtggcggctgtccaggactggtaccacttccactatgtggatatcctggccctgctgcccgcggcatgggaggacagccacgggagccaggacggccacttcgtcctctcctgcagttacgatggcctggactgccaggcccgacagttccggaccttccaccaccccacctacggcagctgctacacggtcgatggcgtctggacagctcagcgccccggcatcacccacggagtcggcctggtcctcagggttgagcagcagcctcacctccctctgctgtccacgctggccggcatcagggtcatggttcacggccgtaaccacacgcccttcctggggcaccacagcttcagcgtccggccagggacggaggccaccatcagcatccgagaggacgaggtgcaccggctcgggagcccctacggccactgcaccgccggcggggaaggcgtggaggtggagctgctacacaacacctcctacaccaggcaggcctgcctggtgtcctgcttccagcagctgatggtggagacctgctcctgtggctactacctccaccctctgccggcgggggctgagtactgcagctctgcccggcaccctgcctggggacactgcttctaccgcctctaccaggacctggagacccaccggctcccctgtacctcccgctgccccaggccctgcagggagtctgcattcaagctctccactgggacctccaggtggccttccgccaagtcagctggatggactctggccacgctaggtgaacaggggctgccgcatcagagccacagacagaggagcagcctggccaaaatcaacatcgtctaccaggagctcaactaccgctcagtggaggaggcgcccgtgtactcggtgccgcagctgctctcggccatgggcagcctctgcagcctgtggtttggggcctccgtcctctccctcctggagctcctggagctgctgctcgatgcttctgccctcaccctggtgctaggcggccgccggctccgcagggcgtggttctcctggcccagagccagccctgcctcaggggcgtccagcatcaagccagaggccagtcagatgcccccgcctgcaggcggcacgtcagatgacccggagcccagcgggcctcatctcccacgggtgatgcttccaggggttctggcgggagtctcagccgaagagagctgggctgggccccagccccttgagactctggacacctgaaccagacctgccagggctgtgcgatctcttggcctggtccttgcagctgtggcagcagcaggctccccagcggcccagggtgggccagaccagcagcccaggaagcagcacacgcggccgtggggaggcaggcaccgggcatgtcggcgcctctggtcaaaccacctacactgcctggggtgggtctcaaggaggcccggggcggaggggggttcccgcgtgcacacgagtgcggctggacgtgccgacacgcggtgatgtacccatgctccgtgtgtctgtgtctgcatgtccacacgtctgatgcacctgtgtacgtgtgtcaagcctagccacctcagctgcagggaggcagaaggcaaggcaggccccacggacacacttgggctgctctgaaataaagctgttgactccacctg

SEQ ID NO: 2363 - protein, 670 aa, Homo sapiens
MRTSPVAAASFQSRQAGGQRLHPASELPAAPAMAEHRSMDGRMEAATRGGSHLQAAAQTPPRPGPPSAPPPPPKEGHQEGLVELPASFRELLTFFCTNATIHGAIRLVCSRGNRLKTTSWGLLSLGALVALCWQLGLLFERHWHRPVLMAVSVHSERKLLPLVTLCDGNPRRPSPVLRHLELLDEFARENIDSLYNVNLSKGRAALSATVPRHEPPFHLDREIRLQRLSHSGSRVRVGFRLCNSTGGDCFYRGYTSGVAAVQDWYHFHYVDILALLPAAWEDSHGSQDGHFVLSCSYDGLDCQARQFRTFHHPTYGSCYTVDGVWTAQRPGITHGVGLVLRVEQQPHLPLLSTLAGIRVMVHGRNHTPFLGHHSFSVRPGTEATISIREDEVHRLGSPYGHCTAGGEGVEVELLHNTSYTRQACLVSCFQQLMVETCSCGYYLHPLPAGAEYCSSARHPAWGHCFYRLYQDLETHRLPCTSRCPRPCRESAFKLSTGTSRWPSAKSAGWTLATLGEQGLPHQSHRQRSSLAKINIVYQELNYRSVEEAPVYSVPQLLSAMGSLCSLWFGASVLSLLELLELLLDASALTLVLGGRRLRRAWFSWPRASPASGASSIKPEASQMPPPAGGTSDDPEPSGPHLPRVMLPGVLAGVSAEESWAGPQPLETLDT

SEQ ID NO: 2364 - DNA, 3484 bp, Homo sapiens
tataaatgcttctcatcagactcaaggcctgaggtgatgctgatgctgtgcctgaattccagcagggaggaggcatgaggtgcgtccgactcccttcccatcacagctgagctagtttttcaggttaactttggaatgcccatggctaagaccaggggtccatccagacagttcagggcttataattttatttttggtttatgagggaacctagaaggcagcccacacgcaccttactcctcccagcaggggacaccggccagaccccaagctccacactcccaccctcagcacccacccaggccagcagccgggggcaccttggtgccaccttagtgcctgttctgcggaggctccactggacagtgcagttgatgcccggggccgagggggctctgcctgggaggctgttcacctgcctgggtgcaggaccccagagggaccccaggccacccctggcctgcccatgcccacgggaatcccgaccttgggctgcctgtctattgcaccagaaccgtcccagggctgactcagagtgaccctgagtgggggacgctcaccccaggggaggaaacggggctctgggataggaggtcctggctggggtcccacagatgccaggcgcctgccatctccagggcagtgctgtcacagaagacaacaccgctccctcgttacctgtggcccggccacctcagcggcccaaggaggtgagctcacagccatgctcggtcaatggggcctggccgtctttcctgggagagagcagaggcatgggcccaaagggagccagggatgcctgcccgtcccttctctcattcaggctcacctggtcatggtgcagtgaccacaggacccccacatgccgggagctgggttcgccccaccccaccccctgcaccgggccagcgaggggatggcccagaagagggggaggaccatgtggattcaccagtgctggacatgtgctctgtggctaccccctctgcctactctctggcccgatacaggggtgtgggacaggcctgggtgactccagcatggctttcctctccaggacgtcaccggtggcagctgcttccttccagagccggcaggcaggaggccagaggctccatcctgcttcagagctgccagctgcccccgcaatggctgagcaccgaagcatggacgggagaatggaagcagccacacgggggggctctcacctccaggctgcagcccagacgccccccaggccggggccaccatcagcaccaccaccaccacccaaggaggggcaccaggaggggctggtggagctgcccgcctcgttccgggagctgctcaccttcttctgcaccaatgccaccatccacggcgccatccgcctggtctgctcccgcgggaaccgcctcaagacgacgtcctgggggctgctgtccctgggagccctggtcgcgctctgctggcagctggggctcctctttgagcgtcactggcaccgcccggtcctcatggccgtctctgtgcactcggagcgcaagctgctcccgctggtcaccctgtgtgacgggaacccacgtcggccgagtccggtcctccgccatctggagctgctggacgagtttgccagggagaacattgactccctgtacaacgtcaacctcagcaaaggcagagccgccctctccgccactgtcccccgccacgagccccccttccacctggaccgggagatccgtctgcagaggctgagccactcgggcagccgggtcagagtggggttcagactgtgcaacagcacgggcggcgactgcttttaccgaggctacacgtcaggcgtggcggctgtccaggactggtaccacttccactatgtggatatcctggccctgctgcccgcggcatgggaggacagccacgggagccaggacggccacttcgtcctctcctgcagttacgatggcctggactgccaggcccgacagttccggaccttccaccaccccacctacggcagctgctacacggtcgatggcgtctggacagctcagcgccccggcatcacccacggagtcggcctggtcctcagggttgagcagcagcctcacctccctctgctgtccacgctggccggcatcagggtcatggttcacggccgtaaccacacgcccttcctggggcaccacagcttcagcgtccggccagggacggaggccaccatcagcatccgagaggacgaggtgcaccggctcgggagcccctacggccactgcaccgccggcggggaaggcgtggaggtggagctgctacacaacacctcctacaccaggcaggcctgcctggtgtcctgcttccagcagctgatggtggagacctgctcctgtggctactacctccaccctctgccggcgggggctgagtactgcagctctgcccggcaccctgcctggggacactgcttctaccgcctctaccaggacctggagacccaccggctcccctgtacctcccgctgccccaggccctgcagggagtctgcattcaagctctccactgggacctccaggtggccttccgccaagtcagctggatggactctggccacgctaggtgaacaggggctgccgcatcagagccacagacagaggagcagcctggccaaaatcaacatcgtctaccaggagctcaactaccgctcagtggaggaggcgcccgtgtactcggtgccgcagctgctctcggccatgggcagcctctgcagcctgtggtttggggcctccgtcctctccctcctggagctcctggagctgctgctcgatgcttctgccctcaccctggtgctaggcggccgccggctccgcagggcgtggttctcctggcccagagccagccctgcctcaggggcgtccagcatcaagccagaggccagtcagatgcccccgcctgcaggcggcacgtcagatgacccggagcccagcgggcctcatctcccacgggtgatgcttccaggggttctggcgggagtctcagccgaagagagctgggctgggccccagccccttgagactctggacacctgaaccagacctgccagggctgtgcgatctcttggcctggtccttgcagctgtggcagcagcaggctccccagcggcccagggtgggccagaccagcagcccaggaagcagcacacgcggccgtggggaggcaggcaccgggcatgtcggcgcctctggtcaaaccacctacactgcctggggtgggtctcaaggaggcccggggcggaggggggttcccgcgtgcacacgagtgcggctggacgtgccgacacgcggtgatgtacccatgctccgtgtgtctgtgtctgcatgtccacacgtctgatgcacctgtgtacgtgtgtcaagcctagccacctcagctgcagggaggcagaaggcaaggcaggccccacggacacacttgggctgctctgaaataaagctgttgactccacctg

SEQ ID NO: 2365 - protein, 816 aa, Homo sapiens
MPGACHLQGSAVTEDNTAPSLPVARPPQRPKEVSSQPCSVNGAWPSFLGESRGMGPKGARDACPSLLSFRLTWSWCSDHRTPTCRELGSPHPTPCTGPARGWPRRGGGPCGFTSAGHVLCGYPLCLLSGPIQGCGTGLGDSSMAFLSRTSPVAAASFQSRQAGGQRLHPASELPAAPAMAEHRSMDGRMEAATRGGSHLQAAAQTPPRPGPPSAPPPPPKEGHQEGLVELPASFRELLTFFCTNATIHGAIRLVCSRGNRLKTTSWGLLSLGALVALCWQLGLLFERHWHRPVLMAVSVHSERKLLPLVTLCDGNPRRPSPVLRHLELLDEFARENIDSLYNVNLSKGRAALSATVPRHEPPFHLDREIRLQRLSHSGSRVRVGFRLCNSTGGDCFYRGYTSGVAAVQDWYHFHYVDILALLPAAWEDSHGSQDGHFVLSCSYDGLDCQARQFRTFHHPTYGSCYTVDGVWTAQRPGITHGVGLVLRVEQQPHLPLLSTLAGIRVMVHGRNHTPFLGHHSFSVRPGTEATISIREDEVHRLGSPYGHCTAGGEGVEVELLHNTSYTRQACLVSCFQQLMVETCSCGYYLHPLPAGAEYCSSARHPAWGHCFYRLYQDLETHRLPCTSRCPRPCRESAFKLSTGTSRWPSAKSAGWTLATLGEQGLPHQSHRQRSSLAKINIVYQELNYRSVEEAPVYSVPQLLSAMGSLCSLWFGASVLSLLELLELLLDASALTLVLGGRRLRRAWFSWPRASPASGASSIKPEASQMPPPAGGTSDDPEPSGPHLPRVMLPGVLAGVSAEESWAGPQPLETLDT

SEQ ID NO: 2366 - DNA, 1406 bp, Homo sapiens
agcggcccaaggaggtgagctcacagccatgctcggtcaatggggcctggccgtctttcctgggagagagcagaggcatgggcccaaagggagccagggatgcctgcccgtcccttctctcattcaggctcacctggtcatggtgcagtgaccacaggacccccacatgccgggagctgggttcgccccaccccaccccctgcaccgggccagcgaggggatggcccagaagagggggaggaccatgtggattcaccagtgctggacatgtgctctgtggctaccccctctgcctactctctggcccgatacaggggtgtgggacaggtgactggtggcagctgcttccttccagagccggcaggcaggaggccagaggctccatcctgcttcagagctgccagctgcccccgcaatggctgagcaccgaagcatggacgggagaatggaagcagccacacgggggggctctcacctccagatcgcctgggcctgtggctccccagaggccctgccacctgaagggatggcagcacagacccactcagcacaacgctgcctgcaaacagggccaggctgcagcccagacgccccccaggccggggccaccatcagcaccaccaccaccacccaaggaggggcaccaggaggggctggtggagctgcccgcctcgttccgggagctgctcaccttcttctgcaccaatgccaccatccacggcgccatccgcctggtctgctcccgcgggaaccgcctcaagacgacgtcctgggggctgctgtccctgggagccctggtcgcgctctgctggcagctggggctcctctttgagcgtcactggcaccgcccggtcctcatggccgtctctgtgcactcggagcgcaagctgctcccgctggtcaccctgtgtgacgggaacccacgtcggtgagggccagggctgtcggcgggaggggtggccgccccagctccttgcccctgtgaccgtctctaaccgaagccccactggcccctgtagccgaggagggggctctgtgtggtcaatgccaccctcctggtcactgtgacctcccaaacctcggtgcccagcccggacctctcggactgccaaggagggggctcagtgtggtcactgccccctggagggacaccagggccctcgggagcctgggaggagaggtgggggtgggcgaggctttccagaaggagggaaggtgggaggggctgcgagcgggctgggctccggggccgacctcaccggcagccacggcctccaactccagctctgggtccagctcaccccactgggcgtcccgagtaggggaggcactgctgtcccgacagcacacactgggatgctggggccagtgtgaggccccgggccggcaactctgactccagggcc

SEQ ID NO: 2367 - protein, 284 aa, Homo sapiens
MGPKGARDACPSLLSFRLTWSWCSDHRTPTCRELGSPHPTPCTGPARGWPRRGGGPCGFTSAGHVLCGYPLCLLSGPIQGCGTGDWWQLLPSRAGRQEARGSILLQSCQLPPQWLSTEAWTGEWKQPHGGALTSRSPGPVAPQRPCHLKGWQHRPTQHNAACKQGQAAAQTPPRPGPPSAPPPPPKEGHQEGLVELPASFRELLTFFCTNATIHGAIRLVCSRGNRLKTTSWGLLSLGALVALCWQLGLLFERHWHRPVLMAVSVHSERKLLPLVTLCDGNPRR

SEQ ID NO: 2368 - DNA, 1005 bp, Homo sapiens
agccacaatctctggcaagcacctaggaccttgtccccgcctgccaagtagccgcccgggccatgtgtgccctgtctcctcggcagcaagccccctgccgcgagcttggagaggcaccccagggtggcagctgcttccttccagagccggcaggcaggaggccagaggctccatcctgcttcagagctgccagctgcccccgcaatggctgagcaccgaagcatggacgggagaatggaagcagccacacgggggggctctcacctccaggctgcagcccagacgccccccaggccggggccaccatcagcaccaccaccaccacccaaggaggggcaccaggaggggctggtggagctgcccgcctcgttccgggagctgctcaccttcttctgcaccaatgccaccatccacggcgccatccgcctggtctgctcccgcgggaaccgcctcaagacgacgtcctgggggctgctgtccctgggagccctggtaggacagccacgggagccaggacggccacttcgtcctctcctgcagttacgatggcctggactgccaggcccgacagttccggaccttccaccaccccacctacggcagctgctacacggtcgatggcgtctggacagctcagcgccccggcatcacccacggagtcggcctggtcctcagggttgagcagcagcctcacctccctctgctgtccacgctggccggcatcagggtcatggttcacggccgtaaccacacgcccttcctggggcaccacagcttcagcgtccggccagggacggaggccaccatcagcatccgagaggacgaggtgcaccggctcgggagcccctacggccactgcaccgccggcggggaaggcgtggaggtggagctgctacacaacacctcctacaccaggcaggcctgcctggtgtcctgagggaggcagaaggcaaggcaggccccacggacacacttgggctgctctgaaataaagctgttgactcc

SEQ ID NO: 2369 - protein, 158 aa, Homo sapiens
MAEHRSMDGRMEAATRGGSHLQAAAQTPPRPGPPSAPPPPPKEGHQEGLVELPASFRELLTFFCTNATIHGAIRLVCSRGNRLKTTSWGLLSLGALVGQPREPGRPLRPLLQLRWPGLPGPTVPDLPPPHLRQLLHGRWRLDSSAPRHHPRSRPGPQG

SEQ ID NO: 2370 - DNA, 1073 bp, Homo sapiens
ggtggcagctgcttccttccagagccggcaggcaggaggccagaggctccatcctgcttcagagctgccagctgcccccgcaatggctgagcaccgaagcatggacgggagaatggaagcagccacacgggggggctctcacctccagatcgcctgggcctgtggctccccagaggccctgccacctgaagggatggcagcacagacccactcagcacaacgctgcctgcaaacagggccaggctgcagcccagacgccccccaggccggggccaccatcagcaccaccaccaccacccaaggaggggcaccaggaggggctggtggagctgcccgcctcgttccgggagctgctcaccttcttctgcaccaatgccaccatccacggcgccatccgcctggtctgctcccgcgggaaccgcctcaagacgacgtcctgggggctgctgtccctgggagccctggtcgcgctctgctggcagctggggctcctctttgagcgtcactggcaccgcccggtcctcatggccgtctctgtgcactcggagcgcaagctgctcccgctggtcaccctgtgtgacgggaacccacgtcggtgagggccagggctgtcggcgggaggggtggccgccccagctccttgcccctgtgaccgtctctaaccgaagccccactggcccctgtagccgaggagggggctctgtgtggtcaatgccaccctcctggtcactgtgacctcccaaacctcggtgcccagcccggacctctcggactgccaaggagggggctcagtgtggtcactgccccctggagggacaccagggccctcgggagcctgggaggagaggtgggggtgggcgaggctttccagaaggagggaaggtgggaggggctgcgagcgggctgggctccggggccgacctcaccggcagccacggcctccaactccagctctgggtccagctcaccccactgggcgtcccgagtaggggaggcactgctgtcccgacagcacacactgggatgctggggccagtgtgaggccccgggccggcaactctgactccagggcc

SEQ ID NO: 2371 - protein, 138 aa, Homo sapiens
MAEHRSMDGRMEAATRGGSHLQIAWACGSPEALPPEGMAAQTHSAQRCLQTGPGCSPDAPQAGATISTTTTTQGGAPGGAGGAARLVPGAAHLLLHQCHHPRRHPPGLLPREPPQDDVLGAAVPGSPGRALLAAGAPL

SEQ ID NO: 2372 - DNA, 2512 bp, Homo sapiens
ggtggcagctgcttccttccagagccggcaggcaggaggccagaggctccatcctgcttcagagctgccagctgcccccgcaatggctgagcaccgaagcatggacgggagaatggaagcagccacacgggggggctctcacctccagatcgcctgggcctgtggctccccagaggccctgccacctgaagggatggcagcacagacccactcagcacaacgctgcctgcaaacagggccaggctgcagcccagacgccccccaggccggggccaccatcagcaccaccaccaccacccaaggaggggcaccaggaggggctggtggagctgcccgcctcgttccgggagctgctcaccttcttctgcaccaatgccaccatccacggcgccatccgcctggtctgctcccgcgggaaccgcctcaagacgacgtcctgggggctgctgtccctgggagccctggtcgcgctctgctggcagctggggctcctctttgagcgtcactggcaccgcccggtcctcatggccgtctctgtgcactcggagcgcaagctgctcccgctggtcaccctgtgtgacgggaacccacgtcggccgagtccggtcctccgccatctggagctgctggacgagtttgccagggagaacattgactccctgtacaacgtcaacctcagcaaaggcagagccgccctctccgccactgtcccccgccacgagccccccttccacctggaccgggagatccgtctgcagaggctgagccactcgggcagccgggtcagagtggggttcagactgtgcaacagcacgggcggcgactgcttttaccgaggctacacgtcaggcgtggcggctgtccaggactggtaccacttccactatgtggatatcctggccctgctgcccgcggcatgggaggacagccacgggagccaggacggccacttcgtcctctcctgcagttacgatggcctggactgccaggcccgacagttccggaccttccaccaccccacctacggcagctgctacacggtcgatggcgtctggacagctcagcgccccggcatcacccacggagtcggcctggtcctcagggttgagcagcagcctcacctccctctgctgtccacgctggccggcatcagggtcatggttcacggccgtaaccacacgcccttcctggggcaccacagcttcagcgtccggccagggacggaggccaccatcagcatccgagaggacgaggtgcaccggctcgggagcccctacggccactgcaccgccggcggggaaggcgtggaggtggagctgctacacaacacctcctacaccaggcaggcctgcctggtgtcctgcttccagcagctgatggtggagacctgctcctgtggctactacctccaccctctgccggcgggggctgagtactgcagctctgcccggcaccctgcctggggacactgcttctaccgcctctaccaggacctggagacccaccggctcccctgtacctcccgctgccccaggccctgcagggagtctgcattcaagctctccactgggacctccaggtggccttccgccaagtcagctggatggactctggccacgctaggtgaacaggggctgccgcatcagagccacagacagaggagcagcctggccaaaatcaacatcgtctaccaggagctcaactaccgctcagtggaggaggcgcccgtgtactcggtgccgcagctgctctcggccatgggcagcctctgcagcctgtggtttggggcctccgtcctctccctcctggagctcctggagctgctgctcgatgcttctgccctcaccctggtgctaggcggccgccggctccgcagggcgtggttctcctggcccagagccagccctgcctcaggggcgtccagcatcaagccagaggccagtcagatgcccccgcctgcaggcggcacgtcagatgacccggagcccagcgggcctcatctcccacgggtgatgcttccaggggttctggcgggagtctcagccgaagagagctgggctgggccccagccccttgagactctggacacctgaaccagacctgccagggctgtgcgatctcttggcctggtccttgcagctgtggcagcagcaggctccccagcggcccagggtgggccagaccagcagcccaggaagcagcacacgcggccgtggggaggcaggcaccgggcatgtcggcgcctctggtcaaaccacctacactgcctggggtgggtctcaaggaggcccggggcggaggggggttcccgcgtgcacacgagtgcggctggacgtgccgacacgcggtgatgtacccatgctccgtgtgtctgtgtctgcatgtccacacgtctgatgcacctgtgtacgtgtgtcaagcctagccacctcagctgcagggaggcagaaggcaaggcaggccccacggacacacttgggctgctctgaaataaagctgttgactccacctg

SEQ ID NO: 2373 - protein, 522 aa, Homo sapiens
MAVSVHSERKLLPLVTLCDGNPRRPSPVLRHLELLDEFARENIDSLYNVNLSKGRAALSATVPRHEPPFHLDREIRLQRLSHSGSRVRVGFRLCNSTGGDCFYRGYTSGVAAVQDWYHFHYVDILALLPAAWEDSHGSQDGHFVLSCSYDGLDCQARQFRTFHHPTYGSCYTVDGVWTAQRPGITHGVGLVLRVEQQPHLPLLSTLAGIRVMVHGRNHTPFLGHHSFSVRPGTEATISIREDEVHRLGSPYGHCTAGGEGVEVELLHNTSYTRQACLVSCFQQLMVETCSCGYYLHPLPAGAEYCSSARHPAWGHCFYRLYQDLETHRLPCTSRCPRPCRESAFKLSTGTSRWPSAKSAGWTLATLGEQGLPHQSHRQRSSLAKINIVYQELNYRSVEEAPVYSVPQLLSAMGSLCSLWFGASVLSLLELLELLLDASALTLVLGGRRLRRAWFSWPRASPASGASSIKPEASQMPPPAGGTSDDPEPSGPHLPRVMLPGVLAGVSAEESWAGPQPLETLDT

SEQ ID NO: 2374 - DNA, 1779 bp, Homo sapiens
ggtggcagctgcttccttccagagccggcaggcaggaggccagaggctccatcctgcttcagagctgccagctgcccccgcaatggctgagcaccgaagcatggacgggagaatggaagcagccacacgggggggctctcacctccagatcgcctgggcctgtggctccccagaggccctgccacacagttccggaccttccaccaccccacctacggcagctgctacacggtcgatggcgtctggacagctcagcgccccggcatcacccacggtgggtgccagcccctggccggtgcgggggcaggggtgcaggtcaggtggcctcacaccagcccttggcctcccaggagtcggcctggtcctcagggttgagcagcagcctcacctccctctgctgtccacgctggccggcatcagggtcatggttcacggccgtaaccacacgcccttcctggggcaccacagcttcagcgtccggccagggacggaggccaccatcagcatccgagaggacgaggtgcaccggctcgggagcccctacggccactgcaccgccggcggggaaggcgtggaggtggagctgctacacaacacctcctacaccaggcaggcctgcctggtgtcctgcttccagcagctgatggtggagacctgctcctgtggctactacctccaccctctgccggcgggggctgagtactgcagctctgcccggcaccctgcctggggacactgcttctaccgcctctaccaggacctggagacccaccggctcccctgtacctcccgctgccccaggccctgcagggagtctgcattcaagctctccactgggacctccaggtggccttccgccaagtcagctggatggactctggccacgctaggtgaacaggggctgccgcatcagagccacagacagaggagcagcctggccaaaatcaacatcgtctaccaggagctcaactaccgctcagtggaggaggcgcccgtgtactcggtgccgcagctgctctcggccatgggcagcctctgcagcctgtggtttggggcctccgtcctctccctcctggagctcctggagctgctgctcgatgcttctgccctcaccctggtgctaggcggccgccggctccgcagggcgtggttctcctggcccagagccagccctgcctcaggggcgtccagcatcaagccagaggccagtcagatgcccccgcctgcaggcggcacgtcagatgacccggagcccagcgggcctcatctcccacgggtgatgcttccaggggttctggcgggagtctcagccgaagagagctgggctgggccccagccccttgagactctggacacctgaaccagacctgccagggctgtgcgatctcttggcctggtccttgcagctgtggcagcagcaggctccccagcggcccagggtgggccagaccagcagcccaggaagcagcacacgcggccgtggggaggcaggcaccgggcatgtcggcgcctctggtcaaaccacctacactgcctggggtgggtctcaaggaggcccggggcggaggggggttcccgcgtgcacacgagtgcggctggacgtgccgacacgcggtgatgtacccatgctccgtgtgtctgtgtctgcatgtccacacgtctgatgcacctgtgtacgtgtgtcaagcctagccacctcagctgcagggaggcagaaggcaaggcaggccccacggacacacttgggctgctctgaaataaagctgttgactccacctg

SEQ ID NO: 2375 - protein, 425 aa, Homo sapiens
MAEHRSMDGRMEAATRGGSHLQIAWACGSPEALPHSSGPSTTPPTAAATRSMASGQLSAPASPTVGASPWPVRGQGCRSGGLTPALGLPGVGLVLRVEQQPHLPLLSTLAGIRVMVHGRNHTPFLGHHSFSVRPGTEATISIREDEVHRLGSPYGHCTAGGEGVEVELLHNTSYTRQACLVSCFQQLMVETCSCGYYLHPLPAGAEYCSSARHPAWGHCFYRLYQDLETHRLPCTSRCPRPCRESAFKLSTGTSRWPSAKSAGWTLATLGEQGLPHQSHRQRSSLAKINIVYQELNYRSVEEAPVYSVPQLLSAMGSLCSLWFGASVLSLLELLELLLDASALTLVLGGRRLRRAWFSWPRASPASGASSIKPEASQMPPPAGGTSDDPEPSGPHLPRVMLPGVLAGVSAEESWAGPQPLETLDT

SEQ ID NO: 2376 - DNA, 3763 bp, Homo sapiens
acgagcggtccgggccggcgcggctgccgctcggcgccgcggtcctcgtgccagtgagcgccgcggccgccgcagccatgaccgtggagttcgaggagtgcgtcaaggactccccgcgcttcagggcgaccattgacgaggtggagacggacgtggtggagattgaggccaaactggacaagctggtgaagctgtgcagtggcatggtggaagccggtaaggcctacgtcagcaccagcaggcttttcgtgagcggcgtccgcgacctgtcccagcagtgccagggcgacaccgtcatctcggaatgtctgcagaggttcgctgacagcctacaggaggtggtgaactaccacatgatcctgtttgaccaggcccagaggtccgtgcggcagcagctccagagctttgtcaaagaggatgtgcggaagttcaaggagacaaagaagcagtttgacaaggtgcgggaggacctggagctgtccctggtgaggaacgcccaggccccgaggcaccggccccacgaggtggaggaagccaccggggccctcaccctcaccaggaagtgcttccgccacctggcactggactatgtgctccagatcaatgttctgcaggccaagaagaagtttgagatcctggactctatgctgtccttcatgcacgcccagtccagcttcttccagcagggctacagcctcctgcaccagctggacccctacatgaagaagctggcagccgagctggaccagctggtgatcgactctgcggtggaaaagcgtgagatggagcgaaagcacgccgccatccagcagcgggtgaggacttctcctacgatgagtccaaagtggagtttgacgtggacgcgcccagtggggtggtgatggagggctacctcttcaagagggccagcaacgctttcaagacatggaaccggcgctggttctccattcagaacagccagctggtctaccagaagaagctcaaggatgccctcaccgtggtggtggatgacctccgcctgtgctctgtgaagccgtgtgaggacatcgagcggaggttctgcttcgaggtgctgtcacccaccaagagctgcatgctgcaggctgactccgagaagctgcggcaagcctgggtccaggctgtgcaggccagcatcgcctccgcctaccgcgagagccctgacagttgctatagcgagaggctggaccgcacagcatccccgtccacgagcagcatcgactccgccaccgacactcgggagcgtggcgtgaagggcgagagtgtgctgcagcgtgtgcagagtgtggccggcaacagccagtgcggcgactgcggccagccggacccccgctgggccagcatcaacctgggcgtgctgctctgcattgagtgctccggcatccacaggagcctgggtgtccactgctccaaggtgcggtccctgacgctggactcgtgggagcctgagctgctaaagctgatgtgtgagcttggaaacagcgctgtgaatcagatctatgaggcccagtgtgagggtgcaggcagcaggaaacccacagccagcagctcccggcaggacaaggaggcctggatcaaggacaaatacgtggaaaagaagtttctgcggaaggcgcccatggcaccagccctggaggccccaagacgctggagggtgcagaagtgcctgcggccccacagctctccccgcgctcccactgcccgccgcaaggtccggcttgagcccgttctgccctgtgtggccgctctgtcctcagtgggcaccctggatcgtaagttccgccgagactccctcttctgtcccgacgagctggactcgctcttctcctacttcgacgcaggggccgcaggggctggccctcgcagtctgagtagcgacagtggccttgggggcagctcggatggcagctcggacgtcctggctttcggctcgggctctgtggtggacagcgtcactgaggaggagggtgcagagtcggaggagtccagcggtgaggcagacggggacactgaggccgaggcctggggcctggcggacgtgcgcgagctgcacccggggctcttggcgcaccgcgcagcgcgtgcccgcgaccttcctgcgctggcggcggcgctggcccacggggccgaggtcaactgggcggacgcggaggatgagggcaagacgccgctggtgcaggccgtgctagggggctccttgatcgtctgtgagttcctgctgcaaaacggagcggacgtgaaccaaagagacagccggggccgggcgcccctgcaccacgccacgctgctgggccgcaccggccaggtttgcctgttcctgaagcggggcgcggaccagcacgccctggaccaagagcagcgggacccgttggccatcgcagtgcaggcggccaacgctgacatcgtgacactgctccgtctggcgcgcatggcggaggaaatgcgcgaggccgaggctgcccctggtcccccgggcgccctggcgggcagccccacggagctccagttccgcaggtgtatccaggagttcatcagcctccacctggaagagagctagggccgggcaggccgggcagctgccaccccgcccggcccgacgccccgcatgccccgaagtccctggcgcccacccggccgcggccctgcgtgtgacccgcgggtcgatacctggcagccccagtgctggggcgccgcggccctgctcgcccaggaggagagcgagggccccacactgagtctcttgaagcctcacgtttccctgggggggtgctgcatcgtcgggtgtccctcaccccacctggggaacctctgtcttcaggtcaccccttttcaggggcctgggttgctcatgtcacaagccacttttaaggcccgtgtcacctgtgtccctgtgtcctcagggcctgtgttacttcgtgccccacttctgcccagaacactgacctgttagctggctccctcctgcacaccccagagcctcctcccagggcagaaagggtggcccatccagggaaccaacgagtacctcacttagtgaccccagcatccaggctggcgtcgcgggtgctgggcgggaggggctctggcctgggtcctcagccctggctggacgcgggcgtcccaaggccacgtggctggccacgaaggtccccgtgccagacagccccagccgcatcccggcctcctccggaggcaccttctcctggtactcggcccagagcctgcgcataaagccactttgccactttgcagccctcatctcatgttctttgtagcggaccgagtgggtttgctataggcctcgtctgactttgtcttgcgtcttttctctgtggactcttgaggacgcctgagccccagccctgcccctgaccagcctcccccttgggtccaggggtctttcggctcatattgcagggcctgccaatgccttcacgcaccccttccccaaaggtgcccggcagggaggcagggcctcccccactcagcgcaggtcaggctaaggccagtcggctggtcactatgcaatgctgccctggggaggctccctgagggcacagtgggcgctggacccggccccccaactctcttgcctgctgcctgtgaccctgaagaacagaattgattcttgcccctctccctgtgtgagcttggccccgcctcttgccccaggcccctgctggcgggtctcaccccccacccctcgctttgaataaagcacttgcgcccactgcctgctcctggg

SEQ ID NO: 2377 - protein, 564 aa, Homo sapiens
MEGYLFKRASNAFKTWNRRWFSIQNSQLVYQKKLKDALTVVVDDLRLCSVKPCEDIERRFCFEVLSPTKSCMLQADSEKLRQAWVQAVQASIASAYRESPDSCYSERLDRTASPSTSSIDSATDTRERGVKGESVLQRVQSVAGNSQCGDCGQPDPRWASINLGVLLCIECSGIHRSLGVHCSKVRSLTLDSWEPELLKLMCELGNSAVNQIYEAQCEGAGSRKPTASSSRQDKEAWIKDKYVEKKFLRKAPMAPALEAPRRWRVQKCLRPHSSPRAPTARRKVRLEPVLPCVAALSSVGTLDRKFRRDSLFCPDELDSLFSYFDAGAAGAGPRSLSSDSGLGGSSDGSSDVLAFGSGSVVDSVTEEEGAESEESSGEADGDTEAEAWGLADVRELHPGLLAHRAARARDLPALAAALAHGAEVNWADAEDEGKTPLVQAVLGGSLIVCEFLLQNGADVNQRDSRGRAPLHHATLLGRTGQVCLFLKRGADQHALDQEQRDPLAIAVQAANADIVTLLRLARMAEEMREAEAAPGPPGALAGSPTELQFRRCIQEFISLHLEES

SEQ ID NO: 2378 - DNA, 1547 bp, Homo sapiens
ggtctgggtcctcctggtgctgccaggaccgagagcagctgccctactgcccccaccctgtcccacagtgcatgggtgccagacctggatgggctgcagtagtgcagtggggtgaggggaggtgccgcagggttgaggggctccagatgggtccagggttgactctgaactcctagaggagaggcgggtgaggctggctcagcccttggtgggcactgtccctgagggactcccagcggccggctgtcctgggagaggctggtccagccttcttccccgagggcacagcagcggctgcctctgcctgcctggggttgggggggcggggggaagtgcactgaacctggtcccagtcctgcccccgtagcaggcaggcgtctgtctcccagcctgtttcctgaaagccccttcccatggtggagcccctcagggaggtgcggggggaggtgaagccccgagggggctgaggctgcaggtgaccccagccagccccgttcttgctttagggcgaccattgacgaggtggagacggacgtggtggagattgagcctcacgtttccctgggggggtgctgcatcgtcgggtgtccctcaccccacctggggaacctctgtcttcaggtcaccccttttcaggggcctgggttgctcatgtcacaagccacttttaaggcccgtgtcacctgtgtccctgtgtcctcagggcctgtgttacttcgtgccccacttctgcccagaacactgacctgttagctggctccctcctgcacaccccagagcctcctcccagggcagaaagggtggcccatccagggaaccaacgagtacctcacttagtgaccccagcatccaggctggcgtcgcgggtgctgggcgggaggggctctggcctgggtcctcagccctggctggacgcgggcgtcccaaggccacgtggctggccacgaaggtccccgtgccagacagccccagccgcatcccggcctcctccggaggcaccttctcctggtactcggcccagagcctgcgcataaagccactttgccactttgcagccctcatctcatgttctttgtagcggaccgagtgggtttgctataggcctcgtctgactttgtcttgcgtcttttctctgtggactcttgaggacgcctgagccccagccctgcccctgaccagcctcccccttgggtccaggggtctttcggctcatattgcagggcctgccaatgccttcacgcaccccttccccaaaggtgcccggcagggaggcagggcctcccccactcagcgcaggtcaggctaaggccagtcggctggtcactatgcaatgctgccctggggaggctccctgagggcacagtgggcgctggacccggccccccaactctcttgcctgctgcctgtgaccctgaagaacagaattgattcttgcccctctccctgtgtgagcttggccccgcctcttgccccaggcccctgctggcgggtctcaccccccacccctcgctttgaataaagcacttgcgcccactgcctgctcctgg

SEQ ID NO: 2379 - protein, 62 aa, Homo sapiens
MLPWGGSLRAQWALDPAPQLSCLLPVTLKNRIDSCPSPCVSLAPPLAPGPCWRVSPPTPRFE

SEQ ID NO: 2380 - DNA, 5332 bp, Homo sapiens
tgtaacgtggagcctggtcgccccagcccgggagagggggaccctgcccgcaccctcctggtctggggagggcctagtggcagcccaggtgcagtgggccggaggccaggggagcccgtgtaggggaaccgcctggcctctgttcagtgtgcccctcccctgggtggggcttcaggcgctgagtcatggctttggttggggggcagcctcaccctcctccccgtcctccaagctgctgaggaaatcctgggctgagcacagcagaggaggcctaggtccccaggactgaggaagggagagctgaggggctcccagcagtgggagcggctctcggggcctctgccagggcccaccctgtccccatgagcacgtccgtgagctcctgggtgcagccatccccccttgctggctctccagggacacgggcgccccaaacccgagggcggcagctctgggtgcagctgtctctgcatccggccctgctcaggggtggctgcaactcctggggtgtggcgctctctgctgccttctcctgggaggatggtcccttctctgttctgggatcctccagctgaggtagaggtcagggtccaggggctgcaggctgggcactggcggtcagcggacaccacagcgagattccctccatcgccccctgcttcgggattcagagtcctcttagccccttgggaacaagagagggctgctcagagaggacctagtgtccttctggggtggctgggacccttcaaggtccctggctggggcagcctggtgcctgcagctccagctcctaattgaggacacgccccatgtaaaccacaggcccctcccccgaggcctgggacaccggtcagggtagcaaggtacgagggactgtaggccctgatggcctctgctcctggacccctgccctagacctggagtcctggccccagcccgggccctgtggtgcccaatccccaggaggccagatggcccggacagccagtgagccgattgtgtggagggctgccgggatcctggccctgtttccctgttgcctgctcccggagggggtggtcacgtgcccgatccatctgcctcctgtcttccggggattctcccgccgaggcttctctggtgatgtcatgccttaactcttctctccccaggcagccccactgtcaggctgtcctggtgggagtgggctctgaggaggatggcctacccgtctttccagcggaccatgccgcttgcagctgtgaggttgggggagccgggggcgtctctccccagctggtctgggtcctcctggtgctgccaggaccgagagcagctgccctactgcccccaccctgtcccacagtgcatgggtgccagacctggatgggctgcagtagtgcagtggggtgaggggaggtgccgcagggttgaggggctccagatgggtccagggttgactctgaactcctagaggagaggcgggtgaggctggctcagcccttggtgggcactgtccctgagggactcccagcggccggctgtcctgggagaggctggtccagccttcttccccgagggcacagcagcggctgcctctgcctgcctggggttgggggggcggggggaagtgcactgaacctggtcccagtcctgcccccgtagcaggcaggcgtctgtctcccagcctgtttcctgaaagccccttcccatggtggagcccctcagggaggtgcggggggaggtgaagccccgagggggctgaggctgcaggtgaccccagccagccccgttcttgctttagggcgaccattgacgaggtggagacggacgtggtggagattgaggccaaactggacaagctggtgaagctgtgcagtggcatggtggaagccggtaaggcctacgtcagcaccagcaggcttttcgtgagcggcgtccgcgacctgtcccagcagtgccagggcgacaccgtcatctcggaatgtctgcagaggttcgctgacagcctacaggaggtggtgaactaccacatgatcctgtttgaccaggcccagaggtccgtgcggcagcagctccagagctttgtcaaagaggatgtgcggaagttcaaggagacaaagaagcagtttgacaaggtgcgggaggacctggagctgtccctggtgaggaacgcccaggccccgaggcaccggccccacgaggtggaggaagccaccggggccctcaccctcaccaggaagtgcttccgccacctggcactggactatgtgctccagatcaatgttctgcaggccaagaagaagtttgagatcctggactctatgctgtccttcatgcacgcccagtccagcttcttccagcagggctacagcctcctgcaccagctggacccctacatgaagaagctggcagccgagctggaccagctggtgatcgactctgcggtggaaaagcgtgagatggagcgaaagcacgccgccatccagcagcggacgctgctgcaggacttctcctacgatgagtccaaagtggagtttgacgtggacgcgcccagtggggtggtgatggagggctacctcttcaagagggccagcaacgctttcaagacatggaaccggcgctggttctccattcagaacagccagctggtctaccagaagaagctcaaggatgccctcaccgtggtggtggatgacctccgcctgtgctctgtgaagccgtgtgaggacatcgagcggaggttctgcttcgaggtgctgtcacccaccaagagctgcatgctgcaggctgactccgagaagctgcggcaagcctgggtccaggctgtgcaggccagcatcgcctccgcctaccgcgagagccctgacagttgctatagcgagaggctggaccgcacagcatccccgtccacgagcagcatcgactccgccaccgacactcgggagcgtggcgtgaagggcgagagtgtgctgcagcgtgtgcagagtgtggccggcaacagccagtgcggcgactgcggccagccggacccccgctgggccagcatcaacctgggcgtgctgctctgcattgagtgctccggcatccacaggagcctgggtgtccactgctccaaggtgcggtccctgacgctggactcgtgggagcctgagctgctaaagctgatgtgtgagcttggaaacagcgctgtgaatcagatctatgaggcccagtgtgagggtgcaggcagcaggaaacccacagccagcagctcccggcaggacaaggaggcctggatcaaggacaaatacgtggaaaagaagtttctgcggaaggcgcccatggcaccagccctggaggccccaagacgctggagggtgcagaagtgcctgcggccccacagctctccccgcgctcccactgcccgccgcaaggtccggcttgagcccgttctgccctgtgtggccgctctgtcctcagtgggcaccctggatcgtaagttccgccgagactccctcttctgtcccgacgagctggactcgctcttctcctacttcgacgcaggggccgcaggggctggccctcgcaagggtgcagagtcggaggagtccagcggtgaggcagacggggacactgaggccgaggcctggggcctggcggacgtgcgcgagctgcacccggggctcttggcgcaccgcgcagcgcgtgcccgcgaccttcctgcgctggcggcggcgctggcccacggggccgaggtcaactgggcggacgcggaggatgagggcaagacgccgctggtgcaggccgtgctagggggctccttgatcgtctgtgagttcctgctgcaaaacggagcggacgtgaaccaaagagacagccggggccgggcgcccctgcaccacgccacgctgctgggccgcaccggccaggtttgcctgttcctgaagcggggcgcggaccagcacgccctggaccaagagcagcgggacccgttggccatcgcagtgcaggcggccaacgctgacatcgtgacactgctccgtctggcgcgcatggcggaggaaatgcgcgaggccgaggctgcccctggtcccccgggcgccctggcgggcagccccacggagctccagttccgcaggtgtatccaggagttcatcagcctccacctggaagagagctagggccgggcaggccgggcagctgccaccccgcccggcccgacgccccgcatgccccgaagtccctggcgcccacccggccgcggccctgcgtgtgacccgcgggtcgatacctggcagccccagtgctggggcgccgcggccctgctcgcccaggaggagagcgagggccccacactgagtctcttgaagcctcacgtttccctgggggggtgctgcatcgtcgggtgtccctcaccccacctggggaacctctgtcttcaggtcaccccttttcaggggcctgggttgctcatgtcacaagccacttttaaggcccgtgtcacctgtgtccctgtgtcctcagggcctgtgttacttcgtgccccacttctgcccagaacactgacctgttagctggctccctcctgcacaccccagagcctcctcccagggcagaaagggtggcccatccagggaaccaacgagtacctcacttagtgaccccagcatccaggctggcgtcgcgggtgctgggcgggaggggctctggcctgggtcctcagccctggctggacgcgggcgtcccaaggccacgtggctggccacgaaggtccccgtgccagacagccccagccgcatcccggcctcctccggaggcaccttctcctggtactcggcccagagcctgcgcataaagccactttgccactttgcagccctcatctcatgttctttgtagcggaccgagtgggtttgctataggcctcgtctgactttgtcttgcgtcttttctctgtggactcttgaggacgcctgagccccagccctgcccctgaccagcctcccccttgggtccaggggtctttcggctcatattgcagggcctgccaatgccttcacgcaccccttccccaaaggtgcccggcagggaggcagggcctcccccactcagcgcaggtcaggctaaggccagtcggctggtcactatgcaatgctgccctggggaggctccctgagggcacagtgggcgctggacccggccccccaactctcttgcctgctgcctgtgaccctgaagaacagaattgattcttgcccctctccctgtgtgagcttggccccgcctcttgccccaggcccctgctggcgggtctcaccccccacccctcgctttgaataaagcacttgcgcccactgcctgctcctgg

SEQ ID NO: 2381 - protein, 759 aa, Homo sapiens; identical to SEQ ID NO: 28

SEQ ID NO: 2382 - DNA, 3733 bp, Homo sapiens
tcgggaccgtccgcccccgctctgtgtctgcacctccactgggctgagcccctcccgggccctgcagtccagctctggccagggtcgtctgggtccgtgggggcgtcggcccctggtctctgacttgatcctgtgtccagagcagcgcgtggggaacaggcagctggagccgcgtttaaggcctgggggcgaccattgacgaggtggagacggacgtggtggagattgaggccaaactggacaagctggtgaagctgtgcagtggcatggtggaagccggtaaggcctacgtcagcaccagcaggcttttcgtgagcggcgtccgcgacctgtcccagcagtgccagggcgacaccgtcatctcggaatgtctgcagaggttcgctgacagcctacaggaggtggtgaactaccacatgatcctgtttgaccaggcccagaggtccgtgcggcagcagctccagagctttgtcaaagaggatgtgcggaagttcaaggagacaaagaagcagtttgacaaggtgcgggaggacctggagctgtccctggtgaggaacgcccaggccccgaggcaccggccccacgaggtggaggaagccaccggggccctcaccctcaccaggaagtgcttccgccacctggcactggactatgtgctccagatcaatgttctgcaggccaagaagaagtttgagatcctggactctatgctgtccttcatgcacgcccagtccagcttcttccagcagggctacagcctcctgcaccagctggacccctacatgaagaagctggcagccgagctggaccagctggtgatcgactctgcggtggaaaagcgtgagatggagcgaaagcacgccgccatccagcagcggacgctgctgcaggacttctcctacgatgagtccaaagtggagtttgacgtggacgcgcccagtggggtggtgatggagggctacctcttcaagagggccagcaacgctttcaagacatggaaccggcgctggttctccattcagaacagccagctggtctaccagaagaagctcaaggatgccctcaccgtggtggtggatgacctccgcctgtgctctgtgaagccgtgtgaggacatcgagcggaggttctgcttcgaggtgctgtcacccaccaagagctgcatgctgcaggctgactccgagaagctgcggcaagcctgggtccaggctgtgcaggccagcatcgcctccgcctaccgcgagagccctgacagttgctatagcgagaggctggaccgcacagcatccccgtccacgagcagcatcgactccgccaccgacactcgggagcgtggcgtgaagggcgagagtgtgctgcagcgtgtgcagagtgtggccggcaacagccagtgcggcgactgcggccagccggacccccgctgggccagcatcaacctgggcgtgctgctctgcattgagtgctccggcatccacaggagcctgggtgtccactgctccaaggtgcggtccctgacgctggactcgtgggagcctgagctgctaaagctgatgtgtgagcttggaaacagcgctgtgaatcagatctatgaggcccagtgtgagggtgcaggcagcaggaaacccacagccagcagctcccggcaggacaaggaggcctggatcaaggacaaatacgtggaaaagaagtttctgcggaaggcgcccatggcaccagccctggaggccccaagacgctggagggtgcagaagtgcctgcggccccacagctctccccgcgctcccactgcccgccgcaaggtccggcttgagcccgttctgccctgtgtggccgctctgtcctcagtgggcaccctggatcgtaagttccgccgagactccctcttctgtcccgacgagctggactcgctcttctcctacttcgacgcaggggccgcaggggctggccctcgcaagggtgcagagtcggaggagtccagcggtgaggcagacggggacactgaggccgaggcctggggcctggcggacgtgcgcgagctgcacccggggctcttggcgcaccgcgcagcgcgtgcccgcgaccttcctgcgctggcggcggcgctggcccacggggccgaggtcaactgggcggacgcggaggatgagggcaagacgccgctggtgcaggccgtgctagggggctccttgatcgtctgtgagttcctgctgcaaaacggagcggacgtgaaccaaagagacagccggggccgggcgcccctgcaccacgccacgctgctgggccgcaccggccaggtttgcctgttcctgaagcggggcgcggaccagcacgccctggaccaagagcagcgggacccgttggccatcgcagtgcaggcggccaacgctgacatcgtgacactgctccgtctggcgcgcatggcggaggaaatgcgcgaggccgaggctgcccctggtcccccgggcgccctggcgggcagccccacggagctccagttccgcaggtgtatccaggagttcatcagcctccacctggaagagagctagggccgggcaggccgggcagctgccaccccgcccggcccgacgccccgcatgccccgaagtccctggcgcccacccggccgcggccctgcgtgtgacccgcgggtcgatacctggcagccccagtgctggggcgccgcggccctgctcgcccaggaggagagcgagggccccacactgagtctcttgaagcctcacgtttccctgggggggtgctgcatcgtcgggtgtccctcaccccacctggggaacctctgtcttcaggtcaccccttttcaggggcctgggttgctcatgtcacaagccacttttaaggcccgtgtcacctgtgtccctgtgtcctcagggcctgtgttacttcgtgccccacttctgcccagaacactgacctgttagctggctccctcctgcacaccccagagcctcctcccagggcagaaagggtggcccatccagggaaccaacgagtacctcacttagtgaccccagcatccaggctggcgtcgcgggtgctgggcgggaggggctctggcctgggtcctcagccctggctggacgcgggcgtcccaaggccacgtggctggccacgaaggtccccgtgccagacagccccagccgcatcccggcctcctccggaggcaccttctcctggtactcggcccagagcctgcgcataaagccactttgccactttgcagccctcatctcatgttctttgtagcggaccgagtgggtttgctataggcctcgtctgactttgtcttgcgtcttttctctgtggactcttgaggacgcctgagccccagccctgcccctgaccagcctcccccttgggtccaggggtctttcggctcatattgcagggcctgccaatgccttcacgcaccccttccccaaaggtgcccggcagggaggcagggcctcccccactcagcgcaggtcaggctaaggccagtcggctggtcactatgcaatgctgccctggggaggctccctgagggcacagtgggcgctggacccggccccccaactctcttgcctgctgcctgtgaccctgaagaacagaattgattcttgcccctctccctgtgtgagcttggccccgcctcttgccccaggcccctgctggcgggtctcaccccccacccctcgctttgaataaagcacttgcgcccactgcctgctcctgg

SEQ ID NO: 2383 - protein, 759 aa, Homo sapiens; identical to SEQ ID NO: 28

SEQ ID NO: 2384 - DNA, 3681 bp, Homo sapiens
gccatgaccgtggagttcgaggagtgcgtcaaggactccccgcgcttcagacgtgtgcacaagtgtgcatcggctttgcttggtggacatttggcaaacgacaatggaggcaaagaaacctctctgcatccccaaggcgaccattgacgaggtggagacggacgtggtggagattgaggccaaactggacaagctggtgaagctgtgcagtggcatggtggaagccggtaaggcctacgtcagcaccagcaggcttttcgtgagcggcgtccgcgacctgtcccagcagtgccagggcgacaccgtcatctcggaatgtctgcagaggttcgctgacagcctacaggaggtggtgaactaccacatgatcctgtttgaccaggcccagaggtccgtgcggcagcagctccagagctttgtcaaagaggatgtgcggaagttcaaggagacaaagaagcagtttgacaaggtgcgggaggacctggagctgtccctggtgaggaacgcccaggccccgaggcaccggccccacgaggtggaggaagccaccggggccctcaccctcaccaggaagtgcttccgccacctggcactggactatgtgctccagatcaatgttctgcaggccaagaagaagtttgagatcctggactctatgctgtccttcatgcacgcccagtccagcttcttccagcagggctacagcctcctgcaccagctggacccctacatgaagaagctggcagccgagctggaccagctggtgatcgactctgcggtggaaaagcgtgagatggagcgaaagcacgccgccatccagcagcggacgctgctgcaggacttctcctacgatgagtccaaagtggagtttgacgtggacgcgcccagtggggtggtgatggagggctacctcttcaagagggccagcaacgctttcaagacatggaaccggcgctggttctccattcagaacagccagctggtctaccagaagaagctcaaggatgccctcaccgtggtggtggatgacctccgcctgtgctctgtgaagccgtgtgaggacatcgagcggaggttctgcttcgaggtgctgtcacccaccaagagctgcatgctgcaggctgactccgagaagctgcggcaagcctgggtccaggctgtgcaggccagcatcgcctccgcctaccgcgagagccctgacagttgctatagcgagaggctggaccgcacagcatccccgtccacgagcagcatcgactccgccaccgacactcgggagcgtggcgtgaagggcgagagtgtgctgcagcgtgtgcagagtgtggccggcaacagccagtgcggcgactgcggccagccggacccccgctgggccagcatcaacctgggcgtgctgctctgcattgagtgctccggcatccacaggagcctgggtgtccactgctccaaggtgcggtccctgacgctggactcgtgggagcctgagctgctaaagctgatgtgtgagcttggaaacagcgctgtgaatcagatctatgaggcccagtgtgagggtgcaggcagcaggaaacccacagccagcagctcccggcaggacaaggaggcctggatcaaggacaaatacgtggaaaagaagtttctgcggaaggcgcccatggcaccagccctggaggccccaagacgctggagggtgcagaagtgcctgcggccccacagctctccccgcgctcccactgcccgccgcaaggtccggcttgagcccgttctgccctgtgtggccgctctgtcctcagtgggcaccctggatcgtaagttccgccgagactccctcttctgtcccgacgagctggactcgctcttctcctacttcgacgcaggggccgcaggggctggccctcgcaagggtgcagagtcggaggagtccagcggtgaggcagacggggacactgaggccgaggcctggggcctggcggacgtgcgcgagctgcacccggggctcttggcgcaccgcgcagcgcgtgcccgcgaccttcctgcgctggcggcggcgctggcccacggggccgaggtcaactgggcggacgcggaggatgagggcaagacgccgctggtgcaggccgtgctagggggctccttgatcgtctgtgagttcctgctgcaaaacggagcggacgtgaaccaaagagacagccggggccgggcgcccctgcaccacgccacgctgctgggccgcaccggccaggtttgcctgttcctgaagcggggcgcggaccagcacgccctggaccaagagcagcgggacccgttggccatcgcagtgcaggcggccaacgctgacatcgtgacactgctccgtctggcgcgcatggcggaggaaatgcgcgaggccgaggctgcccctggtcccccgggcgccctggcgggcagccccacggagctccagttccgcaggtgtatccaggagttcatcagcctccacctggaagagagctagggccgggcaggccgggcagctgccaccccgcccggcccgacgccccgcatgccccgaagtccctggcgcccacccggccgcggccctgcgtgtgacccgcgggtcgatacctggcagccccagtgctggggcgccgcggccctgctcgcccaggaggagagcgagggccccacactgagtctcttgaagcctcacgtttccctgggggggtgctgcatcgtcgggtgtccctcaccccacctggggaacctctgtcttcaggtcaccccttttcaggggcctgggttgctcatgtcacaagccacttttaaggcccgtgtcacctgtgtccctgtgtcctcagggcctgtgttacttcgtgccccacttctgcccagaacactgacctgttagctggctccctcctgcacaccccagagcctcctcccagggcagaaagggtggcccatccagggaaccaacgagtacctcacttagtgaccccagcatccaggctggcgtcgcgggtgctgggcgggaggggctctggcctgggtcctcagccctggctggacgcgggcgtcccaaggccacgtggctggccacgaaggtccccgtgccagacagccccagccgcatcccggcctcctccggaggcaccttctcctggtactcggcccagagcctgcgcataaagccactttgccactttgcagccctcatctcatgttctttgtagcggaccgagtgggtttgctataggcctcgtctgactttgtcttgcgtcttttctctgtggactcttgaggacgcctgagccccagccctgcccctgaccagcctcccccttgggtccaggggtctttcggctcatattgcagggcctgccaatgccttcacgcaccccttccccaaaggtgcccggcagggaggcagggcctcccccactcagcgcaggtcaggctaaggccagtcggctggtcactatgcaatgctgccctggggaggctccctgagggcacagtgggcgctggacccggccccccaactctcttgcctgctgcctgtgaccctgaagaacagaattgattcttgcccctctccctgtgtgagcttggccccgcctcttgccccaggcccctgctggcgggtctcaccccccacccctcgctttgaataaagcacttgcgcccactgcctgctcctgg

SEQ ID NO: 2385 - protein, 796 aa, Homo sapiens
MEAKKPLCIPKATIDEVETDVVEIEAKLDKLVKLCSGMVEAGKAYVSTSRLFVSGVRDLSQQCQGDTVISECLQRFADSLQEVVNYHMILFDQAQRSVRQQLQSFVKEDVRKFKETKKQFDKVREDLELSLVRNAQAPRHRPHEVEEATGALTLTRKCFRHLALDYVLQINVLQAKKKFEILDSMLSFMHAQSSFFQQGYSLLHQLDPYMKKLAAELDQLVIDSAVEKREMERKHAAIQQRTLLQDFSYDESKVEFDVDAPSGVVMEGYLFKRASNAFKTWNRRWFSIQNSQLVYQKKLKDALTVVVDDLRLCSVKPCEDIERRFCFEVLSPTKSCMLQADSEKLRQAWVQAVQASIASAYRESPDSCYSERLDRTASPSTSSIDSATDTRERGVKGESVLQRVQSVAGNSQCGDCGQPDPRWASINLGVLLCIECSGIHRSLGVHCSKVRSLTLDSWEPELLKLMCELGNSAVNQIYEAQCEGAGSRKPTASSSRQDKEAWIKDKYVEKKFLRKAPMAPALEAPRRWRVQKCLRPHSSPRAPTARRKVRLEPVLPCVAALSSVGTLDRKFRRDSLFCPDELDSLFSYFDAGAAGAGPRKGAESEESSGEADGDTEAEAWGLADVRELHPGLLAHRAARARDLPALAAALAHGAEVNWADAEDEGKTPLVQAVLGGSLIVCEFLLQNGADVNQRDSRGRAPLHHATLLGRTGQVCLFLKRGADQHALDQEQRDPLAIAVQAANADIVTLLRLARMAEEMREAEAAPGPPGALAGSPTELQFRRCIQEFISLHLEES

SEQ ID NO: 2386 - DNA, 3646 bp, Homo sapiens
gcagccatgaccgtggagttcgaggagtgcgtcaaggactccccgcgcttcagagcagcgcgtggggaacaggcagctggagccgcgtttaaggcctgggggcgaccattgacgaggtggagacggacgtggtggagattgaggccaaactggacaagctggtgaagctgtgcagtggcatggtggaagccggtaaggcctacgtcagcaccagcaggcttttcgtgagcggcgtccgcgacctgtcccagcagtgccagggcgacaccgtcatctcggaatgtctgcagaggttcgctgacagcctacaggaggtggtgaactaccacatgatcctgtttgaccaggcccagaggtccgtgcggcagcagctccagagctttgtcaaagaggatgtgcggaagttcaaggagacaaagaagcagtttgacaaggtgcgggaggacctggagctgtccctggtgaggaacgcccaggccccgaggcaccggccccacgaggtggaggaagccaccggggccctcaccctcaccaggaagtgcttccgccacctggcactggactatgtgctccagatcaatgttctgcaggccaagaagaagtttgagatcctggactctatgctgtccttcatgcacgcccagtccagcttcttccagcagggctacagcctcctgcaccagctggacccctacatgaagaagctggcagccgagctggaccagctggtgatcgactctgcggtggaaaagcgtgagatggagcgaaagcacgccgccatccagcagcggacgctgctgcaggacttctcctacgatgagtccaaagtggagtttgacgtggacgcgcccagtggggtggtgatggagggctacctcttcaagagggccagcaacgctttcaagacatggaaccggcgctggttctccattcagaacagccagctggtctaccagaagaagctcaaggatgccctcaccgtggtggtggatgacctccgcctgtgctctgtgaagccgtgtgaggacatcgagcggaggttctgcttcgaggtgctgtcacccaccaagagctgcatgctgcaggctgactccgagaagctgcggcaagcctgggtccaggctgtgcaggccagcatcgcctccgcctaccgcgagagccctgacagttgctatagcgagaggctggaccgcacagcatccccgtccacgagcagcatcgactccgccaccgacactcgggagcgtggcgtgaagggcgagagtgtgctgcagcgtgtgcagagtgtggccggcaacagccagtgcggcgactgcggccagccggacccccgctgggccagcatcaacctgggcgtgctgctctgcattgagtgctccggcatccacaggagcctgggtgtccactgctccaaggtgcggtccctgacgctggactcgtgggagcctgagctgctaaagctgatgtgtgagcttggaaacagcgctgtgaatcagatctatgaggcccagtgtgagggtgcaggcagcaggaaacccacagccagcagctcccggcaggacaaggaggcctggatcaaggacaaatacgtggaaaagaagtttctgcggaaggcgcccatggcaccagccctggaggccccaagacgctggagggtgcagaagtgcctgcggccccacagctctccccgcgctcccactgcccgccgcaaggtccggcttgagcccgttctgccctgtgtggccgctctgtcctcagtgggcaccctggatcgtaagttccgccgagactccctcttctgtcccgacgagctggactcgctcttctcctacttcgacgcaggggccgcaggggctggccctcgcaagggtgcagagtcggaggagtccagcggtgaggcagacggggacactgaggccgaggcctggggcctggcggacgtgcgcgagctgcacccggggctcttggcgcaccgcgcagcgcgtgcccgcgaccttcctgcgctggcggcggcgctggcccacggggccgaggtcaactgggcggacgcggaggatgagggcaagacgccgctggtgcaggccgtgctagggggctccttgatcgtctgtgagttcctgctgcaaaacggagcggacgtgaaccaaagagacagccggggccgggcgcccctgcaccacgccacgctgctgggccgcaccggccaggtttgcctgttcctgaagcggggcgcggaccagcacgccctggaccaagagcagcgggacccgttggccatcgcagtgcaggcggccaacgctgacatcgtgacactgctccgtctggcgcgcatggcggaggaaatgcgcgaggccgaggctgcccctggtcccccgggcgccctggcgggcagccccacggagctccagttccgcaggtgtatccaggagttcatcagcctccacctggaagagagctagggccgggcaggccgggcagctgccaccccgcccggcccgacgccccgcatgccccgaagtccctggcgcccacccggccgcggccctgcgtgtgacccgcgggtcgatacctggcagccccagtgctggggcgccgcggccctgctcgcccaggaggagagcgagggccccacactgagtctcttgaagcctcacgtttccctgggggggtgctgcatcgtcgggtgtccctcaccccacctggggaacctctgtcttcaggtcaccccttttcaggggcctgggttgctcatgtcacaagccacttttaaggcccgtgtcacctgtgtccctgtgtcctcagggcctgtgttacttcgtgccccacttctgcccagaacactgacctgttagctggctccctcctgcacaccccagagcctcctcccagggcagaaagggtggcccatccagggaaccaacgagtacctcacttagtgaccccagcatccaggctggcgtcgcgggtgctgggcgggaggggctctggcctgggtcctcagccctggctggacgcgggcgtcccaaggccacgtggctggccacgaaggtccccgtgccagacagccccagccgcatcccggcctcctccggaggcaccttctcctggtactcggcccagagcctgcgcataaagccactttgccactttgcagccctcatctcatgttctttgtagcggaccgagtgggtttgctataggcctcgtctgactttgtcttgcgtcttttctctgtggactcttgaggacgcctgagccccagccctgcccctgaccagcctcccccttgggtccaggggtctttcggctcatattgcagggcctgccaatgccttcacgcaccccttccccaaaggtgcccggcagggaggcagggcctcccccactcagcgcaggtcaggctaaggccagtcggctggtcactatgcaatgctgccctggggaggctccctgagggcacagtgggcgctggacccggccccccaactctcttgcctgctgcctgtgaccctgaagaacagaattgattcttgcccctctccctgtgtgagcttggccccgcctcttgccccaggcccctgctggcgggtctcaccccccacccctcgctttgaataaagcacttgcgcccactgcctgctcctgg

SEQ ID NO: 2387 - protein, 759 aa, Homo sapiens; identical to SEQ ID NO: 28

SEQ ID NO: 2388 - DNA, 3670 bp, Homo sapiens
acgagcggtccgggccggcgcggctgccgctcggcgccgcggtcctcgtgccagtgagcgccgcggccgccgcagccatgaccgtggagttcgaggagtgcgtcaaggactccccgcgcttcagggcgaccattgacgaggtggagacggacgtggtggagattgaggccaaactggacaagctggtgaagctgtgcagtggcatggtggaagccggtaaggcctacgtcagcaccagcaggcttttcgtgagcggcgtccgcgacctgtcccagcagtgccagggcgacaccgtcatctcggaatgtctgcagaggttcgctgacagcctacaggaggtggtgaactaccacatgatcctgtttgaccaggcccagaggtccgtgcggcagcagctccagagctttgtcaaagaggatgtgcggaagttcaaggagacaaagaagcagtttgacaaggtgcgggaggacctggagctgtccctggtgaggaacgcccaggccccgaggcaccggccccacgaggtggaggaagccaccggggccctcaccctcaccaggaagtgcttccgccacctggcactggactatgtgctccagatcaatgttctgcaggccaagaagaagtttgagatcctggactctatgctgtccttcatgcacgcccagtccagcttcttccagcagggctacagcctcctgcaccagctggacccctacatgaagaagctggcagccgagctggaccagctggtgatcgactctgcggtggaaaagcgtgagatggagcgaaagcacgccgccatccagcagcggacgctgctgcaggacttctcctacgatgagtccaaagtggagtttgacgtggacgcgcccagtggggtggtgatggagggctacctcttcaagagggccagcaacgctttcaagacatggaaccggcgctggttctccattcagaacagccagctggtctaccagaagaagctcaaggatgccctcaccgtggtggtggatgacctccgcctgtgctctgtgaagccgtgtgaggacatcgagcggaggttctgcttcgaggtgctgtcacccaccaagagctgcatgctgcaggctgactccgagaagctgcggcaagcctgggtccaggctgtgcaggccagcatcgcctccgcctaccgcgagagccctgacagttgctatagcgagaggctggaccgcacagcatccccgtccacgagcagcatcgactccgccaccgacactcgggagcgtggcgtgaagggcgagagtgtgctgcagcgtgtgcagagtgtggccggcaacagccagtgcggcgactgcggccagccggacccccgctgggccagcatcaacctgggcgtgctgctctgcattgagtgctccggcatccacaggagcctgggtgtccactgctccaaggtgcggtccctgacgctggactcgtgggagcctgagctgctaaagctgatgtgtgagcttggaaacagcgctgtgaatcagatctatgaggcccagtgtgagggtgcaggcagcaggaaacccacagccagcagctcccggcaggacaaggaggcctggatcaaggacaaatacgtggaaaagaagtttctgcggaaggcgcccatggcaccagccctggaggccccaagacgctggagggtgcagaagtgcctgcggccccacagctctccccgcgctcccactgcccgccgcaaggtccggcttgagcccgttctgccctgtgtggccgctctgtcctcagtgggcaccctggatcgtaagttccgccgagactccctcttctgtcccgacgagctggactcgctcttctcctacttcgacgcaggggccgcaggggctggccctcgcaagggtgcagagtcggaggagtccagcggtgaggcagacggggacactgaggccgaggcctggggcctggcggacgtgcgcgagctgcacccggggctcttggcgcaccgcgcagcgcgtgcccgcgaccttcctgcgctggcggcggcgctggcccacggggccgaggtcaactgggcggacgcggaggatgagggcaagacgccgctggtgcaggccgtgctagggggctccttgatcgtctgtgagttcctgctgcaaaacggagcggacgtgaaccaaagagacagccggggccgggcgcccctgcaccacgccacgctgctgggccgcaccggccaggtttgcctgttcctgaagcggggcgcggaccagcacgccctggaccaagagcagcgggacccgttggccatcgcagtgcaggcggccaacgctgacatcgtgacactgctccgtctggcgcgcatggcggaggaaatgcgcgaggccgaggctgcccctggtcccccgggcgccctggcgggcagccccacggagctccagttccgcaggtgtatccaggagttcatcagcctccacctggaagagagctagggccgggcaggccgggcagctgccaccccgcccggcccgacgccccgcatgccccgaagtccctggcgcccacccggccgcggccctgcgtgtgacccgcgggtcgatacctggcagccccagtgctggggcgccgcggccctgctcgcccaggaggagagcgagggccccacactgagtctcttgaagcctcacgtttccctgggggggtgctgcatcgtcgggtgtccctcaccccacctggggaacctctgtcttcaggtcaccccttttcaggggcctgggttgctcatgtcacaagccacttttaaggcccgtgtcacctgtgtccctgtgtcctcagggcctgtgttacttcgtgccccacttctgcccagaacactgacctgttagctggctccctcctgcacaccccagagcctcctcccagggcagaaagggtggcccatccagggaaccaacgagtacctcacttagtgaccccagcatccaggctggcgtcgcgggtgctgggcgggaggggctctggcctgggtcctcagccctggctggacgcgggcgtcccaaggccacgtggctggccacgaaggtccccgtgccagacagccccagccgcatcccggcctcctccggaggcaccttctcctggtactcggcccagagcctgcgcataaagccactttgccactttgcagccctcatctcatgttctttgtagcggaccgagtgggtttgctataggcctcgtctgactttgtcttgcgtcttttctctgtggactcttgaggacgcctgagccccagccctgcccctgaccagcctcccccttgggtccaggggtctttcggctcatattgcagggcctgccaatgccttcacgcaccccttccccaaaggtgcccggcagggaggcagggcctcccccactcagcgcaggtcaggctaaggccagtcggctggtcactatgcaatgctgccctggggaggctccctgagggcacagtgggcgctggacccggccccccaactctcttgcctgctgcctgtgaccctgaagaacagaattgattcttgcccctctccctgtgtgagcttggccccgcctcttgccccaggcccctgctggcgggtctcaccccccacccctcgctttgaataaagcacttgcgcccactgcctgctcctgg

SEQ ID NO: 2389 - protein, 801 aa, Homo sapiens
MTVEFEECVKDSPRFRATIDEVETDVVEIEAKLDKLVKLCSGMVEAGKAYVSTSRLFVSGVRDLSQQCQGDTVISECLQRFADSLQEVVNYHMILFDQAQRSVRQQLQSFVKEDVRKFKETKKQFDKVREDLELSLVRNAQAPRHRPHEVEEATGALTLTRKCFRHLALDYVLQINVLQAKKKFEILDSMLSFMHAQSSFFQQGYSLLHQLDPYMKKLAAELDQLVIDSAVEKREMERKHAAIQQRTLLQDFSYDESKVEFDVDAPSGVVMEGYLFKRASNAFKTWNRRWFSIQNSQLVYQKKLKDALTVVVDDLRLCSVKPCEDIERRFCFEVLSPTKSCMLQADSEKLRQAWVQAVQASIASAYRESPDSCYSERLDRTASPSTSSIDSATDTRERGVKGESVLQRVQSVAGNSQCGDCGQPDPRWASINLGVLLCIECSGIHRSLGVHCSKVRSLTLDSWEPELLKLMCELGNSAVNQIYEAQCEGAGSRKPTASSSRQDKEAWIKDKYVEKKFLRKAPMAPALEAPRRWRVQKCLRPHSSPRAPTARRKVRLEPVLPCVAALSSVGTLDRKFRRDSLFCPDELDSLFSYFDAGAAGAGPRKGAESEESSGEADGDTEAEAWGLADVRELHPGLLAHRAARARDLPALAAALAHGAEVNWADAEDEGKTPLVQAVLGGSLIVCEFLLQNGADVNQRDSRGRAPLHHATLLGRTGQVCLFLKRGADQHALDQEQRDPLAIAVQAANADIVTLLRLARMAEEMREAEAAPGPPGALAGSPTELQFRRCIQEFISLHLEES

SEQ ID NO: 2390 - DNA, 3714 bp, Homo sapiens
actcactctgccgggagagtccagcataggttgcgttcaaacaccggcagctcatcacgccggtgacagccagtggccaggcggtacaggtaggtccgggacgtggctgcgtgacgagcgtggaagtcgctgggcactcggaaggcccgcaggaccctatggcggcagggcgaccattgacgaggtggagacggacgtggtggagattgaggccaaactggacaagctggtgaagctgtgcagtggcatggtggaagccggtaaggcctacgtcagcaccagcaggcttttcgtgagcggcgtccgcgacctgtcccagcagtgccagggcgacaccgtcatctcggaatgtctgcagaggttcgctgacagcctacaggaggtggtgaactaccacatgatcctgtttgaccaggcccagaggtccgtgcggcagcagctccagagctttgtcaaagaggatgtgcggaagttcaaggagacaaagaagcagtttgacaaggtgcgggaggacctggagctgtccctggtgaggaacgcccaggccccgaggcaccggccccacgaggtggaggaagccaccggggccctcaccctcaccaggaagtgcttccgccacctggcactggactatgtgctccagatcaatgttctgcaggccaagaagaagtttgagatcctggactctatgctgtccttcatgcacgcccagtccagcttcttccagcagggctacagcctcctgcaccagctggacccctacatgaagaagctggcagccgagctggaccagctggtgatcgactctgcggtggaaaagcgtgagatggagcgaaagcacgccgccatccagcagcggacgctgctgcaggacttctcctacgatgagtccaaagtggagtttgacgtggacgcgcccagtggggtggtgatggagggctacctcttcaagagggccagcaacgctttcaagacatggaaccggcgctggttctccattcagaacagccagctggtctaccagaagaagctcaaggatgccctcaccgtggtggtggatgacctccgcctgtgctctgtgaagccgtgtgaggacatcgagcggaggttctgcttcgaggtgctgtcacccaccaagagctgcatgctgcaggctgactccgagaagctgcggcaagcctgggtccaggctgtgcaggccagcatcgcctccgcctaccgcgagagccctgacagttgctatagcgagaggctggaccgcacagcatccccgtccacgagcagcatcgactccgccaccgacactcgggagcgtggcgtgaagggcgagagtgtgctgcagcgtgtgcagagtgtggccggcaacagccagtgcggcgactgcggccagccggacccccgctgggccagcatcaacctgggcgtgctgctctgcattgagtgctccggcatccacaggagcctgggtgtccactgctccaaggtgcggtccctgacgctggactcgtgggagcctgagctgctaaagctgatgtgtgagcttggaaacagcgctgtgaatcagatctatgaggcccagtgtgagggtgcaggcagcaggaaacccacagccagcagctcccggcaggacaaggaggcctggatcaaggacaaatacgtggaaaagaagtttctgcggaaggcgcccatggcaccagccctggaggccccaagacgctggagggtgcagaagtgcctgcggccccacagctctccccgcgctcccactgcccgccgcaaggtccggcttgagcccgttctgccctgtgtggccgctctgtcctcagtgggcaccctggatcgtaagttccgccgagactccctcttctgtcccgacgagctggactcgctcttctcctacttcgacgcaggggccgcaggggctggccctcgcaagggtgcagagtcggaggagtccagcggtgaggcagacggggacactgaggccgaggcctggggcctggcggacgtgcgcgagctgcacccggggctcttggcgcaccgcgcagcgcgtgcccgcgaccttcctgcgctggcggcggcgctggcccacggggccgaggtcaactgggcggacgcggaggatgagggcaagacgccgctggtgcaggccgtgctagggggctccttgatcgtctgtgagttcctgctgcaaaacggagcggacgtgaaccaaagagacagccggggccgggcgcccctgcaccacgccacgctgctgggccgcaccggccaggtttgcctgttcctgaagcggggcgcggaccagcacgccctggaccaagagcagcgggacccgttggccatcgcagtgcaggcggccaacgctgacatcgtgacactgctccgtctggcgcgcatggcggaggaaatgcgcgaggccgaggctgcccctggtcccccgggcgccctggcgggcagccccacggagctccagttccgcaggtgtatccaggagttcatcagcctccacctggaagagagctagggccgggcaggccgggcagctgccaccccgcccggcccgacgccccgcatgccccgaagtccctggcgcccacccggccgcggccctgcgtgtgacccgcgggtcgatacctggcagccccagtgctggggcgccgcggccctgctcgcccaggaggagagcgagggccccacactgagtctcttgaagcctcacgtttccctgggggggtgctgcatcgtcgggtgtccctcaccccacctggggaacctctgtcttcaggtcaccccttttcaggggcctgggttgctcatgtcacaagccacttttaaggcccgtgtcacctgtgtccctgtgtcctcagggcctgtgttacttcgtgccccacttctgcccagaacactgacctgttagctggctccctcctgcacaccccagagcctcctcccagggcagaaagggtggcccatccagggaaccaacgagtacctcacttagtgaccccagcatccaggctggcgtcgcgggtgctgggcgggaggggctctggcctgggtcctcagccctggctggacgcgggcgtcccaaggccacgtggctggccacgaaggtccccgtgccagacagccccagccgcatcccggcctcctccggaggcaccttctcctggtactcggcccagagcctgcgcataaagccactttgccactttgcagccctcatctcatgttctttgtagcggaccgagtgggtttgctataggcctcgtctgactttgtcttgcgtcttttctctgtggactcttgaggacgcctgagccccagccctgcccctgaccagcctcccccttgggtccaggggtctttcggctcatattgcagggcctgccaatgccttcacgcaccccttccccaaaggtgcccggcagggaggcagggcctcccccactcagcgcaggtcaggctaaggccagtcggctggtcactatgcaatgctgccctggggaggctccctgagggcacagtgggcgctggacccggccccccaactctcttgcctgctgcctgtgaccctgaagaacagaattgattcttgcccctctccctgtgtgagcttggccccgcctcttgccccaggcccctgctggcgggtctcaccccccacccctcgctttgaataaagcacttgcgcccactgcctgctcctgg

SEQ ID NO: 2391 - protein, 759 aa, Homo sapiens; identical to SEQ ID NO: 28

SEQ ID NO: 2392 - DNA, 2500 bp, Homo sapiens
actcactctgccgggagagtccagcataggttgcgttcaaacaccggcagctcatcacgccggtgacagccagtggccaggcggtacaggtaggtccgggacgtggctgcgtgacgagcgtggaagtcgctgggcactcggaaggcccgcaggaccctatggcggcagggcgaccattgacgaggtggagacggacgtggtggagattgaggccaaactggacaagctggtgaagctgtgcagtggcatggtggaagccggtaaggcctacgtcagcaccagcaggcttttcgtgagcggcgtccgcgacctgtcccagcagtgccagggcgacaccgtcatctcggaatgtctgcagaggttcgctgacagcctacaggaggtggtgaactaccacatgatcctgtttgaccaggcccagaggtccgtgcggcagcagctccagagctttgtcaaagaggatgtgcggaagttcaaggagacaaagaagcagtttgacaaggtgcgggaggacctggagctgtccctggtgaggaacgcccaggccccgaggcaccggccccacgaggtggaggaagccaccggggccctcaccctcaccaggaagtgcttccgccacctggcactggactatgtgctccagatcaatgttctgcaggccaagaagaagtttgagatcctggactctatgctgtccttcatgcacgcccagtccagcttcttccagcagggctacagcctcctgcaccagctggacccctacatgaagaagctggcagccgagctggaccagctggtgatcgactctgcggtggaaaagcgtgagatggagcgaaagcacgccgccatccagcagcgggtgaggccgcgcagccggctccctgcacaccaggcgcctgggaggcccctgcgtcctcaccccatgcccggcacaccctccccgccccttcctcctgcctgtctcccacctgccctgcccacaccctctctaggggaccaaggctgctccctttgatgtgtgcagtggaggggcacgtgtgggtggggccgctgctgggatctccttttgaggcggtggtcacctctgtggcctcagtcactggctccttgcggggcctttgcttgcctgtgggacagcagccccggccaccatcccgggcagaggttggctgcaggcaggagtggctattttgggataggggagagccccccaggagttggggacgggtccaccagtcaccaggagttggggacgggtccaccagtcaccaggagttggcagccgtcactcactggctttctccccctaccccctcctgctccggccctccagacgctgctgcaggtaagtgagcacgggccctgggcgggctgtgggtcgggggagaccagatggggcggtgcctttccctcctctaccccaagggcacttcagcaccaaggacacctcccaccagtctcggctcctgctgctgatgcggctgtgaggggctggctccggccagacctccacattccccgtggggttggcggcagctgtcccttcccatcccatgtggcctggggagcaggtggccgcccctcccctctgcttccctggcctgccagatggcgggacacacagggccctcagtgactcccaggcctcctgaatggggctctgtccgcccagctggccacatgaatggggcactcaggatgcggagggtgggggcgcagcttccttcctgatcgcagcctgctggtccctgcagggctggggtggggccggcactctcgggcccccagctgtgaacgtgaggggtctgccccacgggttgcagggctgggggccttgctcaggtcaagaagtggctgtggtgaacagagggtctctcgtctgagcgtgtggtccgtgggccgtgtggcagcctcagacaaggacctcacccccacctgtgctccggaggcaccttctcctggtactcggcccagagcctgcgcataaagccactttgccactttgcagccctcatctcatgttctttgtagcggaccgagtgggtttgctataggcctcgtctgactttgtcttgcgtcttttctctgtggactcttgaggacgcctgagccccagccctgcccctgaccagcctcccccttgggtccaggggtctttcggctcatattgcagggcctgccaatgccttcacgcaccccttccccaaaggtgcccggcagggaggcagggcctcccccactcagcgcaggtcaggctaaggccagtcggctggtcactatgcaatgctgccctggggaggctccctgagggcacagtgggcgctggacccggccccccaactctcttgcctgctgcctgtgaccctgaagaacagaattgattcttgcccctctccctgtgtgagcttggccccgcctcttgccccaggcccctgctggcgggtctcaccccccacccctcgctttgaataaagcacttgcgcccactgcctgctcctgg

SEQ ID NO: 2393 - protein, 255 aa, Homo sapiens
MVEAGKAYVSTSRLFVSGVRDLSQQCQGDTVISECLQRFADSLQEVVNYHMILFDQAQRSVRQQLQSFVKEDVRKFKETKKQFDKVREDLELSLVRNAQAPRHRPHEVEEATGALTLTRKCFRHLALDYVLQINVLQAKKKFEILDSMLSFMHAQSSFFQQGYSLLHQLDPYMKKLAAELDQLVIDSAVEKREMERKHAAIQQRVRPRSRLPAHQAPGRPLRPHPMPGTPSPPLPPACLPPALPTPSLGDQGCSL

SEQ ID NO: 2394 - DNA, 589 bp, Homo sapiens
tgggaggatggtcccttctctgttctgggatcctccagctgaggtagaggtcagggtccaggggctgcaggctgggcactggcggtcagcggacaccacagcgagattccctccatcgccccctgcttcgggattcagagtcctcttagccccttgggaacaagagagggctgctcagagaggacctagtgtccttctggggtggctgggacccttcaaggtccctggctggggcagcctggtgcctgcagctccagctcctaattgaggacacgccccatgtaaaccacaggcccctcccccgaggcctgggacaccggtcagggtagcaaggtacgagggactgtaggccctgatggcctctgctcctggacccctgccctagacctggagtcctggccccagcccgggccctgtggtgcccaatccccaggaggccagatggcccggacagccagtgagccgattgtgtggagggctgccgggatcctggccctgtttccctgttgcctgcccgcctcttgccccaggcccctgctggcgggtctcaccccccacccctcgctttgaataaagcacttgcgcccac

SEQ ID NO: 2395 - protein, 42 aa, Homo sapiens
MARTASEPIVWRAAGILALFPCCLPASCPRPLLAGLTPHPSL

SEQ ID NO: 2396 - DNA, 3342 bp, Homo sapiens
ctttgcttgcctgtgggacagcagccccggccaccatcccgggcagaggttggctgcaggcaggagtggctattttgggataggggagagccccccaggagttggggacgggtccaccagtcaccaggagttggggacgggtccaccagtcaccaggagttggcagccgtcactcactggctttctccccctaccccctcctgctccggccctccagacgctgctgcaggtaagtgagcacgggccctgggcgggctgtgggtcgggggagaccagatggggcggtgcctttccctcctctaccccaagggcacttcagcaccaaggacacctcccaccagtctcggctcctgctgctgatgcggctgtgaggggctggctccggccagacctccacattccccgtggggttggcggcagctgtcccttcccatcccatgtggcctggggagcaggtggccgcccctcccctctgcttccctggcctgccagatggcgggacacacagggccctcagtgactcccaggcctcctgaatggggctctgtccgcccagctggccacatgaatggggcactcaggatgcggagggtgggggcgcagcttccttcctgatcgcagcctgctggtccctgcagggctggggtggggccggcactctcgggcccccagctgtgaacgtgaggggtctgccccacgggttgcagggctgggggccttgctcaggtcaagaagtggctgtggtgaacagagggtctctcgtctgagcgtgtggtccgtgggccgtgtggcagcctcagacaaggacctcacccccacctgtgctccgggaaagcacggagggtagcagggcccctggggtgggcactgagggggcgggttccatccccccaggacttctcctacgatgagtccaaagtggagtttgacgtggacgcgcccagtggggtggtgatggagggctacctcttcaagagggccagcaacgctttcaagacatggaaccggcgctggttctccattcagaacagccagctggtctaccagaagaagctcaaggatgccctcaccgtggtggtggatgacctccgcctgtgctctgtgaagccgtgtgaggacatcgagcggaggttctgcttcgaggtgctgtcacccaccaagagctgcatgctgcaggctgactccgagaagctgcggcaagcctgggtccaggctgtgcaggccagcatcgcctccgcctaccgcgagagccctgacagttgctatagcgagaggctggaccgcacagcatccccgtccacgagcagcatcgactccgccaccgacactcgggagcgtggcgtgaagggcgagagtgtgctgcagcgtgtgcagagtgtggccggcaacagccagtgcggcgactgcggccagccggacccccgctgggccagcatcaacctgggcgtgctgctctgcattgagtgctccggcatccacaggagcctgggtgtccactgctccaaggtgcggtccctgacgctggactcgtgggagcctgagctgctaaagctgatgtgtgagcttggaaacagcgctgtgaatcagatctatgaggcccagtgtgagggtgcaggcagcaggaaacccacagccagcagctcccggcaggacaaggaggcctggatcaaggacaaatacgtggaaaagaagtttctgcggaaggcgcccatggcaccagccctggaggccccaagacgctggagggtgcagaagtgcctgcggccccacagctctccccgcgctcccactgcccgccgcaaggtccggcttgagcccgttctgccctgtgtggccgctctgtcctcagtgggcaccctggatcgtaagttccgccgagactccctcttctgtcccgacgagctggactcgctcttctcctacttcgacgcaggggccgcaggggctggccctcgcagtctgagtagcgacagtggccttgggggcagctcggatggcagctcggacgtcctggctttcggctcgggctctgtggtggacagcgtcactgaggaggagggtgcagagtcggaggagtccagcggtgaggcagacggggacactgaggccgaggcctggggcctggcggacgtgcgcgagctgcacccggggctcttggcgcaccgcgcagcgcgtgcccgcgaccttcctgcgctggcggcggcgctggcccacggggccgaggtcaactgggcggacgcggaggatgagggcaagacgccgctggtgcaggccgtgctagggggctccttgatcgtctgtgagttcctgctgcaaaacggagcggacgtgaaccaaagagacagccggggccgggcgcccctgcaccacgccacgctgctgggccgcaccggccaggtttgcctgttcctgaagcggggcgcggaccagcacgccctggaccaagagcagcgggacccgttggccatcgcagtgcaggcggccaacgctgacatcgtgacactgctccgtctggcgcgcatggcggaggaaatgcgcgaggccgaggctgcccctggtcccccgggcgccctggcgggcagccccacggagctccagttccgcaggtgtatccaggagttcatcagcctccacctggaagagagctagggccgggcaggccgggcagctgccaccccgcccggcccgacgccccgcatgccccgaagtccctggcgcccacccggccgcggccctgcgtgtgacccgcgggtcgatacctggcagccccagtgctggggcgccgcggccctgctcgcccaggaggagagcgagggccccacactgagtctcttgaagcctcacgtttccctgggggggtgctgcatcgtcgggtgtccctcaccccacctggggaacctctgtcttcaggtcaccccttttcaggggcctgggttgctcatgtcacaagccacttttaaggcccgtgtcacctgtgtccctgtgtcctcagggcctgtgttacttcgtgccccacttctgcccagaacactgacctgttagctggctccctcctgcacaccccagagcctcctcccagggcagaaagggtggcccatccagggaaccaacgagtacctcacttagtgaccccagcatccaggctggcgtcgcgggtgctgggcgggaggggctctggcctgggtcctcagccctggctggacgcgggcgtcccaaggccacgtggctggccacgaaggtccccgtgccagacagccccagccgcatcccggcctcctccggaggcaccttctcctggtactcggcccagagcctgcgcataaagccactttgccactttgc

SEQ ID NO: 2397 - protein, 564 aa, Homo sapiens; identical to SEQ ID NO: 2377

SEQ ID NO: 2398 - DNA, 1053 bp, Homo sapiens
ggtctgggtcctcctggtgctgccaggaccgagagcagctgccctactgcccccaccctgtcccacagtgcatgggtgccagacctggatgggctgcagtagtgcagtggggtgaggggaggtgccgcagggttgaggggctccagatgggtccagggttgactctgaactcctagaggagaggcgggtgaggctggctcagcccttggtgggcactgtccctgagggactcccagcggccggctgtcctgggagaggctggtccagccttcttccccgagggcacagcagcggctgcctctgcctgcctggggttgggggggcggggggaagtgcactgaacctggtcccagtcctgcccccgtagcaggcaggcgtctgtctcccagcctgtttcctgaaagccccttcccatggtggagcccctcagggaggtgcggggggaggtgaagccccgagggggctgaggctgcaggtgaccccagccagccccgttcttgctttagggcgaccattgacgaggtggagacggacgtggtggagattgagcctcacgtttccctgggggggtgctgcatcgtcgggtgtccctcaccccacctggggaacctctgtcttcaggtcaccccttttcaggggcctgggttgctcatgtcacaagccacttttaaggcccgtgtcacctgtgtccctgtgtcctcagggcctgtgttacttcgtgccccacttctgcccagaacactgacctgttagctggctccctcctgcacaccccagagcctcctcccagggcagaaagggtggcccatccagggaaccaacgagtacctcacttagtgaccccagcatccaggctggcgtcgcgggtgctgggcgggaggggctctggcctgggtcctcagccctggctggacgcgggcgtcccaaggccacgtggctggccacgaaggtccccgtgccagacagccccagccgcatcccggcctcctccggaggcaccttctcctggtactcggcccagagcctgcgcataaagccactttgccactttgc

SEQ ID NO: 2399 - protein, 34 aa, Homo sapiens
MGARPGWAAVVQWGEGRCRRVEGLQMGPGLTLNS

SEQ ID NO: 2400 - DNA, 4305 bp, Homo sapiens
tgggaggatggtcccttctctgttctgggatcctccagctgaggtagaggtcagggtccaggggctgcaggctgggcactggcggtcagcggacaccacagcgagattccctccatcgccccctgcttcgggattcagagtcctcttagccccttgggaacaagagagggctgctcagagaggacctagtgtccttctggggtggctgggacccttcaaggtccctggctggggcagcctggtgcctgcagctccagctcctaattgaggacacgccccatgtaaaccacaggcccctcccccgaggcctgggacaccggtcagggtagcaaggtacgagggactgtaggccctgatggcctctgctcctggacccctgccctagacctggagtcctggccccagcccgggccctgtggtgcccaatccccaggaggccagatggcccggacagccagtgagccgattgtgtggagggctgccgggatcctggccctgtttccctgttgcctgctcccggagggggtggtcacgtgcccgatccatctgcctcctgtcttccggggattctcccgccgaggcttctctggtgatgtcatgccttaactcttctctccccaggcagccccactgtcaggctgtcctggtgggagtgggctctgaggaggatggcctacccgtctttccagcggaccatgccgcttgcagctgtgaggttgggggagccgggggcgtctctccccagctggtctgggtcctcctggtgctgccaggaccgagagcagctgccctactgcccccaccctgtcccacagtgcatgggtgccagacctggatgggctgcagtagtgcagtggggtgaggggaggtgccgcagggttgaggggctccagatgggtccagggttgactctgaactcctagaggagaggcgggtgaggctggctcagcccttggtgggcactgtccctgagggactcccagcggccggctgtcctgggagaggctggtccagccttcttccccgagggcacagcagcggctgcctctgcctgcctggggttgggggggcggggggaagtgcactgaacctggtcccagtcctgcccccgtagcaggcaggcgtctgtctcccagcctgtttcctgaaagccccttcccatggtggagcccctcagggaggtgcggggggaggtgaagccccgagggggctgaggctgcaggtgaccccagccagccccgttcttgctttagggcgaccattgacgaggtggagacggacgtggtggagattgaggccaaactggacaagctggtgaagctgtgcagtggcatggtggaagccggtaaggcctacgtcagcaccagcaggcttttcgtgagcggcgtccgcgacctgtcccagcagtgccagggcgacaccgtcatctcggaatgtctgcagaggttcgctgacagcctacaggaggtggtgaactaccacatgatcctgtttgaccaggcccagaggtccgtgcggcagcagctccagagctttgtcaaagaggatgtgcggaagttcaaggagacaaagaagcagtttgacaaggtgcgggaggacctggagctgtccctggtgaggaacgcccaggccccgaggcaccggccccacgaggtggaggaagccaccggggccctcaccctcaccaggaagtgcttccgccacctggcactggactatgtgctccagatcaatgttctgcaggccaagaagaagtttgagatcctggactctatgctgtccttcatgcacgcccagtccagcttcttccagcagggctacagcctcctgcaccagctggacccctacatgaagaagctggcagccgagctggaccagctggtgatcgactctgcggtggaaaagcgtgagatggagcgaaagcacgccgccatccagcagcggacgctgctgcaggacttctcctacgatgagtccaaagtggagtttgacgtggacgcgcccagtggggtggtgatggagggctacctcttcaagagggccagcaacgctttcaagacatggaaccggcgctggttctccattcagaacagccagctggtctaccagaagaagctcaaggatgccctcaccgtggtggtggatgacctccgcctgtgctctgtgaagccgtgtgaggacatcgagcggaggttctgcttcgaggtgctgtcacccaccaagagctgcatgctgcaggctgactccgagaagctgcggcaagcctgggtccaggctgtgcaggccagcatcgcctccgcctaccgcgagagccctgacagttgctatagcgagaggctggaccgcacagcatccccgtccacgagcagcatcgactccgccaccgacactcgggagcgtggcgtgaagggcgagagtgtgctgcagcgtgtgcagagtgtggccggcaacagccagtgcggcgactgcggccagccggacccccgctgggccagcatcaacctgggcgtgctgctctgcattgagtgctccggcatccacaggagcctgggtgtccactgctccaaggtgcggtccctgacgctggactcgtgggagcctgagctgctaaagctgatgtgtgagcttggaaacagcgctgtgaatcagatctatgaggcccagtgtgagggtgcaggcagcaggaaacccacagccagcagctcccggcaggacaaggaggcctggatcaaggacaaatacgtggaaaagaagtttctgcggaaggcgcccatggcaccagccctggaggccccaagacgctggagggtgcagaagtgcctgcggccccacagctctccccgcgctcccactgcccgccgcaaggtccggcttgagcccgttctgccctgtgtggccgctctgtcctcagtgggcaccctggatcgtaagttccgccgagactccctcttctgtcccgacgagctggactcgctcttctcctacttcgacgcaggggccgcaggggctggccctcgcaagggtgcagagtcggaggagtccagcggtgaggcagacggggacactgaggccgaggcctggggcctggcggacgtgcgcgagctgcacccggggctcttggcgcaccgcgcagcgcgtgcccgcgaccttcctgcgctggcggcggcgctggcccacggggccgaggtcaactgggcggacgcggaggatgagggcaagacgccgctggtgcaggccgtgctagggggctccttgatcgtctgtgagttcctgctgcaaaacggagcggacgtgaaccaaagagacagccggggccgggcgcccctgcaccacgccacgctgctgggccgcaccggccaggtttgcctgttcctgaagcggggcgcggaccagcacgccctggaccaagagcagcgggacccgttggccatcgcagtgcaggcggccaacgctgacatcgtgacactgctccgtctggcgcgcatggcggaggaaatgcgcgaggccgaggctgcccctggtcccccgggcgccctggcgggcagccccacggagctccagttccgcaggtgtatccaggagttcatcagcctccacctggaagagagctagggccgggcaggccgggcagctgccaccccgcccggcccgacgccccgcatgccccgaagtccctggcgcccacccggccgcggccctgcgtgtgacccgcgggtcgatacctggcagccccagtgctggggcgccgcggccctgctcgcccaggaggagagcgagggccccacactgagtctcttgaagcctcacgtttccctgggggggtgctgcatcgtcgggtgtccctcaccccacctggggaacctctgtcttcaggtcaccccttttcaggggcctgggttgctcatgtcacaagccacttttaaggcccgtgtcacctgtgtccctgtgtcctcagggcctgtgttacttcgtgccccacttctgcccagaacactgacctgttagctggctccctcctgcacaccccagagcctcctcccagggcagaaagggtggcccatccagggaaccaacgagtacctcacttagtgaccccagcatccaggctggcgtcgcgggtgctgggcgggaggggctctggcctgggtcctcagccctggctggacgcgggcgtcccaaggccacgtggctggccacgaaggtccccgtgccagacagccccagccgcatcccggcctcctccggaggcaccttctcctggtactcggcccagagcctgcgcataaagccactttgccactttgc

SEQ ID NO: 2401 - protein, 759 aa, Homo sapiens; identical to SEQ ID NO: 28

SEQ ID NO: 2402 - DNA, 1050 bp, Homo sapiens
cggggaaggtcaggtagggggtaggggttgtgtgcacaccgagtctgcatgttttccatcattcgtggcgtgcaggcgtgtacacctgcgtgaactacatgttcacagacgtgtgcacaagtgtgcatcggctttgcttggtggacatttggcaaacgacaatggaggcaaagaaacctctctgcatccccaagtgcgcacctgcgtgaggccccctcctctgcacgagctcgtgcggggtgcgctcttgtgaactttgcccctctgcgtgcctccctccggacaccaggccttgcacaggacgtgtggatgagctgtgccacggggctgtgcttgcttctgcatgtagcctgccgatgagtgcacgcaagcgtgtgcacacaccacctgtctgtgtgggttcacgtactgtgttagccatgtcagcaatagacacatcaccttgtacacgcgtgttccatcactaggtacacatgttgatgcgtgtctgtgcagtgtctccttgaacacacatgtatgtgtggtaccagtgtgtgcaggcatgtttgtgcatgaacatgtttgcacatgtgtgcttgattgtgtatgtgtgggtgtgcacgcgcgcgctgggtctcttgggatctgctggcaagtcagcatgtgtgtggaggcacggggagcctctgtatccctggagccctcaccaggaggctcaggagccttggagtgggaggctcagggccagccaggagagtggccgccagccctgggcagaggaactggggccatcctctgctcctcccagggcagaaagggtggcccatccagggaaccaacgagtacctcacttagtgaccccagcatccaggctggcgtcgcgggtgctgggcgggaggggctctggcctgggtcctcagccctggctggacgcgggcgtcccaaggccacgtggctggccacgaaggtccccgtgccagacagccccagccgcatcccggcctcctccggaggcaccttctcctggtactcggcccagagcctgcgcataaagccactttgccactttgc

SEQ ID NO: 2403 - protein, 172 aa, Homo sapiens
MYVWYQCVQACLCMNMFAHVCLIVYVWVCTRALGLLGSAGKSACVWRHGEPLYPWSPHQEAQEPWSGRLRASQESGRQPWAEELGPSSAPPRAERVAHPGNQRVPHLVTPASRLASRVLGGRGSGLGPQPWLDAGVPRPRGWPRRSPCQTAPAASRPPPEAPSPGTRPRACA

SEQ ID NO: 2404 - DNA, 3239 bp, Homo sapiens
tcgggaccgtccgcccccgctctgtgtctgcacctccactgggctgagcccctcccgggccctgcagtccagctctggccagggtcgtctgggtccgtgggggcgtcggcccctggtctctgacttgatcctgtgtccagagcagcgcgtggggaacaggcagctggagccgcgtttaaggcctgggggcgaccattgacgaggtggagacggacgtggtggagattgaggccaaactggacaagctggtgaagctgtgcagtggcatggtggaagccggtaaggcctacgtcagcaccagcaggcttttcgtgagcggcgtccgcgacctgtcccagcagtgccagggcgacaccgtcatctcggaatgtctgcagaggttcgctgacagcctacaggaggtggtgaactaccacatgatcctgtttgaccaggcccagaggtccgtgcggcagcagctccagagctttgtcaaagaggatgtgcggaagttcaaggagacaaagaagcagtttgacaaggtgcgggaggacctggagctgtccctggtgaggaacgcccaggccccgaggcaccggccccacgaggtggaggaagccaccggggccctcaccctcaccaggaagtgcttccgccacctggcactggactatgtgctccagatcaatgttctgcaggccaagaagaagtttgagatcctggactctatgctgtccttcatgcacgcccagtccagcttcttccagcagggctacagcctcctgcaccagctggacccctacatgaagaagctggcagccgagctggaccagctggtgatcgactctgcggtggaaaagcgtgagatggagcgaaagcacgccgccatccagcagcggacgctgctgcaggacttctcctacgatgagtccaaagtggagtttgacgtggacgcgcccagtggggtggtgatggagggctacctcttcaagagggccagcaacgctttcaagacatggaaccggcgctggttctccattcagaacagccagctggtctaccagaagaagctcaaggatgccctcaccgtggtggtggatgacctccgcctgtgctctgtgaagccgtgtgaggacatcgagcggaggttctgcttcgaggtgctgtcacccaccaagagctgcatgctgcaggctgactccgagaagctgcggcaagcctgggtccaggctgtgcaggccagcatcgcctccgcctaccgcgagagccctgacagttgctatagcgagaggctggaccgcacagcatccccgtccacgagcagcatcgactccgccaccgacactcgggagcgtggcgtgaagggcgagagtgtgctgcagcgtgtgcagagtgtggccggcaacagccagtgcggcgactgcggccagccggacccccgctgggccagcatcaacctgggcgtgctgctctgcattgagtgctccggcatccacaggagcctgggtgtccactgctccaaggtgcggtccctgacgctggactcgtgggagcctgagctgctaaagctgatgtgtgagcttggaaacagcgctgtgaatcagatctatgaggcccagtgtgagggtgcaggcagcaggaaacccacagccagcagctcccggcaggacaaggaggcctggatcaaggacaaatacgtggaaaagaagtttctgcggaaggcgcccatggcaccagccctggaggccccaagacgctggagggtgcagaagtgcctgcggccccacagctctccccgcgctcccactgcccgccgcaaggtccggcttgagcccgttctgccctgtgtggccgctctgtcctcagtgggcaccctggatcgtaagttccgccgagactccctcttctgtcccgacgagctggactcgctcttctcctacttcgacgcaggggccgcaggggctggccctcgcaagggtgcagagtcggaggagtccagcggtgaggcagacggggacactgaggccgaggcctggggcctggcggacgtgcgcgagctgcacccggggctcttggcgcaccgcgcagcgcgtgcccgcgaccttcctgcgctggcggcggcgctggcccacggggccgaggtcaactgggcggacgcggaggatgagggcaagacgccgctggtgcaggccgtgctagggggctccttgatcgtctgtgagttcctgctgcaaaacggagcggacgtgaaccaaagagacagccggggccgggcgcccctgcaccacgccacgctgctgggccgcaccggccaggtttgcctgttcctgaagcggggcgcggaccagcacgccctggaccaagagcagcgggacccgttggccatcgcagtgcaggcggccaacgctgacatcgtgacactgctccgtctggcgcgcatggcggaggaaatgcgcgaggccgaggctgcccctggtcccccgggcgccctggcgggcagccccacggagctccagttccgcaggtgtatccaggagttcatcagcctccacctggaagagagctagggccgggcaggccgggcagctgccaccccgcccggcccgacgccccgcatgccccgaagtccctggcgcccacccggccgcggccctgcgtgtgacccgcgggtcgatacctggcagccccagtgctggggcgccgcggccctgctcgcccaggaggagagcgagggccccacactgagtctcttgaagcctcacgtttccctgggggggtgctgcatcgtcgggtgtccctcaccccacctggggaacctctgtcttcaggtcaccccttttcaggggcctgggttgctcatgtcacaagccacttttaaggcccgtgtcacctgtgtccctgtgtcctcagggcctgtgttacttcgtgccccacttctgcccagaacactgacctgttagctggctccctcctgcacaccccagagcctcctcccagggcagaaagggtggcccatccagggaaccaacgagtacctcacttagtgaccccagcatccaggctggcgtcgcgggtgctgggcgggaggggctctggcctgggtcctcagccctggctggacgcgggcgtcccaaggccacgtggctggccacgaaggtccccgtgccagacagccccagccgcatcccggcctcctccggaggcaccttctcctggtactcggcccagagcctgcgcataaagccactttgccactttgc

SEQ ID NO: 2405 - protein, 759 aa, Homo sapiens; identical to SEQ ID NO: 28

SEQ ID NO: 2406 - DNA, 3187 bp, Homo sapiens
gccatgaccgtggagttcgaggagtgcgtcaaggactccccgcgcttcagacgtgtgcacaagtgtgcatcggctttgcttggtggacatttggcaaacgacaatggaggcaaagaaacctctctgcatccccaaggcgaccattgacgaggtggagacggacgtggtggagattgaggccaaactggacaagctggtgaagctgtgcagtggcatggtggaagccggtaaggcctacgtcagcaccagcaggcttttcgtgagcggcgtccgcgacctgtcccagcagtgccagggcgacaccgtcatctcggaatgtctgcagaggttcgctgacagcctacaggaggtggtgaactaccacatgatcctgtttgaccaggcccagaggtccgtgcggcagcagctccagagctttgtcaaagaggatgtgcggaagttcaaggagacaaagaagcagtttgacaaggtgcgggaggacctggagctgtccctggtgaggaacgcccaggccccgaggcaccggccccacgaggtggaggaagccaccggggccctcaccctcaccaggaagtgcttccgccacctggcactggactatgtgctccagatcaatgttctgcaggccaagaagaagtttgagatcctggactctatgctgtccttcatgcacgcccagtccagcttcttccagcagggctacagcctcctgcaccagctggacccctacatgaagaagctggcagccgagctggaccagctggtgatcgactctgcggtggaaaagcgtgagatggagcgaaagcacgccgccatccagcagcggacgctgctgcaggacttctcctacgatgagtccaaagtggagtttgacgtggacgcgcccagtggggtggtgatggagggctacctcttcaagagggccagcaacgctttcaagacatggaaccggcgctggttctccattcagaacagccagctggtctaccagaagaagctcaaggatgccctcaccgtggtggtggatgacctccgcctgtgctctgtgaagccgtgtgaggacatcgagcggaggttctgcttcgaggtgctgtcacccaccaagagctgcatgctgcaggctgactccgagaagctgcggcaagcctgggtccaggctgtgcaggccagcatcgcctccgcctaccgcgagagccctgacagttgctatagcgagaggctggaccgcacagcatccccgtccacgagcagcatcgactccgccaccgacactcgggagcgtggcgtgaagggcgagagtgtgctgcagcgtgtgcagagtgtggccggcaacagccagtgcggcgactgcggccagccggacccccgctgggccagcatcaacctgggcgtgctgctctgcattgagtgctccggcatccacaggagcctgggtgtccactgctccaaggtgcggtccctgacgctggactcgtgggagcctgagctgctaaagctgatgtgtgagcttggaaacagcgctgtgaatcagatctatgaggcccagtgtgagggtgcaggcagcaggaaacccacagccagcagctcccggcaggacaaggaggcctggatcaaggacaaatacgtggaaaagaagtttctgcggaaggcgcccatggcaccagccctggaggccccaagacgctggagggtgcagaagtgcctgcggccccacagctctccccgcgctcccactgcccgccgcaaggtccggcttgagcccgttctgccctgtgtggccgctctgtcctcagtgggcaccctggatcgtaagttccgccgagactccctcttctgtcccgacgagctggactcgctcttctcctacttcgacgcaggggccgcaggggctggccctcgcaagggtgcagagtcggaggagtccagcggtgaggcagacggggacactgaggccgaggcctggggcctggcggacgtgcgcgagctgcacccggggctcttggcgcaccgcgcagcgcgtgcccgcgaccttcctgcgctggcggcggcgctggcccacggggccgaggtcaactgggcggacgcggaggatgagggcaagacgccgctggtgcaggccgtgctagggggctccttgatcgtctgtgagttcctgctgcaaaacggagcggacgtgaaccaaagagacagccggggccgggcgcccctgcaccacgccacgctgctgggccgcaccggccaggtttgcctgttcctgaagcggggcgcggaccagcacgccctggaccaagagcagcgggacccgttggccatcgcagtgcaggcggccaacgctgacatcgtgacactgctccgtctggcgcgcatggcggaggaaatgcgcgaggccgaggctgcccctggtcccccgggcgccctggcgggcagccccacggagctccagttccgcaggtgtatccaggagttcatcagcctccacctggaagagagctagggccgggcaggccgggcagctgccaccccgcccggcccgacgccccgcatgccccgaagtccctggcgcccacccggccgcggccctgcgtgtgacccgcgggtcgatacctggcagccccagtgctggggcgccgcggccctgctcgcccaggaggagagcgagggccccacactgagtctcttgaagcctcacgtttccctgggggggtgctgcatcgtcgggtgtccctcaccccacctggggaacctctgtcttcaggtcaccccttttcaggggcctgggttgctcatgtcacaagccacttttaaggcccgtgtcacctgtgtccctgtgtcctcagggcctgtgttacttcgtgccccacttctgcccagaacactgacctgttagctggctccctcctgcacaccccagagcctcctcccagggcagaaagggtggcccatccagggaaccaacgagtacctcacttagtgaccccagcatccaggctggcgtcgcgggtgctgggcgggaggggctctggcctgggtcctcagccctggctggacgcgggcgtcccaaggccacgtggctggccacgaaggtccccgtgccagacagccccagccgcatcccggcctcctccggaggcaccttctcctggtactcggcccagagcctgcgcataaagccactttgccactttgc

SEQ ID NO: 2407 - protein, 796 aa, Homo sapiens; identical to SEQ ID NO: 2385

SEQ ID NO: 2408 - DNA, 3152 bp, Homo sapiens
gcagccatgaccgtggagttcgaggagtgcgtcaaggactccccgcgcttcagagcagcgcgtggggaacaggcagctggagccgcgtttaaggcctgggggcgaccattgacgaggtggagacggacgtggtggagattgaggccaaactggacaagctggtgaagctgtgcagtggcatggtggaagccggtaaggcctacgtcagcaccagcaggcttttcgtgagcggcgtccgcgacctgtcccagcagtgccagggcgacaccgtcatctcggaatgtctgcagaggttcgctgacagcctacaggaggtggtgaactaccacatgatcctgtttgaccaggcccagaggtccgtgcggcagcagctccagagctttgtcaaagaggatgtgcggaagttcaaggagacaaagaagcagtttgacaaggtgcgggaggacctggagctgtccctggtgaggaacgcccaggccccgaggcaccggccccacgaggtggaggaagccaccggggccctcaccctcaccaggaagtgcttccgccacctggcactggactatgtgctccagatcaatgttctgcaggccaagaagaagtttgagatcctggactctatgctgtccttcatgcacgcccagtccagcttcttccagcagggctacagcctcctgcaccagctggacccctacatgaagaagctggcagccgagctggaccagctggtgatcgactctgcggtggaaaagcgtgagatggagcgaaagcacgccgccatccagcagcggacgctgctgcaggacttctcctacgatgagtccaaagtggagtttgacgtggacgcgcccagtggggtggtgatggagggctacctcttcaagagggccagcaacgctttcaagacatggaaccggcgctggttctccattcagaacagccagctggtctaccagaagaagctcaaggatgccctcaccgtggtggtggatgacctccgcctgtgctctgtgaagccgtgtgaggacatcgagcggaggttctgcttcgaggtgctgtcacccaccaagagctgcatgctgcaggctgactccgagaagctgcggcaagcctgggtccaggctgtgcaggccagcatcgcctccgcctaccgcgagagccctgacagttgctatagcgagaggctggaccgcacagcatccccgtccacgagcagcatcgactccgccaccgacactcgggagcgtggcgtgaagggcgagagtgtgctgcagcgtgtgcagagtgtggccggcaacagccagtgcggcgactgcggccagccggacccccgctgggccagcatcaacctgggcgtgctgctctgcattgagtgctccggcatccacaggagcctgggtgtccactgctccaaggtgcggtccctgacgctggactcgtgggagcctgagctgctaaagctgatgtgtgagcttggaaacagcgctgtgaatcagatctatgaggcccagtgtgagggtgcaggcagcaggaaacccacagccagcagctcccggcaggacaaggaggcctggatcaaggacaaatacgtggaaaagaagtttctgcggaaggcgcccatggcaccagccctggaggccccaagacgctggagggtgcagaagtgcctgcggccccacagctctccccgcgctcccactgcccgccgcaaggtccggcttgagcccgttctgccctgtgtggccgctctgtcctcagtgggcaccctggatcgtaagttccgccgagactccctcttctgtcccgacgagctggactcgctcttctcctacttcgacgcaggggccgcaggggctggccctcgcaagggtgcagagtcggaggagtccagcggtgaggcagacggggacactgaggccgaggcctggggcctggcggacgtgcgcgagctgcacccggggctcttggcgcaccgcgcagcgcgtgcccgcgaccttcctgcgctggcggcggcgctggcccacggggccgaggtcaactgggcggacgcggaggatgagggcaagacgccgctggtgcaggccgtgctagggggctccttgatcgtctgtgagttcctgctgcaaaacggagcggacgtgaaccaaagagacagccggggccgggcgcccctgcaccacgccacgctgctgggccgcaccggccaggtttgcctgttcctgaagcggggcgcggaccagcacgccctggaccaagagcagcgggacccgttggccatcgcagtgcaggcggccaacgctgacatcgtgacactgctccgtctggcgcgcatggcggaggaaatgcgcgaggccgaggctgcccctggtcccccgggcgccctggcgggcagccccacggagctccagttccgcaggtgtatccaggagttcatcagcctccacctggaagagagctagggccgggcaggccgggcagctgccaccccgcccggcccgacgccccgcatgccccgaagtccctggcgcccacccggccgcggccctgcgtgtgacccgcgggtcgatacctggcagccccagtgctggggcgccgcggccctgctcgcccaggaggagagcgagggccccacactgagtctcttgaagcctcacgtttccctgggggggtgctgcatcgtcgggtgtccctcaccccacctggggaacctctgtcttcaggtcaccccttttcaggggcctgggttgctcatgtcacaagccacttttaaggcccgtgtcacctgtgtccctgtgtcctcagggcctgtgttacttcgtgccccacttctgcccagaacactgacctgttagctggctccctcctgcacaccccagagcctcctcccagggcagaaagggtggcccatccagggaaccaacgagtacctcacttagtgaccccagcatccaggctggcgtcgcgggtgctgggcgggaggggctctggcctgggtcctcagccctggctggacgcgggcgtcccaaggccacgtggctggccacgaaggtccccgtgccagacagccccagccgcatcccggcctcctccggaggcaccttctcctggtactcggcccagagcctgcgcataaagccactttgccactttgc

SEQ ID NO: 2409 - protein, 759 aa, Homo sapiens; identical to SEQ ID NO: 28

SEQ ID NO: 2410 - DNA, 3176 bp, Homo sapiens
acgagcggtccgggccggcgcggctgccgctcggcgccgcggtcctcgtgccagtgagcgccgcggccgccgcagccatgaccgtggagttcgaggagtgcgtcaaggactccccgcgcttcagggcgaccattgacgaggtggagacggacgtggtggagattgaggccaaactggacaagctggtgaagctgtgcagtggcatggtggaagccggtaaggcctacgtcagcaccagcaggcttttcgtgagcggcgtccgcgacctgtcccagcagtgccagggcgacaccgtcatctcggaatgtctgcagaggttcgctgacagcctacaggaggtggtgaactaccacatgatcctgtttgaccaggcccagaggtccgtgcggcagcagctccagagctttgtcaaagaggatgtgcggaagttcaaggagacaaagaagcagtttgacaaggtgcgggaggacctggagctgtccctggtgaggaacgcccaggccccgaggcaccggccccacgaggtggaggaagccaccggggccctcaccctcaccaggaagtgcttccgccacctggcactggactatgtgctccagatcaatgttctgcaggccaagaagaagtttgagatcctggactctatgctgtccttcatgcacgcccagtccagcttcttccagcagggctacagcctcctgcaccagctggacccctacatgaagaagctggcagccgagctggaccagctggtgatcgactctgcggtggaaaagcgtgagatggagcgaaagcacgccgccatccagcagcggacgctgctgcaggacttctcctacgatgagtccaaagtggagtttgacgtggacgcgcccagtggggtggtgatggagggctacctcttcaagagggccagcaacgctttcaagacatggaaccggcgctggttctccattcagaacagccagctggtctaccagaagaagctcaaggatgccctcaccgtggtggtggatgacctccgcctgtgctctgtgaagccgtgtgaggacatcgagcggaggttctgcttcgaggtgctgtcacccaccaagagctgcatgctgcaggctgactccgagaagctgcggcaagcctgggtccaggctgtgcaggccagcatcgcctccgcctaccgcgagagccctgacagttgctatagcgagaggctggaccgcacagcatccccgtccacgagcagcatcgactccgccaccgacactcgggagcgtggcgtgaagggcgagagtgtgctgcagcgtgtgcagagtgtggccggcaacagccagtgcggcgactgcggccagccggacccccgctgggccagcatcaacctgggcgtgctgctctgcattgagtgctccggcatccacaggagcctgggtgtccactgctccaaggtgcggtccctgacgctggactcgtgggagcctgagctgctaaagctgatgtgtgagcttggaaacagcgctgtgaatcagatctatgaggcccagtgtgagggtgcaggcagcaggaaacccacagccagcagctcccggcaggacaaggaggcctggatcaaggacaaatacgtggaaaagaagtttctgcggaaggcgcccatggcaccagccctggaggccccaagacgctggagggtgcagaagtgcctgcggccccacagctctccccgcgctcccactgcccgccgcaaggtccggcttgagcccgttctgccctgtgtggccgctctgtcctcagtgggcaccctggatcgtaagttccgccgagactccctcttctgtcccgacgagctggactcgctcttctcctacttcgacgcaggggccgcaggggctggccctcgcaagggtgcagagtcggaggagtccagcggtgaggcagacggggacactgaggccgaggcctggggcctggcggacgtgcgcgagctgcacccggggctcttggcgcaccgcgcagcgcgtgcccgcgaccttcctgcgctggcggcggcgctggcccacggggccgaggtcaactgggcggacgcggaggatgagggcaagacgccgctggtgcaggccgtgctagggggctccttgatcgtctgtgagttcctgctgcaaaacggagcggacgtgaaccaaagagacagccggggccgggcgcccctgcaccacgccacgctgctgggccgcaccggccaggtttgcctgttcctgaagcggggcgcggaccagcacgccctggaccaagagcagcgggacccgttggccatcgcagtgcaggcggccaacgctgacatcgtgacactgctccgtctggcgcgcatggcggaggaaatgcgcgaggccgaggctgcccctggtcccccgggcgccctggcgggcagccccacggagctccagttccgcaggtgtatccaggagttcatcagcctccacctggaagagagctagggccgggcaggccgggcagctgccaccccgcccggcccgacgccccgcatgccccgaagtccctggcgcccacccggccgcggccctgcgtgtgacccgcgggtcgatacctggcagccccagtgctggggcgccgcggccctgctcgcccaggaggagagcgagggccccacactgagtctcttgaagcctcacgtttccctgggggggtgctgcatcgtcgggtgtccctcaccccacctggggaacctctgtcttcaggtcaccccttttcaggggcctgggttgctcatgtcacaagccacttttaaggcccgtgtcacctgtgtccctgtgtcctcagggcctgtgttacttcgtgccccacttctgcccagaacactgacctgttagctggctccctcctgcacaccccagagcctcctcccagggcagaaagggtggcccatccagggaaccaacgagtacctcacttagtgaccccagcatccaggctggcgtcgcgggtgctgggcgggaggggctctggcctgggtcctcagccctggctggacgcgggcgtcccaaggccacgtggctggccacgaaggtccccgtgccagacagccccagccgcatcccggcctcctccggaggcaccttctcctggtactcggcccagagcctgcgcataaagccactttgccactttgc

SEQ ID NO: 2411 - protein, 801 aa, Homo sapiens; identical to SEQ ID NO: 2389

SEQ ID NO: 2412 - DNA, 3220 bp, Homo sapiens
actcactctgccgggagagtccagcataggttgcgttcaaacaccggcagctcatcacgccggtgacagccagtggccaggcggtacaggtaggtccgggacgtggctgcgtgacgagcgtggaagtcgctgggcactcggaaggcccgcaggaccctatggcggcagggcgaccattgacgaggtggagacggacgtggtggagattgaggccaaactggacaagctggtgaagctgtgcagtggcatggtggaagccggtaaggcctacgtcagcaccagcaggcttttcgtgagcggcgtccgcgacctgtcccagcagtgccagggcgacaccgtcatctcggaatgtctgcagaggttcgctgacagcctacaggaggtggtgaactaccacatgatcctgtttgaccaggcccagaggtccgtgcggcagcagctccagagctttgtcaaagaggatgtgcggaagttcaaggagacaaagaagcagtttgacaaggtgcgggaggacctggagctgtccctggtgaggaacgcccaggccccgaggcaccggccccacgaggtggaggaagccaccggggccctcaccctcaccaggaagtgcttccgccacctggcactggactatgtgctccagatcaatgttctgcaggccaagaagaagtttgagatcctggactctatgctgtccttcatgcacgcccagtccagcttcttccagcagggctacagcctcctgcaccagctggacccctacatgaagaagctggcagccgagctggaccagctggtgatcgactctgcggtggaaaagcgtgagatggagcgaaagcacgccgccatccagcagcggacgctgctgcaggacttctcctacgatgagtccaaagtggagtttgacgtggacgcgcccagtggggtggtgatggagggctacctcttcaagagggccagcaacgctttcaagacatggaaccggcgctggttctccattcagaacagccagctggtctaccagaagaagctcaaggatgccctcaccgtggtggtggatgacctccgcctgtgctctgtgaagccgtgtgaggacatcgagcggaggttctgcttcgaggtgctgtcacccaccaagagctgcatgctgcaggctgactccgagaagctgcggcaagcctgggtccaggctgtgcaggccagcatcgcctccgcctaccgcgagagccctgacagttgctatagcgagaggctggaccgcacagcatccccgtccacgagcagcatcgactccgccaccgacactcgggagcgtggcgtgaagggcgagagtgtgctgcagcgtgtgcagagtgtggccggcaacagccagtgcggcgactgcggccagccggacccccgctgggccagcatcaacctgggcgtgctgctctgcattgagtgctccggcatccacaggagcctgggtgtccactgctccaaggtgcggtccctgacgctggactcgtgggagcctgagctgctaaagctgatgtgtgagcttggaaacagcgctgtgaatcagatctatgaggcccagtgtgagggtgcaggcagcaggaaacccacagccagcagctcccggcaggacaaggaggcctggatcaaggacaaatacgtggaaaagaagtttctgcggaaggcgcccatggcaccagccctggaggccccaagacgctggagggtgcagaagtgcctgcggccccacagctctccccgcgctcccactgcccgccgcaaggtccggcttgagcccgttctgccctgtgtggccgctctgtcctcagtgggcaccctggatcgtaagttccgccgagactccctcttctgtcccgacgagctggactcgctcttctcctacttcgacgcaggggccgcaggggctggccctcgcaagggtgcagagtcggaggagtccagcggtgaggcagacggggacactgaggccgaggcctggggcctggcggacgtgcgcgagctgcacccggggctcttggcgcaccgcgcagcgcgtgcccgcgaccttcctgcgctggcggcggcgctggcccacggggccgaggtcaactgggcggacgcggaggatgagggcaagacgccgctggtgcaggccgtgctagggggctccttgatcgtctgtgagttcctgctgcaaaacggagcggacgtgaaccaaagagacagccggggccgggcgcccctgcaccacgccacgctgctgggccgcaccggccaggtttgcctgttcctgaagcggggcgcggaccagcacgccctggaccaagagcagcgggacccgttggccatcgcagtgcaggcggccaacgctgacatcgtgacactgctccgtctggcgcgcatggcggaggaaatgcgcgaggccgaggctgcccctggtcccccgggcgccctggcgggcagccccacggagctccagttccgcaggtgtatccaggagttcatcagcctccacctggaagagagctagggccgggcaggccgggcagctgccaccccgcccggcccgacgccccgcatgccccgaagtccctggcgcccacccggccgcggccctgcgtgtgacccgcgggtcgatacctggcagccccagtgctggggcgccgcggccctgctcgcccaggaggagagcgagggccccacactgagtctcttgaagcctcacgtttccctgggggggtgctgcatcgtcgggtgtccctcaccccacctggggaacctctgtcttcaggtcaccccttttcaggggcctgggttgctcatgtcacaagccacttttaaggcccgtgtcacctgtgtccctgtgtcctcagggcctgtgttacttcgtgccccacttctgcccagaacactgacctgttagctggctccctcctgcacaccccagagcctcctcccagggcagaaagggtggcccatccagggaaccaacgagtacctcacttagtgaccccagcatccaggctggcgtcgcgggtgctgggcgggaggggctctggcctgggtcctcagccctggctggacgcgggcgtcccaaggccacgtggctggccacgaaggtccccgtgccagacagccccagccgcatcccggcctcctccggaggcaccttctcctggtactcggcccagagcctgcgcataaagccactttgccactttgc

SEQ ID NO: 2413 - protein, 759 aa, Homo sapiens; identical to SEQ ID NO: 28

SEQ ID NO: 2414 - DNA, 849 bp, Homo sapiens
acatgcgccccattgtcccggggcctgtcagcgagtggagcagggctgtgccgagttcacagatgtcctcctggggccgcccccgcctgggtaccaccccttcctgttcctggacagcctccacaagaaggcaggcggcagatccagaggcggcctgcaccccagggggacaccacccacggcacaggagcctcctggaggcagcagcctcagtcccaaaatgaagggagcgacgtttgccgaactgaaaagggtcgcccggtcaggcggcacgtgtgcccggaggggctgagggcgtgaccgccagccacggtcaccacccgacgcaggtcagtgcctcgtggtggaggagcgtgggcagaatcacggggtgcagaggagccgaagaccgtcccctcagctccggggcagctcctgtgcggctctgcacttcctggtacccgtggggacagcgctggcatcgacggcggcgtggcgggcggggtaggcggcagtaaggcgggcagtgttcgagctcatctcgcacgcggcactgtccctgctctccctggcagcagcaggaagacctgggtccttgtcgctgaaaaaatagactctgaagaaaaacccctgctgtcctcacgcagccgcgggcagatgagctgtgatggcttccccgggtggggagggtggggcggccgccacccccactccgttgcgggtcttcagatggcgtcatgtgttggggcttttagaagttagtcatttaaaaatgtgttgattttctgaatttcaagtctccttactggttttaaatagcttataacaaaagtgtaaatgttagaatgttccagcaagcagaggaccagc

SEQ ID NO: 2415 - protein, 73 aa, Homo sapiens
MRPIVPGPVSEWSRAVPSSQMSSWGRPRLGTTPSCSWTASTRRQAADPEAACTPGGHHPRHRSLLEAAASVPK

SEQ ID NO: 2416 - DNA, 609 bp, Homo sapiens
ctgggcctgaccttcgccggctgcccctgggcctggaggcaggacacgaaggggctgatgggtctgtggtcagccccgagcgcactttgctgagctgtggtcttgctgagccagcccacaggcccagcgactcctggcttactcagcccaggcctgaggctcccagggaaggccaggccaggctgtgcaggaacctgcctatggggctgggcacctggccctccaggaaggcctgcctgcgaggagctgctctgcacaggggtctcgaccctccgctaggcaccaggagcgaagagggagaggctttgggaaggagacacaggtcagagagcttacagaaaagtcagcctcgatggacggcaagatgcacctgtcagccacgaaggagccccccgaggtgcagatccccacatccgccgcacccgtgtggagaaaacagcgctggatttcctgtcgtgggttttgtgactttgaaagccgaggctgctgattgggaattaaatcccagaggacgccgctcaacacactggaaacccagcagctgctgctgttcccagcaatttttctttctctaaattgaaacatcattttctatttttcttctgacac

SEQ ID NO: 2417 - protein, 124 aa, Homo sapiens
MGLGTWPSRKACLRGAALHRGLDPPLGTRSEEGEALGRRHRSESLQKSQPRWTARCTCQPRRSPPRCRSPHPPHPCGENSAGFPVVGFVTLKAEAADWELNPRGRRSTHWKPSSCCCSQQFFFL

SEQ ID NO: 2418 - DNA, 157 bp, Homo sapiens
agtacgtgctcatgatccgcgacgtgaccaccccgtgtccacaggaggccacctcggtgtgaatggaaggaaacgctgcctctgcttgcgtgactctgctccccgattctccagagccccgtggttgctggcttgaataaaatgctcagtggcggct

SEQ ID NO: 2419 - protein, 44 aa, Homo sapiens
VRAHDPRRDHPVSTGGHLGVNGRKRCLCLRDSAPRFSRAPWLLA

SEQ ID NO: 2420 - DNA, 1838 bp, Homo sapiens
agacgcgcaggccgttggcgggcgggcctcccggcggaagagacgacagcggcggaaacgcgcacaggcgcagctgcgtcctctggctccgggcccggctagcttcgctccagagattgcgcgggctcagggactaggcccgtggccacacccccccttgcgacaaagaccaatggaagcgggcgttgctggtcgctaagagaaccctcggcggcaagatggcagcggcgggcgagggcaccccgagctcccgcgggccgcgtcgggacccgcctaggcggccgccccggaacggttatggtgtctacgtatacccaaattccttctttcgatatgaaggagaatggaaagcagggaggaagcacggtcacgggaagttgttatttaaagatggcagttattacgaaggggcgtttgtggacggagagatcacgggagaaggccgccggcactgggcctggtcaggagacaccttctctggacagtttgttctgggagagcctcaaggctacggcgtcatggagtacaaagccggcggatgttatgaaggggaggtctcccacggcatgcgggaaggacacgggtttctggtggaccgggatggacaagtgtaccagggctccttccatgacaacaagaggcacggccctgggcagatgctctttcagaacggtgacaagtacgacggcgactgggtccgggaccggcgtcagggacacggggtgctgcgctgcgccgacggctccacctacaagggacagtggcacagcgacgtcttcagtggactgggcagcatggcccactgctcaggggtcacctattatgggttgtggatcaatggccacccagcagaacaagctacgaggatcgtgatcttgggtccggaggtgatggaagtggcccaagggtctcccttctcggtgaacgttcagctgctgcaggaccacggggaaattgccaagagcgagagcggccgggtcctgcagatctcagcgggcgtcagatacgtgcagctgtcagcctactctgaggtcaactttttcaaagtggacagagacaaccaagagacactcatccagaccccatttgggttcgaatgcatcccttatcctgtgtccagccccgcagctggggtgccggggcccagagctgccaagggaggggcagaagccgacgtgcccctgcccaggggagacctggagctgcatttgggtgccctccatggccaggaggacacccctggtggcctgcttgccaggggacatgcgccccattgtcccggggcctgtcagcgagtggagcagggctgtgccgagttcacagatgtcctcctggggccgcccccgcctgggtaccaccccttcctgttcctggacagcctccacaagaaggcaggcggcagatccagaggcggcctgcaccccagggggacaccacccacggcacaggagcctcctggaggcagcaggcctgaggggagagccacggaggagcaggctgcggcagcacacctaggggagtacgtgctcatgatccgcgacgtgaccaccccgccgttcctggggcgcaggctgcccccggccttcaaacacctgcgggtcgtagcgaagagggctggccagccaccccatgtcctggaagaaggccctgaagcctcaagcagctggcaggccgcccacagctgcaccccagagccgccagcgcctcggtgaggccccgtgtccacaggaggccacctcggtgtgaatggaaggaaacgctgcctctgcttgcgtgactctgctccccgattctccagagccccgtggttgctggcttgaataaaatgctcagtggcg

SEQ ID NO: 2421 - protein, 497 aa, Homo sapiens; identical to SEQ ID NO: 30

SEQ ID NO: 2422 - DNA, 1544 bp, Homo sapiens
agacgcgcaggccgttggcgggcgggcctcccggcggaagagacgacagcggcggaaacgcgcacaggcgcagctgcgtcctctggctccgggcccggctagcttcgctccagagattgcgcgggctcagggactaggcccgtggccacacccccccttgcgacaaagaccaatggaagcgggcgttgctggtcgctaagagaaccctcggcggcaagatggcagcggcgggcgagggcaccccgagctcccgcgggccgcgtcgggacccgcctaggcggccgccccggaacggttatggtgtctacgtatacccaaattccttctttcgatatgaaggagaatggaaagcagggaggaagcacggtcacgggaagttgttatttaaagatggcagttattacgaaggggcgtttgtggacggagagatcacgggagaaggccgccggcactgggcctggtcaggagacaccttctctggacagtttgttctgggagagcctcaaggctacggcgtcatggagtacaaagccggcggatgttatgaaggggaggtctcccacggcatgcgggaaggacacgggtttctggtggaccgggatggacaagtgtaccagggctccttccatgacaacaagaggcacggccctgggcagatgctctttcagaacggtgacaagtacgacggcgactgggtccgggaccggcgtcagggacacggggtgctgcgctgcgccgacggctccacctacaagggacagtggcacagcgacgtcttcagtggactgggcagcatggcccactgctcaggggtcacctattatgggttgtggatcaatggccacccagcagaacaagctacgaggatcgtgatcttgggtccggaggtgatggaagtggcccaagggtctcccttctcggtgaacgttcagctgctgcaggaccacggggaaattgccaagagcgagagcggccgggtcctgcagatctcagcgggcgtcagatacgtgcagctgtcagcctactctgaggtcaactttttcaaagtggacagagacaaccaagagacactcatccagaccccatttgggttcgaatgcatcccttatcctgtgtccagccccgcagctggggtgccggggcccagagctgccaagggaggggcagaagccgacgtgcccctgcccaggggagacctggagctgcatttgggtgccctccatggccaggaggacacccctggtggcctgcttgggagctcactcttctaggatcagacgagtctccttccagacaacagctgtgagaggaccagcaagcgcaggcgtcattcatcatataaaagagcatgcaggcatcccaggtggggcagcagggcccggcgccactccacgggaggccaaggcggccaagcctcaggccaacaggcccacggggggcccggcccgcgcccccttgtctgccttcacctcagttgatagaagcagttccacaccgcataggtggaatagctctcatatttctgcataaaaatacttactggg

SEQ ID NO: 2423 - protein, 350 aa, Homo sapiens
MAAAGEGTPSSRGPRRDPPRRPPRNGYGVYVYPNSFFRYEGEWKAGRKHGHGKLLFKDGSYYEGAFVDGEITGEGRRHWAWSGDTFSGQFVLGEPQGYGVMEYKAGGCYEGEVSHGMREGHGFLVDRDGQVYQGSFHDNKRHGPGQMLFQNGDKYDGDWVRDRRQGHGVLRCADGSTYKGQWHSDVFSGLGSMAHCSGVTYYGLWINGHPAEQATRIVILGPEVMEVAQGSPFSVNVQLLQDHGEIAKSESGRVLQISAGVRYVQLSAYSEVNFFKVDRDNQETLIQTPFGFECIPYPVSSPAAGVPGPRAAKGGAEADVPLPRGDLELHLGALHGQEDTPGGLLGSSLF

SEQ ID NO: 2424 - DNA, 2477 bp, Homo sapiens
tccgggtcgccgctccgccgggacgcgttggccggggcgcgcggtgcttggctgcggtgctcacactcatgaggagccggaagtcacaggtgggatgagagcagaaagggaagcactgctatcctgcctctcctgggaagacaccccgctgcctgggagctggggaggtggccctgtgttcttggctgcagcaggatggagctcaagtgccacagactctccgtgtccttaccaaatgtatgtaggtgttctggagcaagtgtttcttcatttgctgggtgcccataggaccatttccaaaggctctctaaatggctgttttgggactgctcattactctctgagaaggtcagtgaagctcctcgagccatcatgttgaagtcagtctcggccagcccttttggagaaaccatgtttgtgcttctgacataccagttattaaacaatctactggaatgaggagaatctcaatgatgagaaagtctttccttttttggactgtgggagcagtccaagctgcccagctgcagagcaggaatctgcaagtgagactgtgaccaattcttgacattttggagttgacaccttggaggtggttaatccatgacgaaactgaagctaagccgatctcatgttttgactcctgtcaatccggagaggacagcaaatggcctgctcaggtgtctgttaacagccagcgcttccagcccagcagatcatctggcttttctctgcagaaggggccaaaaggtccacctgatgaacctgttgcacgcgaaaagttcagaaccactgctgccaagatgctgacagaagccttgagaagcacctgctgcgggaaaagacgtgcaggcgtagaacacagagcgggtggcagcttcttcagttcaatccccacctcaggcagttgttgggggtcatatctaggctcacaggtgcagtgcggtcttcagcgcgcttgaaagcacgaagttgttcggcagccaggttggcctctgcccaggaagttgctggttccacgtctgccaagacagcatgtctgacttcctcatcccacaaagccacagacacgcgaacgtccaagaagttcaaatgtgacaaaggacatcttgtgaagtcagaattacagaagcttgtccctaagaatgacagcgcttctttgccaaaagtgacacctgagaccccttgtgaaaatgagtttgctgaaggcagtgccttgcttccaggcagcgaggctggcgtttctgtgcagcagggggctgcaagtcttcctctcggtggctgcagagttgtgagtgactctcgcttagcaaagactagagatggcctgtccgtgccaaaacacagtgccgggtccggagcagaagaatccaacagcagctccactgtgcagaagcagaatgagccagggctacagacagaggatgtgcagaagccaccacttcagatggacaacagcgtctttctagatgacgacagcaatcagccaatgcccgtgagccggttctttggaaacgttgagctcatgcaggacctcccacctgcgtcttcatcttgtccttcaatgagcagacgagagttcagaaaaatgcatttcagagccaaagatgatgatgatgacgacgacgatgatgcagaaatgtaggggccatacaaaataatgtccttgagtatttagtaccattaacaatttgacaatttagcacattacaagatttatataaaatgtatctccaagagaatgtcttaatcaaacttcagaactgacccatctaagtcaatagtgcaaagcacccaatacctgtggaggatgtactcatgggaactaaaactcaaaccatctttgaggttgcaaagctgctgtactgtgccaatgtcctttctttttttttttttttttttttccttggagacagagtttctctcttgtcgcccaggctggagtgcaatggcgcaatctcggctcactgcaacctccacctcctgggttcaagtgattctcctgcctcagcctcctgagtagctgggattacaggcatacaccaccacacccagctagtttttgtattattagtagacacgggggtttctccacgttggccaggctggtctcaaactcctgacctcgtgatacgcccgcctcagcctcccaaagtgctgggattacaggcgcgagccaccatgcccggccagtgtcctttcttatacacgtacatacatgatgatggcttgagtcagctgcagggcagtgggcttaatgagagggatctttgtaaagacagctcttcacttcagctcagtagctttggtcataggcaagtttgttttccattatcataatttgatgattcttgtgatgaattcaatgctagttcttaaagaactcttttatttctgtatgtggagctaatgtttaccttggaaattttgcaaaatacatgtaagaaagaaataaaatatattttgaaaatattttg

SEQ ID NO: 2425 - protein, 68 aa, Homo sapiens [sequence omitted]

SEQ ID NO: 2426 - DNA, 1671 bp, Homo sapiens
gtgctgacgtcggacgccgccgcggcgcgctctgcagactccgggtcgccgctccgccgggacgcgttggccggggcgcgcggtgcttggctgcggtgctcacactcatgaggagccggaagctcacaggtgcagtgcggtcttcagcgcgcttgaaagcacgaagttgttcggcagccaggttggcctctgcccaggaagttgctggttccacgtctgccaagacagcatgtctgacttcctcatcccacaaagccacagacacgcgaacgtccaagaagttcaaatgtgacaaaggacatcttgtgaagtcagaattacagaagcttgtccctaagaatgacagcgcttctttgccaaaagtgacacctgagaccccttgtgaaaatgagtttgctgaaggcagtgccttgcttccaggcagcgaggctggcgtttctgtgcagcagggggctgcaagtcttcctctcggtggctgcagagttgtgagtgactctcgcttagcaaagactagagatggcctgtccgtgccaaaacacagtgccgggtccggagcagaagaatccaacagcagctccactgtgcagaagcagaatgagccagggctacagacagaggatgtgcagaagccaccacttcagatggacaacagcgtctttctagatgacgacagcaatcagccaatgcccgtgagccggttctttggaaacgttgagctcatgcaggacctcccacctgcgtcttcatcttgtccttcaatgagcagacgagagttcagaaaaatgcatttcagagccaaagatgatgatgatgacgacgacgatgatgcagaaatgtaggggccatacaaaataatgtccttgagtatttagtaccattaacaatttgacaatttagcacattacaagatttatataaaatgtatctccaagagaatgtcttaatcaaacttcagaactgacccatctaagtcaatagtgcaaagcacccaatacctgtggaggatgtactcatgggaactaaaactcaaaccatctttgaggttgcaaagctgctgtactgtgccaatgtcctttctttttttttttttttttttttccttggagacagagtttctctcttgtcgcccaggctggagtgcaatggcgcaatctcggctcactgcaacctccacctcctgggttcaagtgattctcctgcctcagcctcctgagtagctgggattacaggcatacaccaccacacccagctagtttttgtattattagtagacacgggggtttctccacgttggccaggctggtctcaaactcctgacctcgtgatacgcccgcctcagcctcccaaagtgctgggattacaggcgcgagccaccatgcccggccagtgtcctttcttatacacgtacatacatgatgatggcttgagtcagctgcagggcagtgggcttaatgagagggatctttgtaaagacagctcttcacttcagctcagtagctttggtcataggcaagtttgttttccattatcataatttgatgattcttgtgatgaattcaatgctagttcttaaagaactcttttatttctgtatgtggagctaatgtttaccttggaaattttgcaaaatacatgtaagaaagaaataaaatatattttgaaaatattttg

SEQ ID NO: 2427 - protein, 243 aa, Homo sapiens
MRSRKLTGAVRSSARLKARSCSAARLASAQEVAGSTSAKTACLTSSSHKATDTRTSKKFKCDKGHLVKSELQKLVPKNDSASLPKVTPETPCENEFAEGSALLPGSEAGVSVQQGAASLPLGGCRVVSDSRLAKTRDGLSVPKHSAGSGAEESNSSSTVQKQNEPGLQTEDVQKPPLQMDNSVFLDDDSNQPMPVSRFFGNVELMQDLPPASSSCPSMSRREFRKMHFRAKDDDDDDDDDAEM

SEQ ID NO: 2428 - DNA, 2598 bp, Homo sapiens
gtgctgacgtcggacgccgccgcggcgcgctctgcagactccgggtcgccgctccgccgggacgcgttggccggggcgcgcggtgcttggctgcggtgctcacactcatgaggagccggaagctcacaggtgcagtgcggtcttcagcgcgcttgaaagcacgaagttgttcggcagccaggttggcctctgcccaggaagttgctggttccacgtctgccaagacagcatgtctggtgagccctgttaccgtggagaacgccaagatcctgactcgagggtccatttttatacaaaattgccactccaagatgtgttgctttagaaaaatatcgactgttacttatctgccagagggggactattgcagatgaaaaggtgacagcactgtaattgccttcagagaaagacacactctgcaggccagggctggctctcctagcacccgcccacccgtgtgtgtgtctagacccgggctctgatcctagcacccgcccacccgtgtgtgtgtctagacccgggccctgatcctagcacccgcccacccgtgtgtgtgtctagacccgggccctgatcctagcaccctcccacccgtgtgtgtgtctagacccgggccctgatcctagcaccctcccacccgtgtgtgtgtctagacccgggccctgatcctagcacccgcccacccgtgtgtgtgtctagacccgggccctgatcctagcacccgcccacccgtgtgtgtgtctagacccgggccctgatcctagcacccgcccacccgtgtgtgtgtctagacccgggccctgatcctagcacccgcccacccgtgtgtgtgtctagacccgggccctgatcctagcacccgcccacccgtgtgtgttgtctaaaccaggctctgaggccacttgtgctcatcgctctgctcttagcgtgctatggagtcatgctggcccattgccgtgcagcctcaccgccagaggcttgaagagaaaggcagagtgggtggggaaaggaatctcatgccgtctgccgttcaccctagcccagccatcgattccgaggagcgagttcctgaacttaccggtgaagtagagccgcttcacggagcctacagttgaggggttaggacttggccatatgatgaaagctggattcttttactgtaattgtataatatataaatatatgcttcagaattcacctgaggagctgtaacgccactaggggaaactgaaagtgtaggagtggtgtggagctgtaacgccactagggaaaactgaaagtgtaggagtggtgtggggtgtgtctagattcagtctcgcttgtattttgtcccttggtggcaaaacagtgaaatgacgatctgtgaaagttgtggtcacagcatctttatcatttccgatgtgagaagaaatactagcctctggattgaggcctgttttatttgctagatatgtctggttccccttacattttttttcttgacagacttcctcatcccacaaagccacagacacgcgaacgtccaagaagttcaaatgtgacaaaggacatcttgtgaagtcagaattacagaagcttgtccctaagaatgacagcgcttctttgccaaaagtgacacctgagaccccttgtgaaaatgagtttgctgaaggcagtgccttgcttccaggcagcgaggctggcgtttctgtgcagcagggggctgcaagtcttcctctcggtggctgcagagttgtgagtgactctcgcttagcaaagactagagatggcctgtccgtgccaaaacacagtgccgggtccggagcagaagaatccaacagcagctccactgtgcagaagcagaatgagccagggctacagacagaggatgtgcagaagccaccacttcagatggacaacagcgtctttctagatgacgacagcaatcagccaatgcccgtgagccggttctttggaaacgttgagctcatgcaggacctcccacctgcgtcttcatcttgtccttcaatgagcagacgagagttcagaaaaatgcatttcagagccaaagatgatgatgatgacgacgacgatgatgcagaaatgtaggggccatacaaaataatgtccttgagtatttagtaccattaacaatttgacaatttagcacattacaagatttatataaaatgtatctccaagagaatgtcttaatcaaacttcagaactgacccatctaagtcaatagtgcaaagcacccaatacctgtggaggatgtactcatgggaactaaaactcaaaccatctttgaggttgcaaagctgctgtactgtgccaatgtccagtgtcctttcttatacacgtacatacatgatgatggcttgagtcagctgcagggcagtgggcttaatgagagggatctttgtaaagacagctcttcacttcagctcagtagctttggtcataggcaagtttgttttccattatcataatttgatgattcttgtgatgaattcaatgctagttcttaaagaactcttttatttctgtatgtggagctaatgtttaccttggaaattttgcaaaatacatgtaagaaagaaataaaatatattttga

SEQ ID NO: 2429 - protein, 88 aa, Homo sapiens
MRSRKLTGAVRSSARLKARSCSAARLASAQEVAGSTSAKTACLVSPVTVENAKILTRGSIFIQNCHSKMCCFRKISTVTYLPEGDYCR

SEQ ID NO: 2430 - DNA, 577 bp, Homo sapiens
ctgcagactccgggtcgccgctccgccgggacgcgttggccggggcgcgcggtgcttggctgcggtgctcacactcatgaggagccggaagctcacaggtgcagtgcggtcttcagcgcgcttgaaagcacgaagttgttcggcagccaggttggcctctgcccaggaagttgctggttccacgtctgccaagacagcatgtctggtgagccctgttaccgtggagaacgccaagatcctgactcgagggtccatttttatacaaaattgccactccaagatgtgttgctttagaaaaatatcgactgttacttatctgccagagggggactattgcagatgaaaagcgtgctatggagtcatgctggcccattgccgtgcagcctcaccgccagaggcttgaagagaaaggcagagtgggtggggaaaggaatctcatgccgtctgccgttcaccctagcccagccatcgattccgaggagcgagttcctgaacttaccggtgaagtagagccgcttcacggagcctacagttgaggggttaggacttggccatatgccagcgtgtagcacagagc

SEQ ID NO: 2431 - protein, 88 aa, Homo sapiens; identical to SEQ ID NO: 2429

SEQ ID NO: 2432 - DNA, 634 bp, Homo sapiens
gcgaaggtcacaggccttgggccagtggtgggacactggagcaggaagtcggcctgtggccggccatgttcatgagggcgcgtcccttggcacccctgtagccgctatgtttcccacgcccgtggcaggcctgagagattatgtttgcggggggtgctttttttgtagcttctgtgttcgccatatttgaaaggggcagacggccatgttcgtgaacggcgcttcccttggtgcacctgtggccgccatgtttgagcgaggaccccgtggcaggccaggaccgtttctccggtgctatcccagagcatggcgcatccactcattcactcaagcccaccctctcctatcctctcggtccacccgacttagctgggcaaaaataaccctgtggtaggacagccgtctgctgttggaaagtatcgcagctcctcccgtgtctgccccgtgcacatgtgccaaggtcctgccttgaatgaaggacacagcggagaaggatgtaggctctgagcctgctagggtgcctgagagactcacaggactacccctggggcagttggaagatgcccagaaacttcagggagccaccagcatggggcagagggtctcttctggagttggtggcatcagaatcagg

SEQ ID NO: 2433 - protein, 62 aa, Homo sapiens
MFVNGASLGAPVAAMFERGPRGRPGPFLRCYPRAWRIHSFTQAHPLLSSRSTRLSWAKITLW

SEQ ID NO: 2434 - DNA, 3059 bp, Homo sapiens
acactggagcaggaagtcggcctgtggccggccatgttcatgagggcgcgtcccttggcacccctgtagccgctatgtttcccacgcccgtggcaggcctgagagattatgtttgcggggggtgctttttttgtagcttctgtgttcgccatatttgaaaggggcagacggccatgttcgtgaacggcgcttcccttggtgcacctgtggccgccatgtttgagcgaggaaagccaggggtctgtgcggggatgctgcaggacacgagaaccagccaagacctatggcccctgcagccaccgagggctcgagagcgcccctgtggacttggctgggcccttcatggtgacatccaggaatgcggctgagcgcgggtgttgacctcgctgtttgctggaatgtttgggttcttggaccatgtcagtgacggctgtgtcaccatggccttgctatccccaggaaaacctaacatgcaccccgcgcctgtcctctgggactcccatcctcctcctttgtctgacccctgagaggcttaccgtttccccagggcagccccggctgtggccctcggccctgctccaggcggccatgtcagtgtcctccctcggcgctcccaacaccctacctggctctgcgatggccaccctggactcctaaacaccccagaaagggaagagatttaagaggaaccttgattcctgccattctgcgcagtcgtgggtccctcctccacctggggccctcaaggggatttctgtccgcactcccagccagcgacccctcccagttcctgcagctggagcggccctctctcctgaacattcgggcacctgcgtctgtcactgcagccagagggctggagtgtcttcggtcaactcgccatccctgccacggctggaggccacatgtcccagaacctaccttgctgggatgggggttggggtggcagaggctgaacgcgtgtgaggtttgggggaggacaagcggagcggggatgtgtgggaggtcctggtgtccaccgtgaggatggtcacaccccatagctttgttgatgctgtggctgtagcaggcccagtggctccgctgagcctccctagcaccagtgcccagtgaagtgtggggggctggacataggtggcctcagttcctgggactcccccaaagctctggtttcccccctgctcccaggcttcaggtggacgagttagtgaccacccccactccagacctccctcccctagccacccccacagttataaaaaccttcattctcatatggaaccccctttcctgaaatccgtagagtgactgactgctttcttgagtgaatctggactgggccacatgatgatcgctgtacagagcagctgagctcctctgtctcagcctccctgagttcacagcaggctctgggcatcatctccgtgtcatcctaaggccacgggcggggttcccaccaaacaggagagcagctctcccgagatgaagccttctgatagccctagaaccaagaggaaccgtgtggggttgggtggggtgtttactgtgcactcctgatgttccctcccagtgaaggacacccacctgggacactgtggcccctggccctccctccctcccctcggtggcagagagaacttcctggtgggtgacagcccatggtccacccttgccaggtggattcaggcaaaatacgccaggctgtgtgctgaaggcatcccatctcttcctcgtcccctctcggctggatcggggtggggcagcgggtggtgagtgtgtctgtcctgccagttcagcctccaactggtctgctgtggggcaggagcccacctggctctcctgcagagctgcatggcctgccttgcctcacccgtgacaacagagactttggttctccatctgcagacgcatttgtcttgtttcttattcggtccagaactcgggtgggaagaagggtgatgttatttgggtcccctcaagaccttgacaacagatagtttttaatatcacattttaaagccgccaactttctctcctccactttggtatttccctgatttttaaacagaatgtcggctctggaggcagaaagcttgggcttggatctgggccctgccacgcagtagctatgtggccagggaatacatagcttccggatctccgatccctacagtaaagtacagataaaaatacttttcattgatgtgtttgaaatcgaatgagatagttaatgaatgagtaagtgctctgcaaactccagagcggggtgcgcgttctgatctgtttcatagaatctgacacgtaccctttcccaccccagcgtctctgaattgggatgcatctgacagcaagtgtggcatccgggctgcagttgccgttgtctgctcacatgtgaattaaaaaaacaatctcagcatatgaaatctctaatcgcgtatgaacttggtggttattcctggtgccgtgtggataactgcagcctcaacaccccagtccacaaaccacgtacggaccaactgaggaaggagtaggggttcttgttgttgcagaaaaccctccctcaacttgctctagaagataccagcattcatacttggagtgggcatcagcagcttggaagacacagcagtgggcccctcttagcaggagtgccccatctcatggctcccgacgacgacccagagggtgatgctgcgtaggggctcacggacattggcactctaagtcagagatgctcaggtgaagggggctctgatggtgaggacattcagaaataacagagattggctgggtacggtggctcacacctgtaatcccagcactttgggagggaagccgaggcaggtggatcactggaggtcagcctggccaacatggtgaaaccccgtctctactaaaaatacaaaaattagctgggcgtggcggcatgtgtctgtaatcccagttactcgggaggctgaggcaggagaattgcttgaacctgggaggcagaggttgcagtgagccaagagtgcgccactgcactccagcctgggcaacagagcgagactctttgtctc

SEQ ID NO: 2435 - protein, 64 aa, Homo sapiens
MFVNGASLGAPVAAMFERGKPGVCAGMLQDTRTSQDLWPLQPPRARERPCGLGWALHGDIQECG

SEQ ID NO: 2436 - DNA, 1052 bp, Homo sapiens
ctggagcaggaagtcggcctgtggccggccatgttcatgagggcgcgtcccttggcacccctgtagccgctatgtttcccacgcccgtggcaggcctgagagattatgtttgcggggggtgctttttttgtagcttctgtgttcgccatatttgaaaggggcagacggccatgttcgtgaacggcgcttcccttggtgcacctgtggccgccatgtttgagcgagcgtctctgaattgggatgcatctgacagcaagtgtggcatccgggctgcagttgccgttgtctgctcacatgtgaattaaaaaaacaatctcagcatatgaaatctctaatcgcgtatgaacttggtggttattcctggtgccgtgtggataactgcagcctcaacaccccagtccacaaaccacgtacggaccaactgaggaaggagtaggggttcttgttgttgcagaaaaccctccctcaacttgctctagaagataccagcattcatacttggagtgggcatcagcagcttggaagacacagcagtgggcccctcttagcaggagtgccccatctcatggctcccgacgacgacccagagggtgatgctgcgtaggggctcacggacattggcactctaagtcagagatgctcaggtgaagggggctctgatggtgaggacattcagaaataacagagattggctgggtacggtggctcacacctgtaatcccagcactttgggagggaagccgaggcaggtggatcactggaggtcagcctggccaacatggtgaaaccccgtctctactaaaaatacaaaaattagctgggcgtggcggcatgtgtctgtaatcccagttactcgggaggctgaggcaggagaattgcttgaacctgggaggcagaggttgcagtgagccaagagtgcgccactgcactccagcctgggcaacagagcgagactctttgtctcaaaaaagaaaaaaaaaagaaacaacagagacttattttacttatgttttcctcttttctgtgtgtataatgagagaaattaggatgcc

SEQ ID NO: 2437 - protein, 44 aa, Homo sapiens
MFVNGASLGAPVAAMFERASLNWDASDSKCGIRAAVAVVCSHVN

SEQ ID NO: 2438 - DNA, 1938 bp, Homo sapiens
gaagtcggcctgtggccggccatgttcatgagggcgcgtcccttggcacccctgtagccgctatgtttcccacgcccgtggcaggcctgagagattatgtttgcggggggtgctttttttgtagcttctgtgttcgccatatttgaaaggggcagacggccatgttcgtgaacggcgcttcccttggtgcacctgtggccgccatgtttgagcgaggaccccgtggcaggccaggaccgtttctccggtgctatcccagagcatggcgcatccactcattcactcaagggaaaggcctgaaagtaaaattgtatcaacattaggtttggctaatgttgccattaggcaaacctaattttaatgaagccaggaggttctcgttttgggccttgactggacaggtttgagctagaaaccacttgaagtattgatcatccatctgatcatcaagtttttttttttttttgagttggagtctcactctgttgctcacgctggagtgcagtggcacgatctcagctccctgcaacctccacctcccgggttctcctgcctcagccttccaagtagctgggattataagcgtgtgccaccatgcctggctacttttttatattttcggttgagatggggtttcaccgcgtggccaggctggtctcaaactcctgacctcaagtgatccgcctgcctcggcctcccaaagtgctgggattacaggcgtgagccgccactcccagcttgttcatccagtttttattgagcatctattatgtgccgatattgaggtagactctgggagtcacagcagtgaatgcagctgcctggatgcctcgtgagggccggagcctcactggggagatggacatgaacagcaaatgcacagcgaggaaagccaggggtctgtgcggggatgctgcaggacacgagaaccagccaagacctatggcccctgcagccaccgagggctcgagagcgcccctgtggacttggctgggcccttcatggtgacatccaggaatgcggctgagcgcgggtgttgacctcgctgtttgctggaatgtttgggttcttggaccatgtcagtgacggctgtgtcaccatggccttgctatccccaggaaaacctaacatgcaccccgcgcctgtcctctgggactcccatcctcctcctttgtctgacccctgagaggcttaccgtttccccagggcagccccggctgtggccctcggccctgctccaggcggccatgtcagtgtcctccctcggcgctcccaacaccctacctggctctgcgatggccaccctggactcctaaacaccccagaaagggaagagatttaagaggaaccttgattcctgccattctgcgcagtcgtgggtccctcctccacctggggccctcaaggggatttctgtccgcactcccagccagcgacccctcccagttcctgcagctggagcggccctctctcctgaacattcgggcacctgcgtctgtcactgcagccagagggctggagtgtcttcggtcaactcgccatccctgccacggctggaggccacatgtcccagaacctaccttgctgggatgggggttggggtggcagaggctgaacgcgtgtgaggtttgggggaggacaagcggagcggggatgtgtgggaggtcctggtgtccaccgtgaggatggtcacaccccatagctttgttgatgctgtggctgtagcaggcccagtggctccgctgagcctccctagcaccagtgcccagtgaagtgtggggggctggacataggtggcctcagttcctgggactcccccaaagctctggtttcccccctgctcccaggcttcaggtggacgagttagtgaccacccccactccagacctccctcccctagccacccccacagttataaaaaccttcattctcatatgg

SEQ ID NO: 2439 - protein, 60 aa, Homo sapiens
MPREGRSLTGEMDMNSKCTARKARGLCGDAAGHENQPRPMAPAATEGSRAPLWTWLGPSW

SEQ ID NO: 2440 - DNA, 559 bp, Homo sapiens; identical to SEQ ID NO: 33

SEQ ID NO: 2441 - protein, 112 aa, Homo sapiens; identical to SEQ ID NO: 34

SEQ ID NO: 2442 - DNA, 559 bp, Homo sapiens
gcggcgtgctcgtgccatgtgcctgtcagttctgcaagcatttgttggatgtgaaggttggtgtgatgaccacgctgcccacaacaggcaaaagggtgcggacagctgaggctcctcacttcccgctccaaagctcagaacctcccttccctcctggatccaacagaagcagcggccgctgctgcctgtgcctctcaaacttgtcacccacggatgctgggaaaaatgcacataaaagggtcctgtctttgtgatgtcagcgtgaagtggaattcgcagaatggctaaagtggagggaagacttaaaatgcattggatgatgatagcagcgtcatttacaatcaccacgacttggaagcagccgagatgtcctttggcagatgattggagaaatgaactgtggcacgtccatgcagaccatgaaatactattcagtgctaaaaatgagtgagctttccatccatgaaaagacatagagaaacctgaaatgcagatcacaaagtgaaaggccaatctggaaaggctacacaccctatgactccaacctgtgacattccca

SEQ ID NO: 2443 - protein, 62 aa, Homo sapiens; identical to SEQ ID NO: 36

SEQ ID NO: 2444 - DNA, 3242 bp, Homo sapiens
gtgctcgtgccatgtgcctgtcagttctgcaagcatttgttggatgtgaaggttggtgtgatgaccacgctgcccacaacaggcaaaagggtgcggacagctgaggctcctcacttcccgctccaaagctcagaacctcccttccctcctggatccaacagaagcagcggccgctgctgcctgtgcctctcaaacttgtcacccacggatgctgggaaaaatgcacataaaatgactggatggagatgacccaggaaggggccctgttgcccaggaaatgggcttgtcctgaaccacagcttgaaggagagccaccgactgatcaggaatacccaactggactttattccagcaacatacaaagcattactgtgctgggccatggtatattattgggtttcttttattagaacacttggcattaccttcactaatatacactcatcatagtagacattttcactagttatagatgatatgcactattttcccttctgaaacagaaatttgcagcagcactgccaaaggacaatagatttttaaaaatcatagaatgactggagttcatgtctctgcaaagaacatctaagccctaagccatccagagtggatgaggcatctctgcatgagttaaattacacactccagctgctgtaaccaagaaggagtttcacagtggtcaaaacgtcgtagaagtttagttctcatgcatgtaacagtccaaacgcagctccacagtggcaaggagccagcgtcctttctcttgctgtcctgctgtgctcaagaggtggcttctgtctttgagtccaacgtggctgctctggccccagccatcatttctatactccagcaggtggcaagtgggaagaagaaagggagagcttatgcctttcattttagggacacatggcctagtgctgctcacatcaccctgctcaccttgtgttgggaccagagtctagtcacatggcagcaaatagctgtgaggaatattgggaaaggttgtctttggctacttggcctcatgaccatcggaaactgctgtactacaaaaggtgggttctgatcatcttagttgggaatgctgtgacaaatgaccatagcctgggggcttaaacaacaaacatttatttcacacagtcctggaggctggagatccaagatcaaaatgctggctggcttggtgtctggtgagggcttgcagacagccacttgttgtatcctcaaatggtagagagagagagagaaagacagagagagacagagagaggcagagagagagagagggagcaagctctcttgagcctcttatcagggcactaatcccatcttgaggggtccctcctcatggcctaatcaatcatctcccaaacgcctcaactcccaacaccatcatgttgtgggtgagggtttcagcacatgaatttggaggggacacagacattcagtgtgcagaggctgccactgtgcctctctgtccccatccctttcctgacaccttagagtgtgtgtccccacaggaaagcaatgtccttcaacatctcttcccaggagcccctgagcacccgcttccctctcactttattactgctcctatccatacaggtttgggcaggagaacaggagccacactcagtatttagaggaaagagagacagagagcacaagtgagagagattgacttaatccaggaaatcagaggctcacacagacattggaagggagcggtgaaggtcagttttaggaaacccagaagtgcagagatgacgaggaagccccgaaatgcccctggaagcccgcagtgcccagtgagccattcccagggaacgcctgggaaccaccagaggctgacaagcctggaaccactgggggaggggacctgggaaactggggagaacatggaggtgacgggatgacgctgagttggaacggacaacccaatgcaggcttcctctcctcgcttctcagcccagcagggtggctggctcatttgtgggatttatcaccaactaagggttttcagggggttgaaaatggctcattatccctcctagataatgttgcctcttagtagaggatttgatgctttgacccagacatgattcctcctgtgggcatgaaaatatatattttttcttttcaacttttagtctaagttccagggtccatgtgcaggatgtgcaggtttgttacataggcagatgtgtgccatggtggtttgctttgaagcagagactggtgggtgcggagcaaggccagttccgccctgctccagcctctcctggctctgccccctgccctccactcagcacttggtttctgcagtcacctcccctctccggtctctccgggtatggcccctctctgggtcactcccatcagcattcatcctcgtctccaggcatgggaggtctccgtgaccccatgcccctgagcaccgctgccctatttctctggtccctttctctggaccctatttctctggtcccttttgcggccagagtcctcagaagagctggctgcccaccgcctctcctcccgcccctctgctgaggctgtatcgtgaccaccccacccccctgccacatcacatcagggggcctgccctctgtcctcctcttctgtttcctcttcgttgcttttctcacgcttggcccttcatcccttctctcctgggctccccggacctcctgcgcatgggtttctttctgcccctgtctctttccctgcattcttgtcctcttctcggcattctgttttcagtctgtccctctgccatgtgactgtccagtacacgtgagtacatgggatatgttccccaaaccatggaggctgggcttagccatgtgacctgctttggccaaggatgttttgacagcactgcacaagcagaggtctcagctgtgcttctgcggcggcggggctcccccccggggctcctgtcacctgtctggggagaacgtgctccaggcgcggcccttccagagagtgtggaatccccggggaagcccagatgatccacagccagacgctggctgaggttgagaaactggcacttgttgatgtcagccaccgagtttggagttttggagtggcttgtcagacagcagcattgtagcaatggccgaatcatccatgaagacgctgaatttcatttttgttttttgttacggcagcataactttgctgatctggtctgtgacaaaataactttttcctctgtcagtctttctcttttcatt

SEQ ID NO: 2445 - protein, 62 aa, Homo sapiens; identical to SEQ ID NO: 38

SEQ ID NO: 2446 - DNA, 755 bp, Homo sapiens
gtgccaataggatgtactgacagatcagaagtggtcgtgagagaaggagcaagtagccagaagagtgaagtgtgcactggctgagatgtgggagcaggtgttgttggtttccccggagatgcagcaagaaggccctcgccagatatcaaggccttaagcttggacttcccagcctccagaactgtcttatgtatcaacaaaatcacaccagaccacccaaagctggccctgccaactgaccacacacacccctgcctgaaaggcatgtttcaatgtgcaacagacgcctgccactcaggggacatcaaatgttcatgagaactcgctaacctcgaaacaggttctacaaattcaaaaaaaccacccgtggcctggctctgggctgaagctgagtcctggcttgaaatcccctgccttaatctctcttcgaagacttttctgcattcatctgagtcctcatcctccaaggcagggctcaggcttgggctcaggctcccagccatgtatccctcctggaccattcctgactcctttccagtatccttatcacttgtaccacatacgttggcctttgatcctgtgtactgttggatttgtctttacttcacaggttcatcttgtctccccaagaacaatgagagttgcctcaaggggtagaaccatgctttttgttttcttttgaattcattacagcacagccaaaagctcaacacacaaaacacactcagtaaatatctgttgaacagaataaaagc

SEQ ID NO: 2447 - protein, 51 aa, Homo sapiens
MYPSWTIPDSFPVSLSLVPHTLAFDPVYCWICLYFTGSSCLPKNNESCLKG

SEQ ID NO: 2448 - DNA, 789 bp, Homo sapiens
agctgcctatcggcttctcagtgtttgaacttcaaagggctggacgctcacccaagaaggggaccccggcctgacctctctcggaattcaaaaaaatctaaggctcagagagggaatgggagctggctcttccctctgtgtttagcatccacgttttttggcggtctggctgaaaccagcccaccctagttcgggcgccagagcaacgcagttccgagggcagatctccaaggggcggaggcagagccgcgggcccttccaccgcagccatccgcacgggaggcctcgcgattgctcggaaccatcccgcaggagttcagctgatattttctagtgtggggcgagagattttgtggagcgcatttaaggggtttttgttgtgactgctgccttgtatacatttattttctttcttggaactgggcctcgccctcctcccactgacatgatggcccagtccaaggccaatggctcgcactatgcgctgaccgccatcggcctggggatgctggtccttggggtgatcatggccatgtggaacctggtacccggcttcagcgcggccgagaagccaacagctcagggcagcaacaagaccgaggtgggtggcggcatcctcaagagcaagaccttctctgtggcctacgtgctggtcggggccggggtgatgctgctgctgctttctatctgcctgagtatcagggataagaggaagcagcggcagggcgaggacctggcccatgtccagcacccgacaggcgctgggcctcacgcccaggaggaagacag

SEQ ID NO: 2449 - protein, 113 aa, Homo sapiens
MMAQSKANGSHYALTAIGLGMLVLGVIMAMWNLVPGFSAAEKPTAQGSNKTEVGGGILKSKTFSVAYVLVGAGVMLLLLSICLSIRDKRKQRQGEDLAHVQHPTGAGPHAQEE

SEQ ID NO: 2450 - DNA, 843 bp, Homo sapiens
agtgtttgaacttcaaagggctggacgctcacccaagaaggggaccccggcctgacctctctcggaattcaaaaaaatctaaggctcagagagggaatgggagctggctcttccctctgtgtttagcatccacgttttttggcggtctggctgaaaccagcccaccctagttcgggcgccagagcaacgcagttccgagggcagatctccaaggggcggaggcagagccgcgggtggatctttaactcaagactagcatgaagagttgccttctggcctgccctgagtctcctcaaataacaacaggcccttccaccgcagccatccgcacgggaggcctcgcgattgctcggaaccatcccgcaggagttcagctgatattttctagtgtggggcgagagattttgtggagcgcatttaaggggtttttgttgtgactgctgccttgtatacatttattttctttcttggaactgggcctcgccctcctcccactgacatgatggcccagtccaaggccaatggctcgcactatgcgctgaccgccatcggcctggggatgctggtccttggggtgatcatggccatgtggaacctggtacccggcttcagcgcggccgagaagccaacagctcagggcagcaacaagaccgaggtgggtggcggcatcctcaagagcaagaccttctctgtggcctacgtgctggtcggggccggggtgatgctgctgctgctttctatctgcctgagtatcagggataagaggaagcagcggcagggcgaggacctggcccatgtccagcacccgacaggcgctgggcctcacgcccaggaggaagacag

SEQ ID NO: 2451 - protein, 59 aa, Homo sapiens
MKSCLLACPESPQITTGPSTAAIRTGGLAIARNHPAGVQLIFSSVGREILWSAFKGFLL

SEQ ID NO: 2452 - DNA, 1925 bp, Homo sapiens
agtgtttgaacttcaaagggctggacgctcacccaagaaggggaccccggcctgacctctctcggaattcaaaaaaatctaaggctcagagagggaatgggagctggctcttccctctgtgtttagcatccacgttttttggcggtctggctgaaaccagcccaccctagttcgggcgccagagcaacgcagttccgagggcagatctccaaggggcggaggcagagccgcgggcccttccaccgcagccatccgcacgggaggcctcgcgattgctcggaaccatcccgcaggagttcagctgatattttctagtgtggggcgagagattttgtggagcgcatttaaggggtttttgttgtgactgctgccttgtatacatttattttctttcttggaactgggcctcgccctcctcccactgacatgatggcccagtccaaggccaatggctcgcactatgcgctgaccgccatcggcctggggatgctggtccttggggtgatcatggccatgtggaacctggtacccggcttcagcgcggccgagaagccaacagctcagggcagcaacaagaccgaggtgggtggcggcatcctcaagagcaagaccttctctgtggcctacgtgctggtcggggccggggtgatgctgctgctgctttctatctgcctgagtatcagggataagaggaagcagcggcagggcgaggacctggcccatgtccagcacccgacaggcgctgggcctcacgcccaggaggaagacagccaggaggaagaagaggaggatgaggaggctgcctcaaggtactatgttcccagctacgaggaagtgatgaacacaaactactcagaagcaaggggagaggagcagaacccgaggttgagcatctctctcccgtcctatgagtcactgacggggctcgacgagaccacccccacatccaccagggctgacgtggaggccagccctgggaacccccctgacaggcagaactctaagttggccaaacgactgaaaccgctgaaagttcgaaggattaaatctgaaaagcttcacctcaaagactttaggatcaacctcccagacaaaaacgtccctcctccctcgatagagcctttgactcctccaccgcagtatgatgaagtccaggagaaggcccccgacacccggccgcccgactgaatggccccacttgagccacgctccctcctgtctctcacacctttcacccccaagactctaacaaagccacatgagccacagttgagaagcggaggggccagctgtgcatggagccatttggatggcggcgggcggggggggattctctgtatcaggagtgactttgttgccccacacagcctcctgctgcaggtgctttggaaagagatgctgccttggagctggtgaatctgtggaccacattcaagggtgtggcacaggcatcttcccatccttttcactccgaatcgctggcgacacattctcctttccagctaggaaagggttcctcgcggctggtttagattgtggttgtttgttttgcttctactaagactgttttgtttcaaaaaggaaacaagttttgtgtttgctgtctacgctggagtcctgaactgtgggtagaaaacacgacctggctttgtagaaaggacacagggctgttttatgaactaagcggtgaggctcaggtggcggctctcgcagagcccctgatgctgttgttctttgagggcttaaggcctgatgaacgtaggcacgtgatgcataatagtcttcaatggtacacttaactagtctcttctgtgtaacagcaaaaaaaaaaaaaaaaagaagaagaaagaaaactgtaggaaatgttctttttgaaatgccatgcaatggagctttttgtaataaaatattttatatgtagtaca

SEQ ID NO: 2453 - protein, 253 aa, Homo sapiens; identical to SEQ ID NO: 40

SEQ ID NO: 2454 - DNA, 1979 bp, Homo sapiens
gctggacgctcacccaagaaggggaccccggcctgacctctctcggaattcaaaaaaatctaaggctcagagagggaatgggagctggctcttccctctgtgtttagcatccacgttttttggcggtctggctgaaaccagcccaccctagttcgggcgccagagcaacgcagttccgagggcagatctccaaggggcggaggcagagccgcgggtggatctttaactcaagactagcatgaagagttgccttctggcctgccctgagtctcctcaaataacaacaggcccttccaccgcagccatccgcacgggaggcctcgcgattgctcggaaccatcccgcaggagttcagctgatattttctagtgtggggcgagagattttgtggagcgcatttaaggggtttttgttgtgactgctgccttgtatacatttattttctttcttggaactgggcctcgccctcctcccactgacatgatggcccagtccaaggccaatggctcgcactatgcgctgaccgccatcggcctggggatgctggtccttggggtgatcatggccatgtggaacctggtacccggcttcagcgcggccgagaagccaacagctcagggcagcaacaagaccgaggtgggtggcggcatcctcaagagcaagaccttctctgtggcctacgtgctggtcggggccggggtgatgctgctgctgctttctatctgcctgagtatcagggataagaggaagcagcggcagggcgaggacctggcccatgtccagcacccgacaggcgctgggcctcacgcccaggaggaagacagccaggaggaagaagaggaggatgaggaggctgcctcaaggtactatgttcccagctacgaggaagtgatgaacacaaactactcagaagcaaggggagaggagcagaacccgaggttgagcatctctctcccgtcctatgagtcactgacggggctcgacgagaccacccccacatccaccagggctgacgtggaggccagccctgggaacccccctgacaggcagaactctaagttggccaaacgactgaaaccgctgaaagttcgaaggattaaatctgaaaagcttcacctcaaagactttaggatcaacctcccagacaaaaacgtccctcctccctcgatagagcctttgactcctccaccgcagtatgatgaagtccaggagaaggcccccgacacccggccgcccgactgaatggccccacttgagccacgctccctcctgtctctcacacctttcacccccaagactctaacaaagccacatgagccacagttgagaagcggaggggccagctgtgcatggagccatttggatggcggcgggcggggggggattctctgtatcaggagtgactttgttgccccacacagcctcctgctgcaggtgctttggaaagagatgctgccttggagctggtgaatctgtggaccacattcaagggtgtggcacaggcatcttcccatccttttcactccgaatcgctggcgacacattctcctttccagctaggaaagggttcctcgcggctggtttagattgtggttgtttgttttgcttctactaagactgttttgtttcaaaaaggaaacaagttttgtgtttgctgtctacgctggagtcctgaactgtgggtagaaaacacgacctggctttgtagaaaggacacagggctgttttatgaactaagcggtgaggctcaggtggcggctctcgcagagcccctgatgctgttgttctttgagggcttaaggcctgatgaacgtaggcacgtgatgcataatagtcttcaatggtacacttaactagtctcttctgtgtaacagcaaaaaaaaaaaaaaaaagaagaagaaagaaaactgtaggaaatgttctttttgaaatgccatgcaatggagctttttgtaataaaatattttatatgtagtaca

SEQ ID NO: 2455 - protein, 253 aa, Homo sapiens; identical to SEQ ID NO: 40

SEQ ID NO: 2456 - DNA, 2081 bp, Homo sapiens
gacttcgggtttgcactccccggagccagaactccgtggcggctccgggcctccgtggatccgagcagagactggctgcccgcctgccactcgcaggctgggaaaacgccagccggtgcctcgccgggaaagttctcggcaaagctggggatgagccctcagcagggcaggctcccggtgcagcgcgcccccatccattgcccgcgcgcaagaacccggaatgggccccacctgggccgggactcgggcgtgcgatcccgagggcgccctggggaccacgcatcgggtggggaccctggccgagggcgtgagctgactcagtttttaaaaactcgcttcctccttccctacttgtgccggtcactcacctcgctgggaaccagcccagggcagaagggggagagggaggcggtggcctccccaggaaggaggagaggtggatctttaactcaagactagcatgaagagttgccttctggcctgccctgagtctcctcaaataacaacaggcccttccaccgcagccatccgcacgggaggcctcgcgattgctcggaaccatcccgcaggagttcagctgatattttctagtgtggggcgagagattttgtggagcgcatttaaggggtttttgttgtgactgctgccttgtatacatttattttctttcttggaactgggcctcgccctcctcccactgacatgatggcccagtccaaggccaatggctcgcactatgcgctgaccgccatcggcctggggatgctggtccttggggtgatcatggccatgtggaacctggtacccggcttcagcgcggccgagaagccaacagctcagggcagcaacaagaccgaggtgggtggcggcatcctcaagagcaagaccttctctgtggcctacgtgctggtcggggccggggtgatgctgctgctgctttctatctgcctgagtatcagggataagaggaagcagcggcagggcgaggacctggcccatgtccagcacccgacaggcgctgggcctcacgcccaggaggaagacagccaggaggaagaagaggaggatgaggaggctgcctcaaggtactatgttcccagctacgaggaagtgatgaacacaaactactcagaagcaaggggagaggagcagaactctaagttggccaaacgactgaaaccgctgaaagttcgaaggattaaatctgaaaagcttcacctcaaagactttaggatcaacctcccagacaaaaacgtccctcctccctcgatagagcctttgactcctccaccgcagtatgatgaagtccaggagaaggcccccgacacccggccgcccgactgaatggccccacttgagccacgctccctcctgtctctcacacctttcacccccaagactctaacaaagccacatgagccacagttgagaagcggaggggccagctgtgcatggagccatttggatggcggcgggcggggggggattctctgtatcaggagtgactttgttgccccacacagcctcctgctgcaggtgctttggaaagagatgctgccttggagctggtgaatctgtggaccacattcaagggtgtggcacaggcatcttcccatccttttcactccgaatcgctggcgacacattctcctttccagctaggaaagggttcctcgcggctggtttagattgtggttgtttgttttgcttctactaagactgttttgtttcaaaaaggaaacaagttttgtgtttgctgtctacgctggagtcctgaactgtgggtagaaaacacgacctggctttgtagaaaggacacagggctgttttatgaactaagcggtgaggctcaggtggcggctctcgcagagcccctgatgctgttgttctttgagggcttaaggcctgatgaacgtaggcacgtgatgcataatagtcttcaatggtacacttaactagtctcttctgtgtaacagcaaaaaaaaaaaaaaaaagaagaagaaagaaaactgtaggaaatgttctttttgaaatgccatgcaatggagctttttgtaataaaatattttatatgtagtaca

SEQ ID NO: 2457 - protein, 213 aa, Homo sapiens
MMAQSKANGSHYALTAIGLGMLVLGVIMAMWNLVPGFSAAEKPTAQGSNKTEVGGGILKSKTFSVAYVLVGAGVMLLLLSICLSIRDKRKQRQGEDLAHVQHPTGAGPHAQEEDSQEEEEEDEEAASRYYVPSYEEVMNTNYSEARGEEQNSKLAKRLKPLKVRRIKSEKLHLKDFRINLPDKNVPPPSIEPLTPPPQYDEVQEKAPDTRPPD

SEQ ID NO: 2458 - DNA, 860 bp, Homo sapiens
cggtgcctcgccgggaaagttctcggcaaagctggggatgagccctcagcagggcaggctcccggtgcagcgcgcccccatccattgcccgcgcgcaagaacccggaatgggccccacctgggccgggactcgggcgtgcgatcccgagggcgccctggggaccacgcatcgggtggggaccctggccgagggcgtgagctgactcagtttttaaaaactcgcttcctccttccctacttgtgccggtcactcacctcgctgggaaccagcccagggcagaagggggagagggaggcggtggcctccccaggaaggaggagaggcccttccaccgcagccatccgcacgggaggcctcgcgattgctcggaaccatcccgcaggagttcagctgatattttctagtgtggggcgagagattttgtggagcgcatttaaggggtttttgttgtgactgctgccttgtatacatttattttctttcttggaactgggcctcgccctcctcccactgacatgatggcccagtccaaggccaatggctcgcactatgcgctgaccgccatcggcctggggatgctggtccttggggtgatcatggccatgtggaacctggtacccggcttcagcgcggccgagaagccaacagctcagggcagcaacaagaccgaggtgggtggcggcatcctcaagagcaagaccttctctgtggcctacgtgctggtcggggccggggtgatgctgctgctgctttctatctgcctgagtatcagggataagaggaagcagcggcagggcgaggacctggcccatgtccagcacccgacaggcgctgggcctcacgcccaggaggaagacag

SEQ ID NO: 2459 - protein, 138 aa, Homo sapiens
MSPQQGRLPVQRAPIHCPRARTRNGPHLGRDSGVRSRGRPGDHASGGDPGRGRELTQFLKTRFLLPYLCRSLTSLGTSPGQKGEREAVASPGRRRGPSTAAIRTGGLAIARNHPAGVQLIFSSVGREILWSAFKGFLL

SEQ ID NO: 2460 - DNA, 834 bp, Homo sapiens
gcacgccggcgctcccaggccgcgcttcctgcgtccccaacccggtccctgagagggcagtgcgccctctccaccactgcgttccctcggctaagaatcccccgaaccccagccccgcgatcgcggcgcccaccgaggaggccgcccgggtggggcgcgggggtcgcgaagcccgcagtcccggaccgcccagccgagacggagccggacccgccgcctcccgggtggatctttaactcaagactagcatgaagagttgccttctggcctgccctgagtctcctcaaataacaacaggcccttccaccgcagccatccgcacgggaggcctcgcgattgctcggaaccatcccgcaggagttcagctgatattttctagtgtggggcgagagattttgtggagcgcatttaaggggtttttgttgtgactgctgccttgtatacatttattttctttcttggaactgggcctcgccctcctcccactgacatgatggcccagtccaaggccaatggctcgcactatgcgctgaccgccatcggcctggggatgctggtccttggggtgatcatggccatgtggaacctggtacccggcttcagcgcggccgagaagccaacagctcagggcagcaacaagaccgaggtgggtggcggcatcctcaagagcaagaccttctctgtggcctacgtgctggtcggggccggggtgatgctgctgctgctttctatctgcctgagtatcagggataagaggaagcagcggcagggcgaggacctggcccatgtccagcacccgacaggcgctgggcctcacgcccaggaggaagacag

SEQ ID NO: 2461 - protein, 59 aa, Homo sapiens; identical to SEQ ID NO: 2451

SEQ ID NO: 2462 - DNA, 1810 bp, Homo sapiens
acgccggcgctcccaggccgcgcttcctgcgtccccaacccggtccctgagagggcagtgcgccctctccaccactgcgttccctcggctaagaatcccccgaaccccagccccgcgatcgcggcgcccaccgaggaggccgcccgggtggggcgcgggggtcgcgaagcccgcagtcccggaccgcccagccgagacggagccggacccgccgcctcccgggcccttccaccgcagccatccgcacgggaggcctcgcgattgctcggaaccatcccgcaggagttcagctgatattttctagtgtggggcgagagattttgtggagcgcatttaaggggtttttgttgtgactgctgccttgtatacatttattttctttcttggaactgggcctcgccctcctcccactgacatgatggcccagtccaaggccaatggctcgcactatgcgctgaccgccatcggcctggggatgctggtccttggggtgatcatggccatgtggaacctggtacccggcttcagcgcggccgagaagccaacagctcagggcagcaacaagaccgaggtgggtggcggcatcctcaagagcaagaccttctctgtggcctacgtgctggtcggggccggggtgatgctgctgctgctttctatctgcctgagtatcagggataagaggaagcagcggcagggcgaggacctggcccatgtccagcacccgacaggcgctgggcctcacgcccaggaggaagacagccaggaggaagaagaggaggatgaggaggctgcctcaaggtactatgttcccagctacgaggaagtgatgaacacaaactactcagaagcaaggggagaggagcagaacccgaggttgagcatctctctcccgtcctatgagtcactgacggggctcgacgagaccacccccacatccaccagggctgacgtggaggccagccctgggaacccccctgacaggcagaactctaagttggccaaacgactgaaaccgctgaaagttcgaaggattaaatctgaaaagcttcacctcaaagactttaggatcaacctcccagacaaaaacgtccctcctccctcgatagagcctttgactcctccaccgcagtatgatgaagtccaggagaaggcccccgacacccggccgcccgactgaatggccccacttgagccacgctccctcctgtctctcacacctttcacccccaagactctaacaaagccacatgagccacagttgagaagcggaggggccagctgtgcatggagccatttggatggcggcgggcggggggggattctctgtatcaggagtgactttgttgccccacacagcctcctgctgcaggtgctttggaaagagatgctgccttggagctggtgaatctgtggaccacattcaagggtgtggcacaggcatcttcccatccttttcactccgaatcgctggcgacacattctcctttccagctaggaaagggttcctcgcggctggtttagattgtggttgtttgttttgcttctactaagactgttttgtttcaaaaaggaaacaagttttgtgtttgctgtctacgctggagtcctgaactgtgggtagaaaacacgacctggctttgtagaaaggacacagggctgttttatgaactaagcggtgaggctcaggtggcggctctcgcagagcccctgatgctgttgttctttgagggcttaaggcctgatgaacgtaggcacgtgatgcataatagtcttcaatggtacacttaactagtctcttctgtgtaacagc

SEQ ID NO: 2463 - protein, 253 aa, Homo sapiens; identical to SEQ ID NO: 40

SEQ ID NO: 2464 - DNA, 1914 bp, Homo sapiens
acgccggcgctcccaggccgcgcttcctgcgtccccaacccggtccctgagagggcagtgcgccctctccaccactgcgttccctcggctaagaatcccccgaaccccagccccgcgatcgcggcgcccaccgaggaggccgcccgggtggggcgcgggggtcgcgaagcccgcagtcccggaccgcccagccgagacggagccggacccgccgcctcccgggcccttccaccgcagccatccgcacgggaggcctcgcgattgctcggaaccatcccgcaggagttcagctgatattttctagtgtggggcgagagattttgtggagcgcatttaaggggtttttgttgtgactgctgccttgtatacatttattttctttcttggaactgggcctcgccctcctcccactgacatgatggcccagtccaaggccaatggctcgcactatgcgctgaccgccatcggcctggggatgctggtccttggggtgatcatggccatgtggaacctggtacccggcttcagcgcggccgagaagccaacagctcagggcagcaacaagaccgaggtgggtggcggcatcctcaagagcaagaccttctctgtggcctacgtgctggtcggggccggggtgatgctgctgctgctttctatctgcctgagtatcagggataagaggaagcagcggcagggcgaggacctggcccatgtccagcacccgacaggcgctgggcctcacgcccaggaggaagacagccaggaggaagaagaggaggatgaggaggctgcctcaaggtactatgttcccagctacgaggaagtgatgaacacaaactactcagaagcaaggggagaggagcagaacccgaggttgagcatctctctcccgtcctatgagtcactgacggggctcgacgagaccacccccacatccaccagggctgacgtggaggccagccctgggaacccccctgacaggcagaactctaagttggccaaacgactgaaaccgctgaaagttcgaaggattaaatctgaaaagcttcacctcaaagactttaggatcaacctcccagacaaaaacgtccctcctccctcgatagagcctttgactcctccaccgcagtatgatgaagtccaggagaaggcccccgacacccggccgcccgactgaatggccccacttgagccacgctccctcctgtctctcacacctttcacccccaagactctaacaaagccacatgagccacagttgagaagcggaggggccagctgtgcatggagccatttggatggcggcgggcggggggggattctctgtatcaggagtgactttgttgccccacacagcctcctgctgcaggtgctttggaaagagatgctgccttggagctggtgaatctgtggaccacattcaagggtgtggcacaggcatcttcccatccttttcactccgaatcgctggcgacacattctcctttccagctaggaaagggttcctcgcggctggtttagattgtggttgtttgttttgcttctactaagactgttttgtttcaaaaaggaaacaagttttgtgtttgctgtctacgctggagtcctgaactgtgggtagaaaacacgacctggctttgtagaaaggacacagggctgttttatgaactaagcggtgaggctcaggtggcggctctcgcagagcccctgatgctgttgttctttgagggcttaaggcctgatgaacgtaggcacgtgatgcataatagtcttcaatggtacacttaactagtctcttctgtgtaacagcaaaaaaaaaaaaaaaaagaagaagaaagaaaactgtaggaaatgttctttttgaaatgccatgcaatggagctttttgtaataaaatattttatatgtagtaca

SEQ ID NO: 2465 - protein, 253 aa, Homo sapiens; identical to SEQ ID NO: 40

SEQ ID NO: 2466 - DNA, 1726 bp, Homo sapiens
acgccggcgctcccaggccgcgcttcctgcgtccccaacccggtccctgagagggcagtgcgccctctccaccactgcgttccctcggctaagaatcccccgaaccccagccccgcgatcgcggcgcccaccgaggaggccgcccgggtggggcgcgggggtcgcgaagcccgcagtcccggaccgcccagccgagacggagccggacccgccgcctcccgggcccttccaccgcagccatccgcacgggaggcctcgcgattgctcggaaccatcccgcaggagttcagctgatattttctagtgtggggcgagagattttgtggagcgcatttaaggggtttttgttgtgactgctgccttgtatacatttattttctttcttggaactgggcctcgccctcctcccactgacatgatggcccagtccaaggccaatggctcgcactatgcgctgaccgccatcggcctggggatgctggtccttggggtgatcatggccatgtggaacctggtacccggcttcagcgcggccgagaagccaacagctcagggcagcaacaagaccgagccaggaggaagaagaggaggatgaggaggctgcctcaaggtactatgttcccagctacgaggaagtgatgaacacaaactactcagaagcaaggggagaggagcagaacccgaggttgagcatctctctcccgtcctatgagtcactgacggggctcgacgagaccacccccacatccaccagggctgacgtggaggccagccctgggaacccccctgacaggcagaactctaagttggccaaacgactgaaaccgctgaaagttcgaaggattaaatctgaaaagcttcacctcaaagactttaggatcaacctcccagacaaaaacgtccctcctccctcgatagagcctttgactcctccaccgcagtatgatgaagtccaggagaaggcccccgacacccggccgcccgactgaatggccccacttgagccacgctccctcctgtctctcacacctttcacccccaagactctaacaaagccacatgagccacagttgagaagcggaggggccagctgtgcatggagccatttggatggcggcgggcggggggggattctctgtatcaggagtgactttgttgccccacacagcctcctgctgcaggtgctttggaaagagatgctgccttggagctggtgaatctgtggaccacattcaagggtgtggcacaggcatcttcccatccttttcactccgaatcgctggcgacacattctcctttccagctaggaaagggttcctcgcggctggtttagattgtggttgtttgttttgcttctactaagactgttttgtttcaaaaaggaaacaagttttgtgtttgctgtctacgctggagtcctgaactgtgggtagaaaacacgacctggctttgtagaaaggacacagggctgttttatgaactaagcggtgaggctcaggtggcggctctcgcagagcccctgatgctgttgttctttgagggcttaaggcctgatgaacgtaggcacgtgatgcataatagtcttcaatggtacacttaactagtctcttctgtgtaacagcaaaaaaaaaaaaaaaaagaagaagaaagaaaactgtaggaaatgttctttttgaaatgccatgcaatggagctttttgtaataaaatattttatatgtagtaca

SEQ ID NO: 2467 - protein, 59 aa, Homo sapiens
MMAQSKANGSHYALTAIGLGMLVLGVIMAMWNLVPGFSAAEKPTAQGSNKTEPGGRRGG

SEQ ID NO: 2468 - DNA, 1952 bp, Homo sapiens
caacccggtccctgagagggcagtgcgccctctccaccactgcgttccctcggctaagaatcccccgaaccccagccccgcgatcgcggcgcccaccgaggaggccgcccgggtggggcgcgggggtcgcgaagcccgcagtcccggaccgcccagccgagacggagccggacccgccgcctcccgggtggatctttaactcaagactagcatgaagagttgccttctggcctgccctgagtctcctcaaataacaacaggcccttccaccgcagccatccgcacgggaggcctcgcgattgctcggaaccatcccgcaggagttcagctgatattttctagtgtggggcgagagattttgtggagcgcatttaaggggtttttgttgtgactgctgccttgtatacatttattttctttcttggaactgggcctcgccctcctcccactgacatgatggcccagtccaaggccaatggctcgcactatgcgctgaccgccatcggcctggggatgctggtccttggggtgatcatggccatgtggaacctggtacccggcttcagcgcggccgagaagccaacagctcagggcagcaacaagaccgaggtgggtggcggcatcctcaagagcaagaccttctctgtggcctacgtgctggtcggggccggggtgatgctgctgctgctttctatctgcctgagtatcagggataagaggaagcagcggcagggcgaggacctggcccatgtccagcacccgacaggcgctgggcctcacgcccaggaggaagacagccaggaggaagaagaggaggatgaggaggctgcctcaaggtactatgttcccagctacgaggaagtgatgaacacaaactactcagaagcaaggggagaggagcagaacccgaggttgagcatctctctcccgtcctatgagtcactgacggggctcgacgagaccacccccacatccaccagggctgacgtggaggccagccctgggaacccccctgacaggcagaactctaagttggccaaacgactgaaaccgctgaaagttcgaaggattaaatctgaaaagcttcacctcaaagactttaggatcaacctcccagacaaaaacgtccctcctccctcgatagagcctttgactcctccaccgcagtatgatgaagtccaggagaaggcccccgacacccggccgcccgactgaatggccccacttgagccacgctccctcctgtctctcacacctttcacccccaagactctaacaaagccacatgagccacagttgagaagcggaggggccagctgtgcatggagccatttggatggcggcgggcggggggggattctctgtatcaggagtgactttgttgccccacacagcctcctgctgcaggtgctttggaaagagatgctgccttggagctggtgaatctgtggaccacattcaagggtgtggcacaggcatcttcccatccttttcactccgaatcgctggcgacacattctcctttccagctaggaaagggttcctcgcggctggtttagattgtggttgtttgttttgcttctactaagactgttttgtttcaaaaaggaaacaagttttgtgtttgctgtctacgctggagtcctgaactgtgggtagaaaacacgacctggctttgtagaaaggacacagggctgttttatgaactaagcggtgaggctcaggtggcggctctcgcagagcccctgatgctgttgttctttgagggcttaaggcctgatgaacgtaggcacgtgatgcataatagtcttcaatggtacacttaactagtctcttctgtgtaacagcaaaaaaaaaaaaaaaaagaagaagaaagaaaactgtaggaaatgttctttttgaaatgccatgcaatggagctttttgtaataaaatattttatatgtagtaca

SEQ ID NO: 2469 - protein, 253 aa, Homo sapiens; identical to SEQ ID NO: 40

SEQ ID NO: 2470 - DNA, 891 bp, Homo sapiens
ctgcctcagcctctcaaagtgctaggattacaggcgtgagccaccacacccagcaagaacatgattttaaaaaacaaaacaaacactcaaactttcttaagttaccataagaggcctcacatacagcttccttaaaactgcctgcaatttggagagaagcagttaggtactggaactgcctgtgggtaattattgttttcaaacagtgacagatgcaaattctcttcttttgggggaaattgcctgtagctaaacaccggcgccatcactttaaacaaatctcctgatacatatggtatgccaggcgctgagcccaggaacgagggagagtcagcccccgccccccaccccgatggagctgatcccccacgggaggcagcagggattgtaccttaacaacatgtgaataaagatgaggaagcacagcccgtgaaggaggaggcttaacccaaacttggagagtcaggaaggattttcagaaagagtgcagtctgagctgaaatggggagcggggagggcaggtgcagccgccaccgccaaaggtcttcctggtggaggcaactgcctgtgcaaaggcctcaaggtgtaaaagagcttcgttaacacaggccaatactgagtgtagaaacgctgcactcagggcagatgctgaaggcagaggtggaaaaagtattttatatagtttcttcttaaaagtcatgctgggattacaggcgtgagctactgcgcctggccaacctgatagtattcttaacacagattgttttcctgccatcatgaaaactagacttgctttaaagtctttagagtctcagttcatattccaggcattgttttacataaatatcatctgtttattttttctttaagcaaatttcacaaactccatct

SEQ ID NO: 2471 - protein, 37 aa, Homo sapiens
MVCQALSPGTRESQPPPPTPMELIPHGRQQGLYLNNM

SEQ ID NO: 2472 - DNA, 452 bp, Homo sapiens
catgattggatgaggtcatagaagtttggcttctctcattgacctggaaggatgccgtcatccactctgacctgcaaaccttttgatctcaaacagcgatcttccaggcgtggccccaaatcaacagcatcagcgtcacccaggagctgcctgaagccctcttgtgggaagcaagtttgtctgctcctttctgtgagacgttcccagtcactggctcaccctgggagagacagtacgcgtgttctaagctaccaacagacttcctcagatgcagtgagtcagtacaaacacacaggcaaggttgaagaactctatggccttcgtctctcttggctcagccaggcacagttcctcttagcccaagacaaaacagcctatgctgttaaatcagtggttctaccagcttccaatcataaaaccaaggggcaataatacataaaattggaacttat

SEQ ID NO: 2473 - protein, 126 aa, Homo sapiens
MPSSTLTCKPFDLKQRSSRRGPKSTASASPRSCLKPSCGKQVCLLLSVRRSQSLAHPGRDSTRVLSYQQTSSDAVSQYKHTGKVEELYGLRLSWLSQAQFLLAQDKTAYAVKSVVLPASNHKTKGQ

SEQ ID NO: 2474 - DNA, 1710 bp, Homo sapiens
cattctgctggctgcgcggtggcggcggctgtgtgtgcgccgcgccttgccgccccccctggccccccgagcccggggcgcgcgctcccgcccgggccgtccgggccccgcggcgccgcggcccgaggccccgggaagcgcagccatggctctgcggaggctgggggccgcgctgctgctgctgccgctgctcgccgccgtggaagaaacgctaatggactccactacagcgactgctgagctgggctggatggtgcatcctccatcagggtgggaagaggtgagtggctacgatgagaacatgaacacgatccgcacgtaccaggtgtgcaacgtgtttgagtcaagccagaacaactggctacggaccaagtttatccggcgccgtggcgcccaccgcatccacgtggagatgaagttttcggtgcgtgactgcagcagcatccccagcgtgcctggctcctgcaaggagaccttcaacctctattactatgaggctgactttgactcggccaccaagaccttccccaactggatggagaatccatgggtgaaggtggataccattgcagccgacgagagcttctcccaggtggacctgggtggccgcgtcatgaaaatcaacaccgaggtgcggagcttcggacctgtgtcccgcagcggcttctacctggccttccaggactatggcggctgcatgtccctcatcgccgtgcgtgtcttctaccgcaagtgcccccgcatcatccagaatggcgccatcttccaggaaaccctgtcgggggctgagagcacatcgctggtggctgcccggggcagctgcatcgccaatgcggaagaggtggatgtacccatcaagctctactgtaacggggacggcgagtggctggtgcccatcgggcgctgcatgtgcaaagcaggcttcgaggccgttgagaatggcaccgtctgccgaggttgtccatctgggactttcaaggccaaccaaggggatgaggcctgtacccactgtcccatcaacagccggaccacttctgaaggggccaccaactgtgtctgccgcaatggctactacagagcagacctggaccccctggacatgccctgcacaaccatcccctccgcgccccaggctgtgatttccagtgtcaatgagacctccctcatgctggagtggacccctccccgcgactccggaggccgagaggacctcgtctacaacatcatctgcaagagctgtggctcgggccggggtgcctgcacccgctgcggggacaatgtacagtacgcaccacgccagctaggcctgaccgagccacgcatttacatcagtgacctgctggcccacacccagtacaccttcgagatccaggctgtgaacggcgttactgaccagagccccttctcgcctcagttcgcctctgtgaacatcaccaccaaccaggcagctccatcggcagtgtccatcatgcatcaggtgagccgcaccgtggacagcattaccctgtcgtggtcccagccggaccagcccaatggcgtgatcctggactatgagctgcagtactatgagaagatgaagacacagagaagttaaggaacttgcccaaggtcacagaggtcatatatactagagccaggatttgaacccaagaagtctggctccagcttgtgatcttaacctccatgctataaagcctgtaataacattgc

SEQ ID NO: 2475 - protein, 482 aa, Homo sapiens
MALRRLGAALLLLPLLAAVEETLMDSTTATAELGWMVHPPSGWEEVSGYDENMNTIRTYQVCNVFESSQNNWLRTKFIRRRGAHRIHVEMKFSVRDCSSIPSVPGSCKETFNLYYYEADFDSATKTFPNWMENPWVKVDTIAADESFSQVDLGGRVMKINTEVRSFGPVSRSGFYLAFQDYGGCMSLIAVRVFYRKCPRIIQNGAIFQETLSGAESTSLVAARGSCIANAEEVDVPIKLYCNGDGEWLVPIGRCMCKAGFEAVENGTVCRGCPSGTFKANQGDEACTHCPINSRTTSEGATNCVCRNGYYRADLDPLDMPCTTIPSAPQAVISSVNETSLMLEWTPPRDSGGREDLVYNIICKSCGSGRGACTRCGDNVQYAPRQLGLTEPRIYISDLLAHTQYTFEIQAVNGVTDQSPFSPQFASVNITTNQAAPSAVSIMHQVSRTVDSITLSWSQPDQPNGVILDYELQYYEKMKTQRS

SEQ ID NO: 2476 - DNA, 4126 bp, Homo sapiens
cattctgctggctgcgcggtggcggcggctgtgtgtgcgccgcgccttgccgccccccctggccccccgagcccggggcgcgcgctcccgcccgggccgtccgggccccgcggcgccgcggcccgaggccccgggaagcgcagccatggctctgcggaggctgggggccgcgctgctgctgctgccgctgctcgccgccgtggaagaaacgctaatggactccactacagcgactgctgagctgggctggatggtgcatcctccatcagggtgggaagaggtgagtggctacgatgagaacatgaacacgatccgcacgtaccaggtgtgcaacgtgtttgagtcaagccagaacaactggctacggaccaagtttatccggcgccgtggcgcccaccgcatccacgtggagatgaagttttcggtgcgtgactgcagcagcatccccagcgtgcctggctcctgcaaggagaccttcaacctctattactatgaggctgactttgactcggccaccaagaccttccccaactggatggagaatccatgggtgaaggtggataccattgcagccgacgagagcttctcccaggtggacctgggtggccgcgtcatgaaaatcaacaccgaggtgcggagcttcggacctgtgtcccgcagcggcttctacctggccttccaggactatggcggctgcatgtccctcatcgccgtgcgtgtcttctaccgcaagtgcccccgcatcatccagaatggcgccatcttccaggaaaccctgtcgggggctgagagcacatcgctggtggctgcccggggcagctgcatcgccaatgcggaagaggtggatgtacccatcaagctctactgtaacggggacggcgagtggctggtgcccatcgggcgctgcatgtgcaaagcaggcttcgaggccgttgagaatggcaccgtctgccgaggttgtccatctgggactttcaaggccaaccaaggggatgaggcctgtacccactgtcccatcaacagccggaccacttctgaaggggccaccaactgtgtctgccgcaatggctactacagagcagacctggaccccctggacatgccctgcacaaccatcccctccgcgccccaggctgtgatttccagtgtcaatgagacctccctcatgctggagtggacccctccccgcgactccggaggccgagaggacctcgtctacaacatcatctgcaagagctgtggctcgggccggggtgcctgcacccgctgcggggacaatgtacagtacgcaccacgccagctaggcctgaccgagccacgcatttacatcagtgacctgctggcccacacccagtacaccttcgagatccaggctgtgaacggcgttactgaccagagccccttctcgcctcagttcgcctctgtgaacatcaccaccaaccaggcagctccatcggcagtgtccatcatgcatcaggtgagccgcaccgtggacagcattaccctgtcgtggtcccagccggaccagcccaatggcgtgatcctggactatgagctgcagtactatgagaaggagctcagtgagtacaacgccacagccataaaaagccccaccaacacggtcaccgtgcagggcctcaaagccggcgccatctatgtcttccaggtgcgggcacgcaccgtggcaggttacgggcgctacagcggcaagatgtacttccagaccatgacagaagccgagtaccagacaagcatccaggagaagttgccactcatcatcggctcctcggccgctggcctggtcttcctcattgctgtggttgtcatcgccatcgtgtgtaacagacgggggtttgagcgtgctgactcggagtacacggacaagctgcaacactacaccagtggccacatgaccccaggcatgaagatctacatcgatcctttcacctacgaggaccccaacgaggcagtgcgggagtttgccaaggaaattgacatctcctgtgtcaaaattgagcaggtgatcggagcaggggagtttggcgaggtctgcagtggccacctgaagctgccaggcaagagagagatctttgtggccatcaagacgctcaagtcgggctacacggagaagcagcgccgggacttcctgagcgaagcctccatcatgggccagttcgaccatcccaacgtcatccacctggagggtgtcgtgaccaagagcacacctgtgatgatcatcaccgagttcatggagaatggctccctggactcctttctccggcaaaacgatgggcagttcacagtcatccagctggtgggcatgcttcggggcatcgcagctggcatgaagtacctggcagacatgaactatgttcaccgtgacctggctgcccgcaacatcctcgtcaacagcaacctggtctgcaaggtgtcggactttgggctctcacgctttctagaggacgatacctcagaccccacctacaccagtgccctgggcggaaagatccccatccgctggacagccccggaagccatccagtaccggaagttcacctcggccagtgatgtgtggagctacggcattgtcatgtgggaggtgatgtcctatggggagcggccctactgggacatgaccaaccaggatgtaatcaatgccattgagcaggactatcggctgccaccgcccatggactgcccgagcgccctgcaccaactcatgctggactgttggcagaaggaccgcaaccaccggcccaagttcggccaaattgtcaacacgctagacaagatgatccgcaatcccaacagcctcaaagccatggcgcccctctcctctggcatcaacctgccgctgctggaccgcacgatccccgactacaccagctttaacacggtggacgagtggctggaggccatcaagatggggcagtacaaggagagcttcgccaatgccggcttcacctcctttgacgtcgtgtctcagatgatgatggaggacattctccgggttggggtcactttggctggccaccagaaaaaaatcctgaacagtatccaggtgatgcgggcgcagatgaaccagattcagtctgtggaggtttgacattcacctgcctcggctcacctcttcctccaagccccgccccctctgccccacgtgccggccctcctggtgctctatccactgcagggccagccactcgccaggaggccacgggccacgggaagaaccaagcggtgccagccacgagacgtcaccaagaaaacatgcaactcaaacgacggaaaaaaaaagggaatgggaaaaaagaaaacagatcctgggagggggcgggaaatacaaggaatattttttaaagaggattctcataaggaaagcaatgactgttcttgcgggggataaaaaagggcttgggagattcatgcgatgtgtccaatcggagacaaaagcagtttctctccaactccctctgggaaggtgacctggccagagccaagaaacactttcagaaaaacaaatgtgaaggggagagacaggggccgcccttggctcctgtccctgctgctcctctaggcctcactcaacaaccaagcgcctggaggacgggacagatggacagacagccaccctgagaacccctctgggaaaatctattcctgccaccactgggcaaacagaagaatttttctgtctttggagagtattttagaaactccaatgaaagacactgtttctcctgttggctcacagggctgaaaggggcttttgtcctcctgggtcagggagaacgcggggaccccagaaaggtcagccttcctgaggatgggcaacccccaggtctgcagctccaggtacatatcacgcgcacagcctggcagcctggccctcctggtgcccactcccgccagcccctgcctcgaggactgatactgcagtgactgccgtcagctccgactgccgctgagaagggttgatcctgcatctgggtttgtttacagcaattcctggactcgggggtattttggtcacagggtggttttggtttagggggtttgtttgttgggttgttttttgttttttggttttttttaatgacaatgaagtgacactttgacatttcct

SEQ ID NO: 2477 - protein, 986 aa, Homo sapiens; identical to SEQ ID NO: 44

SEQ ID NO: 2478 - DNA, 4033 bp, Homo sapiens
cattctgctggctgcgcggtggcggcggctgtgtgtgcgccgcgccttgccgccccccctggccccccgagcccggggcgcgcgctcccgcccgggccgtccgggccccgcggcgccgcggcccgaggccccgggaagcgcagccatggctctgcggaggctgggggccgcgctgctgctgctgccgctgctcgccgccgtggaagaaacgctaatggactccactacagcgactgctgagctgggctggatggtgcatcctccatcagggtgggaagaggtgagtggctacgatgagaacatgaacacgatccgcacgtaccaggtgtgcaacgtgtttgagtcaagccagaacaactggctacggaccaagtttatccggcgccgtggcgcccaccgcatccacgtggagatgaagttttcggtgcgtgactgcagcagcatccccagcgtgcctggctcctgcaaggagaccttcaacctctattactatgaggctgactttgactcggccaccaagaccttccccaactggatggagaatccatgggtgaaggtggataccattgcagccgacgagagcttctcccaggtggacctgggtggccgcgtcatgaaaatcaacaccgaggtgcggagcttcggacctgtgtcccgcagcggcttctacctggccttccaggactatggcggctgcatgtccctcatcgccgtgcgtgtcttctaccgcaagtgcccccgcatcatccagaatggcgccatcttccaggaaaccctgtcgggggctgagagcacatcgctggtggctgcccggggcagctgcatcgccaatgcggaagaggtggatgtacccatcaagctctactgtaacggggacggcgagtggctggtgcccatcgggcgctgcatgtgcaaagcaggcttcgaggccgttgagaatggcaccgtctgccgaggttgtccatctgggactttcaaggccaaccaaggggatgaggcctgtacccactgtcccatcaacagccggaccacttctgaaggggccaccaactgtgtctgccgcaatggctactacagagcagacctggaccccctggacatgccctgcacaaccatcccctccgcgccccaggctgtgatttccagtgtcaatgagacctccctcatgctggagtggacccctccccgcgactccggaggccgagaggacctcgtctacaacatcatctgcaagagctgtggctcgggccggggtgcctgcacccgctgcggggacaatgtacagtacgcaccacgccagctaggcctgaccgagccacgcatttacatcagtgacctgctggcccacacccagtacaccttcgagatccaggctgtgaacggcgttactgaccagagccccttctcgcctcagttcgcctctgtgaacatcaccaccaaccaggcagctccatcggcagtgtccatcatgcatcaggtgagccgcaccgtggacagcattaccctgtcgtggtcccagccggaccagcccaatggcgtgatcctggactatgagctgcagtactatgagaaggagctcagtgagtacaacgccacagccataaaaagccccaccaacacggtcaccgtgcagggcctcaaagccggcgccatctatgtcttccaggtgcgggcacgcaccgtggcaggttacgggcgctacagcggcaagatgtacttccagaccatgacagaagccgagtaccagacaagcatccaggagaagttgccactcatcatcggctcctcggccgctggcctggtcttcctcattgctgtggttgtcatcgccatcgtgtgtaacagacgggggtttgagcgtgctgactcggagtacacggacaagctgcaacactacaccagtggccacatgaccccaggcatgaagatctacatcgatcctttcacctacgaggaccccaacgaggcagtgcgggagtttgccaaggaaattgacatctcctgtgtcaaaattgagcaggtgatcggagcaggggagtttggcgaggtctgcagtggccacctgaagctgccaggcaagagagagatctttgtggccatcaagacgctcaagtcgggctacacggagaagcagcgccgggacttcctgagcgaagcctccatcatgggccagttcgaccatcccaacgtcatccacctggagggtgtcgtgaccaagagcacacctgtgatgatcatcaccgagttcatggagaatggctccctggactcctttctccggcaaaacgatgggcagttcacagtcatccagctggtgggcatgcttcggggcatcgcagctggcatgaagtacctggcagacatgaactatgttcaccgtgacctggctgcccgcaacatcctcgtcaacagcaacctggtctgcaaggtgtcggactttgggctctcacgctttctagaggacgatacctcagaccccacctacaccagtgccctgggcggaaagatccccatccgctggacagccccggaagccatccagtaccggaagttcacctcggccagtgatgtgtggagctacggcattgtcatgtgggaggtgatgtcctatggggagcggccctactgggacatgaccaaccaggatgtaatcaatgccattgagcaggactatcggctgccaccgcccatggactgcccgagcgccctgcaccaactcatgctggactgttggcagaaggaccgcaaccaccggcccaagttcggccaaattgtcaacacgctagacaagatgatccgcaatcccaacagcctcaaagccatggcgcccctctcctctggcatcaacctgccgctgctggaccgcacgatccccgactacaccagctttaacacggtggacgagtggctggaggccatcaagatggggcagtacaaggagagcttcgccaatgccggcttcacctcctttgacgtcgtgtctcagatgatgatggaggacattctccgggttggggtcactttggctggccaccagaaaaaaatcctgaacagtatccaggtgatgcgggcgcagatgaaccagattcagtctgtggagggccagccactcgccaggaggccacgggccacgggaagaaccaagcggtgccagccacgagacgtcaccaagaaaacatgcaactcaaacgacggaaaaaaaaagggaatgggaaaaaagaaaacagatcctgggagggggcgggaaatacaaggaatattttttaaagaggattctcataaggaaagcaatgactgttcttgcgggggataaaaaagggcttgggagattcatgcgatgtgtccaatcggagacaaaagcagtttctctccaactccctctgggaaggtgacctggccagagccaagaaacactttcagaaaaacaaatgtgaaggggagagacaggggccgcccttggctcctgtccctgctgctcctctaggcctcactcaacaaccaagcgcctggaggacgggacagatggacagacagccaccctgagaacccctctgggaaaatctattcctgccaccactgggcaaacagaagaatttttctgtctttggagagtattttagaaactccaatgaaagacactgtttctcctgttggctcacagggctgaaaggggcttttgtcctcctgggtcagggagaacgcggggaccccagaaaggtcagccttcctgaggatgggcaacccccaggtctgcagctccaggtacatatcacgcgcacagcctggcagcctggccctcctggtgcccactcccgccagcccctgcctcgaggactgatactgcagtgactgccgtcagctccgactgccgctgagaagggttgatcctgcatctgggtttgtttacagcaattcctggactcgggggtattttggtcacagggtggttttggtttagggggtttgtttgttgggttgttttttgttttttggttttttttaatgacaatgaagtgacactttgacatttcct

SEQ ID NO: 2479 - protein, 1055 aa, Homo sapiens
MALRRLGAALLLLPLLAAVEETLMDSTTATAELGWMVHPPSGWEEVSGYDENMNTIRTYQVCNVFESSQNNWLRTKFIRRRGAHRIHVEMKFSVRDCSSIPSVPGSCKETFNLYYYEADFDSATKTFPNWMENPWVKVDTIAADESFSQVDLGGRVMKINTEVRSFGPVSRSGFYLAFQDYGGCMSLIAVRVFYRKCPRIIQNGAIFQETLSGAESTSLVAARGSCIANAEEVDVPIKLYCNGDGEWLVPIGRCMCKAGFEAVENGTVCRGCPSGTFKANQGDEACTHCPINSRTTSEGATNCVCRNGYYRADLDPLDMPCTTIPSAPQAVISSVNETSLMLEWTPPRDSGGREDLVYNIICKSCGSGRGACTRCGDNVQYAPRQLGLTEPRIYISDLLAHTQYTFEIQAVNGVTDQSPFSPQFASVNITTNQAAPSAVSIMHQVSRTVDSITLSWSQPDQPNGVILDYELQYYEKELSEYNATAIKSPTNTVTVQGLKAGAIYVFQVRARTVAGYGRYSGKMYFQTMTEAEYQTSIQEKLPLIIGSSAAGLVFLIAVVVIAIVCNRRGFERADSEYTDKLQHYTSGHMTPGMKIYIDPFTYEDPNEAVREFAKEIDISCVKIEQVIGAGEFGEVCSGHLKLPGKREIFVAIKTLKSGYTEKQRRDFLSEASIMGQFDHPNVIHLEGVVTKSTPVMIITEFMENGSLDSFLRQNDGQFTVIQLVGMLRGIAAGMKYLADMNYVHRDLAARNILVNSNLVCKVSDFGLSRFLEDDTSDPTYTSALGGKIPIRWTAPEAIQYRKFTSASDVWSYGIVMWEVMSYGERPYWDMTNQDVINAIEQDYRLPPPMDCPSALHQLMLDCWQKDRNHRPKFGQIVNTLDKMIRNPNSLKAMAPLSSGINLPLLDRTIPDYTSFNTVDEWLEAIKMGQYKESFANAGFTSFDVVSQMMMEDILRVGVTLAGHQKKILNSIQVMRAQMNQIQSVEGQPLARRPRATGRTKRCQPRDVTKKTCNSNDGKKKGMGKKKTDPGRGREIQGIFFKEDSHKESNDCSCGG

SEQ ID NO: 2480 - DNA, 4208 bp, Homo sapiens
cattctgctggctgcgcggtggcggcggctgtgtgtgcgccgcgccttgccgccccccctggccccccgagcccggggcgcgcgctcccgcccgggccgtccgggccccgcggcgccgcggcccgaggccccgggaagcgcagccatggctctgcggaggctgggggccgcgctgctgctgctgccgctgctcgccgccgtggaagaaacgctaatggactccactacagcgactgctgagctgggctggatggtgcatcctccatcagggtgggaagaggtgagtggctacgatgagaacatgaacacgatccgcacgtaccaggtgtgcaacgtgtttgagtcaagccagaacaactggctacggaccaagtttatccggcgccgtggcgcccaccgcatccacgtggagatgaagttttcggtgcgtgactgcagcagcatccccagcgtgcctggctcctgcaaggagaccttcaacctctattactatgaggctgactttgactcggccaccaagaccttccccaactggatggagaatccatgggtgaaggtggataccattgcagccgacgagagcttctcccaggtggacctgggtggccgcgtcatgaaaatcaacaccgaggtgcggagcttcggacctgtgtcccgcagcggcttctacctggccttccaggactatggcggctgcatgtccctcatcgccgtgcgtgtcttctaccgcaagtgcccccgcatcatccagaatggcgccatcttccaggaaaccctgtcgggggctgagagcacatcgctggtggctgcccggggcagctgcatcgccaatgcggaagaggtggatgtacccatcaagctctactgtaacggggacggcgagtggctggtgcccatcgggcgctgcatgtgcaaagcaggcttcgaggccgttgagaatggcaccgtctgccgaggttgtccatctgggactttcaaggccaaccaaggggatgaggcctgtacccactgtcccatcaacagccggaccacttctgaaggggccaccaactgtgtctgccgcaatggctactacagagcagacctggaccccctggacatgccctgcacaaccatcccctccgcgccccaggctgtgatttccagtgtcaatgagacctccctcatgctggagtggacccctccccgcgactccggaggccgagaggacctcgtctacaacatcatctgcaagagctgtggctcgggccggggtgcctgcacccgctgcggggacaatgtacagtacgcaccacgccagctaggcctgaccgagccacgcatttacatcagtgacctgctggcccacacccagtacaccttcgagatccaggctgtgaacggcgttactgaccagagccccttctcgcctcagttcgcctctgtgaacatcaccaccaaccaggcagctccatcggcagtgtccatcatgcatcaggtgagccgcaccgtggacagcattaccctgtcgtggtcccagccggaccagcccaatggcgtgatcctggactatgagctgcagtactatgagaaggagctcagtgagtacaacgccacagccataaaaagccccaccaacacggtcaccgtgcagggcctcaaagccggcgccatctatgtcttccaggtgcgggcacgcaccgtggcaggttacgggcgctacagcggcaagatgtacttccagaccatgacagaagccgagtaccagacaagcatccaggagaagttgccactcatcatcggctcctcggccgctggcctggtcttcctcattgctgtggttgtcatcgccatcgtgtgtaacagacgggggtttgagcgtgctgactcggagtacacggacaagctgcaacactacaccagtggccacatgaccccaggcatgaagatctacatcgatcctttcacctacgaggaccccaacgaggcagtgcgggagtttgccaaggaaattgacatctcctgtgtcaaaattgagcaggtgatcggagcaggggagtttggcgaggtctgcagtggccacctgaagctgccaggcaagagagagatctttgtggccatcaagacgctcaagtcgggctacacggagaagcagcgccgggacttcctgagcgaagcctccatcatgggccagttcgaccatcccaacgtcatccacctggagggtgtcgtgaccaagagcacacctgtgatgatcatcaccgagttcatggagaatggctccctggactcctttctccggcaaaacgatgggcagttcacagtcatccagctggtgggcatgcttcggggcatcgcagctggcatgaagtacctggcagacatgaactatgttcaccgtgacctggctgcccgcaacatcctcgtcaacagcaacctggtctgcaaggtgtcggactttgggctctcacgctttctagaggacgatacctcagaccccacctacaccagtgccctgggcggaaagatccccatccgctggacagccccggaagccatccagtaccggaagttcacctcggccagtgatgtgtggagctacggcattgtcatgtgggaggtgatgtcctatggggagcggccctactgggacatgaccaaccaggatgtaatcaatgccattgagcaggactatcggctgccaccgcccatggactgcccgagcgccctgcaccaactcatgctggactgttggcagaaggaccgcaaccaccggcccaagttcggccaaattgtcaacacgctagacaagatgatccgcaatcccaacagcctcaaagccatggcgcccctctcctctggcatcaacctgccgctgctggaccgcacgatccccgactacaccagctttaacacggtggacgagtggctggaggccatcaagatggggcagtacaaggagagcttcgccaatgccggcttcacctcctttgacgtcgtgtctcagatgatgatggaggacattctccgggttggggtcactttggctggccaccagaaaaaaatcctgaacagtatccaggtgatgcgggcgcagatgaaccagattcagtctgtggaggtttgacattcacctgcctcggctcacctcttcctccaagccccgccccctctgccccacgtgccggccctcctggtgctctatccactgcagggccagccactcgccaggaggccacgggccacgggaagaaccaagcggtgccagccacgagacgtcaccaagaaaacatgcaactcaaacgacggaaaaaaaaagggaatgggaaaaaagaaaacagatcctgggagggggcgggaaatacaaggaatattttttaaagaggattctcataaggaaagcaatgactgttcttgcgggggataaaaaagggcttgggagattcatgcgatgtgtccaatcggagacaaaagcagtttctctccaactccctctgggaaggtgacctggccagagccaagaaacactttcagaaaaacaaatgtgaaggggagagacaggggccgcccttggctcctgtccctgctgctcctctaggcctcactcaacaaccaagcgcctggaggacgggacagatggacagacagccaccctgagaacccctctgggaaaatctattcctgccaccactgggcaaacagaagaatttttctgtctttggagagtattttagaaactccaatgaaagacactgtttctcctgttggctcacagggctgaaaggggcttttgtcctcctgggtcagggagaacgcggggaccccagaaaggtcagccttcctgaggatgggcaacccccaggtctgcagctccaggtacatatcacgcgcacagcctggcagcctggccctcctggtgcccactcccgccagcccctgcctcgaggactgatactgcagtgactgccgtcagctccgactgccgctgagaagggttgatcctgcatctgggtttgtttacagcaattcctggactcgggggtattttggtcacagggtggttttggtttagggggtttgtttgttgggttgttttttgttttttggttttttttaatgacaatgaagtgacactttgacatttcctaccttttgaggacttgatccttctccaggaagaaggtgctttctgcttactgacttaggcaatacaccaagggcgagatttt

SEQ ID NO: 2481 - protein, 986 aa, Homo sapiens; identical to SEQ ID NO: 44

SEQ ID NO: 2482 - DNA, 4773 bp, Homo sapiens
cattctgctggctgcgcggtggcggcggctgtgtgtgcgccgcgccttgccgccccccctggccccccgagcccggggcgcgcgctcccgcccgggccgtccgggccccgcggcgccgcggcccgaggccccgggaagcgcagccatggctctgcggaggctgggggccgcgctgctgctgctgccgctgctcgccgccgtggaagaaacgctaatggactccactacagcgactgctgagctgggctggatggtgcatcctccatcagggtgggaagaggtgagtggctacgatgagaacatgaacacgatccgcacgtaccaggtgtgcaacgtgtttgagtcaagccagaacaactggctacggaccaagtttatccggcgccgtggcgcccaccgcatccacgtggagatgaagttttcggtgcgtgactgcagcagcatccccagcgtgcctggctcctgcaaggagaccttcaacctctattactatgaggctgactttgactcggccaccaagaccttccccaactggatggagaatccatgggtgaaggtggataccattgcagccgacgagagcttctcccaggtggacctgggtggccgcgtcatgaaaatcaacaccgaggtgcggagcttcggacctgtgtcccgcagcggcttctacctggccttccaggactatggcggctgcatgtccctcatcgccgtgcgtgtcttctaccgcaagtgcccccgcatcatccagaatggcgccatcttccaggaaaccctgtcgggggctgagagcacatcgctggtggctgcccggggcagctgcatcgccaatgcggaagaggtggatgtacccatcaagctctactgtaacggggacggcgagtggctggtgcccatcgggcgctgcatgtgcaaagcaggcttcgaggccgttgagaatggcaccgtctgccgaggttgtccatctgggactttcaaggccaaccaaggggatgaggcctgtacccactgtcccatcaacagccggaccacttctgaaggggccaccaactgtgtctgccgcaatggctactacagagcagacctggaccccctggacatgccctgcacaaccatcccctccgcgccccaggctgtgatttccagtgtcaatgagacctccctcatgctggagtggacccctccccgcgactccggaggccgagaggacctcgtctacaacatcatctgcaagagctgtggctcgggccggggtgcctgcacccgctgcggggacaatgtacagtacgcaccacgccagctaggcctgaccgagccacgcatttacatcagtgacctgctggcccacacccagtacaccttcgagatccaggctgtgaacggcgttactgaccagagccccttctcgcctcagttcgcctctgtgaacatcaccaccaaccaggcagctccatcggcagtgtccatcatgcatcaggtgagccgcaccgtggacagcattaccctgtcgtggtcccagccggaccagcccaatggcgtgatcctggactatgagctgcagtactatgagaaggagctcagtgagtacaacgccacagccataaaaagccccaccaacacggtcaccgtgcagggcctcaaagccggcgccatctatgtcttccaggtgcgggcacgcaccgtggcaggttacgggcgctacagcggcaagatgtacttccagaccatgacagaagccgagtaccagacaagcatccaggagaagttgccactcatcatcggctcctcggccgctggcctggtcttcctcattgctgtggttgtcatcgccatcgtgtgtaacagacgggggtttgagcgtgctgactcggagtacacggacaagctgcaacactacaccagtggccacatgaccccaggcatgaagatctacatcgatcctttcacctacgaggaccccaacgaggcagtgcgggagtttgccaaggaaattgacatctcctgtgtcaaaattgagcaggtgatcggagcaggggagtttggcgaggtctgcagtggccacctgaagctgccaggcaagagagagatctttgtggccatcaagacgctcaagtcgggctacacggagaagcagcgccgggacttcctgagcgaagcctccatcatgggccagttcgaccatcccaacgtcatccacctggagggtgtcgtgaccaagagcacacctgtgatgatcatcaccgagttcatggagaatggctccctggactcctttctccggcaaaacgatgggcagttcacagtcatccagctggtgggcatgcttcggggcatcgcagctggcatgaagtacctggcagacatgaactatgttcaccgtgacctggctgcccgcaacatcctcgtcaacagcaacctggtctgcaaggtgtcggactttgggctctcacgctttctagaggacgatacctcagaccccacctacaccagtgccctgggcggaaagatccccatccgctggacagccccggaagccatccagtaccggaagttcacctcggccagtgatgtgtggagctacggcattgtcatgtgggaggtgatgtcctatggggagcggccctactgggacatgaccaaccaggatgtaatcaatgccattgagcaggactatcggctgccaccgcccatggactgcccgagcgccctgcaccaactcatgctggactgttggcagaaggaccgcaaccaccggcccaagttcggccaaattgtcaacacgctagacaagatgatccgcaatcccaacagcctcaaagccatggcgcccctctcctctggcatcaacctgccgctgctggaccgcacgatccccgactacaccagctttaacacggtggacgagtggctggaggccatcaagatggggcagtacaaggagagcttcgccaatgccggcttcacctcctttgacgtcgtgtctcagatgatgatggaggacattctccgggttggggtcactttggctggccaccagaaaaaaatcctgaacagtatccaggtgatgcgggcgcagatgaaccagattcagtctgtggagggccagccactcgccaggaggccacgggccacgggaagaaccaagcggtgccagccacgagacgtcaccaagaaaacatgcaactcaaacgacggaaaaaaaaagggaatgggaaaaaagaaaacagatcctgggagggggcgggaaatacaaggaatattttttaaagaggattctcataaggaaagcaatgactgttcttgcgggggataaaaaagggcttgggagattcatgcgatgtgtccaatcggagacaaaagcagtttctctccaactccctctgggaaggtgacctggccagagccaagaaacactttcagaaaaacaaatgtgaaggggagagacaggggccgcccttggctcctgtccctgctgctcctctaggcctcactcaacaaccaagcgcctggaggacgggacagatggacagacagccaccctgagaacccctctgggaaaatctattcctgccaccactgggcaaacagaagaatttttctgtctttggagagtattttagaaactccaatgaaagacactgtttctcctgttggctcacagggctgaaaggggcttttgtcctcctgggtcagggagaacgcggggaccccagaaaggtcagccttcctgaggatgggcaacccccaggtctgcagctccaggtacatatcacgcgcacagcctggcagcctggccctcctggtgcccactcccgccagcccctgcctcgaggactgatactgcagtgactgccgtcagctccgactgccgctgagaagggttgatcctgcatctgggtttgtttacagcaattcctggactcgggggtattttggtcacagggtggttttggtttagggggtttgtttgttgggttgttttttgttttttggttttttttaatgacaatgaagtgacactttgacatttcctaccttttgaggacttgatccttctccaggaagaaggtgctttctgcttactgacttaggcaatacaccaagggcgagattttatatgcacatttctggatttttttatacggttttcattgacactcttccctcctcccacctgccaccaggcctcaccaaagcccactgccatggggccatctgggccattcagagactggagtgagatttgggtgtggagggggaggcgccaaggtggaggagcttcccactccaggactgttgatgaaagggacagattgaggaggaagtgggctctgaggctgcagggctggaagtccttgcccacttcccactctcctgccccaatctatctagtacttcccaggcaaataggcccctttgaggctcctgagtgccctcagatggtcaaaacccagttttccctctgggagcctaaaccaggctgcatcggaggccaggacccggatcattcactgtgataccctgccctccagagggtgcgctcagagacacgggcaagcatgcctcttcccttccctggagagaaagtgtgtgatttctctcccacctccttccccccaccagacctttgctgggcctaaaggtcttggccatggggacgccctcagtctagggatctggccacagactccctcctgtgaaccaacacagacacccaagcagagcaatcagttagtgaattgaatggaaataaacgctttagttataatatga

SEQ ID NO: 2483 - protein, 1055 aa, Homo sapiens; identical to SEQ ID NO: 2479

SEQ ID NO: 2484 - DNA, 4866 bp, Homo sapiens
cattctgctggctgcgcggtggcggcggctgtgtgtgcgccgcgccttgccgccccccctggccccccgagcccggggcgcgcgctcccgcccgggccgtccgggccccgcggcgccgcggcccgaggccccgggaagcgcagccatggctctgcggaggctgggggccgcgctgctgctgctgccgctgctcgccgccgtggaagaaacgctaatggactccactacagcgactgctgagctgggctggatggtgcatcctccatcagggtgggaagaggtgagtggctacgatgagaacatgaacacgatccgcacgtaccaggtgtgcaacgtgtttgagtcaagccagaacaactggctacggaccaagtttatccggcgccgtggcgcccaccgcatccacgtggagatgaagttttcggtgcgtgactgcagcagcatccccagcgtgcctggctcctgcaaggagaccttcaacctctattactatgaggctgactttgactcggccaccaagaccttccccaactggatggagaatccatgggtgaaggtggataccattgcagccgacgagagcttctcccaggtggacctgggtggccgcgtcatgaaaatcaacaccgaggtgcggagcttcggacctgtgtcccgcagcggcttctacctggccttccaggactatggcggctgcatgtccctcatcgccgtgcgtgtcttctaccgcaagtgcccccgcatcatccagaatggcgccatcttccaggaaaccctgtcgggggctgagagcacatcgctggtggctgcccggggcagctgcatcgccaatgcggaagaggtggatgtacccatcaagctctactgtaacggggacggcgagtggctggtgcccatcgggcgctgcatgtgcaaagcaggcttcgaggccgttgagaatggcaccgtctgccgaggttgtccatctgggactttcaaggccaaccaaggggatgaggcctgtacccactgtcccatcaacagccggaccacttctgaaggggccaccaactgtgtctgccgcaatggctactacagagcagacctggaccccctggacatgccctgcacaaccatcccctccgcgccccaggctgtgatttccagtgtcaatgagacctccctcatgctggagtggacccctccccgcgactccggaggccgagaggacctcgtctacaacatcatctgcaagagctgtggctcgggccggggtgcctgcacccgctgcggggacaatgtacagtacgcaccacgccagctaggcctgaccgagccacgcatttacatcagtgacctgctggcccacacccagtacaccttcgagatccaggctgtgaacggcgttactgaccagagccccttctcgcctcagttcgcctctgtgaacatcaccaccaaccaggcagctccatcggcagtgtccatcatgcatcaggtgagccgcaccgtggacagcattaccctgtcgtggtcccagccggaccagcccaatggcgtgatcctggactatgagctgcagtactatgagaaggagctcagtgagtacaacgccacagccataaaaagccccaccaacacggtcaccgtgcagggcctcaaagccggcgccatctatgtcttccaggtgcgggcacgcaccgtggcaggttacgggcgctacagcggcaagatgtacttccagaccatgacagaagccgagtaccagacaagcatccaggagaagttgccactcatcatcggctcctcggccgctggcctggtcttcctcattgctgtggttgtcatcgccatcgtgtgtaacagacgggggtttgagcgtgctgactcggagtacacggacaagctgcaacactacaccagtggccacatgaccccaggcatgaagatctacatcgatcctttcacctacgaggaccccaacgaggcagtgcgggagtttgccaaggaaattgacatctcctgtgtcaaaattgagcaggtgatcggagcaggggagtttggcgaggtctgcagtggccacctgaagctgccaggcaagagagagatctttgtggccatcaagacgctcaagtcgggctacacggagaagcagcgccgggacttcctgagcgaagcctccatcatgggccagttcgaccatcccaacgtcatccacctggagggtgtcgtgaccaagagcacacctgtgatgatcatcaccgagttcatggagaatggctccctggactcctttctccggcaaaacgatgggcagttcacagtcatccagctggtgggcatgcttcggggcatcgcagctggcatgaagtacctggcagacatgaactatgttcaccgtgacctggctgcccgcaacatcctcgtcaacagcaacctggtctgcaaggtgtcggactttgggctctcacgctttctagaggacgatacctcagaccccacctacaccagtgccctgggcggaaagatccccatccgctggacagccccggaagccatccagtaccggaagttcacctcggccagtgatgtgtggagctacggcattgtcatgtgggaggtgatgtcctatggggagcggccctactgggacatgaccaaccaggatgtaatcaatgccattgagcaggactatcggctgccaccgcccatggactgcccgagcgccctgcaccaactcatgctggactgttggcagaaggaccgcaaccaccggcccaagttcggccaaattgtcaacacgctagacaagatgatccgcaatcccaacagcctcaaagccatggcgcccctctcctctggcatcaacctgccgctgctggaccgcacgatccccgactacaccagctttaacacggtggacgagtggctggaggccatcaagatggggcagtacaaggagagcttcgccaatgccggcttcacctcctttgacgtcgtgtctcagatgatgatggaggacattctccgggttggggtcactttggctggccaccagaaaaaaatcctgaacagtatccaggtgatgcgggcgcagatgaaccagattcagtctgtggaggtttgacattcacctgcctcggctcacctcttcctccaagccccgccccctctgccccacgtgccggccctcctggtgctctatccactgcagggccagccactcgccaggaggccacgggccacgggaagaaccaagcggtgccagccacgagacgtcaccaagaaaacatgcaactcaaacgacggaaaaaaaaagggaatgggaaaaaagaaaacagatcctgggagggggcgggaaatacaaggaatattttttaaagaggattctcataaggaaagcaatgactgttcttgcgggggataaaaaagggcttgggagattcatgcgatgtgtccaatcggagacaaaagcagtttctctccaactccctctgggaaggtgacctggccagagccaagaaacactttcagaaaaacaaatgtgaaggggagagacaggggccgcccttggctcctgtccctgctgctcctctaggcctcactcaacaaccaagcgcctggaggacgggacagatggacagacagccaccctgagaacccctctgggaaaatctattcctgccaccactgggcaaacagaagaatttttctgtctttggagagtattttagaaactccaatgaaagacactgtttctcctgttggctcacagggctgaaaggggcttttgtcctcctgggtcagggagaacgcggggaccccagaaaggtcagccttcctgaggatgggcaacccccaggtctgcagctccaggtacatatcacgcgcacagcctggcagcctggccctcctggtgcccactcccgccagcccctgcctcgaggactgatactgcagtgactgccgtcagctccgactgccgctgagaagggttgatcctgcatctgggtttgtttacagcaattcctggactcgggggtattttggtcacagggtggttttggtttagggggtttgtttgttgggttgttttttgttttttggttttttttaatgacaatgaagtgacactttgacatttcctaccttttgaggacttgatccttctccaggaagaaggtgctttctgcttactgacttaggcaatacaccaagggcgagattttatatgcacatttctggatttttttatacggttttcattgacactcttccctcctcccacctgccaccaggcctcaccaaagcccactgccatggggccatctgggccattcagagactggagtgagatttgggtgtggagggggaggcgccaaggtggaggagcttcccactccaggactgttgatgaaagggacagattgaggaggaagtgggctctgaggctgcagggctggaagtccttgcccacttcccactctcctgccccaatctatctagtacttcccaggcaaataggcccctttgaggctcctgagtgccctcagatggtcaaaacccagttttccctctgggagcctaaaccaggctgcatcggaggccaggacccggatcattcactgtgataccctgccctccagagggtgcgctcagagacacgggcaagcatgcctcttcccttccctggagagaaagtgtgtgatttctctcccacctccttccccccaccagacctttgctgggcctaaaggtcttggccatggggacgccctcagtctagggatctggccacagactccctcctgtgaaccaacacagacacccaagcagagcaatcagttagtgaattgaatggaaataaacgctttagttataatatga

SEQ ID NO: 2485 - protein, 986 aa, Homo sapiens; identical to SEQ ID NO: 44

SEQ ID NO: 2486 - DNA, 593 bp, Homo sapiens
aagggcaggtgccgccacagcagtctgtggggggaaggaaggaaccccggagcggcagcaaagagcctggcagtgggggaggtgggagagacccggccggcagctgggttgtgatcccagctgtggccttacttcaggacatgacctttggtgggagaataatccagctcctgttactctgttgtagaagcagaaatctaaagaaatccctatttcctccatgtacttgagctcttgatcttccaggcaaggtgggttttgagggagaggaataaaatatgaatgtgtcttcatcaacattttcacctggacatcgtcttctatccattacctctttcaatcccagcaccaacccaggaaagtgggcaaggctgtgtcccctgggagcagaacagagaattggaggaccagcactcgagagctgaacaagcctgcatggccatccatcatagttactaaagagattagactaactctctgtagctccagagggcaaaagaagaaccacttggtagaatccaccagaggcagttttgaattcgaagagaagaagcactttctaatggtcacacagctggccagccctgagtgag

SEQ ID NO: 2487 - protein, 58 aa, Homo sapiens
MCLHQHFHLDIVFYPLPLSIPAPTQESGQGCVPWEQNRELEDQHSRAEQACMAIHHSY

SEQ ID NO: 2488 - DNA, 478 bp, Homo sapiens
gagctccagtgtgaatgtccaacttagagctcaacatttccatttggatgtttaataggaccctgatggatacagatggcaatagaaagcctctctgaggaagtgacatttaagctagactttcgggatgagcgggagccagccatgtgaagaacgggggaggagagacactccaggcaggaggaagtcgcgtgtgaaaactccaaggtggaaagagctcactgttgtgttcaaggaacagagagaagggcagtgtgtctagagtgcagcactcaggagagacagcacgagatgagattttctgaatttcatcccgatcacacagcacacagcagaggaagtggttggcctgccctccgggtcacctctctcctcatgctggcccttacgaaagataaaaatactgataactaatgcttattgaacacttactatgtttcaggcattgttttaaataaatttatattaaataaatagt

SEQ ID NO: 2489 - protein, 44 aa, Homo sapiens
MSGSQPCEERGRRDTPGRRKSRVKTPRWKELTVVFKEQREGQCV

SEQ ID NO: 2490 - DNA, 463 bp, Homo sapiens
agcaacgatccagatggtggctgtgctctgtctgcgtgggtcccagagtgagaagctgaggtgccggccttgttgaacagggagggctgctctctgctctggagatggcactgtgctctcatgtccacattgtggaaggcggaagggcgagagaggctgggtgacacctcttcttgccttagaaacacgagcgagtggttctgaacagccgcggtcttgcatgcctgcccctcagcaacggccctgctccaaaccggtgttacagtgatctgattattgtaattgatgacattaggaataaggaatccacacagaataatacaggtgcctgtcatgccagagtggttttattcattgttagagaagttcataaagttgaaagaaagcatctacatgggctagaacagcaaaaagcatgttttagtcctttcttaatttgtgaataaaatgatgaattccagaa

SEQ ID NO: 2491 - protein, 38 aa, Homo sapiens
MTLGIRNPHRIIQVPVMPEWFYSLLEKFIKLKESIYMG

SEQ ID NO: 2492 - DNA, 488 bp, Homo sapiens
atgacctgtagcccatgtgtatacaaccctttcctgcacgtctgcacacggagtgtacagaacccagccagcacgggtgaggaccagatgagagatgggggctgcagcagcaaagtctgggacggaggtctcagagagccccttggggtggcgaaggccctccacacatcagagctccagaccctgaagaagagggcagagctacatggtgctgccaggtgagtcctgcaccgccagggccattcaggggatgccctttgtggacatgcagaatttctatgaatatagttttttgtaaacattttgtaacaatttgggtttcatagtaactgtgttacttgccaatcattctaggctgatgtaaataaatttccaaacaaatctgattattttcctttttaagacactgtgatatatcaaagtgcacagtttgctgtatgaagtaatatggttttaaattttaaataaaatgtttctagaaaacaggg

SEQ ID NO: 2493 - protein, 30 aa, Homo sapiens
MVLPGESCTARAIQGMPFVDMQNFYEYSFL

SEQ ID NO: 2494 - DNA, 3912 bp, Homo sapiens
gtgggagcccgcgcgggagccgagccgacgcgagtcggagccggagccgagtccgagcggagtccgggcggagcccaggagcctcgctcgcgggcagcccgtgggcggcagccaggcggggcgggcgccggcggggcggccccccagtaagatgtgcgcggcgccgcggggcgccccccacttgcagcggcgctcgggagccgggcggctgggccaggcggcgccttcggggctgctgcgcgcccgcgcctagagctgccgccccagggagcccgccacggccgcgccccgggcacgctcggcggcgcccaacgatgaccgctccctggcggcgcctccggagtctggtttgggaatactgggccgggctcctcgtgtgcgccttctggatcccggactcgcgcgggatgccccacgtcatccggatcggaggaatcttcgagtatgcggacggccccaacgcccaggtcatgaatgccgaggagcatgcctttcgattttctgccaacatcatcaacaggaacaggactctgctgcccaacacaaccttgacctatgacatacagaggattcacttccatgacagcttcgaggcgaccaaaaaggcctgtgaccagctggcactgggcgtggtggcgatcttcggcccatcacagggctcctgcaccaatgccgtccagtccatctgcaatgccctggaggtgccccacatccagctgcgttggaagcaccacccgctggacaacaaggacaccttctacgtgaacctctaccccgactacgcctcgctcagccatgccatcctcgacctggtccagtacctcaagtggcggtcagccaccgtggtctatgacgacagtacagggctcatccgactgcaggagctcatcatggccccatcaagatacaacatccgcctgaagatccgtcagctccccatcgactctgacgactcgcgccccttgctcaaggagatgaagcgaggccgggaattccgcattatcttcgactgcagccacactatggcggcccagatcctcaagcaggccatggccatgggcatgatgactgagtactaccacttcatcttcaccactctggatctctacgctttagacctggagccctaccgctactcaggcgtgaacctgacaggattccggattctcaatgtggacaacccacacgtctcggccattgtggagaagtggtccatggagcggctgcaggcagctccccggtccgagtctggcctgctggatggagtgatgatgactgatgcagccttactgtacgacgccgtccatatcgtgtccgtgtgctaccagcgggcaccacagatgaccgtgaactccctgcagtgccatcggcacaaggcctggcgctttggcggccgcttcatgaacttcatcaaggaggctcaatgggaaggattaactggacgaattgttttcaacaaaactagtggcttgcggacggattttgatctggacatcatcagcctgaaagaggatggcctggagaaggttggggtgtggagtcctgccgacgggctcaacatcactgaggttgccaaaggccgaggccctaatgtcaccgactctctgacaaacagatcactcattgtcaccacagtgctggaggagcccttcgtcatgtttcggaaatcagacaggacgctatacgggaatgaccggttcgagggctactgcatcgacctgctaaaggagctggcccacatccttggtttctcctatgagatccggctggtggaggacggcaagtacggggcacaggatgacaagggccagtggaacggcatggtcaaggagctcatcgaccacaaggcagatctggccgtggcccccctgaccatcacccatgttcgagagaaggccatcgacttctccaagcccttcatgacacttggtgtgagcatcctgtatcgaaagcccaatggcaccaaccccagcgtcttctccttcctcaatcccctgtccccagacatctggatgtatgttctcctcgcctacctgggggtcagctgtgtcctcttcgtcatcgccaggttcagcccttatgagtggtacgatgctcacccctgcaaccctggctccgaggtggtggaaaataacttcactctgcttaacagcttctggtttggaatgggatccctgatgcagcaagggtctgagctgatgcccaaagccctgtccacacgcatcattggtggcatctggtggttcttcacgctcatcatcatctcttcctacacggccaacctggctgcctttctgaccgtggagcgcatggaatcacccattgactctgctgatgacctggccaagcaaaccaaaatcgagtatggggctgtcaaggatggggccaccatgaccttcttcaagaaatccaagatctccaccttcgagaagatgtgggccttcatgagcagcaagccatcggcgctggtgaagaacaacgaggagggcatccagagggccctgacggccgactacgcgctgctcatggagtccaccaccatcgagtacgtcacgcagaggaactgcaacctcacccagatcgggggcctcattgactccaagggctacggcatcggcacgcccatgggctccccataccgggacaagatcaccatcgccatcctgcagcttcaggaggaggacaagctgcatatcatgaaggagaagtggtggcggggcagcgggtgtcctgaggaggaaaacaaagaggccagtgccctggggatccagaagatcgggggcatcttcattgtcctggccgccgggctggtcctctctgtgctggtggccgtgggcgagtttgtgtacaagctccgcaaaacagcagagagagagcagcgttccttctgcagcaccgtggccgatgagatccgtttctcccttacctgccagcgtcgagtcaagcacaagcctcagcctcccatgatggtcaagactgacgccgtcatcaacatgcacacattcaatgaccgccggcttcccggcaaggacagcatggcctgcagcacatccttagcccctgtgttcccctaggcacagctggggtggggacctcaggcctgggggctgggcagaggaaagcaaaggagattggaaggaacgtcccctgtccccgcactgggcttggggaccagagctgccacctgcctgttgggccaggagcctcctgcccttacctgccaggaagccagcaggctctcaggccagctgcttgggcttcatcctcctcagatcttctgtgggtttctaaagctgccagccgagatagccaaggccaaaggaagcacatgcctctctcaggccaaactcacctgcccctcaactctcctccagagtcagaagtttctgccgcagccctgcagagggcacagaaaatggaagacagctcttatattgccatttcttccacaagagcccaggcctcctacagcttgaccgtgaggccagagacacaagccttcggcgccttaaggatgttctagcatggctgccaatgggagctcatggtgagggatacccatcccatatgcctgggcagaaggaagacttcatccctctggggctgttcacgtggtcctaatcttctgaacttggcgctgcccctggcagcccctgttctggcagagttgaagacagagctacacaggggaaaagaggagtttggggtatgggagagaagagaatgcacaaacagaggccgccattttggattcttatggacaatgacccagtggttcctaatcctctaggaggtctctaagaatataagtgggggagtggccacagaaaattcttctccactttctagccagaggagagaggaccccctgaatttctcacaaaggatgcccaaagatgcagccggtatttg

SEQ ID NO: 2495 - protein, 919 aa, Homo sapiens [sequence omitted]

SEQ ID NO: 2496 - DNA, 3248 bp, Homo sapiens
gtgggagcccgcgcgggagccgagccgacgcgagtcggagccggagccgagtccgagcggagtccgggcggagcccaggagcctcgctcgcgggcagcccgtgggcggcagccaggcggggcgggcgccggcggggcggccccccagtaagatgtgcgcggcgccgcggggcgccccccacttgcagcggcgctcgggagccgggcggctgggccaggcggcgccttcggggctgctgcgcgcccgcgcctagagctgccgccccagggagcccgccacggccgcgccccgggcacgctcggcggcgcccaacgatgaccgctccctggcggcgcctccggagtctggtttgggaatactgggccgggctcctcgtgtgcgccttctggatcccggactcgcgcgggatgccccacgtcatccggatcggaggaatcttcgagtatgcggacggccccaacgcccaggtcatgaatgccgaggagcatgcctttcgattttctgccaacatcatcaacaggaacaggactctgctgcccaacacaaccttgacctatgacatacagaggattcacttccatgacagcttcgaggcgaccaaaaaggcctgtgaccagctggcactgggcgtggtggcgatcttcggcccatcacagggctcctgcaccaatgccgtccagtccatctgcaatgccctggaggtgccccacatccagctgcgttggaagcaccacccgctggacaacaaggacaccttctacgtgaacctctaccccgactacgcctcgctcagccatgccatcctcgacctggtccagtacctcaagtggcggtcagccaccgtggtctatgacgacagtacagggctcatccgactgcaggagctcatcatggccccatcaagatacaacatccgcctgaagatccgtcagctccccatcgactctgacgactcgcgccccttgctcaaggagatgaagcgaggccgggaattccgcattatcttcgactgcagccacactatggcggcccagatcctcaagcaggccatggccatgggcatgatgactgagtactaccacttcatcttcaccactctggatctctacgctttagacctggagccctaccgctactcaggcgtgaacctgacaggattccggattctcaatgtggacaacccacacgtctcggccattgtggagaagtggtccatggagcggctgcaggcagctccccggtccgagtctggcctgctggatggagtgatgatgactgatgcagccttactgtacgacgccgtccatatcgtgtccgtgtgctaccagcgggcaccacagatgaccgtgaactccctgcagtgccatcggcacaaggcctggcgctttggcggccgcttcatgaacttcatcaaggaggctcaatgggaaggattaactggacgaattgttttcaacaaaactagtggcttgcggacggattttgatctggacatcatcagcctgaaagaggatggcctggagaaggttggggtgtggagtcctgccgacgggctcaacatcactgaggttgccaaaggccgaggccctaatgtcaccgactctctgacaaacagatcactcattgtcaccacagtgctggaggagcccttcgtcatgtttcggaaatcagacaggacgctatacgggaatgaccggttcgagggctactgcatcgacctgctaaaggagctggcccacatccttggtttctcctatgagatccggctggtggaggacggcaagtacggggcacaggatgacaagggccagtggaacggcatggtcaaggagctcatcgaccacaaggcagatctggccgtggcccccctgaccatcacccatgttcgagagaaggccatcgacttctccaagcccttcatgacacttggtgtgagcatcctgtatcgaaagcccaatggcaccaaccccagcgtcttctccttcctcaatcccctgtccccagacatctggatgtatgttctcctcgcctacctgggggtcagctgtgtcctcttcgtcatcgccaggttcagcccttatgagtggtacgatgctcacccctgcaaccctggctccgaggtggtggaaaataacttcactctgcttaacagcttctggtttggaatgggatccctgatgcagcaagggtctgagctgatgcccaaagccctgtccacacgcatcattggtggcatctggtggttcttcacgctcatcatcatctcttcctacacggccaacctggctgcctttctgaccgtggagcgcatggaatcacccattgactctgctgatgacctggccaagcaaaccaaaatcgagtatggggctgtcaaggatggggccaccatgaccttcttcaagaaatccaagatctccaccttcgagaagatgtgggccttcatgagcagcaagccatcggcgctggtgaagaacaacgaggagggcatccagagggccctgacggccgactacgcgctgctcatggagtccaccaccatcgagtacgtcacgcagaggaactgcaacctcacccagatcgggggcctcattgactccaagggctacggcatcggcacgcccatgggctccccataccgggacaagatcaccatcgccatcctgcagcttcaggaggaggacaagctgcatatcatgaaggagaagtggtggcggggcagcgggtgtcctgaggaggaaaacaaagaggccagtgccctggggatccagaagatcgggggcatcttcattgtcctggccgccgggctggtcctctctgtgctggtggccgtgggcgagtttgtgtacaagctccgcaaaacagcagagagagagcaggtaagccttagagcttggagcctgcacaggatgggaaatggagattcgcgctgatttcactcctgtatgtgccaggcacacagtggtgtctcatctcagcctcacaacagctcaccctgcatccagtcggccagcaagccctgccactctacctctgtcctgacctggcacttttttccatcgccgttgccccaccccaggccaagccccatcacctcctgcctggattatgccgcagccttcaaactggccctccagcctccatgcttccccaacaccatccacaattcacacagcaactggtaccttgtttaaaacttaattcaaaccatatcattttcctgcataaaaccctccagggtaattgtt

SEQ ID NO: 2497 - protein, 872 aa, Homo sapiens
MTAPWRRLRSLVWEYWAGLLVCAFWIPDSRGMPHVIRIGGIFEYADGPNAQVMNAEEHAFRFSANIINRNRTLLPNTTLTYDIQRIHFHDSFEATKKACDQLALGVVAIFGPSQGSCTNAVQSICNALEVPHIQLRWKHHPLDNKDTFYVNLYPDYASLSHAILDLVQYLKWRSATVVYDDSTGLIRLQELIMAPSRYNIRLKIRQLPIDSDDSRPLLKEMKRGREFRIIFDCSHTMAAQILKQAMAMGMMTEYYHFIFTTLDLYALDLEPYRYSGVNLTGFRILNVDNPHVSAIVEKWSMERLQAAPRSESGLLDGVMMTDAALLYDAVHIVSVCYQRAPQMTVNSLQCHRHKAWRFGGRFMNFIKEAQWEGLTGRIVFNKTSGLRTDFDLDIISLKEDGLEKVGVWSPADGLNITEVAKGRGPNVTDSLTNRSLIVTTVLEEPFVMFRKSDRTLYGNDRFEGYCIDLLKELAHILGFSYEIRLVEDGKYGAQDDKGQWNGMVKELIDHKADLAVAPLTITHVREKAIDFSKPFMTLGVSILYRKPNGTNPSVFSFLNPLSPDIWMYVLLAYLGVSCVLFVIARFSPYEWYDAHPCNPGSEVVENNFTLLNSFWFGMGSLMQQGSELMPKALSTRIIGGIWWFFTLIIISSYTANLAAFLTVERMESPIDSADDLAKQTKIEYGAVKDGATMTFFKKSKISTFEKMWAFMSSKPSALVKNNEEGIQRALTADYALLMESTTIEYVTQRNCNLTQIGGLIDSKGYGIGTPMGSPYRDKITIAILQLQEEDKLHIMKEKWWRGSGCPEEENKEASALGIQKIGGIFIVLAAGLVLSVLVAVGEFVYKLRKTAEREQVSLRAWSLHRMGNGDSR

SEQ ID NO: 2498 - DNA, 2693 bp, Homo sapiens
gttgagcgagagagggagcgtggagagctggagcagccgccaccgccgccgccgagggagccccgggacggcagcccctgggcgcagggtgcgctgttctcggagtccgacccagggcgactcacgcccactggtgcgacccggacagcctgggactgacccgccggcccaggcgaggctgcagccagagggctgggaagggatcgcgctcgcggcatccagaggcggccaggcggaggcgagggagcaggttagagggacaaagagctttgcagacgtccccggcgtcctgcgagcgccagcggccgggacgaggcggccgggagcccgggaagagcccgtggatgttctgcgcgcggcctgggagccgccgccgccgccgcctcagcgagaggaggaatgcaccggccgcgccgccgcgggacgcgcccgccgctcctggcgctgctggccgcgctgctgctggccgcacgcggggctgctgcccaagaaacagagctgtcagtcagtgctgaattagtgcctacctcatcatggaacatctcaagtgaactcaacaaagattcttacctgaccctcgatgaaccaatgaataacatcaccacgtctctgggccagacagcagaactgcactgcaaagtctctgggaatccacctcccaccatccgctggttcaaaaatgatgctcctgtggtccaggagccccggaggctctcctttcggtccaccatctatggctctcggctgcggattagaaacctcgacaccacagacacaggctacttccagtgcgtggcaacaaacggcaaggaggtggtttcttccactggagtcttgtttgtcaagtttggcccccctcccactgcaagtccaggatactcagatgagtatgaagaagatggattctgtcagccatacagagggattgcatgtgcaagatttattggcaaccgcaccgtctatatggagtctttgcacatgcaaggggaaatagaaaatcagatcacagctgccttcactatgattggcacttccagtcacttatctgataagtgttctcagttcgccattccttccctgtgccactatgccttcccgtactgcgatgaaacttcatccgtcccaaagccccgtgacttgtgtcgcgatgaatgtgaaatcctggagaatgtcctgtgtcaaacagagtacatttttgcaagatcaaatcccatgattctgatgaggctgaaactgccaaactgtgaagatctcccccagccagagagcccagaagctgcgaactgtatccggattggaattcccatggcagatcctataaataaaaatcacaagtgttataacagcacaggtgtggactaccgggggaccgtcagtgtgaccaaatcagggcgccagtgccagccatggaattcccagtatccccacacacacactttcaccgcccttcgtttcccagagctgaatggaggccattcctactgccgcaacccagggaatcaaaaggaagctccctggtgcttcaccttggatgaaaactttaagtctgatctgtgtgacatcccagcgtgcggtaaatagaagtcattgcccctaatgtattcaatcatctttaaagatccctatcctacccctcttatttaggagaatcctataaggggggcaaagaaaatggacagtatttgcttgatctcaatctggttttagggtaaaccttgccgtttctacataaaacacctcgtaaggtaccaaaacacgttctcaagaagtcaactgcctttatacctgcagccattgcactcatggatgtaacagggacccagcccttcagaggcacagttgagacagtttatcacattgatttttatagaaaaagatgttacccagaatggtctgcgtccaagtggaccttttcagcaaaaaaaggaatattggaagcaggaagaaattgttttctgtatgccttaagaacaccacaaggcaggatgaatctacaaccattactcggtcatccaggacaatctgtgggtaaactgtgtccttcgttatgtctgttaatactgcagaagaagcatataggtatctagtaagaaaatggaattcctgagtcagttaactgttcctttttctagaaaatgtttggagaaaataatgaaaatgggccaagcatggtggcttatacctgtaatcccaacactctaggaaggccgaggcaggaggatcatttgagcccaggggttcaagaccagcccaggcaacatagtgagactccatctctaccaaaaaaaagaaaaaaaaaaaaagaaaatgttggtgaaacctggagttaggaactattttggaactaattcatcttcctgatcctagttctcatagatatcatagataatgccaagtttcccaggcatagtgggagagtcaggatgtcactgctggaaaagcaaaagctacagggtaggagggtgggcaaacaagagcaatagtcatgggacccacaatacaaagtgagctcggtgtttaaccagatgattattcaagccattcattcagaatatttgttgagtacctactaagtgccaagtacttactcatccgagcatggggagacgccagggaccctaaggagggagtaggcatagcacatccacaaagaagcaaggagtcatggaggcggaacaagcaaaagggagagt

SEQ ID NO: 2499 - protein, 393 aa, Homo sapiens
MHRPRRRGTRPPLLALLAALLLAARGAAAQETELSVSAELVPTSSWNISSELNKDSYLTLDEPMNNITTSLGQTAELHCKVSGNPPPTIRWFKNDAPVVQEPRRLSFRSTIYGSRLRIRNLDTTDTGYFQCVATNGKEVVSSTGVLFVKFGPPPTASPGYSDEYEEDGFCQPYRGIACARFIGNRTVYMESLHMQGEIENQITAAFTMIGTSSHLSDKCSQFAIPSLCHYAFPYCDETSSVPKPRDLCRDECEILENVLCQTEYIFARSNPMILMRLKLPNCEDLPQPESPEAANCIRIGIPMADPINKNHKCYNSTGVDYRGTVSVTKSGRQCQPWNSQYPHTHTFTALRFPELNGGHSYCRNPGNQKEAPWCFTLDENFKSDLCDIPACGK

SEQ ID NO: 2500 - DNA, 3796 bp, Homo sapiens
cgagagagggagcgtggagagctggagcagccgccaccgccgccgccgagggagccccgggacggcagcccctgggcgcagggtgcgctgttctcggagtccgacccagggcgactcacgcccactggtgcgacccggacagcctgggactgacccgccggcccaggcgaggctgcagccagagggctgggaagggatcgcgctcgcggcatccagaggcggccaggcggaggcgagggagcaggttagagggacaaagagctttgcagacgtccccggcgtcctgcgagcgccagcggccgggacgaggcggccgggagcccgggaagagcccgtggatgttctgcgcgcggcctgggagccgccgccgccgccgcctcagcgagaggaggaatgcaccggccgcgccgccgcgggacgcgcccgccgctcctggcgctgctggccgcgctgctgctggccgcacgcggggctgctgcccaagaaacagagctgtcagtcagtgctgaattagtgcctacctcatcatggaacatctcaagtgaactcaacaaagattcttacctgaccctcgatgaaccaatgaataacatcaccacgtctctgggccagacagcagaactgcactgcaaagtctctgggaatccacctcccaccatccgctggttcaaaaatgatgctcctgtggtccaggagccccggaggctctcctttcggtccaccatctatggctctcggctgcggattagaaacctcgacaccacagacacaggctacttccagtgcgtggcaacaaacggcaaggaggtggtttcttccactggagtcttgtttgtcaagtttggcccccctcccactgcaagtccaggatactcagatgagtatgaagaagatggattctgtcagccatacagagggattgcatgtgcaagatttattggcaaccgcaccgtctatatggagtctttgcacatgcaaggggaaatagaaaatcagatcacagctgccttcactatgattggcacttccagtcacttatctgataagtgttctcagttcgccattccttccctgtgccactatgccttcccgtactgcgatgaaacttcatccgtcccaaagccccgtgacttgtgtcgcgatgaatgtgaaatcctggagaatgtcctgtgtcaaacagagtacatttttgcaagatcaaatcccatgattctgatgaggctgaaactgccaaactgtgaagatctcccccagccagagagcccagaagctgcgaactgtatccggattggaattcccatggcagatcctataaataaaaatcacaagtgttataacagcacaggtgtggactaccgggggaccgtcagtgtgaccaaatcagggcgccagtgccagccatggaattcccagtatccccacacacacactttcaccgcccttcgtttcccagagctgaatggaggccattcctactgccgcaacccagggaatcaaaaggaagctccctggtgcttcaccttggatgaaaactttaagtctgatctgtgtgacatcccagcgtgcgattcaaaggattccaaggagaagaataaaatggaaatcctgtacatactagtgccaagtgtggccattcccctggccattgctttactcttcttcttcatttgcgtctgtcggaataaccagaagtcatcgtcggcaccagtccagaggcaaccaaaacacgtcagaggtcaaaatgtagagatgtcaatgctgaatgcatataaacccaagagcaaggctaaagagctacctctttctgctgtacgctttatggaagaattgggtgagtgtgcctttggaaaaatctataaaggccatctctatctcccaggcatggaccatgctcagctggttgctatcaagaccttgaaagactataacaacccccagcaatggacggaatttcaacaagaagcctccctaatggcagaactgcaccaccccaatattgtctgccttctaggtgccgtcactcaggaacaacctgtgtgcatgctttttgagtatattaatcagggggatctccatgagttcctcatcatgagatccccacactctgatgttggctgcagcagtgatgaagatgggactgtgaaatccagcctggaccacggagattttctgcacattgcaattcagattgcagctggcatggaatacctgtctagtcacttctttgtccacaaggaccttgcagctcgcaatattttaatcggagagcaacttcatgtaaagatttcagacttggggctttccagagaaatttactccgctgattactacagggtccagagtaagtccttgctgcccattcgctggatgccccctgaagccatcatgtatggcaaattctcttctgattcagatatctggtcctttggggttgtcttgtgggagattttcagttttggactccagccatattatggattcagtaaccaggaagtgattgagatggtgagaaaacggcagctcttaccatgctctgaagactgcccacccagaatgtacagcctcatgacagagtgctggaatgagattccttctaggagaccaagatttaaagatattcacgtccggcttcggtcctgggagggactctcaagtcacacaagctctactactccttcagggggaaatgccaccacacagacaacctccctcagtgccagcccagtgagtaatctcagtaaccccagatatcctaattacatgttcccgagccagggtattacaccacagggccagattgctggtttcattggcccgccaatacctcagaaccagcgattcattcccatcaatggatacccaatacctcctggatatgcagcgtttccagctgcccactaccagccaacaggtcctcccagagtgattcagcactgcccacctcccaagagtcggtccccaagcagtgccagtgggtcgactagcactggccatgtgactagcttgccctcatcaggatccaatcaggaagcaaatattcctttactaccacacatgtcaattccaaatcatcctggtggaatgggtatcaccgtttttggcaacaaatctcaaaaaccctacaaaattgactcaaagcaagcatctttactaggagacgccaatattcatggacacaccgaatctatgatttctgcagaactgtaaaatgcacaacttttgtaaatgtggtatacaggacaaactagacggccgtagaaaagatttatattcaaatgtttttattaaagtaaggttctcatttagcagacatcgcaacaagtaccttctgtgaagtttcactgtgtcttaccaagcaggacagacactcggccagaaaaaaaaaaaaaaaaaaaaaacaagcaaacaaaaacattgtgggatgtgcactccattggagtgcatgacatggcattgggattggaacatgtggtttcgagcactgaaagctgcaaaccagtgaagaggaaaagaaccttgtgattaaatataaaaccaaaagtcaaatggtgctttgtgttttagccttcagtcaccatgactggtctctcccccagatgtatatataccatagcatttgtctacctgctgtcttttcttcaggacagatgttcaggaattatattgattgaatttagactctgtgcatgttcttatggaaatgatgttcagaatccatgaagaaacttcaggccaaatttgaaaccctggagggaaatgagccataagggaagtataacaagccctgaagcctttt

SEQ ID NO: 2501 - protein, 937 aa, Homo sapiens; identical to SEQ ID NO: 48

SEQ ID NO: 2502 - DNA, 1573 bp, Homo sapiens
ctctcagtatgtgtaaactatgacatgcaggccaattcacctagaaaggcctattttcaaaagctcatgtcctctgaattgaggaaccacagatcagatcagcctcttcaaccccccgcgaggctcccattcatgtaagacacccatggctttgtaatggcacccaacgctctgggctggcatgaaaattgtgtgactcacatcatgtgcctccccaagaaggtgaggctgttgctgcaaagctgactagtttgtggaatgtaatggatgagctaaacttggagcagggggctgagacacagatttcctgtgctgtcgagctattgcagatctcagcagataacaaagctattatcctggcagaaatggaagcatcctcaaatcctgtcagatggcagcatggacaaaaattacaagcaaatgtatttttaagctgatgcactttcttaagtctggctcctaaaagcaaaacatgctcttctaggagaagttttagtaaaaacataagaatgctgctgagtttcttagcaggcattttggaggaaaagatttggatcagaaattcagaaattacctgggctcacaaatatatgcccctccagcaccatcctgcattctgcttccaagatacatgagctttctgaagagctggtgagaatgctgaaacttcctggccttggtttcccatctggtaaaatgaggaagaccaaagcttaactctcacaaggaatatgcagatggagtctcactctgtcgcccatgctggagtaaagtggtgtgatctcggctcactgcaacctctgcctcccagcagggagaagtctaagagacaaaatcaataaggctagagaagattggctttctctggatactgtaccttatccatgtgaacaggagattttatagtgacttgtttcagtataaacaaagaggactggaataactgattgctgaggactccaatcatggcagcactgtatgatatgaatgtaaaataagcatgactgactgcaacaagaaggcagcctgaatctacctgaagaatcctcaggccatccgatttgatgatatagtcagtaggattgtttggtttgctagtaacataaattcaaagcttcaggaaggagactgggcacagcggctcatgcctgtaatcccagcactttgggaggccaaggcgagtggatcatttgaggccagcagttctagaccagcctggccaatatggtgaaacgccgtctctactaaaaatacaaaaatcagctgggcatggtggcacatgcttataatcccatctactcaggaggctgaggcataagaatcgcttgaacccaagaggtggaggttgcagtgagccaagattgtgccactatactccagcctgggtgacagagcaagactctgtctcaaacaaaacaaaacaaaacaaaacaaaacaaaacaaaaacaacaaaacacacacacacaaacaccaaagcttcaggaaaaaaaaggcagactaaattatatggtaagtaggctgtttcattgaactgaaatgcaaaagtaaaccggagatgtaagttgtcacaag

SEQ ID NO: 2503 - protein, 41 aa, Homo sapiens
MLLSFLAGILEEKIWIRNSEITWAHKYMPLQHHPAFCFQDT

SEQ ID NO: 2504 - DNA, 837 bp, Homo sapiens
aaactatgacatgcaggccaattcacctagaaaggcctattttcaaaagctcatgtcctctgaattgaggaaccacagatcagatcagcctcttcaaccccccgcgaggctcccattcatgtaagacacccatggctttgtaatggcacccaacgctctgggctggcatgaaaattgtgtgactcacatcatgtgcctccccaagaagagtttcttagcaggcattttggaggaaaagatttggatcagaaattcagaaattacctgggctcacaaatatatgcccctccagcaccatcctgcattctgcttccaagatacatgagctttctgaagagctggtgagaatgctgaaacttcctggccttggtttcccatctggtaaaatgaggaagaccaaagcttaactctcacaaggaatatgcagatgaggaaaccgaagctcttggggtaacacgacttgtgaaactgcatgctactcctcagtggcagggtggggactctggacagaggaactggcaaggtcttctagacctttgacgtgcataaactggcaggtttacagaataacgaggaaaacaaagtgaaacaaaagactgtacccgtgtgctaagaatttattacccgcacatcaaaaaacttatccatcacgatcaagctggcttcatccctgggatgcaaagctggctcagcatatgcaaatcaataaacataatccgtcacataaacagaaccaaagacaaaaaccacatggttatctcagtagatgcagaaaaggcctttgataaaattcaacatcccttcatgttaaaaactcaataaactagatattgatgg

SEQ ID NO: 2505 - protein, 60 aa, Homo sapiens
MAPNALGWHENCVTHIMCLPKKSFLAGILEEKIWIRNSEITWAHKYMPLQHHPAFCFQDT

SEQ ID NO: 2506 - DNA, 881 bp, Homo sapiens
ctctgtgcctgctgccatccacgtaagatgtgacttgctcctccttgccttccgtcatgattgtgaggcgctcccagccatgtggaactgacgaaacactggaactctccagaataaattggtacctgggtctcttctgaagtgagctgctcttaggagcttcaaatgagggtctttgaagccacatgaaaattgatgagtggttgtaacatccaagctaccaaatcagacacacttgtaattgttcccaatagtttcttagcaggcattttggaggaaaagatttggatcagaaattcagaaattacctgggctcacaaatatatgcccctccagcaccatcctgcattctgcttccaagatacatgagctttctgaagagctggtgagaatgctgaaacttcctggccttggtttcccatctggtaaaatgaggaagaccaaagcttaactctcacaaggaatatgcagatgaggaaaccgaagctcttggggtaacacgacttgtgaaactgcatgctactcctcagtggcagggtggggactctggacagaggaactggcaaggtcttctagacctttgacgtgcataaactggcaggtttacagaataacgaggaaaacaaagtgaaacaaaagactgtacccgtgtgctaagaatttattacccgcacatcaaaaaacttatccatcacgatcaagctggcttcatccctgggatgcaaagctggctcagcatatgcaaatcaataaacataatccgtcacataaacagaaccaaagacaaaaaccacatggttatctcagtagatgcagaaaaggcctttgataaaattcaacatcccttcatgttaaaaactcaataaactagatattgatgg

SEQ ID NO: 2507 - protein, 57 aa, Homo sapiens
MSGCNIQATKSDTLVIVPNSFLAGILEEKIWIRNSEITWAHKYMPLQHHPAFCFQDT

SEQ ID NO: 2508 - DNA, 501 bp, Homo sapiens
ctagaaaggcctattttcaaaagctcatgtcctctgaattgaggaaccacagatcagatcagcctcttcaaccccccgcgaggctcccattcatgtaagacacccatggctttgtaatggcacccaacgctctgggctggcatgaaaattgtgtgactcacatcatgtgcctccccaagaaggtaatggatgagctaaacttggagcagggggctgagacacagatttcctgtgctgtcgagctattgcagatctcagcagataacaaagctattatcctggcagaaatggaagcatcctcaaatcctgtcagatggcagcatggacaaaaattacaagcaaatgtatttttaagctgatgcactttcttaagtctggctcctaaaagcaaaacatgctcttctaggagaagttttagtaaaaacataagaatgctgctggtaaggaaatctctaggtgatgccagggactgacaacagaggatttctgatagaagaaaga

SEQ ID NO: 2509 - protein, 80 aa, Homo sapiens
MAPNALGWHENCVTHIMCLPKKVMDELNLEQGAETQISCAVELLQISADNKAIILAEMEASSNPVRWQHGQKLQANVFLS

SEQ ID NO: 2510 - DNA, 1141 bp, Homo sapiens
gtggcggcgcagcttacaccgcggtccccttatttggatctgcgggaatgtgggctggagaggtcctgccgtggtaccagcctccagcctgcccccaggactgcccctgacccaggcgcgcccgctgctcggtggcaggagggccggcggagcgccatggcctgcatcctgaagagaaagtctgtgattgctgtgagcttcatagcagcgttccttttcctgctggttgtgcgtcttgtaaatgaagtgaatttcccattgctactaaactgctttggacaacctggtacaaagtggataccattctcctacacatacaggcggccccttcgaactcactatggatacataaatgtgaagacacaagagcctttgcaactggactgtgacctttgtgccatagtgtcaaactcaggtcagatggttggccagaaggtgggaaatgagatagatcgatcctcctgcatttggagaatgaacaatgcccccaccaaaggttatgaagaagatgtcggccgcatgaccatgattcgagttgtgtcccataccagcgttcctcttttgctaaaaaaccctgattattttttcaaggaagcgaatactactatttatgttatttggggacctttccgcaatatgaggaaagatggcaatggcatcgtttacaacatgttgaaaaagacagttggtatctatccgaatgcccaaatatacgtgaccacagagaagcgcatgagttactgtgatggagtttttaagaaggaaactgggaaggacagtacagagtgaccatgcagtgttgattgatcgaacagcaaccaccacatacatgtcctgccccaccacaaaaggaaggaaggaataaaagaaagaaagaaagaaacaaacaaacaaacaaacaaaactaagcaagacaaaacaaatacccatgtcagtggttcaaagattaagattgtggctttgtgtaaagttctttccctttgtagacttgctgcataattattcaggtatgatggttacagtttttaaaaaggaagggaaattgtggtatgtggtatgtaaatatttttaaatgttgtctctctgttttgatcagtttttgttttattcaatttgtctttattaaatcttatcaaagcaa

SEQ ID NO: 2511 - protein, 210 aa, Homo sapiens
MACILKRKSVIAVSFIAAFLFLLVVRLVNEVNFPLLLNCFGQPGTKWIPFSYTYRRPLRTHYGYINVKTQEPLQLDCDLCAIVSNSGQMVGQKVGNEIDRSSCIWRMNNAPTKGYEEDVGRMTMIRVVSHTSVPLLLKNPDYFFKEANTTIYVIWGPFRNMRKDGNGIVYNMLKKTVGIYPNAQIYVTTEKRMSYCDGVFKKETGKDSTE

SEQ ID NO: 2512 - DNA, 3217 bp, Homo sapiens
gtggcggcgcagcttacaccgcggtccccttatttggatctgcgggaatgtgggctggagaggtcctgccgtggtaccagcctccagcctgcccccaggactgcccctgacccaggcgcgcccgctgctcggtggcaggagggccggcggagcgccatggcctgcatcctgaagagaaagtctgtgattgctgtgagcttcatagcagcgttccttttcctgctggttgtgcgtcttgtaaatgaagtgaatttcccattgctactaaactgctttggacaacctggtacaaagtggataccattctcctacacatacaggcggccccttcgaactcactatggatacataaatgtgaagacacaagagcctttgcaactggactgtgacctttgtgccatagtgtcaaactcaggtcagatggttggccagaaggtgggaaatgagatagatcgatcctcctgcatttggagaatgaacaatgcccccaccaaaggttatgaagaagatgtcggccgcatgaccatgattcgagttgtgtcccataccagcgttcctcttttgctaaaaaaccctgattattttttcaaggaagcgaatactactatttatgttatttggggacctttccgcaatatgaggaaagatggcaatggcatcgtttacaacatgttgaaaaagacagttggtatctatccgaatgcccaaatatacgtgaccacagagaagcgcatgagttactgtgatggagtttttaagaaggaaactgggaaggacagagtccagtctggctcatatctcagcacagggtggtttaccttccttctggccatggacgcctgttatggcattcacgtctacgggatgataaatgacacctactgcaagacagaagggtatagaaaagtcccctaccattattatgaacaaggaagagatgagtgtgatgaatattttcttcatgaacatgccccatatgggggtcataggtttatcactgaaaagaaagtgtttgctaaatgggccaagaagcacaggataatatttacacatccaaactggacattgtcttgataatggttttcctgatcttgccgcatcacttaatgtgatccccatactgcaactgtgatgctgatgatgctaatggagatgatggtaatgataaagacaacaacaatgattatcaagttcctgtacactctcagatgtggatggtgactctgctagtaatttaaacttggcatttcatggaggatggttgtgctcatgatgttctttctggaggttcaacactacgtaccgcactttataatttaactggaattgagatgaaggccagtgacatgacaactgtgacctaagaaatgggaagattatctttcaagatagctgcctagaattgttcaacagtgagtaacttccagaagccaaaagagtttggcttcatgaggcaaggtgattgactcaatggcttgttgaatctcagcagttccgccatcttgaagaatgattgattgtcaaacactgacccaagaactgctatcagggtgcaagtatcttactacttagcctaaggatgggaaaatatctcttcctaatataccatctttctacagtatttcctacagctaaagcctcaggccattgcctaattaacaatgaagatttcatggacatcctacacttcaggattacttgactatctcaaacacataaatcaaaatgggccaagtagcaaatcttgatgaatttccactcttaccatccattcttactaccaacagtataactgaacatgtgattagaatgatctatattaatgtttagttatttttggttgagtgctaaatatttcagaaggctacttaacatgtaagataccaacttcaacactgtaataacatatactgtgaaaacattcctaaaaagtaaccaaagggtttgctaactctgcttcaacatccaacaacacaaaactatatgatttttaaaatcatgaaatagagacagcaaagcatatttttacatcaatttgtatcctatcatacttcataatatatatttgtatattcaaatttctattttataggcccaaggtgtgtttctccaaacattacattctcattgccaagtgccagctgttacacatggagaggaaatgattccttatattaaacctgaccagagctttttgccttctagggatttatttttcccatagtgtatcagttgttatgccacaataacaacaataataatgttcttaatgtccaaagtgctttgtcatttagagtcctttaacatctgttataccatgtgatgcccttgaacaccccattgggctattgtctgtgtattctgctctctttagcagatgatctgtaatttggtcattgttctgttatattccagattgctctacttgctaatatttgtatagaatagaatttatgtaaactagtaaccagttgatctctgtgccaaatacattatatcaggattacacaaaaagtatcacaaaggatggtcttggccatatgctagggcccctgtgaaaataagtagttttgagaagtttttctatatacgtatatatacacgtgtggttctatttaggtggggaaaaaatgaaaaagcagggacaacaggaggaaatgaaggcagagaaatatagtttcctttcctaggattgagacaattctatttttcatatactcgttgctcattaaatagtaaagggttgatttgctgcaagagtagctgagaattcaaaaacatccttgcagaatgattcaaaagacaaaagccaggctcaacttatagaatgttttggaaactggaagtaatgatacatttcacttcagaagcacttgtaggtctttactagtgctaagtattatggtgagctatcattaaagtgtgccatcttggataaaggccttttgcctactctcttctgcaattttgacacctcaatattcacacccataaacattactaagccccagttctatcgttggaaggagttgttattcttttgttgttcccttatgcaatttttaattctatgaatgttaagtttttttgagctaatgatagatagaaatgcccactcaaagaaaaataaacagagacaaatgttaaaattgccatacagactgtttttccccctgttgtttcactttaaaataaaaagaaatccttgattaatcag

SEQ ID NO: 2513 - protein, 305 aa, Homo sapiens
MACILKRKSVIAVSFIAAFLFLLVVRLVNEVNFPLLLNCFGQPGTKWIPFSYTYRRPLRTHYGYINVKTQEPLQLDCDLCAIVSNSGQMVGQKVGNEIDRSSCIWRMNNAPTKGYEEDVGRMTMIRVVSHTSVPLLLKNPDYFFKEANTTIYVIWGPFRNMRKDGNGIVYNMLKKTVGIYPNAQIYVTTEKRMSYCDGVFKKETGKDRVQSGSYLSTGWFTFLLAMDACYGIHVYGMINDTYCKTEGYRKVPYHYYEQGRDECDEYFLHEHAPYGGHRFITEKKVFAKWAKKHRIIFTHPNWTLS

SEQ ID NO: 2514 - DNA, 6866 bp, Homo sapiens
gtggcggcgcagcttacaccgcggtccccttatttggatctgcgggaatgtgggctggagaggtcctgccgtggtaccagcctccagcctgcccccaggactgcccctgacccaggcgcgcccgctgctcggtggcaggagggccggcggagcgccatggcctgcatcctgaagagaaagtctgtgattgctgtgagcttcatagcagcgttccttttcctgctggttgtgcgtcttgtaaatgaagtgaatttcccattgctactaaactgctttggacaacctggtacaaagtggataccattctcctacacatacaggcggccccttcgaactcactatggatacataaatgtgaagacacaagagcctttgcaactggactgtgacctttgtgccatagtgtcaaactcaggtcagatggttggccagaaggtgggaaatgagatagatcgatcctcctgcatttggagaatgaacaatgcccccaccaaaggttatgaagaagatgtcggccgcatgaccatgattcgagttgtgtcccataccagcgttcctcttttgctaaaaaaccctgattattttttcaaggaagcgaatactactatttatgttatttggggacctttccgcaatatgaggaaagatggcaatggcatcgtttacaacatgttgaaaaagacagttggtatctatccgaatgcccaaatatacgtgaccacagagaagcgcatgagttactgtgatggagtttttaagaaggaaactgggaaggacagagtccagtctggctcatatctcagcacagggtggtttaccttccttctggccatggacgcctgttatggcattcacgtctacgggatgataaatgacacctactgcaagacagaagggtatagaaaagtcccctaccattattatgaacaaggaagagatgagtgtgatgaatattttcttcatgaacatgccccatatgggggtcataggtttatcactgaaaagaaagtgtttgctaaatgggccaagaagcacaggataatatttacacatccaaactggacattgtcttgataatggttttcctgatcttgccgcatcacttaatgtgatccccatactgcaactgtgatgctgatgatgctaatggagatgatggtaatgataaagacaacaacaatgattatcaagttcctgtacactctcagatgtggatggtgactctgctagtaatttaaacttggcatttcatggaggatggttgtgctcatgatgttctttctggaggttcaacactacgtaccgcactttataatttaactggaattgagatgaaggccagtgacatgacaactgtgacctaagaaatgggaagattatctttcaagatagctgcctagaattgttcaacagtgagtaacttccagaagccaaaagagtttggcttcatgaggcaaggtgattgactcaatggcttgttgaatctcagcagttccgccatcttgaagaatgattgattgtcaaacactgacccaagaactgctatcagggtgcaagtatcttactacttagcctaaggatgggaaaatatctcttcctaatataccatctttctacagtatttcctacagctaaagcctcaggccattgcctaattaacaatgaagatttcatggacatcctacacttcaggattacttgactatctcaaacacataaatcaaaatgggccaagtagcaaatcttgatgaatttccactcttaccatccattcttactaccaacagtataactgaacatgtgattagaatgatctatattaatgtttagttatttttggttgagtgctaaatatttcagaaggctacttaacatgtaagataccaacttcaacactgtaataacatatactgtgaaaacattcctaaaaagtaaccaaagggtttgctaactctgcttcaacatccaacaacacaaaactatatgatttttaaaatcatgaaatagagacagcaaagcatatttttacatcaatttgtatcctatcatacttcataatatatatttgtatattcaaatttctattttataggcccaaggtgtgtttctccaaacattacattctcattgccaagtgccagctgttacacatggagaggaaatgattccttatattaaacctgaccagagctttttgccttctagggatttatttttcccatagtgtatcagttgttatgccacaataacaacaataataatgttcttaatgtccaaagtgctttgtcatttagagtcctttaacatctgttataccatgtgatgcccttgaacaccccattgggctattgtctgtgtattctgctctctttagcagatgatctgtaatttggtcattgttctgttatattccagattgctctacttgctaatatttgtatagaatagaatttatgtaaactagtaaccagttgatctctgtgccaaatacattatatcaggattacacaaaaagtatcacaaaggatggtcttggccatatgctagggcccctgtgaaaataagtagttttgagaagtttttctatatacgtatatatacacgtgtggttctatttaggtggggaaaaaatgaaaaagcagggacaacaggaggaaatgaaggcagagaaatatagtttcctttcctaggattgagacaattctatttttcatatactcgttgctcattaaatagtaaagggttgatttgctgcaagagtagctgagaattcaaaaacatccttgcagaatgattcaaaagacaaaagccaggctcaacttatagaatgttttggaaactggaagtaatgatacatttcacttcagaagcacttgtaggtctttactagtgctaagtattatggtgagctatcattaaagtgtgccatcttggataaaggccttttgcctactctcttctgcaattttgacacctcaatattcacacccataaacattactaagccccagttctatcgttggaaggagttgttattcttttgttgttcccttatgcaatttttaattctatgaatgttaagtttttttgagctaatgatagatagaaatgcccactcaaagaaaaataaacagagacaaatgttaaaattgccatacagactgtttttccccctgttgtttcactttaaaataaaaagaaatccttgattaatcagaatggcttgggacatgaacttaatttatttagttttctaataaatgaagggccaactcttatttgttctagcccctactgatgagaaacatttgaaaacttgcttgctctcctgcctcgttgtagctttctctgatgaagacttctgcagtatattgtatccctcactctatagcagaaggtgtgtgtggaatatgtagactccagtgttttcttaggaggggtgggaaagggctttctttcctctcctctcctctcgtctcctctttctttcctttctttttgcaactaaactgctactctacactttttattgttgttttctttgtctttttctttctacaaacaggaaacaaaaaaaaaaaaaaacaagtttttctcaatttggagactcaattgaataatttccagtataatcagcattttgatagaatctcacaacttatttttctctgcttttatttcctgtttttctttgttccatctttctaattctagtgaaaatgcaaagtctaatttctcccatgttgagaataaatttttcatctatgatttgctgatagagaagagcttggtaagggagcaattcaaggaaactattttgccatgcacatttctgatcaattcccacagattctggtcaaatgaaagatattctatccaacatttaaacattgaaaaatttaactgaacttacttatcactgatgtgtatttatcccagaaattaattaatatctgtgaaaaataaaaatatttcaatactatccgtgcttcttggaaaatgaactataaaaaagggtcacaatttttctgaaattggcatgaaaacattcaagataaaaataatagactaaacattattttctgttatgcataattctatgaaaaagcaaggtaatttaaaaagagttttaaaatgtgtgtttgaatcttttccaatttaaccaagtgagaagtagcaatgatttacattgttatgatgataatgtgaataagaaaccttttagagtatatgattttacattgctatcaaacctatcaaagaaaaggcaattggaatttggaggaatgtttgtatatatgcacatagagtctatttgtgtgtgtgtgaacgcacatatatatacatctatatacttataactatatataaaagcatatatataatcctatattcttcactggtgcatgtgaatcacagaaagccctattttagacttcatctgaaattcgttgggttacattttgaatcctgatgaaaaaagcaaaaatccaaattaaatggactgattgctaagagtacgtaaaatcatattcaaaagctggccagaagaataaagctagagaagctgctaaatctagaaaacacaatcagatgccacagttgtcacaaatcagacttgtaagtatagcaatctgtattgtaggttctgccgattgcaggcttagctaaagtcacattgaaaaacattgcatcaagcttcattcacactgaagtaaatgaacattggtcctcctattcaaataagccagtctttagcataagcaaaatccagatttgcatgatttttattatatagctacagaactgtgaccactgtgaaaaaggaaaattatacaaggagattgctcttggaggatttggtatgaatcagctgaggtaggaacaagagtctgaattggggacctgctgaccttccaagaagtagaaggccatcagaagaaaatcactgttacttagagaagagacaacactaaagtacttcacctggtagtgttaattggatgttaattatgagctcggtttaatttcaataagcaagaaaatataatcagatgactgatttaaaaaaaaacaacaacaatgtgcccatctagcctttaatgtgacatgtcaaatgcaaataataaattatgttattcagtatcagttgtttgcatgtcttagcacaacaaaggatttacagtctgagggccaagagagaaaaaatgcttttttcttaaaacagcatatttaaaagacaagacctcatcatttcagtagtgtacatagattagtgactgaaggagccagtgctagcctttttaagtaggtcaggcttttagagctgaaagagattttaaagaccagccaattcaactcctacaccttggagctgaggaaacagacagaggtgaagtgacttgcctgtagttataaactggactaatggcagtactgagactcaaattcttgtctcatgttttcttctctagtgctttttccactacactttttagacagaagagtagctggaaaaagaatgcctaactgatttactaaagagtctattcatggaatccaagggctccaaattgtgctaattctgctcaggatgaaacaaatccccacgctgaagtggagaaatattttcataattgaaggaacatatcccattgattgtctacactttcttctctctgtttgttgctattggtaaggctaggctatgttctgttatcacaaaattctaggacttgtttaaagaacttaaaggtcagtttcttagtttctctttgtgattgaggatgagcaagccattgatacaccaagagctgctgagtgttggaggttgcctggtgaaactggcaggccctgttgttgacatttccccagagctaaaatgtcctcatactcaaaccaactgtgctgcccaagttagtgaaattatccatcagcactaacaccaccctttgggttcatgctcatccctgcactccatgtgacctttgagcccagatacccttctagaaggtgaatgaaagccccacatgtcccgcaagacttagtctgcataaaagatttaaaaggatttttttttctctacagtccatttatatgatactgttagaagtgaagaattttgaaactacatacactggcctctgaaaatggttcttgtggctcagaaatagtatattgttctgttgcttgtttttgctgaactgtagagaaaacaccagagtaaaattccatgtaaattgctaaggcatcgaatcagaactgtccttgggcgttgtaacagtgcagaaaatctcatttagtttttttctttttttttttcagttaactacttgtttgtttcttttcagaataggcacttttttttgagtagaaaacctcttctttctccacagatacatctctttttgttcacgccttgaagacttcagaaaaatagaagctcacttccttccataaaggtgaagaacatcttgatgaataaacagtcaactaccaagttcacatatttgcctatgaagtgagagctatttctaagaaacttcaaaaagatcaaaacgaggcaattttatagctttttgttacctaatctacaaagtactaatttccttgtgtttagctttgttgtcactgttactgagtaaatacccatttctgttacatatggtacattttttgcttcacttattttcctgagttcccatgattttttttctgtagtttctcattcattttaaaacccataatcttcatctatttttagaagaaagtgtaaatgcacagttgtacgtttgttgagagtttttatggcattatagtgctttatttataagcattgtgtcttagaataaagcttacaaaatggc

SEQ ID NO: 2515 - protein, 305 aa, Homo sapiens; identical to SEQ ID NO: 2513

SEQ ID NO: 2516 - DNA, 945 bp, Homo sapiens
agtgtgcgcatgtgcaaccagagcggcggcgggaagtgttgcgcaggcgcatccgatcgactcgctgctttgctccccctgtggatgtaaccccttagctggcattttgcatctcaattggcttgtgatggaggcgtctttggggattcagatggatgagccaatggctttttctccccagcgtgaccggtttcaggctgaaggctctttaaaaaaaaacgagcagaattttaaacttgcaggtgttaaaaaagatattgagaagctttatgaagctgtaccacagcttagtaatgtgtttaagattgaggacaaaattggagaaggcactttcagctctgtttatttggccacagcacagttacaagtaggacctgaagagaaaattgctctaaaacacttgattccaacaagtcatcctataagaattgcagctgaacttcagtgcctaacagtggctggggggcaagataatgtcatgggagttaaatactgctttaggaagaatgatcatgtagttattgctatgccatatctggagcatgagtcgtttttggacattctgaattctctttcctttcaagaagtacgggaatatatgcttaatctgttcaaagctttgaaacgcattcatcagtttggtattgttcaccgtgatgttaagcccagcaattttttatataataggcgcctgaaaaagtatgccttggtagactttggtttggcccaaggaacccatgatacgaaaatagagcttcttaaatttgtccagtctgaagctcagcaggaaaggtgttcacaaaacaaatcccacataatcacaggaaacaagattccactgagtggcccagtacctaaggagctggatcagcagtccaccacaaaagcttctgttaaaagaccctacacaaatgcacaaattcagattaaacaaggaaaagacgg

SEQ ID NO: 2517 - protein, 271 aa, Homo sapiens
MEASLGIQMDEPMAFSPQRDRFQAEGSLKKNEQNFKLAGVKKDIEKLYEAVPQLSNVFKIEDKIGEGTFSSVYLATAQLQVGPEEKIALKHLIPTSHPIRIAAELQCLTVAGGQDNVMGVKYCFRKNDHVVIAMPYLEHESFLDILNSLSFQEVREYMLNLFKALKRIHQFGIVHRDVKPSNFLYNRRLKKYALVDFGLAQGTHDTKIELLKFVQSEAQQERCSQNKSHIITGNKIPLSGPVPKELDQQSTTKASVKRPYTNAQIQIKQGK

SEQ ID NO: 2518 - DNA, 983 bp, Homo sapiens
aagtgttgcgcaggcgcatccgatcgactcggtaggtggggatctcttggagacggcgacccaggcatctggggagccacagaagtcgtactcccttaaaccctgctttgctccccctgtggatgtaaccccttagctggcattttgcatctcaattggcttgtgatggaggcgtctttggggattcagatggatgagccaatggctttttctccccagcgtgaccggtttcaggctgaaggctctttaaaaaaaaacgagcagaattttaaacttgcaggtgttaaaaaagatattgagaagctttatgaagctgtaccacagcttagtaatgtgtttaagattgaggacaaaattggagaaggcactttcagctctgtttatttggccacagcacagttacaagtaggacctgaagagaaaattgctctaaaacacttgattccaacaagtcatcctataagaattgcagctgaacttcagtgcctaacagtggctggggggcaagataatgtcatgggagttaaatactgctttaggaagaatgatcatgtagttattgctatgccatatctggagcatgagtcgtttttggacattctgaattctctttcctttcaagaagtacgggaatatatgcttaatctgttcaaagctttgaaacgcattcatcagtttggtattgttcaccgtgatgttaagcccagcaattttttatataataggcgcctgaaaaagtatgccttggtagactttggtttggcccaaggaacccatgatacgaaaatagagcttcttaaatttgtccagtctgaagctcagcaggaaaggtgttcacaaaacaaatcccacataatcacaggaaacaagattccactgagtggcccagtacctaaggagctggatcagcagtccaccacaaaagcttctgttaaaagaccctacacaaatgcacaaattcagattaaacaaggaaaagacgg

SEQ ID NO: 2519 - protein, 271 aa, Homo sapiens; identical to SEQ ID NO: 2517

SEQ ID NO: 2520 - DNA, 3157 bp, Homo sapiens
aagtgttgcgcaggcgcatccgatcgactcggtaggtggggatctcttggagacggcgacccaggcatctggggagccacagaagtcgtactcccttaaaccctgctttgctccccctgtggatgtaaccccttagctggcattttgcatctcaattggcttgtgatggaggcgtctttggggattcagatggatgagccaatggctttttctccccagcgtgaccggtttcaggctgaaggctctttaaaaaaaaacgagcagaattttaaacttgcaggtgttaaaaaagatattgagaagctttatgaagctgtaccacagcttagtaatgtgtttaagattgaggacaaaattggagaaggcactttcagctctgtttatttggccacagcacagttacaagtaggacctgaagagaaaattgctctaaaacacttgattccaacaagtcatcctataagaattgcagctgaacttcagtgcctaacagtggctggggggcaagataatgtcatgggagttaaatactgctttaggaagaatgatcatgtagttattgctatgccatatctggagcatgagtcgtttttggacattctgaattctctttcctttcaagaagtacgggaatatatgcttaatctgttcaaagctttgaaacgcattcatcagtttggtattgttcaccgtgatgttaagcccagcaattttttatataataggcgcctgaaaaagtatgccttggtagactttggtttggcccaaggaacccatgatacgaaaatagagcttcttaaatttgtccagtctgaagctcagcaggaaaggtgttcacaaaacaaatcccacataatcacaggaaacaagattccactgagtggcccagtacctaaggagctggatcagcagtccaccacaaaagcttctgttaaaagaccctacacaaatgcacaaattcagattaaacaaggaaaagacggaaaggagggatctgtaggcctttctgtccagcgctctgtttttggagaaagaaatttcaatatacacagctccatttcacatgagagccctgcagtgaaactcatgaagcagtcaaagactgtggatgtactgtctagaaagttagcaacaaaaaagaaggctatttctacaaaagttatgaatagtgctgtgatgaggaaaactgccagttcttgcccagctagcctgacctgtgactgctatgcaacagataaagtttgtagtatttgcctttcaaggcgtcagcaggttgcccctagggcaggtacaccaggattcagagcaccagaggtcttgacaaagtgccccaatcaaactacagcaattgacatgtggtctgcaggtgtcatatttctttctttgcttagtggacgatatccattttataaagcaagtgatgatttaactgctttggcccaaattatgacaattaggggatccagagaaactatccaagctgctaaaacttttgggaaatcaatattatgtagcaaagaagttccagcacaagacttgagaaaactctgtgagagactcaggggtatggattctagcactcccaagttaacaagtgatatacaagggcatgcttctcatcaaccagctatttcagagaagactgaccataaagcttcttgcctcgttcaaacacctccaggacaatactcagggaattcatttaaaaagggggatagtaatagctgtgagcattgttttgatgagtataataccaatttagaaggctggaatgaggtacctgatgaagcttatgacctgcttgataaacttctagatctaaatccagcttcaagaataacagcagaagaagctttgttgcatccattttttaaagatatgagcttgtgataatggatcttcatttaatgtttactgttatgaggtagaataaaaaagaatactttgtaatagccacaagttcttgtttagagaccagagcaggattaataatttattttaacattttagtgtttggtggcacattctaaaatatagattaagaatacttaaaatgcctgggatagttcttgggactaacaacatgatcttctttgagttaaacctacctaagtagattttaggtgggttcctattaggtcagatttttagcttccctaattacctttcactgacatatacagaaaaaggagcagttttagttttaattaattaaaattaacagatgtgatgaggattaaatgaatcaaaagacttaatttgtagattcttttagagttatgagctaggtatagtttggggaaactcaacctggtgctggtgctcttaacaattttgtaaataaagaagataatttccttttctagaggtacatattaggccttttatgaacactaaaacaatgaggaaatgttggtcatggggcaaagtatcacttaaaattgaattcatccatttttaaaaaacacttcatgaaagcattctggtgtgaattgccatttttttcttactggcttctcaattttcttccttctctgcccctacctaaaacattctcctcggaaattacatggtgctgaccacaaagtttctggatgttttattaaatattgtacgtgtttacagttgggaatttaaaataatacatacactggttgataaagggaagctgcaggaccaaggtgaagattgatagtccaaatgcttttcttttttgagttgtatattttttcacaccatcttagatataattaggtagctgctgaaaggaaaagtgaatacagaattgacggtattattggagatttttcctctgcgtagagccatccagatctctgtatcctgttttgactaagtcttaggtgggttgggaagacagataatgaagtaggcaaagagaaaaggacccaagatagaggtttatattcagaaatggtatatatcaatgacagcatatcaaacttcctatgggaaaaagtctggtgggtggtcagctgacagatttcccatttagtagtcatagaatacagaaatagtttagggacatgtattcattttgttattttgagcattgataggtcagtatatctacctaatctgtttggtaagtataggatatataaaccattaccattgatctgtcttatgccataatctt

SEQ ID NO: 2521 - protein, 574 aa, Homo sapiens; identical to SEQ ID NO: 52

SEQ ID NO: 2522 - DNA, 3219 bp, Homo sapiens
aagtgttgcgcaggcgcatccgatcgactcggtaggtggggatctcttggagacggcgacccaggcatctggggagccacagaagtcgtactcccttaaaccctgctttgctccccctgtggatgtaaccccttagctggcattttgcatctcaattggcttgtgatggaggcgtctttggggattcagatggatgagccaatggctttttctccccagcgtgaccggtttcaggctgaaggctctttaaaaaaaaacgagcagaattttaaacttgcaggtgttaaaaaagatattgagaagctttatgaagctgtaccacagcttagtaatgtgtttaagattgaggacaaaattggagaaggcactttcagctctgtttatttggccacagcacagttacaagtaggacctgaagagaaaattgctctaaaacacttgattccaacaagtcatcctataagaattgcagctgaacttcagtgcctaacagtggctggggggcaagataatgtcatgggagttaaatactgctttaggaagaatgatcatgtagttattgctatgccatatctggagcatgagtcgtttttggacattctgaattctctttcctttcaagaagtacgggaatatatgcttaatctgttcaaagctttgaaacgcattcatcagtttggtattgttcaccgtgatgttaagcccagcaattttttatataataggcgcctgaaaaagtatgccttggtagactttggtttggcccaaggaacccatgatacgaaaatagagcttcttaaatttgtccagtctgaagctcagcaggaaaggtgttcacaaaacaaatcccacataatcacaggaaacaagattccactgagtggcccagtacctaaggagctggatcagcagtccaccacaaaagcttctgttaaaagaccctacacaaatgcacaaattcagattaaacaaggaaaagacggaaaggagggatctgtaggcctttctgtccagcgctctgtttttggagaaagaaatttcaatatacacagctccatttcacatgagagccctgcagtgaaactcatgaagcagtcaaagactgtggatgtactgtctagaaagttagcaacaaaaaagaaggctatttctacaaaagttatgaatagtgctgtgatgaggaaaactgccagttcttgcccagctagcctgacctgtgactgctatgcaacagataaagtttgtagtatttgcctttcaaggcgtcagcaggttgcccctagggcaggtacaccaggattcagagcaccagaggtcttgacaaagtgccccaatcaaactacagcaattgacatgtggtctgcaggtgtcatatttctttctttgcttagtggacgatatccattttataaagcaagtgatgatttaactgctttggcccaaattatgacaattaggggatccagagaaactatccaagctgctaaaacttttgggaaatcaatattatgtagcaaagaagttccagcacaagacttgagaaaactctgtgagagactcaggggtatggattctagcactcccaagttaacaagtgatatacaagggcatgcttctcatcaaccagctatttcagagaagactgaccataaagcttcttgcctcgttcaaacacctccaggacaatactcagggaattcatttaaaaagggggatagtaatagctgtgagcattgttttgatgagtataataccaatttagaaggctggaatgaggtacctgatgaagcttatgacctgcttgataaacttctagatctaaatccagcttcaagaataacagcagaagaagctttgttgcatccattttttaaagatatgagcttgtgataatggatcttcatttaatgtttactgttatgaggtagaataaaaaagaatactttgtaatagccacaagttcttgtttagagaccagagcaggattaataatttattttaacattttagtgtttggtggcacattctaaaatatagattaagaatacttaaaatgcctgggatagttcttgggactaacaacatgatcttctttgagttaaacctacctaagtagattttaggtgggttcctattaggtcagatttttagcttccctaattacctttcactgacatatacagaaaaaggagcagttttagttttaattaattaaaattaacagatgtgatgaggattaaatgaatcaaaagacttaatttgtagattcttttagagttatgagctaggtatagtttggggaaactcaacctggtgctggtgctcttaacaattttgtaaataaagaagataatttccttttctagaggtacatattaggccttttatgaacactaaaacaatgaggaaatgttggtcatggggcaaagtatcacttaaaattgaattcatccatttttaaaaaacacttcatgaaagcattctggtgtgaattgccatttttttcttactggcttctcaattttcttccttctctgcccctacctaaaacattctcctcggaaattacatggtgctgaccacaaagtttctggatgttttattaaatattgtacgtgtttacagttgggaatttaaaataatacatacactggttgataaagggaagctgcaggaccaaggtgaagattgatagtccaaatgcttttcttttttgagttgtatattttttcacaccatcttagatataattaggtagctgctgaaaggaaaagtgaatacagaattgacggtattattggagatttttcctctgcgtagagccatccagatctctgtatcctgttttgactaagtcttaggtgggttgggaagacagataatgaagtaggcaaagagaaaaggacccaagatagaggtttatattcagaaatggtatatatcaatgacagcatatcaaacttcctatgggaaaaagtctggtgggtggtcagctgacagatttcccatttagtagtcatagaatacagaaatagtttagggacatgtattcattttgttattttgagcattgataggtcagtatatctacctaatctgtttggtaagtataggatatataaaccattaccattgatctgtcttatgccataatcttaaaaaaaatttgaatgctcttgaatttgtatattcaataaagttatccttttatatttttta

SEQ ID NO: 2523 - protein, 574 aa, Homo sapiens; identical to SEQ ID NO: 52

SEQ ID NO: 2524 - DNA, 5338 bp, Homo sapiens
agtgttgcgcaggcgcatccgatcgactcggtaggtggggatctcttggagacggcgacccaggcatctggggagccacagaagtcgtactcccttaaaccgtgagtttccgacggtttgttccatggcgcgggattgtgagggattaggaacgaattctggatcgtgacttcggttttctcgccgtgcagttccttttcccgccccccttcggatccctccgacctgcggcgggaaagtcgcgcgcctgcgcactaagcatctggttcggtctctggcccgagggaagccggtccttcccggctgagctcgcggccagcgctggccggcggattcccattcattcacccttctcctcctccgcccagtactcgtggccagggtcgtatcagttctccgtcaacttgcttggggccttggacgagcctcctggcgcttcctgtcagtggcgaaaaggttttctccctcagttcttttcctgacttcaaaccgcccccggcgctcggcccctcccccacgcggtcccgctggctgtgccggactggcagcctcgccgtttcccactgcgcctgctgctgcgcgggtgcccaagccgggaaattctccctgcagccccctgccggtgtttctgataggtgaaaataaagcacatggaattccttagacaaggccacagtatgccctactgtggaggtttggacacatcgtgcgtttgaaaatgtttgcccctttggggggcagtagcatgtttttagtgcgtggtttagcgagtgatctaaatttctctagtgttctaattttcacagctgctttgctccccctgtggatgtaaccccttagctggcattttgcatctcaattggcttgtgatggaggcgtctttggggattcagatggatgagccaatggctttttctccccagcgtgaccggtttcaggctgaaggctctttaaaaaaaaacgagcagaattttaaacttgcaggtgttaaaaaagatattgagaagctttatgaagctgtaccacagcttagtaatgtgtttaagattgaggacaaaattggagaaggcactttcagctctgtttatttggccacagcacagttacaagtaggacctgaagagaaaattgctctaaaacacttgattccaacaagtcatcctataagaattgcagctgaacttcagtgcctaacagtggctggggggcaagataatgtcatgggagttaaatactgctttaggaagaatgatcatgtagttattgctatgccatatctggagcatgagtcgtttttggacattctgaattctctttcctttcaagaagtacgggaatatatgcttaatctgttcaaagctttgaaacgcattcatcagtttggtattgttcaccgtgatgttaagcccagcaattttttatataataggcgcctgaaaaagtatgccttggtagactttggtttggcccaaggaacccatgatacgaaaatagagcttcttaaatttgtccagtctgaagctcagcaggaaaggtgttcacaaaacaaatcccacataatcacaggaaacaagattccactgagtggcccagtacctaaggagctggatcagcagtccaccacaaaagcttctgttaaaagaccctacacaaatgcacaaattcagattaaacaaggaaaagacggaaaggttctatctcttttatttcttaagtaccgacactgttttagaaatatactccttcaaccaacagagggagatagaatactaggatagtacttataatttaaaaaacttttttttgcatttgttatatgtattcatttgattaaattttcactaagatttgtactgaatcattttggttactattttaaaactaaaatttactttgtcagtttataacatctgtcattaactattatgaaatcatattttatgacaaaaatggaaaatattaaattttccctgcatgttaaaaagttcagattaattatcctttttaaaagaaagcattagttataggggaggaattctgaagtgtctatctccattttagctgcacagcaaaatgtaacatccatgcaggtggtttttgaatttttttttagttatatatatttgtggactatgataacattgtatgggtgttgagttctgtctagactattttctcctttcacagaagtggtttggtgcctgagaatgacttggatgcagctgtttttgtttcatctcacttaactctttcaaaactatggcagagtacagctggcagaaagtgttacagatataatccttattttccttgtttttgttggtattgtaggagggatctgtaggcctttctgtccagcgctctgtttttggagaaagaaatttcaatatacacagctccatttcacatgagagccctgcagtgaaagtaagtaatgtagcttaatagcataatggtcagtcagtcatacactgaagagaatttaggtaataactagattaacatttattatcagaaatttttttaaactagagtttggctttggcagaaggtattactgctttaagcatttagtcaaaacttgttttctccagtttttttctgaacttttctggtggaattttttctcatttttggttagctattactgtctttctctagaggaacatttagaacattaagggctttctgtcattgctagagtgtgagctccatacagttagctaactattctgacacatagttgatagtgtaaagatgtttgtaaagttaacaaaatcatcatcaatgtagatgatttcagattgacttatgatatcttgtgacagctagacagcatgagcaacaaattaaaactgtgattttagccaacgtacttgtgcagtttacagttctgaaatggagttagacactagaacataactgttttatacttctgtaatatatcaggaaaagttctaataaagtataactcaaatattggccaagctaggactaattagtaaattttaatataaggtgactttacagaaaaacccaagaagaccttaaacattttaatagacaacagtttatttacagtccaatagccattcagcagtttttaaagttatgcttccgctattgctttttgccatactagcattttaggacatcatgtttaatatcatgaaaatagaaaaatgagacttttcttttacagctcatgaagcagtcaaagactgtggatgtactgtctagaaagttagcaacaaaaaagaaggctatttctacaaaagttatgaatagtgctgtgatgaggaaaactgccagttcttgcccagctagcctgacctgtgactgctatgcaacagataaagtttgtagtatttgcctttcaaggcgtcagcaggttgcccctagggcaggtacaccaggattcagagcaccagaggtcttgacaaagtgccccaatcaaactacagcaattgacatgtggtctgcaggtgtcatatttctttctttgcttagtggacgatatccattttataaagcaagtgatgatttaactgctttggcccaaattatgacaattaggggatccagagaaactatccaagctgctaaaacttttgggaaatcaatattatgtagcaaagaagttccagcacaagacttgagaaaactctgtgagagactcaggggtatggattctagcactcccaagttaacaagtgatatacaagggcatgcttctcatcaaccagctatttcagagaagactgaccataaagcttcttgcctcgttcaaacacctccaggacaatactcagggaattcatttaaaaagggggatagtaatagctgtgagcattgttttgatgagtataataccaatttagaaggctggaatgaggtacctgatgaagcttatgacctgcttgataaacttctagatctaaatccagcttcaagaataacagcagaagaagctttgttgcatccattttttaaagatatgagcttgtgataatggatcttcatttaatgtttactgttatgaggtagaataaaaaagaatactttgtaatagccacaagttcttgtttagagaccagagcaggattaataatttattttaacattttagtgtttggtggcacattctaaaatatagattaagaatacttaaaatgcctgggatagttcttgggactaacaacatgatcttctttgagttaaacctacctaagtagattttaggtgggttcctattaggtcagatttttagcttccctaattacctttcactgacatatacagaaaaaggagcagttttagttttaattaattaaaattaacagatgtgatgaggattaaatgaatcaaaagacttaatttgtagattcttttagagttatgagctaggtatagtttggggaaactcaacctggtgctggtgctcttaacaattttgtaaataaagaagataatttccttttctagaggtacatattaggccttttatgaacactaaaacaatgaggaaatgttggtcatggggcaaagtatcacttaaaattgaattcatccatttttaaaaaacacttcatgaaagcattctggtgtgaattgccatttttttcttactggcttctcaattttcttccttctctgcccctacctaaaacattctcctcggaaattacatggtgctgaccacaaagtttctggatgttttattaaatattgtacgtgtttacagttgggaatttaaaataatacatacactggttgataaagggaagctgcaggaccaaggtgaagattgatagtccaaatgcttttcttttttgagttgtatattttttcacaccatcttagatataattaggtagctgctgaaaggaaaagtgaatacagaattgacggtattattggagatttttcctctgcgtagagccatccagatctctgtatcctgttttgactaagtcttaggtgggttgggaagacagataatgaagtaggcaaagagaaaaggacccaagatagaggtttatattcagaaatggtatatatcaatgacagcatatcaaacttcctatgggaaaaagtctggtgggtggtcagctgacagatttcccatttagtagtcatagaatacagaaatagtttagggacatgtattcattttgttattttgagcattgataggtcagtatatctacctaatctgtttggtaagtataggatatataaaccattaccattgatctgtcttatgccataatcttaaaaaaaatttgaatgctcttgaatttgtatattcaataaagttatccttttatatttttta

SEQ ID NO: 2525 - protein, 302 aa, Homo sapiens
MEASLGIQMDEPMAFSPQRDRFQAEGSLKKNEQNFKLAGVKKDIEKLYEAVPQLSNVFKIEDKIGEGTFSSVYLATAQLQVGPEEKIALKHLIPTSHPIRIAAELQCLTVAGGQDNVMGVKYCFRKNDHVVIAMPYLEHESFLDILNSLSFQEVREYMLNLFKALKRIHQFGIVHRDVKPSNFLYNRRLKKYALVDFGLAQGTHDTKIELLKFVQSEAQQERCSQNKSHIITGNKIPLSGPVPKELDQQSTTKASVKRPYTNAQIQIKQGKDGKVLSLLFLKYRHCFRNILLQPTEGDRILG

SEQ ID NO: 2526 - DNA, 928 bp, Homo sapiens
gatcgactcggtaggtggggatctcttggagacggcgacccaggcatctggggagccacagaagtcgtactcccttaaaccctggcattttgcatctcaattggcttgtgatggaggcgtctttggggattcagatggatgagccaatggctttttctccccagcgtgaccggtttcaggctgaaggctctttaaaaaaaaacgagcagaattttaaacttgcaggtgttaaaaaagatattgagaagctttatgaagctgtaccacagcttagtaatgtgtttaagattgaggacaaaattggagaaggcactttcagctctgtttatttggccacagcacagttacaagtaggacctgaagagaaaattgctctaaaacacttgattccaacaagtcatcctataagaattgcagctgaacttcagtgcctaacagtggctggggggcaagataatgtcatgggagttaaatactgctttaggaagaatgatcatgtagttattgctatgccatatctggagcatgagtcgtttttggacattctgaattctctttcctttcaagaagtacgggaatatatgcttaatctgttcaaagctttgaaacgcattcatcagtttggtattgttcaccgtgatgttaagcccagcaattttttatataataggcgcctgaaaaagtatgccttggtagactttggtttggcccaaggaacccatgatacgaaaatagagcttcttaaatttgtccagtctgaagctcagcaggaaaggtgttcacaaaacaaatcccacataatcacaggaaacaagattccactgagtggcccagtacctaaggagctggatcagcagtccaccacaaaagcttctgttaaaagaccctacacaaatgcacaaattcagattaaacaaggaaaagacgg

SEQ ID NO: 2527 - protein, 271 aa, Homo sapiens; identical to SEQ ID NO: 2517

SEQ ID NO: 2528 - DNA, 3164 bp, Homo sapiens
gatcgactcggtaggtggggatctcttggagacggcgacccaggcatctggggagccacagaagtcgtactcccttaaaccctggcattttgcatctcaattggcttgtgatggaggcgtctttggggattcagatggatgagccaatggctttttctccccagcgtgaccggtttcaggctgaaggctctttaaaaaaaaacgagcagaattttaaacttgcaggtgttaaaaaagatattgagaagctttatgaagctgtaccacagcttagtaatgtgtttaagattgaggacaaaattggagaaggcactttcagctctgtttatttggccacagcacagttacaagtaggacctgaagagaaaattgctctaaaacacttgattccaacaagtcatcctataagaattgcagctgaacttcagtgcctaacagtggctggggggcaagataatgtcatgggagttaaatactgctttaggaagaatgatcatgtagttattgctatgccatatctggagcatgagtcgtttttggacattctgaattctctttcctttcaagaagtacgggaatatatgcttaatctgttcaaagctttgaaacgcattcatcagtttggtattgttcaccgtgatgttaagcccagcaattttttatataataggcgcctgaaaaagtatgccttggtagactttggtttggcccaaggaacccatgatacgaaaatagagcttcttaaatttgtccagtctgaagctcagcaggaaaggtgttcacaaaacaaatcccacataatcacaggaaacaagattccactgagtggcccagtacctaaggagctggatcagcagtccaccacaaaagcttctgttaaaagaccctacacaaatgcacaaattcagattaaacaaggaaaagacggaaaggagggatctgtaggcctttctgtccagcgctctgtttttggagaaagaaatttcaatatacacagctccatttcacatgagagccctgcagtgaaactcatgaagcagtcaaagactgtggatgtactgtctagaaagttagcaacaaaaaagaaggctatttctacaaaagttatgaatagtgctgtgatgaggaaaactgccagttcttgcccagctagcctgacctgtgactgctatgcaacagataaagtttgtagtatttgcctttcaaggcgtcagcaggttgcccctagggcaggtacaccaggattcagagcaccagaggtcttgacaaagtgccccaatcaaactacagcaattgacatgtggtctgcaggtgtcatatttctttctttgcttagtggacgatatccattttataaagcaagtgatgatttaactgctttggcccaaattatgacaattaggggatccagagaaactatccaagctgctaaaacttttgggaaatcaatattatgtagcaaagaagttccagcacaagacttgagaaaactctgtgagagactcaggggtatggattctagcactcccaagttaacaagtgatatacaagggcatgcttctcatcaaccagctatttcagagaagactgaccataaagcttcttgcctcgttcaaacacctccaggacaatactcagggaattcatttaaaaagggggatagtaatagctgtgagcattgttttgatgagtataataccaatttagaaggctggaatgaggtacctgatgaagcttatgacctgcttgataaacttctagatctaaatccagcttcaagaataacagcagaagaagctttgttgcatccattttttaaagatatgagcttgtgataatggatcttcatttaatgtttactgttatgaggtagaataaaaaagaatactttgtaatagccacaagttcttgtttagagaccagagcaggattaataatttattttaacattttagtgtttggtggcacattctaaaatatagattaagaatacttaaaatgcctgggatagttcttgggactaacaacatgatcttctttgagttaaacctacctaagtagattttaggtgggttcctattaggtcagatttttagcttccctaattacctttcactgacatatacagaaaaaggagcagttttagttttaattaattaaaattaacagatgtgatgaggattaaatgaatcaaaagacttaatttgtagattcttttagagttatgagctaggtatagtttggggaaactcaacctggtgctggtgctcttaacaattttgtaaataaagaagataatttccttttctagaggtacatattaggccttttatgaacactaaaacaatgaggaaatgttggtcatggggcaaagtatcacttaaaattgaattcatccatttttaaaaaacacttcatgaaagcattctggtgtgaattgccatttttttcttactggcttctcaattttcttccttctctgcccctacctaaaacattctcctcggaaattacatggtgctgaccacaaagtttctggatgttttattaaatattgtacgtgtttacagttgggaatttaaaataatacatacactggttgataaagggaagctgcaggaccaaggtgaagattgatagtccaaatgcttttcttttttgagttgtatattttttcacaccatcttagatataattaggtagctgctgaaaggaaaagtgaatacagaattgacggtattattggagatttttcctctgcgtagagccatccagatctctgtatcctgttttgactaagtcttaggtgggttgggaagacagataatgaagtaggcaaagagaaaaggacccaagatagaggtttatattcagaaatggtatatatcaatgacagcatatcaaacttcctatgggaaaaagtctggtgggtggtcagctgacagatttcccatttagtagtcatagaatacagaaatagtttagggacatgtattcattttgttattttgagcattgataggtcagtatatctacctaatctgtttggtaagtataggatatataaaccattaccattgatctgtcttatgccataatcttaaaaaaaatttgaatgctcttgaatttgtatattcaataaagttatccttttatatttttta

SEQ ID NO: 2529 - protein, 574 aa, Homo sapiens; identical to SEQ ID NO: 52

SEQ ID NO: 2530 - DNA, 2011 bp, Homo sapiens
agacttacatagttcaactttaacataactagagaaatcttatttcatcataaggcgtcagcaggttgcccctagggcaggtacaccaggattcagagcaccagaggtcttgacaaagtgccccaatcaaactacagcaattgacatgtggtctgcaggtgtcatatttctttctttgcttagtggacgatatccattttataaagcaagtgatgatttaactgctttggcccaaattatgacaattaggggatccagagaaactatccaagctgctaaaacttttgggaaatcaatattatgtagcaaagaagttccagcacaagacttgagaaaactctgtgagagactcaggggtatggattctagcactcccaagttaacaagtgatatacaagggcatgcttctcatcaaccagctatttcagagaagactgaccataaagcttcttgcctcgttcaaacacctccaggacaatactcagggaattcatttaaaaagggggatagtaatagctgtgagcattgttttgatgagtataataccaatttagaaggctggaatgaggtacctgatgaagcttatgacctgcttgataaacttctagatctaaatccagcttcaagaataacagcagaagaagctttgttgcatccattttttaaagatatgagcttgtgataatggatcttcatttaatgtttactgttatgaggtagaataaaaaagaatactttgtaatagccacaagttcttgtttagagaccagagcaggattaataatttattttaacattttagtgtttggtggcacattctaaaatatagattaagaatacttaaaatgcctgggatagttcttgggactaacaacatgatcttctttgagttaaacctacctaagtagattttaggtgggttcctattaggtcagatttttagcttccctaattacctttcactgacatatacagaaaaaggagcagttttagttttaattaattaaaattaacagatgtgatgaggattaaatgaatcaaaagacttaatttgtagattcttttagagttatgagctaggtatagtttggggaaactcaacctggtgctggtgctcttaacaattttgtaaataaagaagataatttccttttctagaggtacatattaggccttttatgaacactaaaacaatgaggaaatgttggtcatggggcaaagtatcacttaaaattgaattcatccatttttaaaaaacacttcatgaaagcattctggtgtgaattgccatttttttcttactggcttctcaattttcttccttctctgcccctacctaaaacattctcctcggaaattacatggtgctgaccacaaagtttctggatgttttattaaatattgtacgtgtttacagttgggaatttaaaataatacatacactggttgataaagggaagctgcaggaccaaggtgaagattgatagtccaaatgcttttcttttttgagttgtatattttttcacaccatcttagatataattaggtagctgctgaaaggaaaagtgaatacagaattgacggtattattggagatttttcctctgcgtagagccatccagatctctgtatcctgttttgactaagtcttaggtgggttgggaagacagataatgaagtaggcaaagagaaaaggacccaagatagaggtttatattcagaaatggtatatatcaatgacagcatatcaaacttcctatgggaaaaagtctggtgggtggtcagctgacagatttcccatttagtagtcatagaatacagaaatagtttagggacatgtattcattttgttattttgagcattgataggtcagtatatctacctaatctgtttggtaagtataggatatataaaccattaccattgatctgtcttatgccataatcttaaaaaaaatttgaatgctcttgaatttgtatattcaataaagttatccttttatatttttta

SEQ ID NO: 2531 - protein, 178 aa, Homo sapiens [sequence omitted]

SEQ ID NO: 2532 - DNA, 2708 bp, Homo sapiens
tgacatgcctgtaatcccagctactcaagaggctgaagcatgagaattgcttgaacctgggaggcagagattgcagtgagctgagactgtgccactgcactctagtctgggccacagagggagaccttgtctcaaaaagaaaaaaagaaaagaatataattggattgttcgtaacacaaaggataaatgcttgagggaatggataccctgttttccaggatgtgattattacacactgcatgcctgtatcaaaacatcttatataccccatcaatatatacacctactgtgtactcagaaaaattaaagtcttcacagtcacaaaaaaataaaaaagtaattttttaaaagtttctatagcagtagttggtgctagtgtcagctgaagaagagcttctaatgttcattacttttcactaaaatgaaagcactttgaccagtatggtatgtaattctcaaggatcattcagattttttcccacatagctatttttggattccttttgatcctataaaatgtgcgtttacttagtgtttcctagtgattaaatatccttttaaatttaccaacacgttgctcaagaaagaaaacatattttgcagtgaggattctcagtcctggttgtacattaaaatcacctgaggaacttttttaaaacattgatgcctgagccctacttcagaactgttcaatcaaaatctttgggtctgggcatctgaaatttttaaggctcccaaggtgattctaatgcataataaatgttgaggactattgatttagatgataaaattatagatttgaaatttatttttaaaatttgtcttctgttgcagcaattgacatgtggtctgcaggtgtcatatttctttctttgcttagtggacgatatccattttataaagcaagtgatgatttaactgctttggcccaaattatgacaattaggggatccagagaaactatccaagctgctaaaacttttgggaaatcaatattatgtagcaaagaagttccagcacaagacttgagaaaactctgtgagagactcaggggtatggattctagcactcccaagttaacaagtgatatacaagggcatgcttctcatcaaccagctatttcagagaagactgaccataaagcttcttgcctcgttcaaacacctccaggacaatactcagggaattcatttaaaaagggggatagtaatagctgtgagcattgttttgatgagtataataccaatttagaaggctggaatgaggtacctgatgaagcttatgacctgcttgataaacttctagatctaaatccagcttcaagaataacagcagaagaagctttgttgcatccattttttaaagatatgagcttgtgataatggatcttcatttaatgtttactgttatgaggtagaataaaaaagaatactttgtaatagccacaagttcttgtttagagaccagagcaggattaataatttattttaacattttagtgtttggtggcacattctaaaatatagattaagaatacttaaaatgcctgggatagttcttgggactaacaacatgatcttctttgagttaaacctacctaagtagattttaggtgggttcctattaggtcagatttttagcttccctaattacctttcactgacatatacagaaaaaggagcagttttagttttaattaattaaaattaacagatgtgatgaggattaaatgaatcaaaagacttaatttgtagattcttttagagttatgagctaggtatagtttggggaaactcaacctggtgctggtgctcttaacaattttgtaaataaagaagataatttccttttctagaggtacatattaggccttttatgaacactaaaacaatgaggaaatgttggtcatggggcaaagtatcacttaaaattgaattcatccatttttaaaaaacacttcatgaaagcattctggtgtgaattgccatttttttcttactggcttctcaattttcttccttctctgcccctacctaaaacattctcctcggaaattacatggtgctgaccacaaagtttctggatgttttattaaatattgtacgtgtttacagttgggaatttaaaataatacatacactggttgataaagggaagctgcaggaccaaggtgaagattgatagtccaaatgcttttcttttttgagttgtatattttttcacaccatcttagatataattaggtagctgctgaaaggaaaagtgaatacagaattgacggtattattggagatttttcctctgcgtagagccatccagatctctgtatcctgttttgactaagtcttaggtgggttgggaagacagataatgaagtaggcaaagagaaaaggacccaagatagaggtttatattcagaaatggtatatatcaatgacagcatatcaaacttcctatgggaaaaagtctggtgggtggtcagctgacagatttcccatttagtagtcatagaatacagaaatagtttagggacatgtattcattttgttattttgagcattgataggtcagtatatctacctaatctgtttggtaagtataggatatataaaccattaccattgatctgtcttatgccataatcttaaaaaaaatttgaatgctcttgaatttgtatattcaataaagttatccttttatatttttta

SEQ ID NO: 2533 - protein, 178 aa, Homo sapiens [sequence omitted]

SEQ ID NO: 2534 - DNA, 1344 bp, Homo sapiens
caatactcagggaattcatttaaaaagggggatagtaatagctgtgagcattgttttgatgagtataataccaatttagaaggctggaatgaggtacctgatgaagcttatgacctgcttgataaacttctagatctaaatccagcttcaagaataacagcagaagaagctttgttgcatccattttttaaagatatgagcttgtgataatggatcttcatttaatgtttactgttatgaggtagaataaaaaagaatactttgtaatagccacaagttcttgtttagagaccagagcaggattaataatttattttaacattttagtgtttggtggcacattctaaaatatagattaagaatacttaaaatgcctgggatagttcttgggactaacaacatgatcttctttgagttaaacctacctaagtagattttaggtgggttcctattaggtcagatttttagcttccctaattacctttcactgacatatacagaaaaaggagcagttttagttttaattaattaaaattaacagatgtgatgaggattaaatgaatcaaaagacttaatttgtagattcttttagagttatgagctaggtatagtttggggaaactcaacctggtgctggtgctcttaacaattttgtaaataaagaagataatttccttttctagaggtacatattaggccttttatgaacactaaaacaatgaggaaatgttggtcatggggcaaagtatcacttaaaattgaattcatccatttttaaaaaacacttcatgaaagcattctggtgtgaattgccatttttttcttactggcttctcaattttcttccttctctgcccctacctaaaacattctcctcggaaattacatggtgctgaccacaaagtttctggatgttttattaaatattgtacgtgtttacagttgggaatttaaaataatacatacactggttgataaagggaagctgcaggaccaaggtgaagattgatagtccaaatgcttttcttttttgagttgtatattttttcacaccatcttagatataattaggtagctgctgaaaggaaaagtgaatacagaattgacggtattattggagatttttcctctgcgtagagccatccagatctctgtatcctgttttgactaagtcttaggtgggttgggaagacagataatgaagtaggcaaagagaaaagaaatagtttagggacatgtattcattttgttattttgagcattgataggtcagtatatctacctaatctgtttggtaagtataggatatataaaccattaccattgatctgtcttatgccataa

SEQ ID NO: 2535 - protein, 40 aa, Homo sapiens [sequence omitted]

SEQ ID NO: 2536 - DNA, 463 bp, Homo sapiens
aggaaccaaggccagctgagaagaacccatttgcaaagcactttgcagatcaataaattcgactgattttagagcggtccctagggaaaggcgagcaaatgggccaaggagagatgctgcccatccaacaagccctggccaagcagaaaggggcgaggcggcgcgggaggcgagttacctggaggactcggcggtgaagctgccgccgtccagcagccgcatcttgcagaagaggaccccattgacgaagggcactgaggagagctcctcgagctcgaagtccaccttaaacttaaacttcttcttcttcatcatcgtgagagccaggcgcctgcaagctgggcgcacggccgggcgccgccgcctccgccgccgctgccgcccgtctgggagtcgggagaggcgaggctcgaggaaccgccgcctcagcgcctcgggggtcgggggcgcccccagcggccgc

SEQ ID NO: 2537 - protein, 32 aa, Homo sapiens
MGQGEMLPIQQALAKQKGARRRGRRVTWRTRR

SEQ ID NO: 2538 - DNA, 1585 bp, Homo sapiens
tcccgactcccagacgggcggcagcggcggcggaggcggcggcggcggcggcggcgagctgagcaccaaaagggcgctcacctccccgggcgagctgcagcacgaccgctccccgcgggcggtcggggtccgcgccgcagctgccgccgcgttccggcccaggctgccgcgagaggcggcggcagcggccccggccgcggccggcctgcggcgccccccggccgcgcccccgcgcacagctcgcggccccggccatggggctgggctgatccggggctcggccaagctgaggcggcggcgcccggccgtgcgcccagcttgcaggcgcctggctctcacgatgatgaagaagaagaagtttaagtttaaggtggacttcgagctcgaggagctctcctcagtgcccttcgtcaatggggtcctcttctgcaagatgcggctgctggacggcggcagcttcaccgccgagtcctccagggaggtggtacaagcaaactgtgttcgctggagaaagaagttctcatttatgtgcaaaatgagtgcaagtgctgccacaggcatcctagatccttgtatctacagagtatccgtgaggaaggaattaaaaggtggaaaagcttatgcaaagctgggctttgcagatctaaacctggcagagtttgctggatcaggaaataccactcgccgctgtttactggaaggctatgataccaaaaatacaagacaggataattccattcttaaagttttgatcagtatgcaactgatgtctggtgacccatgttttaaaacgcctccctccacttcaatgtctataccaattgctggtgaatctgaatctttgcaagaagatagaaaaggtggagagactctcaaagtgcatcttggaatagcagatctttcagcaaagagtgcctctgttccagacgaacttggtgcctgtggacattctagaacatcaagctatgcaagtcagcagtcaaaagtatcagggtatagcacgtgtcactcccggtcatctagtttctctgagctctgccacaggagaaatacctcagtgggaagcacatcaacaggagttgaaagtattctagagccatgtgatgaaattgagcagaaaatcgctgagccaaatcttgatacagctgataaagaagatacagcttcagaaaaactcagcagatgcccagtgaaacaagattctgtagaatctcagctgaagcgagttgatgacaccagggtggatgcagatgacattgtagagaaaatattacaaagtcaagacttcagcctagattccagtgcggaagaagaaggactaaggctatttgtgggtcctgggggaagtacaacctttggcagtcatcatcttccaaatagtgccctggaagctccctccttgctttgagttgtccccgcctttctggatggaaccaatgtacttcttacatatattgattaatgtctcatgtctccctaaaatgtataaaaccaagatgtgccccgaccaccctgagtacatgttgtcaggacctcctgagactgtgtcatgggagcgtgtcctcaaccttggcaaaataaactt

SEQ ID NO: 2539 - protein, 355 aa, Homo sapiens
MMKKKKFKFKVDFELEELSSVPFVNGVLFCKMRLLDGGSFTAESSREVVQANCVRWRKKFSFMCKMSASAATGILDPCIYRVSVRKELKGGKAYAKLGFADLNLAEFAGSGNTTRRCLLEGYDTKNTRQDNSILKVLISMQLMSGDPCFKTPPSTSMSIPIAGESESLQEDRKGGETLKVHLGIADLSAKSASVPDELGACGHSRTSSYASQQSKVSGYSTCHSRSSSFSELCHRRNTSVGSTSTGVESILEPCDEIEQKIAEPNLDTADKEDTASEKLSRCPVKQDSVESQLKRVDDTRVDADDIVEKILQSQDFSLDSSAEEEGLRLFVGPGGSTTFGSHHLPNSALEAPSLL

SEQ ID NO: 2540 - DNA, 5585 bp, Homo sapiens
gcggcagcggcggcggaggcggcggcggcggcggcggcgagctgagcaccaaaagggcgctcacctccccgggcgagctgcagcacgaccgctccccgcgggcggtcggggtccgcgccgcagctgccgccgcgttccggcccaggctgccgcgagaggcggcggcagcggccccggccgcggccggcctgcggcgccccccggccgcgcccccgcgcacagctcgcggccccggccatggggctgggctgatccggggctcggccaagctgaggcggcggcgcccggccgtgcgcccagcttgcaggcgcctggctctcacgatgatgaagaagaagaagtttaagtttaaggtggacttcgagctcgaggagctctcctcagtgcccttcgtcaatggggtcctcttctgcaagatgcggctgctggacggcggcagcttcaccgccgagtcctccagggaggtggtacaagcaaactgtgttcgctggagaaagaagttctcatttatgtgcaaaatgagtgcaagtgctgccacaggcatcctagatccttgtatctacagagtatccgtgaggaaggaattaaaaggtggaaaagcttatgcaaagctgggctttgcagatctaaacctggcagagtttgctggatcaggaaataccactcgccgctgtttactggaaggctatgataccaaaaatacaagacaggataattccattcttaaagttttgatcagtatgcaactgatgtctggtgacccatgttttaaaacgcctccctccacttcaatgtctataccaattgctggtgaatctgaatctttgcaagaagatagaaaaggtggagagactctcaaagtgcatcttggaatagcagatctttcagcaaagagtgcctctgttccagacgaacttggtgcctgtggacattctagaacatcaagctatgcaagtcagcagtcaaaagtatcagggtatagcacgtgtcactcccggtcatctagtttctctgagctctgccacaggagaaatacctcagtgggaagcacatcaacaggagttgaaagtattctagagccatgtgatgaaattgagcagaaaatcgctgagccaaatcttgatacagctgataaagaagatacagcttcagaaaaactcagcagatgcccagtgaaacaagattctgtagaatctcagctgaagcgagttgatgacaccagggtggatgcagatgacattgtagagaaaatattacaaagtcaagacttcagcctagattccagtgcggaagaagaaggactaaggctatttgtgggtcctgggggaagtacaacctttggcagtcatcatcttccaaatagggtggggtctggagcttatgaacaagttgtgatcaaacgctagaagtcaagtcggtgaaaacatttccttgtggatttaagatgtgagtagttgatgtatcaaggcattttattcaagcacttaatagaaaatgaacctcaactatcaagaggaaagccaatgctggtttcttctctggaaggacccaccgccatcctgtaccagccaccaaaggggaacatctacatggcagtctccaggcactgtgccactgtgtgccttggaagcacctggcttctgtggtcactgcacatcataatgaaaagcctgctttttctttcagaacaccccagcggagaaaacagcattatatacatcggagtatcattttaggattcaagtgtaaaaatctgtgatcaagaggctcaatagatttgggctctatggtttggtttttttagtttgagagacagtacatgaatataacttaaaccctatagattttgtcaagatagttgtaattcctgttctggaaatcttccctattacactacctacagcattgtataaagtgtgggtgttcatgctttgggaaaatgttagactacaatttaaacatgtgatgtgcttattcataattctcagtgtatcagtcataaatgaaataacaagtgcatttaagtcagagatacgtgaatggatgtaatgccgttatgcagtatatattgttaattgtcattaatattagatgagctgcagaaccacccccaagcactacataaaagactcaaaataagtttaacacttactgtgttgggcaccctaacagaagagctatcttaactcattgaatattaagatctgctggtttcaggagtcaaaatgtagaaaaagaggagaattgtaatatggtcagaaacagagaagccttttctatgtaaattcagacttatctgaggctaacagttttccgaagtggtggtgggtagcagcatgacagctgcttgccatgactgatgcagactactaggtttccattttagctctctgtaggtactgttttcttccccactgtgtcgaaagtgatttgttttgaagcaagagtagaatataacatctatcaaatatagcttttaaaataagaatacctggtctggatccagttgagcagcacagcagataaaccttagagtttttctgttcttacatgacggtttccatgtggaaagatctaaactttcttggaatcactattagtgaagaaaaatgtagaatctgtataaccagtaattccccaattcttactttcaaagtcatatccaagaaagacaatatgtcagaatagaatgactttggtctaggtgttttcacgttggcaaaaataaggaggaaattatattattttaatatccaaatttaaaggtttggaaaattttgaatagttaatattagaacttatgttgctgttttttatatttcaaggattgagtattctgcattaatccaatactattccaacaaagagattctggaagtttttaaaaaatgataccctgttttatattttgaatgtagagagactctgagagagagaatgttctgagttatactttttattttttaagatttatttttaagaataaaacattgacctgaacattttagcctaaccaagggacttaagtggtaaagacttgcattatgtcttcatgtgaactgatccgttcattatatattatgggaaaaatcaaagaaagttttttatagagatatgaagatattatttagagagatatttattatgacattttttaaaaacatatttttctattttcaaaatattatttctaggctatatttttattggtgctgtgcaaatgattttgcagttttgaaaatgataaaactagattgtaagtggggttcagtgaggacattcatcagacacgtaagaggtgctgcaatcagggtgatgcccatcttactcatccttggctgcccttggtccgacacctctctatacaagactggttctcagtattttaaatggtacagaattctttttaaaaagtagagagattttgaaaagcataaaaatcatgcctttataatcttagcagccatcagatacaccttgatttatgtagtagtaaatataacaaatattttaataaatagaaacactgataaggaagaaaaaagaactaatgtctatgtcttctgtagtcagcaaaagtctggatccattttctattttgtgttccattggcacactttgtgttcaaatttcagtgcagtcctttcaaaatactcgctaagggttgcctaagtgtctgccttactttctgattgtccttttctgagagcatggttaagaacatcttaaccatatagctgttgaaaaaatctgtttattaaataacaagttcacttctgtttatgttttgagtttagaaaatttgacttgaaaatttagattattaataaatttatttttaaatattaaagtcaaatttcaaatcacccagtgttgaagaatttgcagatgtatacaatactttttctaattatgtcttttctatctccatgcctggctttttctaattatatcctagagaaaaagactaatggtatttcaaagctgtgtatttgtgacgagataaagaagagtcttaaacatcttgtttgggagaatgcacaggccagtcaggagacccacctcctcctgtgccctgagctgctgagacccgacagatcatgaaggctagtaaagggcagagaaggccctgagccatcagtttacactcgaattgttgactcccctttgtggtgtttttgaaggctgcttataccaacagctaatgtggattagtgcttatgatcttgaaaaagtcttgaccaagaatcctaaactccaccactcctcccattccagcttaacactatcagaataatatccaaattccagatttttttcttttttacttttttttcttccttttttaagagagacagtgtcttgctcggtcacctaggctggagtgtagtggcgcaatcgttgctcactacagcctcccaactcccaggctcaaatgagcctcccaccttggcctcccaaagtgctaggaccacaggcatgagccactgtgcccagcctagtttcttttctgtatgctttttttacaaaactgtgagccacagaggttgaccacttagccaatttgttgctagaagggagaaaaaaatctccaactagcctccagacaaaacatactcaaattcaaacagcagttagttttaattaacatacagaagtaattttagactttcagatttctatgctgactagaacactttgcaggctgaagctgacattattaccaaatacttcatttaagtacatactctgaagtgtcaggcttccagtatatatagcaacgctctgagagacaaactgggctcatatgacggggttgcattttattttcttaacaggtctttaaattgggcagttctgaaattctgtttggtcagttctagatggtacgtcatgtgaatgcaaccaagcactgtagttgaaattgtgttatgccactactcatgttgtcttaggtactacgcataatgttaatagctgagatgttaaagaatttgaagtctaaaatataaaagatgaatatacccatattaatcctatgttaagatgctctggaaataaaggccttattcccttacacatgcgatttttgtaagataatatatacacagtatattttaaatgtttgtgtgggtggtctgtgtagttactccccatacaacaaagctgacaaaatttttaatttacacaatgtattctgcattttcaaatgtttatgttgtgtatatagcaaagaaattatcttactgatatgcgttgaccaaatcccatggagaaaagacatctcatttgaggttccccttcctctcatgtgtttgattttttggaaggtgatacagtatgtgggtaaccatgcaaatgtttatgaataactttactgaagtgattccatccgtattctgttctaatacttggagaatgaccttcatatttatatattttatttctttgtttcaactatccagtgataattcaggaaatgtttccttttttttttttttttacaaaaactttttatttgtaaaatgtttgtaataatgtaaaggtgaacatgttcaataaaaatcatatattaaaagtttaga

SEQ ID NO: 2541 - protein, 360 aa, Homo sapiens; identical to SEQ ID NO: 57

SEQ ID NO: 2542 - DNA, 8572 bp, Homo sapiens
aaaaaaaaaaaaaaaaacccttttcttttatgaattttattcaagttttgaaaagatgcttatacgttatttgctgatctttgttactttcactctcaaaggggtaacattaccaagcagtctatgctaaggcttactaagctcaccaatcaataactattgtaaactttgaggctcccccacaactccagttcgtaaatgtttatttacaggcctccctccacttcaatgtctataccaattgctggtgaatctgaatctttgcaagaagatagaaaaggtggagagactctcaaagtgcatcttggaatagcaggtatggatgtgtggcttactggttttttaatttgtgagagacgacttgatgccctaaaaattctttgggaattgtgtgggtatttgacttgaaacaggccaataagaatcaacagttttaattatgtaattcttggttgatccagtgctttattttgtctaaagtattgtgctctgacagattaaaaactagatgttacaatgacactctcctcactgtatgcatctactccccacaggtacaagagaatactacaggattttttccatttttcccgttccattaccctgcaacttctgcaaagcagcttctgcctctcgggtgtcgctcctcttccatgaatcgctttccctctgtcagtggttctcaagccctagtgtgcatcagagtctcctggagggcttgtgaaaacacaggttgctggcggcagcagccagagtgttcgattcagtagatctgggttagagcctgaagttttgtatcactaaggcattcccacaagacgctgatgctgctagtccctgaccacaccttgagatccacatttccagacacacttctggcagcagtcagaatctgctccagaagtaaaagcatggtggggataatgtcaaggttgcaggaggaaaaggacttaggagcttccttctttcttcagtattatgtgaacaggatgtattgtttgaaagaagggaaaggtgaagttatataattaaccctttcactgccttttaaaatatgcaaatatttggtttcttataaataatggtgactctgaaatttcctgttttgggatcagtggatcttttgggaacttgtaaccattccattagctccttctcttcagcatgtaaatatgctgatttctttctcctactgaaaaaatgaaaacaaaaactccttagccctacatccttctctatctactgcactcccttagactccagcaggctggcgcatgtgctcacatgctctctctcttcccccactctgccccaaatatagatacatctctctctctctctctgtgtgtgtgtgtgtgtgtgtgtgtgtgtgtgtgtgtgtgtgtgtgtgtgtgtggagagagagagagaaagatcagcaagagatgatatatgtaccacacacttcttatagccaaacttctagaaagaatatactgtccatttattcctaaacacattagcagtctggcttccatcatctgccctctcttgctgctatcccctgatacatgattgtcaagtcctgtggacatttgttctggtcttatctgatggccagttattcattcttgatgctttctcttcccttggctcctacctctctgatctttccttttctagcttcttagaggcttcttcatcttcctccaacttccctttacatattgatgttccaaagggtttggtcccctcacttccttgagcaataccatctatacccttggctttatctatcacataaatgtaaatgtgattctgtgatgtacatgtgatcaaatgctttggggaaaggtccacttcataccaaatgtaacactgaaatccatctgtttctctttctacccagccagagtctaactaagttcttcatgatcaggtcttatttatttctgtatccccagcagaaggcccgggacacagtagatgagtgactgttgaataggcatcctcaggtgtctctaattccgcatatctagcacaagtcttcctaccttttcctcctgtcttttctacttcagttttcctgacacaaacttctcctttcttattgagtcctgctatttgtgcctatgaaacatctctccctctcagctggattattatgaaaacctacactcttatgccccctgtttatcctgttgccagagtgttcttcccaaaatgtagatttgatcatgtcacaccctttcttaaagccactgaactgttttcttctttaaactcatagaaggttcttcatcaacaggcatctactcatctttctagccccttttccctcggttattatactccactaccctatatgccaactttaccaaacgatctgcttccctacaaagaaggcatgctcttcccggtgcctttccttgctcatctagctcaggagttcctatacgtcgctcaagtcctggggttaacctcctctgttaccaggttgtgtcagatgcactgtcctttggagctcttaatagctgcttttttgtgcttgtatttttgtacttaccacattgtataagttttgcttctacctctaaactctaagcatgtattttgtcttattttgtacttcctataccttgtacagtattaggcacctgactgggtaaaatattaataaatattgattgaatgaataaattttgaaaaccagaagatatgtggatgacttaagatctgggccaaacccagaagtaaagagcgctgcataactcgatatgaaccaactttttgagttcagattttgctgaatgtttgcttttggaccacttatactctgtccagaaatgagaaacctttgcagaaggaccaggttactccagtattttccttgttttgcagcatttgttggtccaactgcatgcagtatcatttatagaatagctgctataatagctatgttactcaattgctttccttctgcttctaagttaaaaacagttcttgtttccaaatatgattgtgccctagggaaaatggtcacagttctgcattctctggaagaagcctggttctgaaaatatgtaattggcacctggaacatacacatgatcagaaactattagaaatggctttgacactgccttttgtacatttactttgaatatgaatactataatcactttcttaagaacttttactctcagtgctacgtcccatgctgtgttgatttaagccacagacattgcccaaattatagcctagcactaacaacactaacattaaagtaatagagtactctttagcttgctgttgtgatggatttttaaggaagcagtatttccttagaaaccacattaaaacctaccaattttgtgaacatttataagaatacatctgagtcatttttgttagagaaatactgaacactaaaactgtagcagttttaagatagagtgctgttaaatgttttgaacaacaggagtttattgcatagactgaactaataaaggactgaaataattttttaatgttatgaaaaatataattcttcagcgaactaaggtatttaaatactttgtatatcttgcaatacagttacttccattgcactgacttaaaaggatgtccctcattttgtaacttattgttttgataatgaacttggcagagtttataaagtctgcagagtagaatacaaattgaccattaactttttggcaataagaatgacatcatgttatgacatattacagatctttcagcaaagagtgcctctgttccagacgaacttggtgcctgtggacattctagaacatcaagctatgcaagtcagcagtcaaaagtatcaggtagaggctaacagtgaagttgaattccttattgttccaaagggacttgaaactgctgtggtgtgggggaacgatgtcagattgcagagtgtttgatatgagtattatatccaaggtgattttctctgacagggtatagcacgtgtcactcccggtcatctagtttctctgagctctgccacaggagaaatacctcagtgggaagcacatcaacaggagttgaaagtattctagagccatgtgatgaaattgagcagaaaatcgctgagccaaatcttgatacagctgataaagaagatacagcttcagaaaaactcagcagatgcccagtgaaacaagattctgtagaatctcagctgaagcgagttgatgacaccagggtggatgcagatgacattgtagagaaaatattacaaagtcaagacttcagcctagattccagtgcggaagaagaaggactaaggctatttgtgggtcctgggggaagtacaacctttggcagtcatcatcttccaaatagggtggggtctggagcttatgaacaagttgtgatcaaacgctagaagtcaagtcggtgaaaacatttccttgtggatttaagatgtgagtagttgatgtatcaaggcattttattcaagcacttaatagaaaatgaacctcaactatcaagaggaaagccaatgctggtttcttctctggaaggacccaccgccatcctgtaccagccaccaaaggggaacatctacatggcagtctccaggcactgtgccactgtgtgccttggaagcacctggcttctgtggtcactgcacatcataatgaaaagcctgctttttctttcagaacaccccagcggagaaaacagcattatatacatcggagtatcattttaggattcaagtgtaaaaatctgtgatcaagaggctcaatagatttgggctctatggtttggtttttttagtttgagagacagtacatgaatataacttaaaccctatagattttgtcaagatagttgtaattcctgttctggaaatcttccctattacactacctacagcattgtataaagtgtgggtgttcatgctttgggaaaatgttagactacaatttaaacatgtgatgtgcttattcataattctcagtgtatcagtcataaatgaaataacaagtgcatttaagtcagagatacgtgaatggatgtaatgccgttatgcagtatatattgttaattgtcattaatattagatgagctgcagaaccacccccaagcactacataaaagactcaaaataagtttaacacttactgtgttgggcaccctaacagaagagctatcttaactcattgaatattaagatctgctggtttcaggagtcaaaatgtagaaaaagaggagaattgtaatatggtcagaaacagagaagccttttctatgtaaattcagacttatctgaggctaacagttttccgaagtggtggtgggtagcagcatgacagctgcttgccatgactgatgcagactactaggtttccattttagctctctgtaggtactgttttcttccccactgtgtcgaaagtgatttgttttgaagcaagagtagaatataacatctatcaaatatagcttttaaaataagaatacctggtctggatccagttgagcagcacagcagataaaccttagagtttttctgttcttacatgacggtttccatgtggaaagatctaaactttcttggaatcactattagtgaagaaaaatgtagaatctgtataaccagtaattccccaattcttactttcaaagtcatatccaagaaagacaatatgtcagaatagaatgactttggtctaggtgttttcacgttggcaaaaataaggaggaaattatattattttaatatccaaatttaaaggtttggaaaattttgaatagttaatattagaacttatgttgctgttttttatatttcaaggattgagtattctgcattaatccaatactattccaacaaagagattctggaagtttttaaaaaatgataccctgttttatattttgaatgtagagagactctgagagagagaatgttctgagttatactttttattttttaagatttatttttaagaataaaacattgacctgaacattttagcctaaccaagggacttaagtggtaaagacttgcattatgtcttcatgtgaactgatccgttcattatatattatgggaaaaatcaaagaaagttttttatagagatatgaagatattatttagagagatatttattatgacattttttaaaaacatatttttctattttcaaaatattatttctaggctatatttttattggtgctgtgcaaatgattttgcagttttgaaaatgataaaactagattgtaagtggggttcagtgaggacattcatcagacacgtaagaggtgctgcaatcagggtgatgcccatcttactcatccttggctgcccttggtccgacacctctctatacaagactggttctcagtattttaaatggtacagaattctttttaaaaagtagagagattttgaaaagcataaaaatcatgcctttataatcttagcagccatcagatacaccttgatttatgtagtagtaaatataacaaatattttaataaatagaaacactgataaggaagaaaaaagaactaatgtctatgtcttctgtagtcagcaaaagtctggatccattttctattttgtgttccattggcacactttgtgttcaaatttcagtgcagtcctttcaaaatactcgctaagggttgcctaagtgtctgccttactttctgattgtccttttctgagagcatggttaagaacatcttaaccatatagctgttgaaaaaatctgtttattaaataacaagttcacttctgtttatgttttgagtttagaaaatttgacttgaaaatttagattattaataaatttatttttaaatattaaagtcaaatttcaaatcacccagtgttgaagaatttgcagatgtatacaatactttttctaattatgtcttttctatctccatgcctggctttttctaattatatcctagagaaaaagactaatggtatttcaaagctgtgtatttgtgacgagataaagaagagtcttaaacatcttgtttgggagaatgcacaggccagtcaggagacccacctcctcctgtgccctgagctgctgagacccgacagatcatgaaggctagtaaagggcagagaaggccctgagccatcagtttacactcgaattgttgactcccctttgtggtgtttttgaaggctgcttataccaacagctaatgtggattagtgcttatgatcttgaaaaagtcttgaccaagaatcctaaactccaccactcctcccattccagcttaacactatcagaataatatccaaattccagatttttttcttttttacttttttttcttccttttttaagagagacagtgtcttgctcggtcacctaggctggagtgtagtggcgcaatcgttgctcactacagcctcccaactcccaggctcaaatgagcctcccaccttggcctcccaaagtgctaggaccacaggcatgagccactgtgcccagcctagtttcttttctgtatgctttttttacaaaactgtgagccacagaggttgaccacttagccaatttgttgctagaagggagaaaaaaatctccaactagcctccagacaaaacatactcaaattcaaacagcagttagttttaattaacatacagaagtaattttagactttcagatttctatgctgactagaacactttgcaggctgaagctgacattattaccaaatacttcatttaagtacatactctgaagtgtcaggcttccagtatatatagcaacgctctgagagacaaactgggctcatatgacggggttgcattttattttcttaacaggtctttaaattgggcagttctgaaattctgtttggtcagttctagatggtacgtcatgtgaatgcaaccaagcactgtagttgaaattgtgttatgccactactcatgttgtcttaggtactacgcataatgttaatagctgagatgttaaagaatttgaagtctaaaatataaaagatgaatatacccatattaatcctatgttaagatgctctggaaataaaggccttattcccttacacatgcgatttttgtaagataatatatacacagtatattttaaatgtttgtgtgggtggtctgtgtagttactccccatacaacaaagctgacaaaatttttaatttacacaatgtattctgcattttcaaatgtttatgttgtgtatatagcaaagaaattatcttactgatatgcgttgaccaaatcccatggagaaaagacatctcatttgaggttccccttcctctcatgtgtttgattttttggaaggtgatacagtatgtgggtaaccatgcaaatgtttatgaataactttactgaagtgattccatccgtattctgttctaatacttggagaatgaccttcatatttatatattttatttctttgtttcaactatccagtgataattcaggaaatgtttccttttttttttttttttacaaaaactttttatttgtaaaatgtttgtaataatgtaaaggtgaacatgttcaataaaaatcatatattaaaagtttaga

SEQ ID NO: 2543 - protein, 100 aa, Homo sapiens [sequence omitted]

SEQ ID NO: 2544 - DNA, 790 bp, Homo sapiens
agacagggtctcactatgttgcccaggctggtcttgaacttccatcctcaagcaatcctcctgccccatcttcctaaaatgctgagattacaggtttttaccacctcatacccaagcttacagcaggaaaggttctttaaacttgtgttggttaatgaggtgtcccaacaagtggaaagcttaagagtgagccacctgccaaggcggaaagaacaggctggggaacggggtgataagcccaaagacattggtggctcaaaggcccctgtcccatgctttggaccagtcttcacagaggttgagaaggccaagatagagaactctcccacacccttctgtgttggagataaatttttcgtacctctgcagagactccttgcgtatcccaagttgaaccgcttatgtgctaatgaagagatgatgagatcagtcattgctgactcaattcctctgagcagtgatggttctgcagtggtggctgacctgcgtaattattttgatgaacagtttgagttttgaaccatgtttatttcctgaaatttcagggtctcagcgatagttgtgctcacttagaatttagttttttttgtgtaatcctaattcaagtaatgtttttaaagtttcactgcaaaagtctatgttccaagccattggacagacctgcttgagatatggccagactgcagtgagccctgagaaagatatgagggtttaaaacgggtgctttcctttgattttggacttttttgttttctcaagaataaagaagttggatgtggtaatatgttaa

SEQ ID NO: 2545 - protein, 167 aa, Homo sapiens
MLPRLVLNFHPQAILLPHLPKMLRLQVFTTSYPSLQQERFFKLVLVNEVSQQVESLRVSHLPRRKEQAGERGDKPKDIGGSKAPVPCFGPVFTEVEKAKIENSPTPFCVGDKFFVPLQRLLAYPKLNRLCANEEMMRSVIADSIPLSSDGSAVVADLRNYFDEQFEF

SEQ ID NO: 2546 - DNA, 1421 bp, Homo sapiens
gctggcggctccgcgacgagctttgttttttcggttgggcatgctgcttaccgcaggatgatggaagcgacggcccgtacaaagacagaagcgttggtttcatgcagtagtgtggttgacggtaattttgaagaagttcccagggagacggcaattcagtttaaacctccactatacagacagcggtaccagttcgttaaaaatttagtggatcaacatgagcctaagaagggattcgttagctcctttcctgggggattttctgaaacctcgggatctgaatttgaccatcacattgtatcatggctccgttgtggagagagactctcgtttgcttggatttgacttgataacgtgtattgaattaatagaacatttggattcaggtgatctggccagatttcctgaagtggtatttgggtacctgtctccatccatgattgtcatcagcacaccaaactctgaattcaatcccctgtttccatcagtgaccttaagagattcagatcataaatttgagtggaccagaatggagtttcagacctgggctttatatgtggcaaatcgctatgattactctgtggagtttactggtgtcggggaaccaccagctggagctgagaatgttggatactgtacccagataggaatcttccggaaaaatggaggaaaggcaacagaatcatgtctttcagagcagcatgatcagcatgtttataaagctgtttttaccacctcatacccaagcttacagcaggaaaggttctttaaacttgtgttggttaatgaggtgtcccaacaagtggaaagcttaagagtgagccacctgccaaggcggaaagaacaggctggggaacggggtgataagcccaaagacattggtggctcaaaggcccctgtcccatgctttggaccagtcttcacagaggttgagaaggccaagatagagaactctcccacacccttctgtgttggagataaatttttcgtacctctgcagagactccttgcgtatcccaagttgaaccgcttatgtgctaatgaagagatgatgagatcagtcattgctgactcaattcctctgagcagtgatggttctgcagtggtggctgacctgcgtaattattttgatgaacagtttgagttttgaaccatgtttatttcctgaaatttcagggtctcagcgatagttgtgctcacttagaatttagttttttttgtgtaatcctaattcaagtaatgtttttaaagtttcactgcaaaagtctatgttccaagccattggacagacctgcttgagatatggccagactgcagtgagccctgagaaagatatgagggtttaaaacgggtgctttcctttgattttggacttttttgttttctcaagaataaagaagttggatgtggtaatatgttaa

SEQ ID NO: 2547 - protein, 310 aa, Homo sapiens [sequence omitted]

SEQ ID NO: 2548 - DNA, 1754 bp, Homo sapiens
aggttggcgagccccgcggggaggccgaggcgcgggtgcgggcgccggcgtagccgcggcggtagcgtcacgcagcgaggccgtgcgtgcgcgggcgtcagggcggcgctgagttgaggacgctggcggctccgcgacgagctttgttttttcggttgggcatgctgcttaccgcaggatgatggaagcgacggcccgtacaaagacagaagcgttggtttcactgagtcagtgctgattctctcaaatagagcttgaaggataaatcttcatttttgtttcaacaaaacttcgaaacaaaatggaagaaaataatctacagtgcagtagtgtggttgacggtaattttgaagaagttcccagggagacggcaattcagtttaaacctccactatacagacagcggtaccagttcgttaaaaatttagtggatcaacatgagcctaagaaggttgcagacctgggatgtggtgatacttcactcttaaggctgctaaaagtcaatccatgcattgaattgcttgttggagtagatattaatgaggataaattacgatggagaggggattcgttagctcctttcctgggggattttctgaaacctcgggatctgaatttgaccatcacattgtatcatggctccgttgtggagagagactctcgtttgcttggatttgacttgataacgtgtattgaattaatagaacatttggattcaggtgatctggccagatttcctgaagtggtatttgggtacctgtctccatccatgattgtcatcagcacaccaaactctgaattcaatcccctgtttccatcagtgaccttaagagattcagatcataaatttgagtggaccagaatggagtttcagacctgggctttatatgtggcaaatcgctatgattactctgtggagtttactggtgtcggggaaccaccagctggagctgagaatgttggatactgtacccagataggaatcttccggaaaaatggaggaaaggcaacagaatcatgtctttcagagcagcatgatcagcatgtttataaagctgtttttaccacctcatacccaagcttacagcaggaaaggttctttaaacttgtgttggttaatgaggtgtcccaacaagtggaaagcttaagagtgagccacctgccaaggcggaaagaacaggctggggaacggggtgataagcccaaagacattggtggctcaaaggcccctgtcccatgctttggaccagtcttcacagaggttgagaaggccaagatagagaactctcccacacccttctgtgttggagataaatttttcgtacctctgcagagactccttgcgtatcccaagttgaaccgcttatgtgctaatgaagagatgatgagatcagtcattgctgactcaattcctctgagcagtgatggttctgcagtggtggctgacctgcgtaattattttgatgaacagtttgagttttgaaccatgtttatttcctgaaatttcagggtctcagcgatagttgtgctcacttagaatttagttttttttgtgtaatcctaattcaagtaatgtttttaaagtttcactgcaaaagtctatgttccaagccattggacagacctgcttgagatatggccagactgcagtgagccctgagaaagatatgagggtttaaaacgggtgctttcctttgattttggacttttttgttttctcaagaataaagaagttggatgtggtaatatgttaa

SEQ ID NO: 2549 - protein, 393 aa, Homo sapiens; identical to SEQ ID NO: 59

SEQ ID NO: 2550 - DNA, 1962 bp, Homo sapiens
gaaagcggaggctgactgggactccagccgccggccgcctcgcgtggagccttgctgctcctcttgccgccttccgctggccaggaccgtttttaggcctttgccacgcctcgggagcgccacgaactcaacagccgcccaagccgccttccggctcgcggtctgcggacgcgctcggagttgggggccttcgccaacagctgccgtaccgtgccgcgtcgcagccgcacgctagcggggtcaacggcgcggcaggcgcaggggtcctcgccaaggttcggaagaggaccttgaaaatggcttctgggcatgcgccacagcggccgttacgagacgcaaaaccgacgccttggaactgagagcctagagggacggagctcggcgcaccatgaggctcccggggcccaaggccgaccgtgagagcgcacgagctgagtcagtgctgattctctcaaatagagcttgaaggataaatcttcatttttgtttcaacaaaacttcgaaacaaaatggaagaaaataatctacagtgcagtagtgtggttgacggtaattttgaagaagttcccagggagacggcaattcagtttaaacctccactatacagacagcggtaccagttcgttaaaaatttagtggatcaacatgagcctaagaaggttgcagacctgggatgtggtgatacttcactcttaaggctgctaaaagtcaatccatgcattgaattgcttgttggagtagatattaatgaggataaattacgatggagaggggattcgttagctcctttcctgggggattttctgaaacctcgggatctgaatttgaccatcacattgtatcatggctccgttgtggagagagactctcgtttgcttggatttgacttgataacgtgtattgaattaatagaacatttggattcaggtgatctggccagatttcctgaagtggtatttgggtacctgtctccatccatgattgtcatcagcacaccaaactctgaattcaatcccctgtttccatcagtgaccttaagagattcagatcataaatttgagtggaccagaatggagtttcagacctgggctttatatgtggcaaatcgctatgattactctgtggagtttactggtgtcggggaaccaccagctggagctgagaatgttggatactgtacccagataggaatcttccggaaaaatggaggaaaggcaacagaatcatgtctttcagagcagcatgatcagcatgtttataaagctgtttttaccacctcatacccaagcttacagcaggaaaggttctttaaacttgtgttggttaatgaggtgtcccaacaagtggaaagcttaagagtgagccacctgccaaggcggaaagaacaggctggggaacggggtgataagcccaaagacattggtggctcaaaggcccctgtcccatgctttggaccagtcttcacagaggttgagaaggccaagatagagaactctcccacacccttctgtgttggagataaatttttcgtacctctgcagagactccttgcgtatcccaagttgaaccgcttatgtgctaatgaagagatgatgagatcagtcattgctgactcaattcctctgagcagtgatggttctgcagtggtggctgacctgcgtaattattttgatgaacagtttgagttttgaaccatgtttatttcctgaaatttcagggtctcagcgatagttgtgctcacttagaatttagttttttttgtgtaatcctaattcaagtaatgtttttaaagtttcactgcaaaagtctatgttccaagccattggacagacctgcttgagatatggccagactgcagtgagccctgagaaagatatgagggtttaaaacgggtgctttcctttgattttggacttttttgttttctcaagaataaagaagttggatgtggtaatatgttaa

SEQ ID NO: 2551 - protein, 393 aa, Homo sapiens; identical to SEQ ID NO: 59

SEQ ID NO: 2552 - DNA, 1151 bp, Homo sapiens
aggttggcgagccccgcggggaggccgaggcgcgggtgcgggcgccggcgtagccgcggcggtagcgtcacgcagcgaggccgtgcgtgcgcgggcgtcagggcggcgctgagttgaggacgctggcggctccgcgacgagctttgttttttcggttgggcatgctgcttaccgcaggatgatggaagcgacggcccgtacaaagacagaagcgttggtttcactgagtcagtgctgattctctcaaatagagcttgaaggataaatcttcatttttgtttcaacaaaacttcgaaacaaaatggaagaaaataatctacagtgcagtagtgtggttgacggtaattttgaagaagttcccagggagacggcaattcagtttaaacctccactatacagacagcggtaccagttcgttaaaaatttagtggatcaacatgagcctaagaaggttgcagacctgggatgtggtgatacttcactcttaaggctgctaaaagtcaatccatgcattgaattgcttgttggagtagatattaatgaggataaattacgatggagaggggattcgttagctcctttcctgggggattttctgaaacctcgggatctgaatttgaccatcacattgtatcatggctccgttgtggagagagactctcgtttgcttggatttgacttgataacgtgtattgaattaatagaacatttggattcaggtgatctggccagatttcctgaagtggtatttgggtacctgtctccatccatgattgtcatcagcacaccaaactctgaattcaatcccctgtttccatcagtgaccttaagagattcagatcataaatttgagtggaccagaatggagtttcagacctgggctttatatgtggcaaatcgctatgattactctgtggagtttactggtgtcggggaaccaccagctggagctgagaatgttggatactgtacccagataggaatcttccggaaaaatggaggaaaggcaacagaatcatgtctttcagagcagcatgatcagcatgtttataaagctagacagggtctcactatgttgcccaggctggtcttgaacttccatcctcaagcaatcctcctgccccatcttcctaaaatgctgagattacagg

SEQ ID NO: 2553 - protein, 282 aa, Homo sapiens
MEENNLQCSSVVDGNFEEVPRETAIQFKPPLYRQRYQFVKNLVDQHEPKKVADLGCGDTSLLRLLKVNPCIELLVGVDINEDKLRWRGDSLAPFLGDFLKPRDLNLTITLYHGSVVERDSRLLGFDLITCIELIEHLDSGDLARFPEVVFGYLSPSMIVISTPNSEFNPLFPSVTLRDSDHKFEWTRMEFQTWALYVANRYDYSVEFTGVGEPPAGAENVGYCTQIGIFRKNGGKATESCLSEQHDQHVYKARQGLTMLPRLVLNFHPQAILLPHLPKMLRL

SEQ ID NO: 2554 - DNA, 588 bp, Homo sapiens
gcgggcgtcagggcggcgctgagttgaggacgctggcggctccgcgacgagctttgttttttcggttgggcatgctgcttaccgcaggatgatggaagcgacggcccgtacaaagacagaagcgttggtttcactgagtcagtgctgattctctcaaatagagcttgaaggataaatcttcatttttgtttcaacaaaacttcgaaacaaaatggaagaaaataatctacagtgcagtagtgtggttgacggtaattttgaagaagttcccagggagacggcaattcagtttaaacctccactatacagacagcggtaccagttcgttaaaaatttagtggatcaacatgagcctaagaaggttgcagacctgggatgtggtgatacttcactcttaaggctgctaaaagtcaatccatgcattgaattgcttgttggagtagatattaatgaggataaattacgatggagaggggattcgttagctcctttcctgggggattttctgaaacctcgggatctgaaattcaatcccctgtttccatcagtgaccttaagagattcagatcataaatttgagtggaccag

SEQ ID NO: 2555 - protein, 124 aa, Homo sapiens
MEENNLQCSSVVDGNFEEVPRETAIQFKPPLYRQRYQFVKNLVDQHEPKKVADLGCGDTSLLRLLKVNPCIELLVGVDINEDKLRWRGDSLAPFLGDFLKPRDLKFNPLFPSVTLRDSDHKFEW

SEQ ID NO: 2556 - DNA, 571 bp, Homo sapiens
cttcgccaacagctgccgtaccgtgccgcgtcgcagccgcacgctagcggggtcaacggcgcggcaggcgcaggggtcctcgccaaggttcggaagaggaccttgaaaatggcttctgggcatgcgccacagcggccgttacgagacgcaaaaccgacgccttggaactgagagcctagagggacggagctcggcgcaccatgaggctcccggggcccaaggccgaccgtgagagcgcacgagtgcagtagtgtggttgacggtaattttgaagaagttcccagggagacggcaattcagtttaaacctccactatacagacagcggtaccagttcgttaaaaatttagtggatcaacatgagcctaagaaggttgcagacctgggatgtggtgatacttcactcttaaggctgctaaaagtcaatccatgcattgaattgcttgttggagtagatattaatgaggataaattacgatggagagggtaatacttagtttctgaaagaattatgcgttaatctaaaactaatggcattattgagtttagagaaagtgttgattttatatttg

SEQ ID NO: 2557 - protein, 36 aa, Homo sapiens
MRHSGRYETQNRRLGTESLEGRSSAHHEAPGAQGRP

SEQ ID NO: 2558 - DNA, 609 bp, Homo sapiens
atatccgccgggcccgccatcttgttcccaggggcagttggcggaagagatcgagctccctggctgccggctcgccttctgcgtggagttctcgcggtctgggtttcgctgtctgctcttggcccggggtcattttgtcggcgtcgggtgccctctcttgcccagctggggcacagcgaggcggccccttctcccgacgacgttcgatggagtagggtcccagaccgttgtcccgaagagcgagatcgagcttggccccctcccccccctccttccctccctccttccttccgccgcaacatggctaacaacagccccgcgctgacaggcaactcgcagccgcagcaccaggcggctgcagctgcggctcagcaacagcagcagtgcggcggcggcggcgctaccaagccggcggtctccggcaagcagggcaatgtgctcccgctctggggcaacgagaagaccatgaacctcaaccccatgatcctgaccaacatcctgtcgtcgccttacttcaaagtacagctctacgagctcaagacctaccacgaggtggtggacgagatctactttaagtttacagctttaaaattattccttttgacgtgg

SEQ ID NO: 2559 - protein, 102 aa, Homo sapiens
MANNSPALTGNSQPQHQAAAAAAQQQQQCGGGGATKPAVSGKQGNVLPLWGNEKTMNLNPMILTNILSSPYFKVQLYELKTYHEVVDEIYFKFTALKLFLLT

SEQ ID NO: 2560 - DNA, 1194 bp, Homo sapiens
atatccgccgggcccgccatcttgttcccaggggcagttggcggaagagatcgagctccctggctgccggctcgccttctgcgtggagttctcgcggtctgggtttcgctgtctgctcttggcccggggtcattttgtcggcgtcgggtgccctctcttgcccagctggggcacagcgaggcggccccttctcccgacgacgttcgatggagtagggtcccagaccgttgtcccgaagagcgagatcgagcttggccccctcccccccctccttccctccctccttccttccgccgcaacatggctaacaacagccccgcgctgacaggcaactcgcagccgcagcaccaggcggctgcagctgcggctcagcaacagcagcagtgcggcggcggcggcgctaccaagccggcggtctccggcaagcagggcaatgtgctcccgctctggggcaacgagaagaccatgaacctcaaccccatgatcctgaccaacatcctgtcgtcgccttacttcaaagtacagctctacgagctcaagacctaccacgaggtggtggacgagatctactttaaggtcacgcacgttgaaccatgggagaaaggaagcaggaaaacagcgggccagacagggatgtgcggaggggttcgaggtgttggaacaggaggaattgtttctacagcattttgcctgttatacaaattatttaccctgaagttaactcgaaagcaagtgatgggtcttataacacacacagactctccatatattagagcgcttggatttatgtatataagatatacacagccccctacagatctgtgggactggtttgaatccttccttgatgatgaagaggacctagatgtgaaggctggtggaggctgtgtaatgaccattggagaaatgctacgatcttttctcacaaaactggagtggttttctaccttgtttccaagaattccagttccagttcaaaagaatattgatcaacagattaaaacccgacctagaaaaatcaagaaagatgggaaggaaggtgctgaggaaatagacagacatgttgaacgcagacgttcaaggtctccaaggagatctctgagtccacggaggtccccaagaaggtcaagaagtagaagtcatcatcgggagggccatgggtcttctagttttgacagagaattagaaagagag

SEQ ID NO: 2561 - protein, 297 aa, Homo sapiens
MANNSPALTGNSQPQHQAAAAAAQQQQQCGGGGATKPAVSGKQGNVLPLWGNEKTMNLNPMILTNILSSPYFKVQLYELKTYHEVVDEIYFKVTHVEPWEKGSRKTAGQTGMCGGVRGVGTGGIVSTAFCLLYKLFTLKLTRKQVMGLITHTDSPYIRALGFMYIRYTQPPTDLWDWFESFLDDEEDLDVKAGGGCVMTIGEMLRSFLTKLEWFSTLFPRIPVPVQKNIDQQIKTRPRKIKKDGKEGAEEIDRHVERRRSRSPRRSLSPRRSPRRSRSRSHHREGHGSSSFDRELER

SEQ ID NO: 2562 - DNA, 1424 bp, Homo sapiens
atatccgccgggcccgccatcttgttcccaggggcagttggcggaagagatcgagctccctggctgccggctcgccttctgcgtggagttctcgcggtctgggtttcgctgtctgctcttggcccggggtcattttgtcggcgtcgggtgccctctcttgcccagctggggcacagcgaggcggccccttctcccgacgacgttcgatggagtagggtcccagaccgttgtcccgaagagcgagatcgagcttggccccctcccccccctccttccctccctccttccttccgccgcaacatggctaacaacagccccgcgctgacaggcaactcgcagccgcagcaccaggcggctgcagctgcggctcagcaacagcagcagtgcggcggcggcggcgctaccaagccggcggtctccggcaagcagggcaatgtgctcccgctctggggcaacgagaagaccatgaacctcaaccccatgatcctgaccaacatcctgtcgtcgccttacttcaaagtacagctctacgagctcaagacctaccacgaggtggtggacgagatctactttaaggtcacgcacgttgaaccatgggagaaaggaagcaggaaaacagcgggccagacagggatgtgcggaggggttcgaggtgttggaacaggaggaattgtttctacagcattttgcctgttatacaaattatttaccctgaagttaactcgaaagcaagtgatgggtcttataacacacacagactctccatatattagagcgcttggatttatgtatataagatatacacagccccctacagatctgtgggactggtttgaatccttccttgatgatgaagaggacctagatgtgaaggctggtggaggctgtgtaatgaccattggagaaatgctacgatcttttctcacaaaactggagtggttttctaccttgtttccaagaattccagttccagttcaaaagaatattgatcaacagattaaaacccgacctagaaaaatcaagaaagatgggaaggaaggtgctgaggaaatagacagacatgttgaacgcagacgttcaaggtctccaaggagatctctgagtccacggaggtccccaagaaggtcaagaagtagaagtcatcatcgggagggccatgggtcttctagttttgacagagaattagaaagagagaaagaacgccagcgactagagcgtgaagccaaagaaagggagaaagaacggcgaagatcccgaagtattgaccgggggttagaacgcaggcgcagcagaagtagggaaaggcatagaagtcgcagtcgaagtcgtgataggaaaggggatagaagggacagggatcgagaaagagagaaagaaaatgagagaggtagaagacgagatcgtgactatgataaggaaagagg

SEQ ID NO: 2563 - protein, 373 aa, Homo sapiens
MANNSPALTGNSQPQHQAAAAAAQQQQQCGGGGATKPAVSGKQGNVLPLWGNEKTMNLNPMILTNILSSPYFKVQLYELKTYHEVVDEIYFKVTHVEPWEKGSRKTAGQTGMCGGVRGVGTGGIVSTAFCLLYKLFTLKLTRKQVMGLITHTDSPYIRALGFMYIRYTQPPTDLWDWFESFLDDEEDLDVKAGGGCVMTIGEMLRSFLTKLEWFSTLFPRIPVPVQKNIDQQIKTRPRKIKKDGKEGAEEIDRHVERRRSRSPRRSLSPRRSPRRSRSRSHHREGHGSSSFDRELEREKERQRLEREAKEREKERRRSRSIDRGLERRRSRSRERHRSRSRSRDRKGDRRDRDREREKENERGRRRDRDYDKE

SEQ ID NO: 2564 - DNA, 4024 bp, Homo sapiens
atatccgccgggcccgccatcttgttcccaggggcagttggcggaagagatcgagctccctggctgccggctcgccttctgcgtggagttctcgcggtctgggtttcgctgtctgctcttggcccggggtcattttgtcggcgtcgggtgccctctcttgcccagctggggcacagcgaggcggccccttctcccgacgacgttcgatggagtagggtcccagaccgttgtcccgaagagcgagatcgagcttggccccctcccccccctccttccctccctccttccttccgccgcaacatggctaacaacagccccgcgctgacaggcaactcgcagccgcagcaccaggcggctgcagctgcggctcagcaacagcagcagtgcggcggcggcggcgctaccaagccggcggtctccggcaagcagggcaatgtgctcccgctctggggcaacgagaagaccatgaacctcaaccccatgatcctgaccaacatcctgtcgtcgccttacttcaaagtacagctctacgagctcaagacctaccacgaggtggtggacgagatctactttaaggtcacgcacgttgaaccatgggagaaaggaagcaggaaaacagcgggccagacagggatgtgcggaggggttcgaggtgttggaacaggaggaattgtttctacagcattttgcctgttatacaaattatttaccctgaagttaactcgaaagcaagtgatgggtcttataacacacacagactctccatatattagagcgcttggatttatgtatataagatatacacagccccctacagatctgtgggactggtttgaatccttccttgatgatgaagaggtatgtcaacaagggtaataatttgttttcttctgattactctcatatttttattatcttttatttattggtggtttaatgtcttcaagaacttcctgtagttaaatttatttcagtgagatacttttggaattaatgtccttttactgagacctgatggcttttatgtattttagggtaaatttctgaagttttattttcttgttttaaaattgtttaaatgtgtttggtaactattggaaaattttctcttcttaattatgttctgtgtattgtattgatcctgaattgtatagttaatagtgacttttcaagatggggcatgctcaagatcgaacagataataaaagatatgcacatagaatactaattgtagcttttttttcttctggaacatttcagttcttcaccctctagcttcttccaaatatcagtattcccacttgcatagaagtgcagaattgaagagttgggtgttacataaataggctaagtgtttggatgacttgttcaaggtgacaaaattttaattccagttttctgactcctagtacaccacacacacctttaaaaaagaaattttttaaattgtaattcgagtctccctaatttgaaatctgaaatactaagttagatttaaatcgtgtatgcattggctgggcgtggtggctcacattgtaatcccaacacttcgagagttcaagaccagcctgagcaatatagtgagacctcatctctacaaaaaaaagtttaaaaattagctgagcatagaggtatgcatcttagtcccacctacttgggaggctggggtgggaggatcacttgagcccaggagacagaatttgctgtgagccaagatcattgccactgcattccagcctgggtaacacagtaagaccctttctcaaaacaaaacaaaatatcatatatgcattaatttacttgcatggtgaagtccaacatgtcaaaaatgaaatgatgagctgtattgtccctatgtctacccagtctactactttgtgttttaaggttcataagactttttgagtgctatgtgtcagtagtctatttacagagttcatccaaagaatttattgaattaaaggatggttctaatggaaatctattgtgttttgttattacatgcacacctaaaaaaaaaaaaaatctcatttagacatggagaatttttatttttctctttttttttttttttttttttgcctgttaactgagttacttcactcagaagaagcaaaacgtgttttaaatcacaatctttaaggtctttttatctttagatcagtttttcagactgaagtgcttctcccttctgtctttaaaaaagcatgttcctcttcataattggtgttgtattggttttgtttctggatgcctctattttatgttttttattgtgtttacaaatctgaggtcctctatttaagctaacttattgttttcttccttagatatctgcagcgattatatttggaaatactgtatatctgaacacttaaatgtgtgtgagtgcaagcagttttacctttagctcttgttttcctgtttagataacaaatctcactttccttgtgtgcttgcactataggtttgggactgacaatagctgactaacatgtcctgagctgtgagagggcatagcaagaaggccttcatgcggtaatgacccttttcagagacaatggtcatcatggattatgcgtttccaattatttgttcatttatttattttctacataactaaattagaaacctcactgcttcatggcagttggtttgctattgcttccagttttattagggcttcattttatattagagctgttaaaagataacctttagacaggaattatctaaagtagatcatatgtagctaggttatggtgcaaggtatatgatgtgtgcaaatatgtccacagaaataaatacatagtaggtatgtggaatgtaaatttaagtcaatcgttccgcatagtttagaaatgtaaggggctttttcatattgttaactgagtgagatcagttccctttatgcctgtgaggctgcagggtttgttctcacttgcatgcacacactaagcccaaatatttctgttcattcattgtcagatcaggatatgaaaataaaatttttctgttagttttttttgtattgagattccaaagatggtaatatttttataatattcatgtatatatggaaatactttttttgacggctagggtatcttttgtgtttctgtaggacctagatgtgaaggctggtggaggctgtgtaatgaccattggagaaatgctacgatcttttctcacaaaactggagtggttttctaccttgtttccaagaattccagttccagttcaaaagaatattgatcaacagattaaaacccgacctagaaaaatcaagaaagatgggaaggaaggtgctgaggaaatagacagacatgttgaacgcagacgttcaaggtaatgtcactcttgaattatgcttatttttcatatatgctttatacaaaattaatggttctgagaaatagcaagttcttaggaatttgtttttactgttcattttattagtttgtcacttttaccccccaaagattattttcttcctttcagggctttttctataaaattatgcatctgtaaatgagaacaataaaattttttgctttaatgattcttgacatggccttaagcttgaggacatgaataaataatgctgttgaaagttttactgtgaaaagaattgcatatgttttattcattgaaattttctttctccctccgccttccttaggtctccaaggagatctctgagtccacggaggtccccaagaaggtcaagaagtagaagtcatcatcgggagggccatgggtcttctagttttgacagagaattagaaagagagaaagaacgccagcgactagagcgtgaagccaaagaaagggagaaagaacggcgaagatcccgaagtattgaccgggggttagaacgcaggcgcagcagaagtagggaaaggcatagaagtcgcagtcgaagtcgtgataggaaaggggatagaagggacagggatcgagaaagagagaaagaaaatgagagaggtagaagacgagatcgtgactatgataaggaaagagg

SEQ ID NO: 2565 - protein, 191 aa, Homo sapiens
MANNSPALTGNSQPQHQAAAAAAQQQQQCGGGGATKPAVSGKQGNVLPLWGNEKTMNLNPMILTNILSSPYFKVQLYELKTYHEVVDEIYFKVTHVEPWEKGSRKTAGQTGMCGGVRGVGTGGIVSTAFCLLYKLFTLKLTRKQVMGLITHTDSPYIRALGFMYIRYTQPPTDLWDWFESFLDDEEVCQQG

SEQ ID NO: 2566 - DNA, 3622 bp, Homo sapiens
atatccgccgggcccgccatcttgttcccaggggcagttggcggaagagatcgagctccctggctgccggctcgccttctgcgtggagttctcgcggtctgggtttcgctgtctgctcttggcccggggtcattttgtcggcgtcgggtgccctctcttgcccagctggggcacagcgaggcggccccttctcccgacgacgttcgatggagtagggtcccagaccgttgtcccgaagagcgagatcgagcttggccccctcccccccctccttccctccctccttccttccgccgcaacatggctaacaacagccccgcgctgacaggcaactcgcagccgcagcaccaggcggctgcagctgcggctcagcaacagcagcagtgcggcggcggcggcgctaccaagccggcggtctccggcaagcagggcaatgtgctcccgctctggggcaacgagaagaccatgaacctcaaccccatgatcctgaccaacatcctgtcgtcgccttacttcaaagtacagctctacgagctcaagacctaccacgaggtggtggacgagatctactttaaggtcacgcacgttgaaccatgggagaaaggaagcaggaaaacagcgggccagacagggatgtgcggaggggttcgaggtgttggaacaggaggaattgtttctacagcattttgcctgttatacaaattatttaccctgaagttaactcgaaagcaagtgatgggtcttataacacacacagactctccatatattagagcgcttggatttatgtatataagatatacacagccccctacagatctgtgggactggtttgaatccttccttgatgatgaagagttcttcaccctctagcttcttccaaatatcagtattcccacttgcatagaagtgcagaattgaagagttgggtgttacataaataggctaagtgtttggatgacttgttcaaggtgacaaaattttaattccagttttctgactcctagtacaccacacacacctttaaaaaagaaattttttaaattgtaattcgagtctccctaatttgaaatctgaaatactaagttagatttaaatcgtgtatgcattggctgggcgtggtggctcacattgtaatcccaacacttcgagagttcaagaccagcctgagcaatatagtgagacctcatctctacaaaaaaaagtttaaaaattagctgagcatagaggtatgcatcttagtcccacctacttgggaggctggggtgggaggatcacttgagcccaggagacagaatttgctgtgagccaagatcattgccactgcattccagcctgggtaacacagtaagaccctttctcaaaacaaaacaaaatatcatatatgcattaatttacttgcatggtgaagtccaacatgtcaaaaatgaaatgatgagctgtattgtccctatgtctacccagtctactactttgtgttttaaggttcataagactttttgagtgctatgtgtcagtagtctatttacagagttcatccaaagaatttattgaattaaaggatggttctaatggaaatctattgtgttttgttattacatgcacacctaaaaaaaaaaaaaatctcatttagacatggagaatttttatttttctctttttttttttttttttttttgcctgttaactgagttacttcactcagaagaagcaaaacgtgttttaaatcacaatctttaaggtctttttatctttagatcagtttttcagactgaagtgcttctcccttctgtctttaaaaaagcatgttcctcttcataattggtgttgtattggttttgtttctggatgcctctattttatgttttttattgtgtttacaaatctgaggtcctctatttaagctaacttattgttttcttccttagatatctgcagcgattatatttggaaatactgtatatctgaacacttaaatgtgtgtgagtgcaagcagttttacctttagctcttgttttcctgtttagataacaaatctcactttccttgtgtgcttgcactataggtttgggactgacaatagctgactaacatgtcctgagctgtgagagggcatagcaagaaggccttcatgcggtaatgacccttttcagagacaatggtcatcatggattatgcgtttccaattatttgttcatttatttattttctacataactaaattagaaacctcactgcttcatggcagttggtttgctattgcttccagttttattagggcttcattttatattagagctgttaaaagataacctttagacaggaattatctaaagtagatcatatgtagctaggttatggtgcaaggtatatgatgtgtgcaaatatgtccacagaaataaatacatagtaggtatgtggaatgtaaatttaagtcaatcgttccgcatagtttagaaatgtaaggggctttttcatattgttaactgagtgagatcagttccctttatgcctgtgaggctgcagggtttgttctcacttgcatgcacacactaagcccaaatatttctgttcattcattgtcagatcaggatatgaaaataaaatttttctgttagttttttttgtattgagattccaaagatggtaatatttttataatattcatgtatatatggaaatactttttttgacggctagggtatcttttgtgtttctgtaggacctagatgtgaaggctggtggaggctgtgtaatgaccattggagaaatgctacgatcttttctcacaaaactggagtggttttctaccttgtttccaagaattccagttccagttcaaaagaatattgatcaacagattaaaacccgacctagaaaaatcaagaaagatgggaaggaaggtgctgaggaaatagacagacatgttgaacgcagacgttcaaggtaatgtcactcttgaattatgcttatttttcatatatgctttatacaaaattaatggttctgagaaatagcaagttcttaggaatttgtttttactgttcattttattagtttgtcacttttaccccccaaagattattttcttcctttcagggctttttctataaaattatgcatctgtaaatgagaacaataaaattttttgctttaatgattcttgacatggccttaagcttgaggacatgaataaataatgctgttgaaagttttactgtgaaaagaattgcatatgttttattcattgaaattttctttctccctccgccttccttaggtctccaaggagatctctgagtccacggaggtccccaagaaggtcaagaagtagaagtcatcatcgggagggccatgggtcttctagttttgacagagaattagaaagagagaaagaacgccagcgactagagcgtgaagccaaagaaagggagaaagaacggcgaagatcccgaagtattgaccgggggttagaacgcaggcgcagcagaagtagggaaaggcatagaagtcgcagtcgaagtcgtgataggaaaggggatagaagggacagggatcgagaaagagagaaagaaaatgagagaggtagaagacgagatcgtgactatgataaggaaagagg

SEQ ID NO: 2567 - protein, 190 aa, Homo sapiens
MANNSPALTGNSQPQHQAAAAAAQQQQQCGGGGATKPAVSGKQGNVLPLWGNEKTMNLNPMILTNILSSPYFKVQLYELKTYHEVVDEIYFKVTHVEPWEKGSRKTAGQTGMCGGVRGVGTGGIVSTAFCLLYKLFTLKLTRKQVMGLITHTDSPYIRALGFMYIRYTQPPTDLWDWFESFLDDEEFFTL

SEQ ID NO: 2568 - DNA, 5311 bp, Homo sapiens
atatccgccgggcccgccatcttgttcccaggggcagttggcggaagagatcgagctccctggctgccggctcgccttctgcgtggagttctcgcggtctgggtttcgctgtctgctcttggcccggggtcattttgtcggcgtcgggtgccctctcttgcccagctggggcacagcgaggcggccccttctcccgacgacgttcgatggagtagggtcccagaccgttgtcccgaagagcgagatcgagcttggccccctcccccccctccttccctccctccttccttccgccgcaacatggctaacaacagccccgcgctgacaggcaactcgcagccgcagcaccaggcggctgcagctgcggctcagcaacagcagcagtgcggcggcggcggcgctaccaagccggcggtctccggcaagcagggcaatgtgctcccgctctggggcaacgagaagaccatgaacctcaaccccatgatcctgaccaacatcctgtcgtcgccttacttcaaagtacagctctacgagctcaagacctaccacgaggtggtggacgagatctactttaaggtcacgcacgttgaaccatgggagaaaggaagcaggaaaacagcgggccagacagggatgtgcggaggggttcgaggtgttggaacaggaggaattgtttctacagcattttgcctgttatacaaattatttaccctgaagttaactcgaaagcaagtgatgggtcttataacacacacagactctccatatattagagcgcttggatttatgtatataagatatacacagccccctacagatctgtgggactggtttgaatccttccttgatgatgaagagttcttcaccctctagcttcttccaaatatcagtattcccacttgcatagaagtgcagaattgaagagttgggtgttacataaataggctaagtgtttggatgacttgttcaaggtgacaaaattttaattccagttttctgactcctagtacaccacacacacctttaaaaaagaaattttttaaattgtaattcgagtctccctaatttgaaatctgaaatactaagttagatttaaatcgtgtatgcattggctgggcgtggtggctcacattgtaatcccaacacttcgagagttcaagaccagcctgagcaatatagtgagacctcatctctacaaaaaaaagtttaaaaattagctgagcatagaggtatgcatcttagtcccacctacttgggaggctggggtgggaggatcacttgagcccaggagacagaatttgctgtgagccaagatcattgccactgcattccagcctgggtaacacagtaagaccctttctcaaaacaaaacaaaatatcatatatgcattaatttacttgcatggtgaagtccaacatgtcaaaaatgaaatgatgagctgtattgtccctatgtctacccagtctactactttgtgttttaaggttcataagactttttgagtgctatgtgtcagtagtctatttacagagttcatccaaagaatttattgaattaaaggatggttctaatggaaatctattgtgttttgttattacatgcacacctaaaaaaaaaaaaaatctcatttagacatggagaatttttatttttctctttttttttttttttttttttgcctgttaactgagttacttcactcagaagaagcaaaacgtgttttaaatcacaatctttaaggtctttttatctttagatcagtttttcagactgaagtgcttctcccttctgtctttaaaaaagcatgttcctcttcataattggtgttgtattggttttgtttctggatgcctctattttatgttttttattgtgtttacaaatctgaggtcctctatttaagctaacttattgttttcttccttagatatctgcagcgattatatttggaaatactgtatatctgaacacttaaatgtgtgtgagtgcaagcagttttacctttagctcttgttttcctgtttagataacaaatctcactttccttgtgtgcttgcactataggtttgggactgacaatagctgactaacatgtcctgagctgtgagagggcatagcaagaaggccttcatgcggtaatgacccttttcagagacaatggtcatcatggattatgcgtttccaattatttgttcatttatttattttctacataactaaattagaaacctcactgcttcatggcagttggtttgctattgcttccagttttattagggcttcattttatattagagctgttaaaagataacctttagacaggaattatctaaagtagatcatatgtagctaggttatggtgcaaggtatatgatgtgtgcaaatatgtccacagaaataaatacatagtaggtatgtggaatgtaaatttaagtcaatcgttccgcatagtttagaaatgtaaggggctttttcatattgttaactgagtgagatcagttccctttatgcctgtgaggctgcagggtttgttctcacttgcatgcacacactaagcccaaatatttctgttcattcattgtcagatcaggatatgaaaataaaatttttctgttagttttttttgtattgagattccaaagatggtaatatttttataatattcatgtatatatggaaatactttttttgacggctagggtatcttttgtgtttctgtaggacctagatgtgaaggctggtggaggctgtgtaatgaccattggagaaatgctacgatcttttctcacaaaactggagtggttttctaccttgtttccaagaattccagttccagttcaaaagaatattgatcaacagattaaaacccgacctagaaaaatcaagaaagatgggaaggaaggtgctgaggaaatagacagacatgttgaacgcagacgttcaaggtaatgtcactcttgaattatgcttatttttcatatatgctttatacaaaattaatggttctgagaaatagcaagttcttaggaatttgtttttactgttcattttattagtttgtcacttttaccccccaaagattattttcttcctttcagggctttttctataaaattatgcatctgtaaatgagaacaataaaattttttgctttaatgattcttgacatggccttaagcttgaggacatgaataaataatgctgttgaaagttttactgtgaaaagaattgcatatgttttattcattgaaattttctttctccctccgccttccttaggtctccaaggagatctctgagtccacggaggtccccaagaaggtcaagaagtagaagtcatcatcgggagggccatgggtcttctagttttgacagagaattagaaagagagaaagaacgccagcgactagagcgtgaagccaaagaaagggagaaagaacggcgaagatcccgaagtattgaccgggggttagaacgcaggcgcagcagaagtagggaaaggcatagaagtcgcagtcgaagtcgtgataggaaaggggatagaagggacagggatcgagaaagagagaaagaaaatgagagaggtagaagacgagatcgtgactatgataaggaaagaggaaatgaacgagaaaaagagagagagcgatcaagagaaaggtccaaggaacagagaagtaggggagaggtagaagagaagaaacataaagaagacaaagatgataggcggcacagagatgacaaaagagattccaagaaagagaaaaaacacagtagaagcagaagcagagaaaggaaacacagaagtaggagtcgaagtagaaatgcagggaaacgaagtagaagtagaagcaaagagaaatcaagtaaacataaaaatgaaagtaaagaaaaatcaaataaacgaagtcgaagtggcagtcaaggaagaactgacagtgttgaaaaatcaaaaaaacgggaacatagtcccagcaaagaaaaatctagaaagcgtagtagaagcaaagaacgttcccacaaacgagatcacagtgatagtaaggaccagtcagacaaacatgatcgtcgaaggagccaaagtatagaacaagagagccaagaaaaacagcataaaaacaaagatgagactgtgtgaaaatattttgtaaaagtggatcacattgaatcctataaatgattaaatctgcttttttcccccacgttgagattgtgcagtagttcgcactcctcaagctctccctgtaggctgcattttcatttcctctttcgtgtagggaagtgcctttgtaattccatttattgcattggtgttttcacccaattgttaagtttgatacatgatgcacagattgttcttgcatttttattgtttgtttttgaaatgtacagtctgtacatatgtcctgaaaatgttttaattcctttggcatggttgccatgttggttaaatttgtataaggcaataaactgccactaatctatttttgttttgtaggtgtgggattatggtttgtgtactgaagttagcatggctgtgcttttcgtaatagaatgctaaagactttgagaatggatcttggatgtctattataggagaagtatgtgctgccaatgtacaagaaggcagcattgtaggattaacattcttgtctactgtatattatcttggaaggctcttgttaatatgttacacttaatattctccacagttacctttagagagaatttatgagaagttagtttctgatgcagaggtttttaggctgtgatttcatcaaaagtccttttagcattctacctcaaagggacacttagtatgcctaaaatttattcacttagttttccttttttatttgaaaaaatacatgacatgtaatctttttttcttgaattctttctcagattttaaagtactatattaaagaaaaaaattaatgtctaaagcctagcattcttgcagaaccctatactaacatgtaatggggagagggtggggcagatgagtagagaaacagattcaagcctcaagcttccaaagcatttttataaatggaaaatccttaaattatgaaacagcttgatatagtgtcctttttttaaaattcagaactttttttattgataatggagattgctgtttgagtttttaaacttaatctagaacagaggagtattaaaagtaatgctgtgctgcattatttaagactatcagcaaattatttgatagattgttcttacaacttgtattctgattacagaaccatcatgagtgtggaataaatactggattaaatcctttatcctggg

SEQ ID NO: 2569 - protein, 190 aa, Homo sapiens; identical to SEQ ID NO: 2567

SEQ ID NO: 2570 - DNA, 3113 bp, Homo sapiens
atatccgccgggcccgccatcttgttcccaggggcagttggcggaagagatcgagctccctggctgccggctcgccttctgcgtggagttctcgcggtctgggtttcgctgtctgctcttggcccggggtcattttgtcggcgtcgggtgccctctcttgcccagctggggcacagcgaggcggccccttctcccgacgacgttcgatggagtagggtcccagaccgttgtcccgaagagcgagatcgagcttggccccctcccccccctccttccctccctccttccttccgccgcaacatggctaacaacagccccgcgctgacaggcaactcgcagccgcagcaccaggcggctgcagctgcggctcagcaacagcagcagtgcggcggcggcggcgctaccaagccggcggtctccggcaagcagggcaatgtgctcccgctctggggcaacgagaagaccatgaacctcaaccccatgatcctgaccaacatcctgtcgtcgccttacttcaaagtacagctctacgagctcaagacctaccacgaggtggtggacgagatctactttaaggtcacgcacgttgaaccatgggagaaaggaagcaggaaaacagcgggccagacagggatgtgcggaggggttcgaggtgttggaacaggaggaattgtttctacagcattttgcctgttatacaaattatttaccctgaagttaactcgaaagcaagtgatgggtcttataacacacacagactctccatatattagagcgcttggatttatgtatataagatatacacagccccctacagatctgtgggactggtttgaatccttccttgatgatgaagaggacctagatgtgaaggctggtggaggctgtgtaatgaccattggagaaatgctacgatcttttctcacaaaactggagtggttttctaccttgtttccaagaattccagttccagttcaaaagaatattgatcaacagattaaaacccgacctagaaaaatcaagaaagatgggaaggaaggtgctgaggaaatagacagacatgttgaacgcagacgttcaaggtctccaaggagatctctgagtccacggaggtccccaagaaggtcaagaagtagaagtcatcatcgggagggccatgggtcttctagttttgacagagaattagaaagagagaaagaacgccagcgactagagcgtgaagccaaagaaagggagaaagaacggcgaagatcccgaagtattgaccgggggttagaacgcaggcgcagcagaagtagggaaaggcatagaagtcgcagtcgaagtcgtgataggaaaggggatagaagggacagggatcgagaaagagagaaagaaaatgagagaggtagaagacgagatcgtgactatgataaggaaagaggaaatgaacgagaaaaagagagagagcgatcaagagaaaggtccaaggaacagagaagtaggggagaggtagaagagaagaaacataaagaagacaaagatgataggcggcacagagatgacaaaagagattccaagaaagagaaaaaacacagtagaagcagaagcagagaaaggaaacacagaagtaggagtcgaagtagaaatgcagggaaacgaagtagaagtagaagcaaagagaaatcaagtaaacataaaaatgaaagtaaagaaaaatcaaataaacgaagtcgaagtggcagtcaaggaagaactgacagtgttgaaaaatcaaaaaaacgggaacatagtcccagcaaagaaaaatctagaaagcgtagtagaagcaaagaacgttcccacaaacgagatcacagtgatagtaaggaccagtcagacaaacatgatcgtcgaaggagccaaagtatagaacaagagagccaagaaaaacagcataaaaacaaagatgagactgtgtgaaaatattttgtaaaagtggatcacattgaatcctataaatgattaaatctgcttttttcccccacgttgagattgtgcagtagttcgcactcctcaagctctccctgtaggctgcattttcatttcctctttcgtgtagggaagtgcctttgtaattccatttattgcattggtgttttcacccaattgttaagtttgatacatgatgcacagattgttcttgcatttttattgtttgtttttgaaatgtacagtctgtacatatgtcctgaaaatgttttaattcctttggcatggttgccatgttggttaaatttgtataaggcaataaactgccactaatctatttttgttttgtaggtgtgggattatggtttgtgtactgaagttagcatggctgtgcttttcgtaatagaatgctaaagactttgagaatggatcttggatgtctattataggagaagtatgtgctgccaatgtacaagaaggcagcattgtaggattaacattcttgtctactgtatattatcttggaaggctcttgttaatatgttacacttaatattctccacagttacctttagagagaatttatgagaagttagtttctgatgcagaggtttttaggctgtgatttcatcaaaagtccttttagcattctacctcaaagggacacttagtatgcctaaaatttattcacttagttttccttttttatttgaaaaaatacatgacatgtaatctttttttcttgaattctttctcagattttaaagtactatattaaagaaaaaaattaatgtctaaagcctagcattcttgcagaaccctatactaacatgtaatggggagagggtggggcagatgagtagagaaacagattcaagcctcaagcttccaaagcatttttataaatggaaaatccttaaattatgaaacagcttgatatagtgtcctttttttaaaattcagaactttttttattgataatggagattgctgtttgagtttttaaacttaatctagaacagaggagtattaaaagtaatgctgtgctgcattatttaagactatcagcaaattatttgatagattgttcttacaacttgtattctgattacagaaccatcatgagtgtggaataaatactggattaaatcctttatcctggg

SEQ ID NO: 2571 - protein, 546 aa, Homo sapiens
MANNSPALTGNSQPQHQAAAAAAQQQQQCGGGGATKPAVSGKQGNVLPLWGNEKTMNLNPMILTNILSSPYFKVQLYELKTYHEVVDEIYFKVTHVEPWEKGSRKTAGQTGMCGGVRGVGTGGIVSTAFCLLYKLFTLKLTRKQVMGLITHTDSPYIRALGFMYIRYTQPPTDLWDWFESFLDDEEDLDVKAGGGCVMTIGEMLRSFLTKLEWFSTLFPRIPVPVQKNIDQQIKTRPRKIKKDGKEGAEEIDRHVERRRSRSPRRSLSPRRSPRRSRSRSHHREGHGSSSFDRELEREKERQRLEREAKEREKERRRSRSIDRGLERRRSRSRERHRSRSRSRDRKGDRRDRDREREKENERGRRRDRDYDKERGNEREKERERSRERSKEQRSRGEVEEKKHKEDKDDRRHRDDKRDSKKEKKHSRSRSRERKHRSRSRSRNAGKRSRSRSKEKSSKHKNESKEKSNKRSRSGSQGRTDSVEKSKKREHSPSKEKSRKRSRSKERSHKRDHSDSKDQSDKHDRRRSQSIEQESQEKQHKNKDETV

SEQ ID NO: 2572 - DNA, 5713 bp, Homo sapiens
atatccgccgggcccgccatcttgttcccaggggcagttggcggaagagatcgagctccctggctgccggctcgccttctgcgtggagttctcgcggtctgggtttcgctgtctgctcttggcccggggtcattttgtcggcgtcgggtgccctctcttgcccagctggggcacagcgaggcggccccttctcccgacgacgttcgatggagtagggtcccagaccgttgtcccgaagagcgagatcgagcttggccccctcccccccctccttccctccctccttccttccgccgcaacatggctaacaacagccccgcgctgacaggcaactcgcagccgcagcaccaggcggctgcagctgcggctcagcaacagcagcagtgcggcggcggcggcgctaccaagccggcggtctccggcaagcagggcaatgtgctcccgctctggggcaacgagaagaccatgaacctcaaccccatgatcctgaccaacatcctgtcgtcgccttacttcaaagtacagctctacgagctcaagacctaccacgaggtggtggacgagatctactttaaggtcacgcacgttgaaccatgggagaaaggaagcaggaaaacagcgggccagacagggatgtgcggaggggttcgaggtgttggaacaggaggaattgtttctacagcattttgcctgttatacaaattatttaccctgaagttaactcgaaagcaagtgatgggtcttataacacacacagactctccatatattagagcgcttggatttatgtatataagatatacacagccccctacagatctgtgggactggtttgaatccttccttgatgatgaagaggtatgtcaacaagggtaataatttgttttcttctgattactctcatatttttattatcttttatttattggtggtttaatgtcttcaagaacttcctgtagttaaatttatttcagtgagatacttttggaattaatgtccttttactgagacctgatggcttttatgtattttagggtaaatttctgaagttttattttcttgttttaaaattgtttaaatgtgtttggtaactattggaaaattttctcttcttaattatgttctgtgtattgtattgatcctgaattgtatagttaatagtgacttttcaagatggggcatgctcaagatcgaacagataataaaagatatgcacatagaatactaattgtagcttttttttcttctggaacatttcagttcttcaccctctagcttcttccaaatatcagtattcccacttgcatagaagtgcagaattgaagagttgggtgttacataaataggctaagtgtttggatgacttgttcaaggtgacaaaattttaattccagttttctgactcctagtacaccacacacacctttaaaaaagaaattttttaaattgtaattcgagtctccctaatttgaaatctgaaatactaagttagatttaaatcgtgtatgcattggctgggcgtggtggctcacattgtaatcccaacacttcgagagttcaagaccagcctgagcaatatagtgagacctcatctctacaaaaaaaagtttaaaaattagctgagcatagaggtatgcatcttagtcccacctacttgggaggctggggtgggaggatcacttgagcccaggagacagaatttgctgtgagccaagatcattgccactgcattccagcctgggtaacacagtaagaccctttctcaaaacaaaacaaaatatcatatatgcattaatttacttgcatggtgaagtccaacatgtcaaaaatgaaatgatgagctgtattgtccctatgtctacccagtctactactttgtgttttaaggttcataagactttttgagtgctatgtgtcagtagtctatttacagagttcatccaaagaatttattgaattaaaggatggttctaatggaaatctattgtgttttgttattacatgcacacctaaaaaaaaaaaaaatctcatttagacatggagaatttttatttttctctttttttttttttttttttttgcctgttaactgagttacttcactcagaagaagcaaaacgtgttttaaatcacaatctttaaggtctttttatctttagatcagtttttcagactgaagtgcttctcccttctgtctttaaaaaagcatgttcctcttcataattggtgttgtattggttttgtttctggatgcctctattttatgttttttattgtgtttacaaatctgaggtcctctatttaagctaacttattgttttcttccttagatatctgcagcgattatatttggaaatactgtatatctgaacacttaaatgtgtgtgagtgcaagcagttttacctttagctcttgttttcctgtttagataacaaatctcactttccttgtgtgcttgcactataggtttgggactgacaatagctgactaacatgtcctgagctgtgagagggcatagcaagaaggccttcatgcggtaatgacccttttcagagacaatggtcatcatggattatgcgtttccaattatttgttcatttatttattttctacataactaaattagaaacctcactgcttcatggcagttggtttgctattgcttccagttttattagggcttcattttatattagagctgttaaaagataacctttagacaggaattatctaaagtagatcatatgtagctaggttatggtgcaaggtatatgatgtgtgcaaatatgtccacagaaataaatacatagtaggtatgtggaatgtaaatttaagtcaatcgttccgcatagtttagaaatgtaaggggctttttcatattgttaactgagtgagatcagttccctttatgcctgtgaggctgcagggtttgttctcacttgcatgcacacactaagcccaaatatttctgttcattcattgtcagatcaggatatgaaaataaaatttttctgttagttttttttgtattgagattccaaagatggtaatatttttataatattcatgtatatatggaaatactttttttgacggctagggtatcttttgtgtttctgtaggacctagatgtgaaggctggtggaggctgtgtaatgaccattggagaaatgctacgatcttttctcacaaaactggagtggttttctaccttgtttccaagaattccagttccagttcaaaagaatattgatcaacagattaaaacccgacctagaaaaatcaagaaagatgggaaggaaggtgctgaggaaatagacagacatgttgaacgcagacgttcaaggtaatgtcactcttgaattatgcttatttttcatatatgctttatacaaaattaatggttctgagaaatagcaagttcttaggaatttgtttttactgttcattttattagtttgtcacttttaccccccaaagattattttcttcctttcagggctttttctataaaattatgcatctgtaaatgagaacaataaaattttttgctttaatgattcttgacatggccttaagcttgaggacatgaataaataatgctgttgaaagttttactgtgaaaagaattgcatatgttttattcattgaaattttctttctccctccgccttccttaggtctccaaggagatctctgagtccacggaggtccccaagaaggtcaagaagtagaagtcatcatcgggagggccatgggtcttctagttttgacagagaattagaaagagagaaagaacgccagcgactagagcgtgaagccaaagaaagggagaaagaacggcgaagatcccgaagtattgaccgggggttagaacgcaggcgcagcagaagtagggaaaggcatagaagtcgcagtcgaagtcgtgataggaaaggggatagaagggacagggatcgagaaagagagaaagaaaatgagagaggtagaagacgagatcgtgactatgataaggaaagaggaaatgaacgagaaaaagagagagagcgatcaagagaaaggtccaaggaacagagaagtaggggagaggtagaagagaagaaacataaagaagacaaagatgataggcggcacagagatgacaaaagagattccaagaaagagaaaaaacacagtagaagcagaagcagagaaaggaaacacagaagtaggagtcgaagtagaaatgcagggaaacgaagtagaagtagaagcaaagagaaatcaagtaaacataaaaatgaaagtaaagaaaaatcaaataaacgaagtcgaagtggcagtcaaggaagaactgacagtgttgaaaaatcaaaaaaacgggaacatagtcccagcaaagaaaaatctagaaagcgtagtagaagcaaagaacgttcccacaaacgagatcacagtgatagtaaggaccagtcagacaaacatgatcgtcgaaggagccaaagtatagaacaagagagccaagaaaaacagcataaaaacaaagatgagactgtgtgaaaatattttgtaaaagtggatcacattgaatcctataaatgattaaatctgcttttttcccccacgttgagattgtgcagtagttcgcactcctcaagctctccctgtaggctgcattttcatttcctctttcgtgtagggaagtgcctttgtaattccatttattgcattggtgttttcacccaattgttaagtttgatacatgatgcacagattgttcttgcatttttattgtttgtttttgaaatgtacagtctgtacatatgtcctgaaaatgttttaattcctttggcatggttgccatgttggttaaatttgtataaggcaataaactgccactaatctatttttgttttgtaggtgtgggattatggtttgtgtactgaagttagcatggctgtgcttttcgtaatagaatgctaaagactttgagaatggatcttggatgtctattataggagaagtatgtgctgccaatgtacaagaaggcagcattgtaggattaacattcttgtctactgtatattatcttggaaggctcttgttaatatgttacacttaatattctccacagttacctttagagagaatttatgagaagttagtttctgatgcagaggtttttaggctgtgatttcatcaaaagtccttttagcattctacctcaaagggacacttagtatgcctaaaatttattcacttagttttccttttttatttgaaaaaatacatgacatgtaatctttttttcttgaattctttctcagattttaaagtactatattaaagaaaaaaattaatgtctaaagcctagcattcttgcagaaccctatactaacatgtaatggggagagggtggggcagatgagtagagaaacagattcaagcctcaagcttccaaagcatttttataaatggaaaatccttaaattatgaaacagcttgatatagtgtcctttttttaaaattcagaactttttttattgataatggagattgctgtttgagtttttaaacttaatctagaacagaggagtattaaaagtaatgctgtgctgcattatttaagactatcagcaaattatttgatagattgttcttacaacttgtattctgattacagaaccatcatgagtgtggaataaatactggattaaatcctttatcctggg

SEQ ID NO: 2573 - protein, 191 aa, Homo sapiens; identical to SEQ ID NO: 2565

SEQ ID NO: 2574 - DNA, 3779 bp, Homo sapiens
atatccgccgggcccgccatcttgttcccaggggcagttggcggaagagatcgagctccctggctgccggctcgccttctgcgtggagttctcgcggtctgggtttcgctgtctgctcttggcccggggtcattttgtcggcgtcgggtgccctctcttgcccagctggggcacagcgaggcggccccttctcccgacgacgttcgatggagtagggtcccagaccgttgtcccgaagagcgagatcgagcttggccccctcccccccctccttccctccctccttccttccgccgcaacatggctaacaacagccccgcgctgacaggcaactcgcagccgcagcaccaggcggctgcagctgcggctcagcaacagcagcagtgcggcggcggcggcgctaccaagccggcggtctccggcaagcagggcaatgtgctcccgctctggggcaacgagaagaccatgaacctcaaccccatgatcctgaccaacatcctgtcgtcgccttacttcaaagtacagctctacgagctcaagacctaccacgaggtggtggacgagatctactttaaggattgactcagtcttgcagcgaggctcggagcagcccagggtcgcaggtagaggtcacgcacgttgaaccatgggagaaaggaagcaggaaaacagcgggccagacagggatgtgcggaggggttcgaggtgttggaacaggaggaattgtttctacagcattttgcctgttatacaaattatttaccctgaagttaactcgaaagcaagtgatgggtcttataacacacacagactctccatatattagagcgcttggatttatgtatataagatatacacagccccctacagatctgtgggactggtttgaatccttccttgatgatgaagaggacctagatgtgaaggctggtggaggctgtgtaatgaccattggagaaatgctacgatcttttctcacaaaactggagtggttttctaccttgtttccaagaattccagttccagttcaaaagaatattgatcaacagattaaaacccgacctagaaaaatcaagaaagatgggaaggaaggtgctgaggaaatagacagacatgttgaacgcagacgttcaaggtctccaaggagatctctgagtccacggaggtccccaagaaggtcaagaagtagaagtcatcatcgggagggccatgggtcttctagttttgacagagaattagaaagagagaaagaacgccagcgactagagcgtgaagccaaagaaagggagaaagaacggcgaagatcccgaagtattgaccgggggttagaacgcaggcgcagcagaagtagggaaaggcatagaagtcgcagtcgaagtcgtgataggaaaggggatagaagggacagggatcgagaaagagagaaagaaaatgagagaggtagaagacgagatcgtgactatgataaggaaagaggaaatgaacgagaaaaagagagagagcgatcaagagaaaggtccaaggaacagagaagtaggggagaggtagaagagaagaaacataaagaagacaaagatgataggcggcacagagatgacaaaagagattccaagaaagagaaaaaacacagtagaagcagaagcagagaaaggaaacacagaagtaggagtcgaagtagaaatgcagggaaacgaagtagaagtagaagcaaagagaaatcaagtaaacataaaaatgaaagtaaagaaaaatcaaataaacgaagtcgaagtggcagtcaaggaagaactgacagtgttgaaaaatcaaaaaaacgggaacatagtcccagcaaagaaaaatctagaaagcgtagtagaagcaaagaacgttcccacaaacgagatcacagtgatagtaaggaccagtcagacaaacatgatcgtcgaaggagccaaagtatagaacaagagagccaagaaaaacagcataaaaacaaagatgagactgtgtgaaaatattttgtaaaagtggatcacattgaatcctataaatgattaaatctgcttttttcccccacgttgagattgtgcagtagttcgcactcctcaagctctccctgtaggctgcattttcatttcctctttcgtgtagggaagtgcctttgtaattccatttattgcattggtgttttcacccaattgttaagtttgatacatgatgcacagattgttcttgcatttttattgtttgtttttgaaatgtacagtctgtacatatgtcctgaaaatgttttaattcctttggcatggttgccatgttggttaaatttgtataaggcaataaactgccactaatctatttttgttttgtaggtgtgggattatggtttgtgtactgaagttagcatggctgtgcttttcgtaatagaatgctaaagactttgagaatggatcttggatgtctattataggagaagtatgtgctgccaatgtacaagaaggcagcattgtaggattaacattcttgtctactgtatattatcttggaaggctcttgttaatatgttacacttaatattctccacagttacctttagagagaatttatgagaagttagtttctgatgcagaggtttttaggctgtgatttcatcaaaagtccttttagcattctacctcaaagggacacttagtatgcctaaaatttattcacttagttttccttttttatttgaaaaaatacatgacatgtaatctttttttcttgaattctttctcagattttaaagtactatattaaagaaaaaaattaatgtctaaagcctagcattcttgcagaaccctatactaacatgtaatggggagagggtggggcagatgagtagagaaacagattcaagcctcaagcttccaaagcatttttataaatggaaaatccttaaattatgaaacagcttgatatagtgtcctttttttaaaattcagaactttttttattgataatggagattgctgtttgagtttttaaacttaatctagaacagaggagtattaaaagtaatgctgtgctgcattatttaagactatcagcaaattatttgatagattgttcttacaacttgtattctgattacagaaccatcatgagtgtggaataaatactggattaaatcctttatcctgggtcttggcttttcccccatttgttaaatttttttagcatatttatattgtggaaattgatgaaacgtcagtagagtcacactttgtgtacagggatgtcttagtgcccagatgacaagtgaattttggagaaatgcatagactgggattgggcatgtggtaatcaataatctttattagaatacttgataatggcagttccctttgtcagtggttgttacatgtgtcatttgattactttgttccatgtcaaagacgtttattgggataccttttacttggacaatatgttagcattttttaaaatttggacttgaaattctttaagataattcacccaattctttttagaaaagaaaatagaggcccaaagtaatgatgtcagtgctagggctaaaactcagtattctgacagtgtagtgaacctggcacgcacattgaggtttgttttatctcactggttatactggccaactaatgcgcactcagaagccaccttgcaaaaatgttaaatggagcaaacgagtacacttgcaagagtcctccatatgtgggcttaacatatgtaccactccattttagaaaaatctcattaaatgaattcttctaaaaatg

SEQ ID NO: 2575 - protein, 435 aa, Homo sapiens
MCGGVRGVGTGGIVSTAFCLLYKLFTLKLTRKQVMGLITHTDSPYIRALGFMYIRYTQPPTDLWDWFESFLDDEEDLDVKAGGGCVMTIGEMLRSFLTKLEWFSTLFPRIPVPVQKNIDQQIKTRPRKIKKDGKEGAEEIDRHVERRRSRSPRRSLSPRRSPRRSRSRSHHREGHGSSSFDRELEREKERQRLEREAKEREKERRRSRSIDRGLERRRSRSRERHRSRSRSRDRKGDRRDRDREREKENERGRRRDRDYDKERGNEREKERERSRERSKEQRSRGEVEEKKHKEDKDDRRHRDDKRDSKKEKKHSRSRSRERKHRSRSRSRNAGKRSRSRSKEKSSKHKNESKEKSNKRSRSGSQGRTDSVEKSKKREHSPSKEKSRKRSRSKERSHKRDHSDSKDQSDKHDRRRSQSIEQESQEKQHKNKDETV

SEQ ID NO: 2576 - DNA, 6326 bp, Homo sapiens
atatccgccgggcccgccatcttgttcccaggggcagttggcggaagagatcgagctccctggctgccggctcgccttctgcgtggagttctcgcggtctgggtttcgctgtctgctcttggcccggggtcattttgtcggcgtcgggtgccctctcttgcccagctggggcacagcgaggcggccccttctcccgacgacgttcgatggagtagggtcccagaccgttgtcccgaagagcgagatcgagcttggccccctcccccccctccttccctccctccttccttccgccgcaacatggctaacaacagccccgcgctgacaggcaactcgcagccgcagcaccaggcggctgcagctgcggctcagcaacagcagcagtgcggcggcggcggcgctaccaagccggcggtctccggcaagcagggcaatgtgctcccgctctggggcaacgagaagaccatgaacctcaaccccatgatcctgaccaacatcctgtcgtcgccttacttcaaagtacagctctacgagctcaagacctaccacgaggtggtggacgagatctactttaaggtcacgcacgttgaaccatgggagaaaggaagcaggaaaacagcgggccagacagggatgtgcggaggggttcgaggtgttggaacaggaggaattgtttctacagcattttgcctgttatacaaattatttaccctgaagttaactcgaaagcaagtgatgggtcttataacacacacagactctccatatattagagcgcttggatttatgtatataagatatacacagccccctacagatctgtgggactggtttgaatccttccttgatgatgaagaggtatgtcaacaagggtaataatttgttttcttctgattactctcatatttttattatcttttatttattggtggtttaatgtcttcaagaacttcctgtagttaaatttatttcagtgagatacttttggaattaatgtccttttactgagacctgatggcttttatgtattttagggtaaatttctgaagttttattttcttgttttaaaattgtttaaatgtgtttggtaactattggaaaattttctcttcttaattatgttctgtgtattgtattgatcctgaattgtatagttaatagtgacttttcaagatggggcatgctcaagatcgaacagataataaaagatatgcacatagaatactaattgtagcttttttttcttctggaacatttcagttcttcaccctctagcttcttccaaatatcagtattcccacttgcatagaagtgcagaattgaagagttgggtgttacataaataggctaagtgtttggatgacttgttcaaggtgacaaaattttaattccagttttctgactcctagtacaccacacacacctttaaaaaagaaattttttaaattgtaattcgagtctccctaatttgaaatctgaaatactaagttagatttaaatcgtgtatgcattggctgggcgtggtggctcacattgtaatcccaacacttcgagagttcaagaccagcctgagcaatatagtgagacctcatctctacaaaaaaaagtttaaaaattagctgagcatagaggtatgcatcttagtcccacctacttgggaggctggggtgggaggatcacttgagcccaggagacagaatttgctgtgagccaagatcattgccactgcattccagcctgggtaacacagtaagaccctttctcaaaacaaaacaaaatatcatatatgcattaatttacttgcatggtgaagtccaacatgtcaaaaatgaaatgatgagctgtattgtccctatgtctacccagtctactactttgtgttttaaggttcataagactttttgagtgctatgtgtcagtagtctatttacagagttcatccaaagaatttattgaattaaaggatggttctaatggaaatctattgtgttttgttattacatgcacacctaaaaaaaaaaaaaatctcatttagacatggagaatttttatttttctctttttttttttttttttttttgcctgttaactgagttacttcactcagaagaagcaaaacgtgttttaaatcacaatctttaaggtctttttatctttagatcagtttttcagactgaagtgcttctcccttctgtctttaaaaaagcatgttcctcttcataattggtgttgtattggttttgtttctggatgcctctattttatgttttttattgtgtttacaaatctgaggtcctctatttaagctaacttattgttttcttccttagatatctgcagcgattatatttggaaatactgtatatctgaacacttaaatgtgtgtgagtgcaagcagttttacctttagctcttgttttcctgtttagataacaaatctcactttccttgtgtgcttgcactataggtttgggactgacaatagctgactaacatgtcctgagctgtgagagggcatagcaagaaggccttcatgcggtaatgacccttttcagagacaatggtcatcatggattatgcgtttccaattatttgttcatttatttattttctacataactaaattagaaacctcactgcttcatggcagttggtttgctattgcttccagttttattagggcttcattttatattagagctgttaaaagataacctttagacaggaattatctaaagtagatcatatgtagctaggttatggtgcaaggtatatgatgtgtgcaaatatgtccacagaaataaatacatagtaggtatgtggaatgtaaatttaagtcaatcgttccgcatagtttagaaatgtaaggggctttttcatattgttaactgagtgagatcagttccctttatgcctgtgaggctgcagggtttgttctcacttgcatgcacacactaagcccaaatatttctgttcattcattgtcagatcaggatatgaaaataaaatttttctgttagttttttttgtattgagattccaaagatggtaatatttttataatattcatgtatatatggaaatactttttttgacggctagggtatcttttgtgtttctgtaggacctagatgtgaaggctggtggaggctgtgtaatgaccattggagaaatgctacgatcttttctcacaaaactggagtggttttctaccttgtttccaagaattccagttccagttcaaaagaatattgatcaacagattaaaacccgacctagaaaaatcaagaaagatgggaaggaaggtgctgaggaaatagacagacatgttgaacgcagacgttcaaggtaatgtcactcttgaattatgcttatttttcatatatgctttatacaaaattaatggttctgagaaatagcaagttcttaggaatttgtttttactgttcattttattagtttgtcacttttaccccccaaagattattttcttcctttcagggctttttctataaaattatgcatctgtaaatgagaacaataaaattttttgctttaatgattcttgacatggccttaagcttgaggacatgaataaataatgctgttgaaagttttactgtgaaaagaattgcatatgttttattcattgaaattttctttctccctccgccttccttaggtctccaaggagatctctgagtccacggaggtccccaagaaggtcaagaagtagaagtcatcatcgggagggccatgggtcttctagttttgacagagaattagaaagagagaaagaacgccagcgactagagcgtgaagccaaagaaagggagaaagaacggcgaagatcccgaagtattgaccgggggttagaacgcaggcgcagcagaagtagggaaaggcatagaagtcgcagtcgaagtcgtgataggaaaggggatagaagggacagggatcgagaaagagagaaagaaaatgagagaggtagaagacgagatcgtgactatgataaggaaagaggaaatgaacgagaaaaagagagagagcgatcaagagaaaggtccaaggaacagagaagtaggggagaggtagaagagaagaaacataaagaagacaaagatgataggcggcacagagatgacaaaagagattccaagaaagagaaaaaacacagtagaagcagaagcagagaaaggaaacacagaagtaggagtcgaagtagaaatgcagggaaacgaagtagaagtagaagcaaagagaaatcaagtaaacataaaaatgaaagtaaagaaaaatcaaataaacgaagtcgaagtggcagtcaaggaagaactgacagtgttgaaaaatcaaaaaaacgggaacatagtcccagcaaagaaaaatctagaaagcgtagtagaagcaaagaacgttcccacaaacgagatcacagtgatagtaaggaccagtcagacaaacatgatcgtcgaaggagccaaagtatagaacaagagagccaagaaaaacagcataaaaacaaagatgagactgtgtgaaaatattttgtaaaagtggatcacattgaatcctataaatgattaaatctgcttttttcccccacgttgagattgtgcagtagttcgcactcctcaagctctccctgtaggctgcattttcatttcctctttcgtgtagggaagtgcctttgtaattccatttattgcattggtgttttcacccaattgttaagtttgatacatgatgcacagattgttcttgcatttttattgtttgtttttgaaatgtacagtctgtacatatgtcctgaaaatgttttaattcctttggcatggttgccatgttggttaaatttgtataaggcaataaactgccactaatctatttttgttttgtaggtgtgggattatggtttgtgtactgaagttagcatggctgtgcttttcgtaatagaatgctaaagactttgagaatggatcttggatgtctattataggagaagtatgtgctgccaatgtacaagaaggcagcattgtaggattaacattcttgtctactgtatattatcttggaaggctcttgttaatatgttacacttaatattctccacagttacctttagagagaatttatgagaagttagtttctgatgcagaggtttttaggctgtgatttcatcaaaagtccttttagcattctacctcaaagggacacttagtatgcctaaaatttattcacttagttttccttttttatttgaaaaaatacatgacatgtaatctttttttcttgaattctttctcagattttaaagtactatattaaagaaaaaaattaatgtctaaagcctagcattcttgcagaaccctatactaacatgtaatggggagagggtggggcagatgagtagagaaacagattcaagcctcaagcttccaaagcatttttataaatggaaaatccttaaattatgaaacagcttgatatagtgtcctttttttaaaattcagaactttttttattgataatggagattgctgtttgagtttttaaacttaatctagaacagaggagtattaaaagtaatgctgtgctgcattatttaagactatcagcaaattatttgatagattgttcttacaacttgtattctgattacagaaccatcatgagtgtggaataaatactggattaaatcctttatcctgggtcttggcttttcccccatttgttaaatttttttagcatatttatattgtggaaattgatgaaacgtcagtagagtcacactttgtgtacagggatgtcttagtgcccagatgacaagtgaattttggagaaatgcatagactgggattgggcatgtggtaatcaataatctttattagaatacttgataatggcagttccctttgtcagtggttgttacatgtgtcatttgattactttgttccatgtcaaagacgtttattgggataccttttacttggacaatatgttagcattttttaaaatttggacttgaaattctttaagataattcacccaattctttttagaaaagaaaatagaggcccaaagtaatgatgtcagtgctagggctaaaactcagtattctgacagtgtagtgaacctggcacgcacattgaggtttgttttatctcactggttatactggccaactaatgcgcactcagaagccaccttgcaaaaatgttaaatggagcaaacgagtacacttgcaagagtcctccatatgtgggcttaacatatgtaccactccattttagaaaaatctcattaaatgaattcttctaaaaatg

SEQ ID NO: 2577 - protein, 191 aa, Homo sapiens; identical to SEQ ID NO: 2565

SEQ ID NO: 2578 - DNA, 3726 bp, Homo sapiens
atatccgccgggcccgccatcttgttcccaggggcagttggcggaagagatcgagctccctggctgccggctcgccttctgcgtggagttctcgcggtctgggtttcgctgtctgctcttggcccggggtcattttgtcggcgtcgggtgccctctcttgcccagctggggcacagcgaggcggccccttctcccgacgacgttcgatggagtagggtcccagaccgttgtcccgaagagcgagatcgagcttggccccctcccccccctccttccctccctccttccttccgccgcaacatggctaacaacagccccgcgctgacaggcaactcgcagccgcagcaccaggcggctgcagctgcggctcagcaacagcagcagtgcggcggcggcggcgctaccaagccggcggtctccggcaagcagggcaatgtgctcccgctctggggcaacgagaagaccatgaacctcaaccccatgatcctgaccaacatcctgtcgtcgccttacttcaaagtacagctctacgagctcaagacctaccacgaggtggtggacgagatctactttaaggtcacgcacgttgaaccatgggagaaaggaagcaggaaaacagcgggccagacagggatgtgcggaggggttcgaggtgttggaacaggaggaattgtttctacagcattttgcctgttatacaaattatttaccctgaagttaactcgaaagcaagtgatgggtcttataacacacacagactctccatatattagagcgcttggatttatgtatataagatatacacagccccctacagatctgtgggactggtttgaatccttccttgatgatgaagaggacctagatgtgaaggctggtggaggctgtgtaatgaccattggagaaatgctacgatcttttctcacaaaactggagtggttttctaccttgtttccaagaattccagttccagttcaaaagaatattgatcaacagattaaaacccgacctagaaaaatcaagaaagatgggaaggaaggtgctgaggaaatagacagacatgttgaacgcagacgttcaaggtctccaaggagatctctgagtccacggaggtccccaagaaggtcaagaagtagaagtcatcatcgggagggccatgggtcttctagttttgacagagaattagaaagagagaaagaacgccagcgactagagcgtgaagccaaagaaagggagaaagaacggcgaagatcccgaagtattgaccgggggttagaacgcaggcgcagcagaagtagggaaaggcatagaagtcgcagtcgaagtcgtgataggaaaggggatagaagggacagggatcgagaaagagagaaagaaaatgagagaggtagaagacgagatcgtgactatgataaggaaagaggaaatgaacgagaaaaagagagagagcgatcaagagaaaggtccaaggaacagagaagtaggggagaggtagaagagaagaaacataaagaagacaaagatgataggcggcacagagatgacaaaagagattccaagaaagagaaaaaacacagtagaagcagaagcagagaaaggaaacacagaagtaggagtcgaagtagaaatgcagggaaacgaagtagaagtagaagcaaagagaaatcaagtaaacataaaaatgaaagtaaagaaaaatcaaataaacgaagtcgaagtggcagtcaaggaagaactgacagtgttgaaaaatcaaaaaaacgggaacatagtcccagcaaagaaaaatctagaaagcgtagtagaagcaaagaacgttcccacaaacgagatcacagtgatagtaaggaccagtcagacaaacatgatcgtcgaaggagccaaagtatagaacaagagagccaagaaaaacagcataaaaacaaagatgagactgtgtgaaaatattttgtaaaagtggatcacattgaatcctataaatgattaaatctgcttttttcccccacgttgagattgtgcagtagttcgcactcctcaagctctccctgtaggctgcattttcatttcctctttcgtgtagggaagtgcctttgtaattccatttattgcattggtgttttcacccaattgttaagtttgatacatgatgcacagattgttcttgcatttttattgtttgtttttgaaatgtacagtctgtacatatgtcctgaaaatgttttaattcctttggcatggttgccatgttggttaaatttgtataaggcaataaactgccactaatctatttttgttttgtaggtgtgggattatggtttgtgtactgaagttagcatggctgtgcttttcgtaatagaatgctaaagactttgagaatggatcttggatgtctattataggagaagtatgtgctgccaatgtacaagaaggcagcattgtaggattaacattcttgtctactgtatattatcttggaaggctcttgttaatatgttacacttaatattctccacagttacctttagagagaatttatgagaagttagtttctgatgcagaggtttttaggctgtgatttcatcaaaagtccttttagcattctacctcaaagggacacttagtatgcctaaaatttattcacttagttttccttttttatttgaaaaaatacatgacatgtaatctttttttcttgaattctttctcagattttaaagtactatattaaagaaaaaaattaatgtctaaagcctagcattcttgcagaaccctatactaacatgtaatggggagagggtggggcagatgagtagagaaacagattcaagcctcaagcttccaaagcatttttataaatggaaaatccttaaattatgaaacagcttgatatagtgtcctttttttaaaattcagaactttttttattgataatggagattgctgtttgagtttttaaacttaatctagaacagaggagtattaaaagtaatgctgtgctgcattatttaagactatcagcaaattatttgatagattgttcttacaacttgtattctgattacagaaccatcatgagtgtggaataaatactggattaaatcctttatcctgggtcttggcttttcccccatttgttaaatttttttagcatatttatattgtggaaattgatgaaacgtcagtagagtcacactttgtgtacagggatgtcttagtgcccagatgacaagtgaattttggagaaatgcatagactgggattgggcatgtggtaatcaataatctttattagaatacttgataatggcagttccctttgtcagtggttgttacatgtgtcatttgattactttgttccatgtcaaagacgtttattgggataccttttacttggacaatatgttagcattttttaaaatttggacttgaaattctttaagataattcacccaattctttttagaaaagaaaatagaggcccaaagtaatgatgtcagtgctagggctaaaactcagtattctgacagtgtagtgaacctggcacgcacattgaggtttgttttatctcactggttatactggccaactaatgcgcactcagaagccaccttgcaaaaatgttaaatggagcaaacgagtacacttgcaagagtcctccatatgtgggcttaacatatgtaccactccattttagaaaaatctcattaaatgaattcttctaaaaatg

SEQ ID NO: 2579 - protein, 546 aa, Homo sapiens; identical to SEQ ID NO: 2571

SEQ ID NO: 2580 - DNA, 5924 bp, Homo sapiens
atatccgccgggcccgccatcttgttcccaggggcagttggcggaagagatcgagctccctggctgccggctcgccttctgcgtggagttctcgcggtctgggtttcgctgtctgctcttggcccggggtcattttgtcggcgtcgggtgccctctcttgcccagctggggcacagcgaggcggccccttctcccgacgacgttcgatggagtagggtcccagaccgttgtcccgaagagcgagatcgagcttggccccctcccccccctccttccctccctccttccttccgccgcaacatggctaacaacagccccgcgctgacaggcaactcgcagccgcagcaccaggcggctgcagctgcggctcagcaacagcagcagtgcggcggcggcggcgctaccaagccggcggtctccggcaagcagggcaatgtgctcccgctctggggcaacgagaagaccatgaacctcaaccccatgatcctgaccaacatcctgtcgtcgccttacttcaaagtacagctctacgagctcaagacctaccacgaggtggtggacgagatctactttaaggtcacgcacgttgaaccatgggagaaaggaagcaggaaaacagcgggccagacagggatgtgcggaggggttcgaggtgttggaacaggaggaattgtttctacagcattttgcctgttatacaaattatttaccctgaagttaactcgaaagcaagtgatgggtcttataacacacacagactctccatatattagagcgcttggatttatgtatataagatatacacagccccctacagatctgtgggactggtttgaatccttccttgatgatgaagagttcttcaccctctagcttcttccaaatatcagtattcccacttgcatagaagtgcagaattgaagagttgggtgttacataaataggctaagtgtttggatgacttgttcaaggtgacaaaattttaattccagttttctgactcctagtacaccacacacacctttaaaaaagaaattttttaaattgtaattcgagtctccctaatttgaaatctgaaatactaagttagatttaaatcgtgtatgcattggctgggcgtggtggctcacattgtaatcccaacacttcgagagttcaagaccagcctgagcaatatagtgagacctcatctctacaaaaaaaagtttaaaaattagctgagcatagaggtatgcatcttagtcccacctacttgggaggctggggtgggaggatcacttgagcccaggagacagaatttgctgtgagccaagatcattgccactgcattccagcctgggtaacacagtaagaccctttctcaaaacaaaacaaaatatcatatatgcattaatttacttgcatggtgaagtccaacatgtcaaaaatgaaatgatgagctgtattgtccctatgtctacccagtctactactttgtgttttaaggttcataagactttttgagtgctatgtgtcagtagtctatttacagagttcatccaaagaatttattgaattaaaggatggttctaatggaaatctattgtgttttgttattacatgcacacctaaaaaaaaaaaaaatctcatttagacatggagaatttttatttttctctttttttttttttttttttttgcctgttaactgagttacttcactcagaagaagcaaaacgtgttttaaatcacaatctttaaggtctttttatctttagatcagtttttcagactgaagtgcttctcccttctgtctttaaaaaagcatgttcctcttcataattggtgttgtattggttttgtttctggatgcctctattttatgttttttattgtgtttacaaatctgaggtcctctatttaagctaacttattgttttcttccttagatatctgcagcgattatatttggaaatactgtatatctgaacacttaaatgtgtgtgagtgcaagcagttttacctttagctcttgttttcctgtttagataacaaatctcactttccttgtgtgcttgcactataggtttgggactgacaatagctgactaacatgtcctgagctgtgagagggcatagcaagaaggccttcatgcggtaatgacccttttcagagacaatggtcatcatggattatgcgtttccaattatttgttcatttatttattttctacataactaaattagaaacctcactgcttcatggcagttggtttgctattgcttccagttttattagggcttcattttatattagagctgttaaaagataacctttagacaggaattatctaaagtagatcatatgtagctaggttatggtgcaaggtatatgatgtgtgcaaatatgtccacagaaataaatacatagtaggtatgtggaatgtaaatttaagtcaatcgttccgcatagtttagaaatgtaaggggctttttcatattgttaactgagtgagatcagttccctttatgcctgtgaggctgcagggtttgttctcacttgcatgcacacactaagcccaaatatttctgttcattcattgtcagatcaggatatgaaaataaaatttttctgttagttttttttgtattgagattccaaagatggtaatatttttataatattcatgtatatatggaaatactttttttgacggctagggtatcttttgtgtttctgtaggacctagatgtgaaggctggtggaggctgtgtaatgaccattggagaaatgctacgatcttttctcacaaaactggagtggttttctaccttgtttccaagaattccagttccagttcaaaagaatattgatcaacagattaaaacccgacctagaaaaatcaagaaagatgggaaggaaggtgctgaggaaatagacagacatgttgaacgcagacgttcaaggtaatgtcactcttgaattatgcttatttttcatatatgctttatacaaaattaatggttctgagaaatagcaagttcttaggaatttgtttttactgttcattttattagtttgtcacttttaccccccaaagattattttcttcctttcagggctttttctataaaattatgcatctgtaaatgagaacaataaaattttttgctttaatgattcttgacatggccttaagcttgaggacatgaataaataatgctgttgaaagttttactgtgaaaagaattgcatatgttttattcattgaaattttctttctccctccgccttccttaggtctccaaggagatctctgagtccacggaggtccccaagaaggtcaagaagtagaagtcatcatcgggagggccatgggtcttctagttttgacagagaattagaaagagagaaagaacgccagcgactagagcgtgaagccaaagaaagggagaaagaacggcgaagatcccgaagtattgaccgggggttagaacgcaggcgcagcagaagtagggaaaggcatagaagtcgcagtcgaagtcgtgataggaaaggggatagaagggacagggatcgagaaagagagaaagaaaatgagagaggtagaagacgagatcgtgactatgataaggaaagaggaaatgaacgagaaaaagagagagagcgatcaagagaaaggtccaaggaacagagaagtaggggagaggtagaagagaagaaacataaagaagacaaagatgataggcggcacagagatgacaaaagagattccaagaaagagaaaaaacacagtagaagcagaagcagagaaaggaaacacagaagtaggagtcgaagtagaaatgcagggaaacgaagtagaagtagaagcaaagagaaatcaagtaaacataaaaatgaaagtaaagaaaaatcaaataaacgaagtcgaagtggcagtcaaggaagaactgacagtgttgaaaaatcaaaaaaacgggaacatagtcccagcaaagaaaaatctagaaagcgtagtagaagcaaagaacgttcccacaaacgagatcacagtgatagtaaggaccagtcagacaaacatgatcgtcgaaggagccaaagtatagaacaagagagccaagaaaaacagcataaaaacaaagatgagactgtgtgaaaatattttgtaaaagtggatcacattgaatcctataaatgattaaatctgcttttttcccccacgttgagattgtgcagtagttcgcactcctcaagctctccctgtaggctgcattttcatttcctctttcgtgtagggaagtgcctttgtaattccatttattgcattggtgttttcacccaattgttaagtttgatacatgatgcacagattgttcttgcatttttattgtttgtttttgaaatgtacagtctgtacatatgtcctgaaaatgttttaattcctttggcatggttgccatgttggttaaatttgtataaggcaataaactgccactaatctatttttgttttgtaggtgtgggattatggtttgtgtactgaagttagcatggctgtgcttttcgtaatagaatgctaaagactttgagaatggatcttggatgtctattataggagaagtatgtgctgccaatgtacaagaaggcagcattgtaggattaacattcttgtctactgtatattatcttggaaggctcttgttaatatgttacacttaatattctccacagttacctttagagagaatttatgagaagttagtttctgatgcagaggtttttaggctgtgatttcatcaaaagtccttttagcattctacctcaaagggacacttagtatgcctaaaatttattcacttagttttccttttttatttgaaaaaatacatgacatgtaatctttttttcttgaattctttctcagattttaaagtactatattaaagaaaaaaattaatgtctaaagcctagcattcttgcagaaccctatactaacatgtaatggggagagggtggggcagatgagtagagaaacagattcaagcctcaagcttccaaagcatttttataaatggaaaatccttaaattatgaaacagcttgatatagtgtcctttttttaaaattcagaactttttttattgataatggagattgctgtttgagtttttaaacttaatctagaacagaggagtattaaaagtaatgctgtgctgcattatttaagactatcagcaaattatttgatagattgttcttacaacttgtattctgattacagaaccatcatgagtgtggaataaatactggattaaatcctttatcctgggtcttggcttttcccccatttgttaaatttttttagcatatttatattgtggaaattgatgaaacgtcagtagagtcacactttgtgtacagggatgtcttagtgcccagatgacaagtgaattttggagaaatgcatagactgggattgggcatgtggtaatcaataatctttattagaatacttgataatggcagttccctttgtcagtggttgttacatgtgtcatttgattactttgttccatgtcaaagacgtttattgggataccttttacttggacaatatgttagcattttttaaaatttggacttgaaattctttaagataattcacccaattctttttagaaaagaaaatagaggcccaaagtaatgatgtcagtgctagggctaaaactcagtattctgacagtgtagtgaacctggcacgcacattgaggtttgttttatctcactggttatactggccaactaatgcgcactcagaagccaccttgcaaaaatgttaaatggagcaaacgagtacacttgcaagagtcctccatatgtgggcttaacatatgtaccactccattttagaaaaatctcattaaatgaattcttctaaaaatg

SEQ ID NO: 2581 - protein, 190 aa, Homo sapiens; identical to SEQ ID NO: 2567

SEQ ID NO: 2582 - DNA, 4097 bp, Homo sapiens
atatccgccgggcccgccatcttgttcccaggggcagttggcggaagagatcgagctccctggctgccggctcgccttctgcgtggagttctcgcggtctgggtttcgctgtctgctcttggcccggggtcattttgtcggcgtcgggtgccctctcttgcccagctggggcacagcgaggcggccccttctcccgacgacgttcgatggagtagggtcccagaccgttgtcccgaagagcgagatcgagcttggccccctcccccccctccttccctccctccttccttccgccgcaacatggctaacaacagccccgcgctgacaggcaactcgcagccgcagcaccaggcggctgcagctgcggctcagcaacagcagcagtgcggcggcggcggcgctaccaagccggcggtctccggcaagcagggcaatgtgctcccgctctggggcaacgagaagaccatgaacctcaaccccatgatcctgaccaacatcctgtcgtcgccttacttcaaagtacagctctacgagctcaagacctaccacgaggtggtggacgagatctactttaaggattgactcagtcttgcagcgaggctcggagcagcccagggtcgcaggtagaggtcacgcacgttgaaccatgggagaaaggaagcaggaaaacagcgggccagacagggatgtgcggaggggttcgaggtgttggaacaggaggaattgtttctacagcattttgcctgttatacaaattatttaccctgaagttaactcgaaagcaagtgatgggtcttataacacacacagactctccatatattagagcgcttggatttatgtatataagatatacacagccccctacagatctgtgggactggtttgaatccttccttgatgatgaagaggacctagatgtgaaggctggtggaggctgtgtaatgaccattggagaaatgctacgatcttttctcacaaaactggagtggttttctaccttgtttccaagaattccagttccagttcaaaagaatattgatcaacagattaaaacccgacctagaaaaatcaagaaagatgggaaggaaggtgctgaggaaatagacagacatgttgaacgcagacgttcaaggtctccaaggagatctctgagtccacggaggtccccaagaaggtcaagaagtagaagtcatcatcgggagggccatgggtcttctagttttgacagagaattagaaagagagaaagaacgccagcgactagagcgtgaagccaaagaaagggagaaagaacggcgaagatcccgaagtattgaccgggggttagaacgcaggcgcagcagaagtagggaaaggcatagaagtcgcagtcgaagtcgtgataggaaaggggatagaagggacagggatcgagaaagagagaaagaaaatgagagaggtagaagacgagatcgtgactatgataaggaaagaggaaatgaacgagaaaaagagagagagcgatcaagagaaaggtccaaggaacagagaagtaggggagaggtagaagagaagaaacataaagaagacaaagatgataggcggcacagagatgacaaaagagattccaagaaagagaaaaaacacagtagaagcagaagcagagaaaggaaacacagaagtaggagtcgaagtagaaatgcagggaaacgaagtagaagtagaagcaaagagaaatcaagtaaacataaaaatgaaagtaaagaaaaatcaaataaacgaagtcgaagtggcagtcaaggaagaactgacagtgttgaaaaatcaaaaaaacgggaacatagtcccagcaaagaaaaatctagaaagcgtagtagaagcaaagaacgttcccacaaacgagatcacagtgatagtaaggaccagtcagacaaacatgatcgtcgaaggagccaaagtatagaacaagagagccaagaaaaacagcataaaaacaaagatgagactgtgtgaaaatattttgtaaaagtggatcacattgaatcctataaatgattaaatctgcttttttcccccacgttgagattgtgcagtagttcgcactcctcaagctctccctgtaggctgcattttcatttcctctttcgtgtagggaagtgcctttgtaattccatttattgcattggtgttttcacccaattgttaagtttgatacatgatgcacagattgttcttgcatttttattgtttgtttttgaaatgtacagtctgtacatatgtcctgaaaatgttttaattcctttggcatggttgccatgttggttaaatttgtataaggcaataaactgccactaatctatttttgttttgtaggtgtgggattatggtttgtgtactgaagttagcatggctgtgcttttcgtaatagaatgctaaagactttgagaatggatcttggatgtctattataggagaagtatgtgctgccaatgtacaagaaggcagcattgtaggattaacattcttgtctactgtatattatcttggaaggctcttgttaatatgttacacttaatattctccacagttacctttagagagaatttatgagaagttagtttctgatgcagaggtttttaggctgtgatttcatcaaaagtccttttagcattctacctcaaagggacacttagtatgcctaaaatttattcacttagttttccttttttatttgaaaaaatacatgacatgtaatctttttttcttgaattctttctcagattttaaagtactatattaaagaaaaaaattaatgtctaaagcctagcattcttgcagaaccctatactaacatgtaatggggagagggtggggcagatgagtagagaaacagattcaagcctcaagcttccaaagcatttttataaatggaaaatccttaaattatgaaacagcttgatatagtgtcctttttttaaaattcagaactttttttattgataatggagattgctgtttgagtttttaaacttaatctagaacagaggagtattaaaagtaatgctgtgctgcattatttaagactatcagcaaattatttgatagattgttcttacaacttgtattctgattacagaaccatcatgagtgtggaataaatactggattaaatcctttatcctgggtcttggcttttcccccatttgttaaatttttttagcatatttatattgtggaaattgatgaaacgtcagtagagtcacactttgtgtacagggatgtcttagtgcccagatgacaagtgaattttggagaaatgcatagactgggattgggcatgtggtaatcaataatctttattagaatacttgataatggcagttccctttgtcagtggttgttacatgtgtcatttgattactttgttccatgtcaaagacgtttattgggataccttttacttggacaatatgttagcattttttaaaatttggacttgaaattctttaagataattcacccaattctttttagaaaagaaaatagaggcccaaagtaatgatgtcagtgctagggctaaaactcagtattctgacagtgtagtgaacctggcacgcacattgaggtttgttttatctcactggttatactggccaactaatgcgcactcagaagccaccttgcaaaaatgttaaatggagcaaacgagtacacttgcaagagtcctccatatgtgggcttaacatatgtaccactccattttagaaaaatctcattaaatgaattcttctaaaaatgatatgcttttttcttttttaagaaaattcctttgtcttttaaattgagcatcaagtgaattagtgctatagacacccagaagttagaaaaacctattgtataatatgaaagccactaaatttgtcttgtgttgaaaatctacttttagcatacctaaattatggagctactactttggatatggttccatgtgaaatgttttatctgactattttaagtaaaatgtggaaagaatttaaattacttcacatggaggtgaaagaactatcacctcgattgacagttcgatgatcgtcactacatttgatttcttgtggg

SEQ ID NO: 2583 - protein, 435 aa, Homo sapiens; identical to SEQ ID NO: 2575

SEQ ID NO: 2584 - DNA, 6644 bp, Homo sapiens
atatccgccgggcccgccatcttgttcccaggggcagttggcggaagagatcgagctccctggctgccggctcgccttctgcgtggagttctcgcggtctgggtttcgctgtctgctcttggcccggggtcattttgtcggcgtcgggtgccctctcttgcccagctggggcacagcgaggcggccccttctcccgacgacgttcgatggagtagggtcccagaccgttgtcccgaagagcgagatcgagcttggccccctcccccccctccttccctccctccttccttccgccgcaacatggctaacaacagccccgcgctgacaggcaactcgcagccgcagcaccaggcggctgcagctgcggctcagcaacagcagcagtgcggcggcggcggcgctaccaagccggcggtctccggcaagcagggcaatgtgctcccgctctggggcaacgagaagaccatgaacctcaaccccatgatcctgaccaacatcctgtcgtcgccttacttcaaagtacagctctacgagctcaagacctaccacgaggtggtggacgagatctactttaaggtcacgcacgttgaaccatgggagaaaggaagcaggaaaacagcgggccagacagggatgtgcggaggggttcgaggtgttggaacaggaggaattgtttctacagcattttgcctgttatacaaattatttaccctgaagttaactcgaaagcaagtgatgggtcttataacacacacagactctccatatattagagcgcttggatttatgtatataagatatacacagccccctacagatctgtgggactggtttgaatccttccttgatgatgaagaggtatgtcaacaagggtaataatttgttttcttctgattactctcatatttttattatcttttatttattggtggtttaatgtcttcaagaacttcctgtagttaaatttatttcagtgagatacttttggaattaatgtccttttactgagacctgatggcttttatgtattttagggtaaatttctgaagttttattttcttgttttaaaattgtttaaatgtgtttggtaactattggaaaattttctcttcttaattatgttctgtgtattgtattgatcctgaattgtatagttaatagtgacttttcaagatggggcatgctcaagatcgaacagataataaaagatatgcacatagaatactaattgtagcttttttttcttctggaacatttcagttcttcaccctctagcttcttccaaatatcagtattcccacttgcatagaagtgcagaattgaagagttgggtgttacataaataggctaagtgtttggatgacttgttcaaggtgacaaaattttaattccagttttctgactcctagtacaccacacacacctttaaaaaagaaattttttaaattgtaattcgagtctccctaatttgaaatctgaaatactaagttagatttaaatcgtgtatgcattggctgggcgtggtggctcacattgtaatcccaacacttcgagagttcaagaccagcctgagcaatatagtgagacctcatctctacaaaaaaaagtttaaaaattagctgagcatagaggtatgcatcttagtcccacctacttgggaggctggggtgggaggatcacttgagcccaggagacagaatttgctgtgagccaagatcattgccactgcattccagcctgggtaacacagtaagaccctttctcaaaacaaaacaaaatatcatatatgcattaatttacttgcatggtgaagtccaacatgtcaaaaatgaaatgatgagctgtattgtccctatgtctacccagtctactactttgtgttttaaggttcataagactttttgagtgctatgtgtcagtagtctatttacagagttcatccaaagaatttattgaattaaaggatggttctaatggaaatctattgtgttttgttattacatgcacacctaaaaaaaaaaaaaatctcatttagacatggagaatttttatttttctctttttttttttttttttttttgcctgttaactgagttacttcactcagaagaagcaaaacgtgttttaaatcacaatctttaaggtctttttatctttagatcagtttttcagactgaagtgcttctcccttctgtctttaaaaaagcatgttcctcttcataattggtgttgtattggttttgtttctggatgcctctattttatgttttttattgtgtttacaaatctgaggtcctctatttaagctaacttattgttttcttccttagatatctgcagcgattatatttggaaatactgtatatctgaacacttaaatgtgtgtgagtgcaagcagttttacctttagctcttgttttcctgtttagataacaaatctcactttccttgtgtgcttgcactataggtttgggactgacaatagctgactaacatgtcctgagctgtgagagggcatagcaagaaggccttcatgcggtaatgacccttttcagagacaatggtcatcatggattatgcgtttccaattatttgttcatttatttattttctacataactaaattagaaacctcactgcttcatggcagttggtttgctattgcttccagttttattagggcttcattttatattagagctgttaaaagataacctttagacaggaattatctaaagtagatcatatgtagctaggttatggtgcaaggtatatgatgtgtgcaaatatgtccacagaaataaatacatagtaggtatgtggaatgtaaatttaagtcaatcgttccgcatagtttagaaatgtaaggggctttttcatattgttaactgagtgagatcagttccctttatgcctgtgaggctgcagggtttgttctcacttgcatgcacacactaagcccaaatatttctgttcattcattgtcagatcaggatatgaaaataaaatttttctgttagttttttttgtattgagattccaaagatggtaatatttttataatattcatgtatatatggaaatactttttttgacggctagggtatcttttgtgtttctgtaggacctagatgtgaaggctggtggaggctgtgtaatgaccattggagaaatgctacgatcttttctcacaaaactggagtggttttctaccttgtttccaagaattccagttccagttcaaaagaatattgatcaacagattaaaacccgacctagaaaaatcaagaaagatgggaaggaaggtgctgaggaaatagacagacatgttgaacgcagacgttcaaggtaatgtcactcttgaattatgcttatttttcatatatgctttatacaaaattaatggttctgagaaatagcaagttcttaggaatttgtttttactgttcattttattagtttgtcacttttaccccccaaagattattttcttcctttcagggctttttctataaaattatgcatctgtaaatgagaacaataaaattttttgctttaatgattcttgacatggccttaagcttgaggacatgaataaataatgctgttgaaagttttactgtgaaaagaattgcatatgttttattcattgaaattttctttctccctccgccttccttaggtctccaaggagatctctgagtccacggaggtccccaagaaggtcaagaagtagaagtcatcatcgggagggccatgggtcttctagttttgacagagaattagaaagagagaaagaacgccagcgactagagcgtgaagccaaagaaagggagaaagaacggcgaagatcccgaagtattgaccgggggttagaacgcaggcgcagcagaagtagggaaaggcatagaagtcgcagtcgaagtcgtgataggaaaggggatagaagggacagggatcgagaaagagagaaagaaaatgagagaggtagaagacgagatcgtgactatgataaggaaagaggaaatgaacgagaaaaagagagagagcgatcaagagaaaggtccaaggaacagagaagtaggggagaggtagaagagaagaaacataaagaagacaaagatgataggcggcacagagatgacaaaagagattccaagaaagagaaaaaacacagtagaagcagaagcagagaaaggaaacacagaagtaggagtcgaagtagaaatgcagggaaacgaagtagaagtagaagcaaagagaaatcaagtaaacataaaaatgaaagtaaagaaaaatcaaataaacgaagtcgaagtggcagtcaaggaagaactgacagtgttgaaaaatcaaaaaaacgggaacatagtcccagcaaagaaaaatctagaaagcgtagtagaagcaaagaacgttcccacaaacgagatcacagtgatagtaaggaccagtcagacaaacatgatcgtcgaaggagccaaagtatagaacaagagagccaagaaaaacagcataaaaacaaagatgagactgtgtgaaaatattttgtaaaagtggatcacattgaatcctataaatgattaaatctgcttttttcccccacgttgagattgtgcagtagttcgcactcctcaagctctccctgtaggctgcattttcatttcctctttcgtgtagggaagtgcctttgtaattccatttattgcattggtgttttcacccaattgttaagtttgatacatgatgcacagattgttcttgcatttttattgtttgtttttgaaatgtacagtctgtacatatgtcctgaaaatgttttaattcctttggcatggttgccatgttggttaaatttgtataaggcaataaactgccactaatctatttttgttttgtaggtgtgggattatggtttgtgtactgaagttagcatggctgtgcttttcgtaatagaatgctaaagactttgagaatggatcttggatgtctattataggagaagtatgtgctgccaatgtacaagaaggcagcattgtaggattaacattcttgtctactgtatattatcttggaaggctcttgttaatatgttacacttaatattctccacagttacctttagagagaatttatgagaagttagtttctgatgcagaggtttttaggctgtgatttcatcaaaagtccttttagcattctacctcaaagggacacttagtatgcctaaaatttattcacttagttttccttttttatttgaaaaaatacatgacatgtaatctttttttcttgaattctttctcagattttaaagtactatattaaagaaaaaaattaatgtctaaagcctagcattcttgcagaaccctatactaacatgtaatggggagagggtggggcagatgagtagagaaacagattcaagcctcaagcttccaaagcatttttataaatggaaaatccttaaattatgaaacagcttgatatagtgtcctttttttaaaattcagaactttttttattgataatggagattgctgtttgagtttttaaacttaatctagaacagaggagtattaaaagtaatgctgtgctgcattatttaagactatcagcaaattatttgatagattgttcttacaacttgtattctgattacagaaccatcatgagtgtggaataaatactggattaaatcctttatcctgggtcttggcttttcccccatttgttaaatttttttagcatatttatattgtggaaattgatgaaacgtcagtagagtcacactttgtgtacagggatgtcttagtgcccagatgacaagtgaattttggagaaatgcatagactgggattgggcatgtggtaatcaataatctttattagaatacttgataatggcagttccctttgtcagtggttgttacatgtgtcatttgattactttgttccatgtcaaagacgtttattgggataccttttacttggacaatatgttagcattttttaaaatttggacttgaaattctttaagataattcacccaattctttttagaaaagaaaatagaggcccaaagtaatgatgtcagtgctagggctaaaactcagtattctgacagtgtagtgaacctggcacgcacattgaggtttgttttatctcactggttatactggccaactaatgcgcactcagaagccaccttgcaaaaatgttaaatggagcaaacgagtacacttgcaagagtcctccatatgtgggcttaacatatgtaccactccattttagaaaaatctcattaaatgaattcttctaaaaatgatatgcttttttcttttttaagaaaattcctttgtcttttaaattgagcatcaagtgaattagtgctatagacacccagaagttagaaaaacctattgtataatatgaaagccactaaatttgtcttgtgttgaaaatctacttttagcatacctaaattatggagctactactttggatatggttccatgtgaaatgttttatctgactattttaagtaaaatgtggaaagaatttaaattacttcacatggaggtgaaagaactatcacctcgattgacagttcgatgatcgtcactacatttgatttcttgtggg

SEQ ID NO: 2585 - protein, 191 aa, Homo sapiens; identical to SEQ ID NO: 2565

SEQ ID NO: 2586 - DNA, 4044 bp, Homo sapiens
atatccgccgggcccgccatcttgttcccaggggcagttggcggaagagatcgagctccctggctgccggctcgccttctgcgtggagttctcgcggtctgggtttcgctgtctgctcttggcccggggtcattttgtcggcgtcgggtgccctctcttgcccagctggggcacagcgaggcggccccttctcccgacgacgttcgatggagtagggtcccagaccgttgtcccgaagagcgagatcgagcttggccccctcccccccctccttccctccctccttccttccgccgcaacatggctaacaacagccccgcgctgacaggcaactcgcagccgcagcaccaggcggctgcagctgcggctcagcaacagcagcagtgcggcggcggcggcgctaccaagccggcggtctccggcaagcagggcaatgtgctcccgctctggggcaacgagaagaccatgaacctcaaccccatgatcctgaccaacatcctgtcgtcgccttacttcaaagtacagctctacgagctcaagacctaccacgaggtggtggacgagatctactttaaggtcacgcacgttgaaccatgggagaaaggaagcaggaaaacagcgggccagacagggatgtgcggaggggttcgaggtgttggaacaggaggaattgtttctacagcattttgcctgttatacaaattatttaccctgaagttaactcgaaagcaagtgatgggtcttataacacacacagactctccatatattagagcgcttggatttatgtatataagatatacacagccccctacagatctgtgggactggtttgaatccttccttgatgatgaagaggacctagatgtgaaggctggtggaggctgtgtaatgaccattggagaaatgctacgatcttttctcacaaaactggagtggttttctaccttgtttccaagaattccagttccagttcaaaagaatattgatcaacagattaaaacccgacctagaaaaatcaagaaagatgggaaggaaggtgctgaggaaatagacagacatgttgaacgcagacgttcaaggtctccaaggagatctctgagtccacggaggtccccaagaaggtcaagaagtagaagtcatcatcgggagggccatgggtcttctagttttgacagagaattagaaagagagaaagaacgccagcgactagagcgtgaagccaaagaaagggagaaagaacggcgaagatcccgaagtattgaccgggggttagaacgcaggcgcagcagaagtagggaaaggcatagaagtcgcagtcgaagtcgtgataggaaaggggatagaagggacagggatcgagaaagagagaaagaaaatgagagaggtagaagacgagatcgtgactatgataaggaaagaggaaatgaacgagaaaaagagagagagcgatcaagagaaaggtccaaggaacagagaagtaggggagaggtagaagagaagaaacataaagaagacaaagatgataggcggcacagagatgacaaaagagattccaagaaagagaaaaaacacagtagaagcagaagcagagaaaggaaacacagaagtaggagtcgaagtagaaatgcagggaaacgaagtagaagtagaagcaaagagaaatcaagtaaacataaaaatgaaagtaaagaaaaatcaaataaacgaagtcgaagtggcagtcaaggaagaactgacagtgttgaaaaatcaaaaaaacgggaacatagtcccagcaaagaaaaatctagaaagcgtagtagaagcaaagaacgttcccacaaacgagatcacagtgatagtaaggaccagtcagacaaacatgatcgtcgaaggagccaaagtatagaacaagagagccaagaaaaacagcataaaaacaaagatgagactgtgtgaaaatattttgtaaaagtggatcacattgaatcctataaatgattaaatctgcttttttcccccacgttgagattgtgcagtagttcgcactcctcaagctctccctgtaggctgcattttcatttcctctttcgtgtagggaagtgcctttgtaattccatttattgcattggtgttttcacccaattgttaagtttgatacatgatgcacagattgttcttgcatttttattgtttgtttttgaaatgtacagtctgtacatatgtcctgaaaatgttttaattcctttggcatggttgccatgttggttaaatttgtataaggcaataaactgccactaatctatttttgttttgtaggtgtgggattatggtttgtgtactgaagttagcatggctgtgcttttcgtaatagaatgctaaagactttgagaatggatcttggatgtctattataggagaagtatgtgctgccaatgtacaagaaggcagcattgtaggattaacattcttgtctactgtatattatcttggaaggctcttgttaatatgttacacttaatattctccacagttacctttagagagaatttatgagaagttagtttctgatgcagaggtttttaggctgtgatttcatcaaaagtccttttagcattctacctcaaagggacacttagtatgcctaaaatttattcacttagttttccttttttatttgaaaaaatacatgacatgtaatctttttttcttgaattctttctcagattttaaagtactatattaaagaaaaaaattaatgtctaaagcctagcattcttgcagaaccctatactaacatgtaatggggagagggtggggcagatgagtagagaaacagattcaagcctcaagcttccaaagcatttttataaatggaaaatccttaaattatgaaacagcttgatatagtgtcctttttttaaaattcagaactttttttattgataatggagattgctgtttgagtttttaaacttaatctagaacagaggagtattaaaagtaatgctgtgctgcattatttaagactatcagcaaattatttgatagattgttcttacaacttgtattctgattacagaaccatcatgagtgtggaataaatactggattaaatcctttatcctgggtcttggcttttcccccatttgttaaatttttttagcatatttatattgtggaaattgatgaaacgtcagtagagtcacactttgtgtacagggatgtcttagtgcccagatgacaagtgaattttggagaaatgcatagactgggattgggcatgtggtaatcaataatctttattagaatacttgataatggcagttccctttgtcagtggttgttacatgtgtcatttgattactttgttccatgtcaaagacgtttattgggataccttttacttggacaatatgttagcattttttaaaatttggacttgaaattctttaagataattcacccaattctttttagaaaagaaaatagaggcccaaagtaatgatgtcagtgctagggctaaaactcagtattctgacagtgtagtgaacctggcacgcacattgaggtttgttttatctcactggttatactggccaactaatgcgcactcagaagccaccttgcaaaaatgttaaatggagcaaacgagtacacttgcaagagtcctccatatgtgggcttaacatatgtaccactccattttagaaaaatctcattaaatgaattcttctaaaaatgatatgcttttttcttttttaagaaaattcctttgtcttttaaattgagcatcaagtgaattagtgctatagacacccagaagttagaaaaacctattgtataatatgaaagccactaaatttgtcttgtgttgaaaatctacttttagcatacctaaattatggagctactactttggatatggttccatgtgaaatgttttatctgactattttaagtaaaatgtggaaagaatttaaattacttcacatggaggtgaaagaactatcacctcgattgacagttcgatgatcgtcactacatttgatttcttgtggg

SEQ ID NO: 2587 - protein, 546 aa, Homo sapiens; identical to SEQ ID NO: 2571

SEQ ID NO: 2588 - DNA, 6242 bp, Homo sapiens
atatccgccgggcccgccatcttgttcccaggggcagttggcggaagagatcgagctccctggctgccggctcgccttctgcgtggagttctcgcggtctgggtttcgctgtctgctcttggcccggggtcattttgtcggcgtcgggtgccctctcttgcccagctggggcacagcgaggcggccccttctcccgacgacgttcgatggagtagggtcccagaccgttgtcccgaagagcgagatcgagcttggccccctcccccccctccttccctccctccttccttccgccgcaacatggctaacaacagccccgcgctgacaggcaactcgcagccgcagcaccaggcggctgcagctgcggctcagcaacagcagcagtgcggcggcggcggcgctaccaagccggcggtctccggcaagcagggcaatgtgctcccgctctggggcaacgagaagaccatgaacctcaaccccatgatcctgaccaacatcctgtcgtcgccttacttcaaagtacagctctacgagctcaagacctaccacgaggtggtggacgagatctactttaaggtcacgcacgttgaaccatgggagaaaggaagcaggaaaacagcgggccagacagggatgtgcggaggggttcgaggtgttggaacaggaggaattgtttctacagcattttgcctgttatacaaattatttaccctgaagttaactcgaaagcaagtgatgggtcttataacacacacagactctccatatattagagcgcttggatttatgtatataagatatacacagccccctacagatctgtgggactggtttgaatccttccttgatgatgaagagttcttcaccctctagcttcttccaaatatcagtattcccacttgcatagaagtgcagaattgaagagttgggtgttacataaataggctaagtgtttggatgacttgttcaaggtgacaaaattttaattccagttttctgactcctagtacaccacacacacctttaaaaaagaaattttttaaattgtaattcgagtctccctaatttgaaatctgaaatactaagttagatttaaatcgtgtatgcattggctgggcgtggtggctcacattgtaatcccaacacttcgagagttcaagaccagcctgagcaatatagtgagacctcatctctacaaaaaaaagtttaaaaattagctgagcatagaggtatgcatcttagtcccacctacttgggaggctggggtgggaggatcacttgagcccaggagacagaatttgctgtgagccaagatcattgccactgcattccagcctgggtaacacagtaagaccctttctcaaaacaaaacaaaatatcatatatgcattaatttacttgcatggtgaagtccaacatgtcaaaaatgaaatgatgagctgtattgtccctatgtctacccagtctactactttgtgttttaaggttcataagactttttgagtgctatgtgtcagtagtctatttacagagttcatccaaagaatttattgaattaaaggatggttctaatggaaatctattgtgttttgttattacatgcacacctaaaaaaaaaaaaaatctcatttagacatggagaatttttatttttctctttttttttttttttttttttgcctgttaactgagttacttcactcagaagaagcaaaacgtgttttaaatcacaatctttaaggtctttttatctttagatcagtttttcagactgaagtgcttctcccttctgtctttaaaaaagcatgttcctcttcataattggtgttgtattggttttgtttctggatgcctctattttatgttttttattgtgtttacaaatctgaggtcctctatttaagctaacttattgttttcttccttagatatctgcagcgattatatttggaaatactgtatatctgaacacttaaatgtgtgtgagtgcaagcagttttacctttagctcttgttttcctgtttagataacaaatctcactttccttgtgtgcttgcactataggtttgggactgacaatagctgactaacatgtcctgagctgtgagagggcatagcaagaaggccttcatgcggtaatgacccttttcagagacaatggtcatcatggattatgcgtttccaattatttgttcatttatttattttctacataactaaattagaaacctcactgcttcatggcagttggtttgctattgcttccagttttattagggcttcattttatattagagctgttaaaagataacctttagacaggaattatctaaagtagatcatatgtagctaggttatggtgcaaggtatatgatgtgtgcaaatatgtccacagaaataaatacatagtaggtatgtggaatgtaaatttaagtcaatcgttccgcatagtttagaaatgtaaggggctttttcatattgttaactgagtgagatcagttccctttatgcctgtgaggctgcagggtttgttctcacttgcatgcacacactaagcccaaatatttctgttcattcattgtcagatcaggatatgaaaataaaatttttctgttagttttttttgtattgagattccaaagatggtaatatttttataatattcatgtatatatggaaatactttttttgacggctagggtatcttttgtgtttctgtaggacctagatgtgaaggctggtggaggctgtgtaatgaccattggagaaatgctacgatcttttctcacaaaactggagtggttttctaccttgtttccaagaattccagttccagttcaaaagaatattgatcaacagattaaaacccgacctagaaaaatcaagaaagatgggaaggaaggtgctgaggaaatagacagacatgttgaacgcagacgttcaaggtaatgtcactcttgaattatgcttatttttcatatatgctttatacaaaattaatggttctgagaaatagcaagttcttaggaatttgtttttactgttcattttattagtttgtcacttttaccccccaaagattattttcttcctttcagggctttttctataaaattatgcatctgtaaatgagaacaataaaattttttgctttaatgattcttgacatggccttaagcttgaggacatgaataaataatgctgttgaaagttttactgtgaaaagaattgcatatgttttattcattgaaattttctttctccctccgccttccttaggtctccaaggagatctctgagtccacggaggtccccaagaaggtcaagaagtagaagtcatcatcgggagggccatgggtcttctagttttgacagagaattagaaagagagaaagaacgccagcgactagagcgtgaagccaaagaaagggagaaagaacggcgaagatcccgaagtattgaccgggggttagaacgcaggcgcagcagaagtagggaaaggcatagaagtcgcagtcgaagtcgtgataggaaaggggatagaagggacagggatcgagaaagagagaaagaaaatgagagaggtagaagacgagatcgtgactatgataaggaaagaggaaatgaacgagaaaaagagagagagcgatcaagagaaaggtccaaggaacagagaagtaggggagaggtagaagagaagaaacataaagaagacaaagatgataggcggcacagagatgacaaaagagattccaagaaagagaaaaaacacagtagaagcagaagcagagaaaggaaacacagaagtaggagtcgaagtagaaatgcagggaaacgaagtagaagtagaagcaaagagaaatcaagtaaacataaaaatgaaagtaaagaaaaatcaaataaacgaagtcgaagtggcagtcaaggaagaactgacagtgttgaaaaatcaaaaaaacgggaacatagtcccagcaaagaaaaatctagaaagcgtagtagaagcaaagaacgttcccacaaacgagatcacagtgatagtaaggaccagtcagacaaacatgatcgtcgaaggagccaaagtatagaacaagagagccaagaaaaacagcataaaaacaaagatgagactgtgtgaaaatattttgtaaaagtggatcacattgaatcctataaatgattaaatctgcttttttcccccacgttgagattgtgcagtagttcgcactcctcaagctctccctgtaggctgcattttcatttcctctttcgtgtagggaagtgcctttgtaattccatttattgcattggtgttttcacccaattgttaagtttgatacatgatgcacagattgttcttgcatttttattgtttgtttttgaaatgtacagtctgtacatatgtcctgaaaatgttttaattcctttggcatggttgccatgttggttaaatttgtataaggcaataaactgccactaatctatttttgttttgtaggtgtgggattatggtttgtgtactgaagttagcatggctgtgcttttcgtaatagaatgctaaagactttgagaatggatcttggatgtctattataggagaagtatgtgctgccaatgtacaagaaggcagcattgtaggattaacattcttgtctactgtatattatcttggaaggctcttgttaatatgttacacttaatattctccacagttacctttagagagaatttatgagaagttagtttctgatgcagaggtttttaggctgtgatttcatcaaaagtccttttagcattctacctcaaagggacacttagtatgcctaaaatttattcacttagttttccttttttatttgaaaaaatacatgacatgtaatctttttttcttgaattctttctcagattttaaagtactatattaaagaaaaaaattaatgtctaaagcctagcattcttgcagaaccctatactaacatgtaatggggagagggtggggcagatgagtagagaaacagattcaagcctcaagcttccaaagcatttttataaatggaaaatccttaaattatgaaacagcttgatatagtgtcctttttttaaaattcagaactttttttattgataatggagattgctgtttgagtttttaaacttaatctagaacagaggagtattaaaagtaatgctgtgctgcattatttaagactatcagcaaattatttgatagattgttcttacaacttgtattctgattacagaaccatcatgagtgtggaataaatactggattaaatcctttatcctgggtcttggcttttcccccatttgttaaatttttttagcatatttatattgtggaaattgatgaaacgtcagtagagtcacactttgtgtacagggatgtcttagtgcccagatgacaagtgaattttggagaaatgcatagactgggattgggcatgtggtaatcaataatctttattagaatacttgataatggcagttccctttgtcagtggttgttacatgtgtcatttgattactttgttccatgtcaaagacgtttattgggataccttttacttggacaatatgttagcattttttaaaatttggacttgaaattctttaagataattcacccaattctttttagaaaagaaaatagaggcccaaagtaatgatgtcagtgctagggctaaaactcagtattctgacagtgtagtgaacctggcacgcacattgaggtttgttttatctcactggttatactggccaactaatgcgcactcagaagccaccttgcaaaaatgttaaatggagcaaacgagtacacttgcaagagtcctccatatgtgggcttaacatatgtaccactccattttagaaaaatctcattaaatgaattcttctaaaaatgatatgcttttttcttttttaagaaaattcctttgtcttttaaattgagcatcaagtgaattagtgctatagacacccagaagttagaaaaacctattgtataatatgaaagccactaaatttgtcttgtgttgaaaatctacttttagcatacctaaattatggagctactactttggatatggttccatgtgaaatgttttatctgactattttaagtaaaatgtggaaagaatttaaattacttcacatggaggtgaaagaactatcacctcgattgacagttcgatgatcgtcactacatttgatttcttgtggg

SEQ ID NO: 2589 - protein, 190 aa, Homo sapiens; identical to SEQ ID NO: 2567

SEQ ID NO: 2590 - DNA, 3475 bp, Homo sapiens
tcactatccgatccaggcagggaaatggtcacgcacgttgaaccatgggagaaaggaagcaggaaaacagcgggccagacagggatgtgcggaggggttcgaggtgttggaacaggaggaattgtttctacagcattttgcctgttatacaaattatttaccctgaagttaactcgaaagcaagtgatgggtcttataacacacacagactctccatatattagagcgcttggatttatgtatataagatatacacagccccctacagatctgtgggactggtttgaatccttccttgatgatgaagaggtatgtcaacaagggtaataatttgttttcttctgattactctcatatttttattatcttttatttattggtggtttaatgtcttcaagaacttcctgtagttaaatttatttcagtgagatacttttggaattaatgtccttttactgagacctgatggcttttatgtattttagggtaaatttctgaagttttattttcttgttttaaaattgtttaaatgtgtttggtaactattggaaaattttctcttcttaattatgttctgtgtattgtattgatcctgaattgtatagttaatagtgacttttcaagatggggcatgctcaagatcgaacagataataaaagatatgcacatagaatactaattgtagcttttttttcttctggaacatttcagttcttcaccctctagcttcttccaaatatcagtattcccacttgcatagaagtgcagaattgaagagttgggtgttacataaataggctaagtgtttggatgacttgttcaaggtgacaaaattttaattccagttttctgactcctagtacaccacacacacctttaaaaaagaaattttttaaattgtaattcgagtctccctaatttgaaatctgaaatactaagttagatttaaatcgtgtatgcattggctgggcgtggtggctcacattgtaatcccaacacttcgagagttcaagaccagcctgagcaatatagtgagacctcatctctacaaaaaaaagtttaaaaattagctgagcatagaggtatgcatcttagtcccacctacttgggaggctggggtgggaggatcacttgagcccaggagacagaatttgctgtgagccaagatcattgccactgcattccagcctgggtaacacagtaagaccctttctcaaaacaaaacaaaatatcatatatgcattaatttacttgcatggtgaagtccaacatgtcaaaaatgaaatgatgagctgtattgtccctatgtctacccagtctactactttgtgttttaaggttcataagactttttgagtgctatgtgtcagtagtctatttacagagttcatccaaagaatttattgaattaaaggatggttctaatggaaatctattgtgttttgttattacatgcacacctaaaaaaaaaaaaaatctcatttagacatggagaatttttatttttctctttttttttttttttttttttgcctgttaactgagttacttcactcagaagaagcaaaacgtgttttaaatcacaatctttaaggtctttttatctttagatcagtttttcagactgaagtgcttctcccttctgtctttaaaaaagcatgttcctcttcataattggtgttgtattggttttgtttctggatgcctctattttatgttttttattgtgtttacaaatctgaggtcctctatttaagctaacttattgttttcttccttagatatctgcagcgattatatttggaaatactgtatatctgaacacttaaatgtgtgtgagtgcaagcagttttacctttagctcttgttttcctgtttagataacaaatctcactttccttgtgtgcttgcactataggtttgggactgacaatagctgactaacatgtcctgagctgtgagagggcatagcaagaaggccttcatgcggtaatgacccttttcagagacaatggtcatcatggattatgcgtttccaattatttgttcatttatttattttctacataactaaattagaaacctcactgcttcatggcagttggtttgctattgcttccagttttattagggcttcattttatattagagctgttaaaagataacctttagacaggaattatctaaagtagatcatatgtagctaggttatggtgcaaggtatatgatgtgtgcaaatatgtccacagaaataaatacatagtaggtatgtggaatgtaaatttaagtcaatcgttccgcatagtttagaaatgtaaggggctttttcatattgttaactgagtgagatcagttccctttatgcctgtgaggctgcagggtttgttctcacttgcatgcacacactaagcccaaatatttctgttcattcattgtcagatcaggatatgaaaataaaatttttctgttagttttttttgtattgagattccaaagatggtaatatttttataatattcatgtatatatggaaatactttttttgacggctagggtatcttttgtgtttctgtaggacctagatgtgaaggctggtggaggctgtgtaatgaccattggagaaatgctacgatcttttctcacaaaactggagtggttttctaccttgtttccaagaattccagttccagttcaaaagaatattgatcaacagattaaaacccgacctagaaaaatcaagaaagatgggaaggaaggtgctgaggaaatagacagacatgttgaacgcagacgttcaaggtaatgtcactcttgaattatgcttatttttcatatatgctttatacaaaattaatggttctgagaaatagcaagttcttaggaatttgtttttactgttcattttattagtttgtcacttttaccccccaaagattattttcttcctttcagggctttttctataaaattatgcatctgtaaatgagaacaataaaattttttgctttaatgattcttgacatggccttaagcttgaggacatgaataaataatgctgttgaaagttttactgtgaaaagaattgcatatgttttattcattgaaattttctttctccctccgccttccttaggtctccaaggagatctctgagtccacggaggtccccaagaaggtcaagaagtagaagtcatcatcgggagggccatgggtcttctagttttgacagagaattagaaagagagaaagaacgccagcgactagagcgtgaagccaaagaaagggagaaagaacggcgaagatcccgaagtattgaccgggggttagaacgcaggcgcagcagaagtagggaaaggcatagaagtcgcagtcgaagtcgtgataggaaaggggatagaagggacagggatcgagaaagagagaaagaaaatgagagaggtagaagacgagatcgtgactatgataaggaaagagg

SEQ ID NO: 2591 - protein, 100 aa, Homo sapiens
MVTHVEPWEKGSRKTAGQTGMCGGVRGVGTGGIVSTAFCLLYKLFTLKLTRKQVMGLITHTDSPYIRALGFMYIRYTQPPTDLWDWFESFLDDEEVCQQG

SEQ ID NO: 2592 - DNA, 5164 bp, Homo sapiens
tcactatccgatccaggcagggaaatggtcacgcacgttgaaccatgggagaaaggaagcaggaaaacagcgggccagacagggatgtgcggaggggttcgaggtgttggaacaggaggaattgtttctacagcattttgcctgttatacaaattatttaccctgaagttaactcgaaagcaagtgatgggtcttataacacacacagactctccatatattagagcgcttggatttatgtatataagatatacacagccccctacagatctgtgggactggtttgaatccttccttgatgatgaagaggtatgtcaacaagggtaataatttgttttcttctgattactctcatatttttattatcttttatttattggtggtttaatgtcttcaagaacttcctgtagttaaatttatttcagtgagatacttttggaattaatgtccttttactgagacctgatggcttttatgtattttagggtaaatttctgaagttttattttcttgttttaaaattgtttaaatgtgtttggtaactattggaaaattttctcttcttaattatgttctgtgtattgtattgatcctgaattgtatagttaatagtgacttttcaagatggggcatgctcaagatcgaacagataataaaagatatgcacatagaatactaattgtagcttttttttcttctggaacatttcagttcttcaccctctagcttcttccaaatatcagtattcccacttgcatagaagtgcagaattgaagagttgggtgttacataaataggctaagtgtttggatgacttgttcaaggtgacaaaattttaattccagttttctgactcctagtacaccacacacacctttaaaaaagaaattttttaaattgtaattcgagtctccctaatttgaaatctgaaatactaagttagatttaaatcgtgtatgcattggctgggcgtggtggctcacattgtaatcccaacacttcgagagttcaagaccagcctgagcaatatagtgagacctcatctctacaaaaaaaagtttaaaaattagctgagcatagaggtatgcatcttagtcccacctacttgggaggctggggtgggaggatcacttgagcccaggagacagaatttgctgtgagccaagatcattgccactgcattccagcctgggtaacacagtaagaccctttctcaaaacaaaacaaaatatcatatatgcattaatttacttgcatggtgaagtccaacatgtcaaaaatgaaatgatgagctgtattgtccctatgtctacccagtctactactttgtgttttaaggttcataagactttttgagtgctatgtgtcagtagtctatttacagagttcatccaaagaatttattgaattaaaggatggttctaatggaaatctattgtgttttgttattacatgcacacctaaaaaaaaaaaaaatctcatttagacatggagaatttttatttttctctttttttttttttttttttttgcctgttaactgagttacttcactcagaagaagcaaaacgtgttttaaatcacaatctttaaggtctttttatctttagatcagtttttcagactgaagtgcttctcccttctgtctttaaaaaagcatgttcctcttcataattggtgttgtattggttttgtttctggatgcctctattttatgttttttattgtgtttacaaatctgaggtcctctatttaagctaacttattgttttcttccttagatatctgcagcgattatatttggaaatactgtatatctgaacacttaaatgtgtgtgagtgcaagcagttttacctttagctcttgttttcctgtttagataacaaatctcactttccttgtgtgcttgcactataggtttgggactgacaatagctgactaacatgtcctgagctgtgagagggcatagcaagaaggccttcatgcggtaatgacccttttcagagacaatggtcatcatggattatgcgtttccaattatttgttcatttatttattttctacataactaaattagaaacctcactgcttcatggcagttggtttgctattgcttccagttttattagggcttcattttatattagagctgttaaaagataacctttagacaggaattatctaaagtagatcatatgtagctaggttatggtgcaaggtatatgatgtgtgcaaatatgtccacagaaataaatacatagtaggtatgtggaatgtaaatttaagtcaatcgttccgcatagtttagaaatgtaaggggctttttcatattgttaactgagtgagatcagttccctttatgcctgtgaggctgcagggtttgttctcacttgcatgcacacactaagcccaaatatttctgttcattcattgtcagatcaggatatgaaaataaaatttttctgttagttttttttgtattgagattccaaagatggtaatatttttataatattcatgtatatatggaaatactttttttgacggctagggtatcttttgtgtttctgtaggacctagatgtgaaggctggtggaggctgtgtaatgaccattggagaaatgctacgatcttttctcacaaaactggagtggttttctaccttgtttccaagaattccagttccagttcaaaagaatattgatcaacagattaaaacccgacctagaaaaatcaagaaagatgggaaggaaggtgctgaggaaatagacagacatgttgaacgcagacgttcaaggtaatgtcactcttgaattatgcttatttttcatatatgctttatacaaaattaatggttctgagaaatagcaagttcttaggaatttgtttttactgttcattttattagtttgtcacttttaccccccaaagattattttcttcctttcagggctttttctataaaattatgcatctgtaaatgagaacaataaaattttttgctttaatgattcttgacatggccttaagcttgaggacatgaataaataatgctgttgaaagttttactgtgaaaagaattgcatatgttttattcattgaaattttctttctccctccgccttccttaggtctccaaggagatctctgagtccacggaggtccccaagaaggtcaagaagtagaagtcatcatcgggagggccatgggtcttctagttttgacagagaattagaaagagagaaagaacgccagcgactagagcgtgaagccaaagaaagggagaaagaacggcgaagatcccgaagtattgaccgggggttagaacgcaggcgcagcagaagtagggaaaggcatagaagtcgcagtcgaagtcgtgataggaaaggggatagaagggacagggatcgagaaagagagaaagaaaatgagagaggtagaagacgagatcgtgactatgataaggaaagaggaaatgaacgagaaaaagagagagagcgatcaagagaaaggtccaaggaacagagaagtaggggagaggtagaagagaagaaacataaagaagacaaagatgataggcggcacagagatgacaaaagagattccaagaaagagaaaaaacacagtagaagcagaagcagagaaaggaaacacagaagtaggagtcgaagtagaaatgcagggaaacgaagtagaagtagaagcaaagagaaatcaagtaaacataaaaatgaaagtaaagaaaaatcaaataaacgaagtcgaagtggcagtcaaggaagaactgacagtgttgaaaaatcaaaaaaacgggaacatagtcccagcaaagaaaaatctagaaagcgtagtagaagcaaagaacgttcccacaaacgagatcacagtgatagtaaggaccagtcagacaaacatgatcgtcgaaggagccaaagtatagaacaagagagccaagaaaaacagcataaaaacaaagatgagactgtgtgaaaatattttgtaaaagtggatcacattgaatcctataaatgattaaatctgcttttttcccccacgttgagattgtgcagtagttcgcactcctcaagctctccctgtaggctgcattttcatttcctctttcgtgtagggaagtgcctttgtaattccatttattgcattggtgttttcacccaattgttaagtttgatacatgatgcacagattgttcttgcatttttattgtttgtttttgaaatgtacagtctgtacatatgtcctgaaaatgttttaattcctttggcatggttgccatgttggttaaatttgtataaggcaataaactgccactaatctatttttgttttgtaggtgtgggattatggtttgtgtactgaagttagcatggctgtgcttttcgtaatagaatgctaaagactttgagaatggatcttggatgtctattataggagaagtatgtgctgccaatgtacaagaaggcagcattgtaggattaacattcttgtctactgtatattatcttggaaggctcttgttaatatgttacacttaatattctccacagttacctttagagagaatttatgagaagttagtttctgatgcagaggtttttaggctgtgatttcatcaaaagtccttttagcattctacctcaaagggacacttagtatgcctaaaatttattcacttagttttccttttttatttgaaaaaatacatgacatgtaatctttttttcttgaattctttctcagattttaaagtactatattaaagaaaaaaattaatgtctaaagcctagcattcttgcagaaccctatactaacatgtaatggggagagggtggggcagatgagtagagaaacagattcaagcctcaagcttccaaagcatttttataaatggaaaatccttaaattatgaaacagcttgatatagtgtcctttttttaaaattcagaactttttttattgataatggagattgctgtttgagtttttaaacttaatctagaacagaggagtattaaaagtaatgctgtgctgcattatttaagactatcagcaaattatttgatagattgttcttacaacttgtattctgattacagaaccatcatgagtgtggaataaatactggattaaatcctttatcctggg

SEQ ID NO: 2593 - protein, 100 aa, Homo sapiens; identical to SEQ ID NO: 2591

SEQ ID NO: 2594 - DNA, 5777 bp, Homo sapiens
tcactatccgatccaggcagggaaatggtcacgcacgttgaaccatgggagaaaggaagcaggaaaacagcgggccagacagggatgtgcggaggggttcgaggtgttggaacaggaggaattgtttctacagcattttgcctgttatacaaattatttaccctgaagttaactcgaaagcaagtgatgggtcttataacacacacagactctccatatattagagcgcttggatttatgtatataagatatacacagccccctacagatctgtgggactggtttgaatccttccttgatgatgaagaggtatgtcaacaagggtaataatttgttttcttctgattactctcatatttttattatcttttatttattggtggtttaatgtcttcaagaacttcctgtagttaaatttatttcagtgagatacttttggaattaatgtccttttactgagacctgatggcttttatgtattttagggtaaatttctgaagttttattttcttgttttaaaattgtttaaatgtgtttggtaactattggaaaattttctcttcttaattatgttctgtgtattgtattgatcctgaattgtatagttaatagtgacttttcaagatggggcatgctcaagatcgaacagataataaaagatatgcacatagaatactaattgtagcttttttttcttctggaacatttcagttcttcaccctctagcttcttccaaatatcagtattcccacttgcatagaagtgcagaattgaagagttgggtgttacataaataggctaagtgtttggatgacttgttcaaggtgacaaaattttaattccagttttctgactcctagtacaccacacacacctttaaaaaagaaattttttaaattgtaattcgagtctccctaatttgaaatctgaaatactaagttagatttaaatcgtgtatgcattggctgggcgtggtggctcacattgtaatcccaacacttcgagagttcaagaccagcctgagcaatatagtgagacctcatctctacaaaaaaaagtttaaaaattagctgagcatagaggtatgcatcttagtcccacctacttgggaggctggggtgggaggatcacttgagcccaggagacagaatttgctgtgagccaagatcattgccactgcattccagcctgggtaacacagtaagaccctttctcaaaacaaaacaaaatatcatatatgcattaatttacttgcatggtgaagtccaacatgtcaaaaatgaaatgatgagctgtattgtccctatgtctacccagtctactactttgtgttttaaggttcataagactttttgagtgctatgtgtcagtagtctatttacagagttcatccaaagaatttattgaattaaaggatggttctaatggaaatctattgtgttttgttattacatgcacacctaaaaaaaaaaaaaatctcatttagacatggagaatttttatttttctctttttttttttttttttttttgcctgttaactgagttacttcactcagaagaagcaaaacgtgttttaaatcacaatctttaaggtctttttatctttagatcagtttttcagactgaagtgcttctcccttctgtctttaaaaaagcatgttcctcttcataattggtgttgtattggttttgtttctggatgcctctattttatgttttttattgtgtttacaaatctgaggtcctctatttaagctaacttattgttttcttccttagatatctgcagcgattatatttggaaatactgtatatctgaacacttaaatgtgtgtgagtgcaagcagttttacctttagctcttgttttcctgtttagataacaaatctcactttccttgtgtgcttgcactataggtttgggactgacaatagctgactaacatgtcctgagctgtgagagggcatagcaagaaggccttcatgcggtaatgacccttttcagagacaatggtcatcatggattatgcgtttccaattatttgttcatttatttattttctacataactaaattagaaacctcactgcttcatggcagttggtttgctattgcttccagttttattagggcttcattttatattagagctgttaaaagataacctttagacaggaattatctaaagtagatcatatgtagctaggttatggtgcaaggtatatgatgtgtgcaaatatgtccacagaaataaatacatagtaggtatgtggaatgtaaatttaagtcaatcgttccgcatagtttagaaatgtaaggggctttttcatattgttaactgagtgagatcagttccctttatgcctgtgaggctgcagggtttgttctcacttgcatgcacacactaagcccaaatatttctgttcattcattgtcagatcaggatatgaaaataaaatttttctgttagttttttttgtattgagattccaaagatggtaatatttttataatattcatgtatatatggaaatactttttttgacggctagggtatcttttgtgtttctgtaggacctagatgtgaaggctggtggaggctgtgtaatgaccattggagaaatgctacgatcttttctcacaaaactggagtggttttctaccttgtttccaagaattccagttccagttcaaaagaatattgatcaacagattaaaacccgacctagaaaaatcaagaaagatgggaaggaaggtgctgaggaaatagacagacatgttgaacgcagacgttcaaggtaatgtcactcttgaattatgcttatttttcatatatgctttatacaaaattaatggttctgagaaatagcaagttcttaggaatttgtttttactgttcattttattagtttgtcacttttaccccccaaagattattttcttcctttcagggctttttctataaaattatgcatctgtaaatgagaacaataaaattttttgctttaatgattcttgacatggccttaagcttgaggacatgaataaataatgctgttgaaagttttactgtgaaaagaattgcatatgttttattcattgaaattttctttctccctccgccttccttaggtctccaaggagatctctgagtccacggaggtccccaagaaggtcaagaagtagaagtcatcatcgggagggccatgggtcttctagttttgacagagaattagaaagagagaaagaacgccagcgactagagcgtgaagccaaagaaagggagaaagaacggcgaagatcccgaagtattgaccgggggttagaacgcaggcgcagcagaagtagggaaaggcatagaagtcgcagtcgaagtcgtgataggaaaggggatagaagggacagggatcgagaaagagagaaagaaaatgagagaggtagaagacgagatcgtgactatgataaggaaagaggaaatgaacgagaaaaagagagagagcgatcaagagaaaggtccaaggaacagagaagtaggggagaggtagaagagaagaaacataaagaagacaaagatgataggcggcacagagatgacaaaagagattccaagaaagagaaaaaacacagtagaagcagaagcagagaaaggaaacacagaagtaggagtcgaagtagaaatgcagggaaacgaagtagaagtagaagcaaagagaaatcaagtaaacataaaaatgaaagtaaagaaaaatcaaataaacgaagtcgaagtggcagtcaaggaagaactgacagtgttgaaaaatcaaaaaaacgggaacatagtcccagcaaagaaaaatctagaaagcgtagtagaagcaaagaacgttcccacaaacgagatcacagtgatagtaaggaccagtcagacaaacatgatcgtcgaaggagccaaagtatagaacaagagagccaagaaaaacagcataaaaacaaagatgagactgtgtgaaaatattttgtaaaagtggatcacattgaatcctataaatgattaaatctgcttttttcccccacgttgagattgtgcagtagttcgcactcctcaagctctccctgtaggctgcattttcatttcctctttcgtgtagggaagtgcctttgtaattccatttattgcattggtgttttcacccaattgttaagtttgatacatgatgcacagattgttcttgcatttttattgtttgtttttgaaatgtacagtctgtacatatgtcctgaaaatgttttaattcctttggcatggttgccatgttggttaaatttgtataaggcaataaactgccactaatctatttttgttttgtaggtgtgggattatggtttgtgtactgaagttagcatggctgtgcttttcgtaatagaatgctaaagactttgagaatggatcttggatgtctattataggagaagtatgtgctgccaatgtacaagaaggcagcattgtaggattaacattcttgtctactgtatattatcttggaaggctcttgttaatatgttacacttaatattctccacagttacctttagagagaatttatgagaagttagtttctgatgcagaggtttttaggctgtgatttcatcaaaagtccttttagcattctacctcaaagggacacttagtatgcctaaaatttattcacttagttttccttttttatttgaaaaaatacatgacatgtaatctttttttcttgaattctttctcagattttaaagtactatattaaagaaaaaaattaatgtctaaagcctagcattcttgcagaaccctatactaacatgtaatggggagagggtggggcagatgagtagagaaacagattcaagcctcaagcttccaaagcatttttataaatggaaaatccttaaattatgaaacagcttgatatagtgtcctttttttaaaattcagaactttttttattgataatggagattgctgtttgagtttttaaacttaatctagaacagaggagtattaaaagtaatgctgtgctgcattatttaagactatcagcaaattatttgatagattgttcttacaacttgtattctgattacagaaccatcatgagtgtggaataaatactggattaaatcctttatcctgggtcttggcttttcccccatttgttaaatttttttagcatatttatattgtggaaattgatgaaacgtcagtagagtcacactttgtgtacagggatgtcttagtgcccagatgacaagtgaattttggagaaatgcatagactgggattgggcatgtggtaatcaataatctttattagaatacttgataatggcagttccctttgtcagtggttgttacatgtgtcatttgattactttgttccatgtcaaagacgtttattgggataccttttacttggacaatatgttagcattttttaaaatttggacttgaaattctttaagataattcacccaattctttttagaaaagaaaatagaggcccaaagtaatgatgtcagtgctagggctaaaactcagtattctgacagtgtagtgaacctggcacgcacattgaggtttgttttatctcactggttatactggccaactaatgcgcactcagaagccaccttgcaaaaatgttaaatggagcaaacgagtacacttgcaagagtcctccatatgtgggcttaacatatgtaccactccattttagaaaaatctcattaaatgaattcttctaaaaatg

SEQ ID NO: 2595 - protein, 100 aa, Homo sapiens; identical to SEQ ID NO: 2591

SEQ ID NO: 2596 - DNA, 6095 bp, Homo sapiens
tcactatccgatccaggcagggaaatggtcacgcacgttgaaccatgggagaaaggaagcaggaaaacagcgggccagacagggatgtgcggaggggttcgaggtgttggaacaggaggaattgtttctacagcattttgcctgttatacaaattatttaccctgaagttaactcgaaagcaagtgatgggtcttataacacacacagactctccatatattagagcgcttggatttatgtatataagatatacacagccccctacagatctgtgggactggtttgaatccttccttgatgatgaagaggtatgtcaacaagggtaataatttgttttcttctgattactctcatatttttattatcttttatttattggtggtttaatgtcttcaagaacttcctgtagttaaatttatttcagtgagatacttttggaattaatgtccttttactgagacctgatggcttttatgtattttagggtaaatttctgaagttttattttcttgttttaaaattgtttaaatgtgtttggtaactattggaaaattttctcttcttaattatgttctgtgtattgtattgatcctgaattgtatagttaatagtgacttttcaagatggggcatgctcaagatcgaacagataataaaagatatgcacatagaatactaattgtagcttttttttcttctggaacatttcagttcttcaccctctagcttcttccaaatatcagtattcccacttgcatagaagtgcagaattgaagagttgggtgttacataaataggctaagtgtttggatgacttgttcaaggtgacaaaattttaattccagttttctgactcctagtacaccacacacacctttaaaaaagaaattttttaaattgtaattcgagtctccctaatttgaaatctgaaatactaagttagatttaaatcgtgtatgcattggctgggcgtggtggctcacattgtaatcccaacacttcgagagttcaagaccagcctgagcaatatagtgagacctcatctctacaaaaaaaagtttaaaaattagctgagcatagaggtatgcatcttagtcccacctacttgggaggctggggtgggaggatcacttgagcccaggagacagaatttgctgtgagccaagatcattgccactgcattccagcctgggtaacacagtaagaccctttctcaaaacaaaacaaaatatcatatatgcattaatttacttgcatggtgaagtccaacatgtcaaaaatgaaatgatgagctgtattgtccctatgtctacccagtctactactttgtgttttaaggttcataagactttttgagtgctatgtgtcagtagtctatttacagagttcatccaaagaatttattgaattaaaggatggttctaatggaaatctattgtgttttgttattacatgcacacctaaaaaaaaaaaaaatctcatttagacatggagaatttttatttttctctttttttttttttttttttttgcctgttaactgagttacttcactcagaagaagcaaaacgtgttttaaatcacaatctttaaggtctttttatctttagatcagtttttcagactgaagtgcttctcccttctgtctttaaaaaagcatgttcctcttcataattggtgttgtattggttttgtttctggatgcctctattttatgttttttattgtgtttacaaatctgaggtcctctatttaagctaacttattgttttcttccttagatatctgcagcgattatatttggaaatactgtatatctgaacacttaaatgtgtgtgagtgcaagcagttttacctttagctcttgttttcctgtttagataacaaatctcactttccttgtgtgcttgcactataggtttgggactgacaatagctgactaacatgtcctgagctgtgagagggcatagcaagaaggccttcatgcggtaatgacccttttcagagacaatggtcatcatggattatgcgtttccaattatttgttcatttatttattttctacataactaaattagaaacctcactgcttcatggcagttggtttgctattgcttccagttttattagggcttcattttatattagagctgttaaaagataacctttagacaggaattatctaaagtagatcatatgtagctaggttatggtgcaaggtatatgatgtgtgcaaatatgtccacagaaataaatacatagtaggtatgtggaatgtaaatttaagtcaatcgttccgcatagtttagaaatgtaaggggctttttcatattgttaactgagtgagatcagttccctttatgcctgtgaggctgcagggtttgttctcacttgcatgcacacactaagcccaaatatttctgttcattcattgtcagatcaggatatgaaaataaaatttttctgttagttttttttgtattgagattccaaagatggtaatatttttataatattcatgtatatatggaaatactttttttgacggctagggtatcttttgtgtttctgtaggacctagatgtgaaggctggtggaggctgtgtaatgaccattggagaaatgctacgatcttttctcacaaaactggagtggttttctaccttgtttccaagaattccagttccagttcaaaagaatattgatcaacagattaaaacccgacctagaaaaatcaagaaagatgggaaggaaggtgctgaggaaatagacagacatgttgaacgcagacgttcaaggtaatgtcactcttgaattatgcttatttttcatatatgctttatacaaaattaatggttctgagaaatagcaagttcttaggaatttgtttttactgttcattttattagtttgtcacttttaccccccaaagattattttcttcctttcagggctttttctataaaattatgcatctgtaaatgagaacaataaaattttttgctttaatgattcttgacatggccttaagcttgaggacatgaataaataatgctgttgaaagttttactgtgaaaagaattgcatatgttttattcattgaaattttctttctccctccgccttccttaggtctccaaggagatctctgagtccacggaggtccccaagaaggtcaagaagtagaagtcatcatcgggagggccatgggtcttctagttttgacagagaattagaaagagagaaagaacgccagcgactagagcgtgaagccaaagaaagggagaaagaacggcgaagatcccgaagtattgaccgggggttagaacgcaggcgcagcagaagtagggaaaggcatagaagtcgcagtcgaagtcgtgataggaaaggggatagaagggacagggatcgagaaagagagaaagaaaatgagagaggtagaagacgagatcgtgactatgataaggaaagaggaaatgaacgagaaaaagagagagagcgatcaagagaaaggtccaaggaacagagaagtaggggagaggtagaagagaagaaacataaagaagacaaagatgataggcggcacagagatgacaaaagagattccaagaaagagaaaaaacacagtagaagcagaagcagagaaaggaaacacagaagtaggagtcgaagtagaaatgcagggaaacgaagtagaagtagaagcaaagagaaatcaagtaaacataaaaatgaaagtaaagaaaaatcaaataaacgaagtcgaagtggcagtcaaggaagaactgacagtgttgaaaaatcaaaaaaacgggaacatagtcccagcaaagaaaaatctagaaagcgtagtagaagcaaagaacgttcccacaaacgagatcacagtgatagtaaggaccagtcagacaaacatgatcgtcgaaggagccaaagtatagaacaagagagccaagaaaaacagcataaaaacaaagatgagactgtgtgaaaatattttgtaaaagtggatcacattgaatcctataaatgattaaatctgcttttttcccccacgttgagattgtgcagtagttcgcactcctcaagctctccctgtaggctgcattttcatttcctctttcgtgtagggaagtgcctttgtaattccatttattgcattggtgttttcacccaattgttaagtttgatacatgatgcacagattgttcttgcatttttattgtttgtttttgaaatgtacagtctgtacatatgtcctgaaaatgttttaattcctttggcatggttgccatgttggttaaatttgtataaggcaataaactgccactaatctatttttgttttgtaggtgtgggattatggtttgtgtactgaagttagcatggctgtgcttttcgtaatagaatgctaaagactttgagaatggatcttggatgtctattataggagaagtatgtgctgccaatgtacaagaaggcagcattgtaggattaacattcttgtctactgtatattatcttggaaggctcttgttaatatgttacacttaatattctccacagttacctttagagagaatttatgagaagttagtttctgatgcagaggtttttaggctgtgatttcatcaaaagtccttttagcattctacctcaaagggacacttagtatgcctaaaatttattcacttagttttccttttttatttgaaaaaatacatgacatgtaatctttttttcttgaattctttctcagattttaaagtactatattaaagaaaaaaattaatgtctaaagcctagcattcttgcagaaccctatactaacatgtaatggggagagggtggggcagatgagtagagaaacagattcaagcctcaagcttccaaagcatttttataaatggaaaatccttaaattatgaaacagcttgatatagtgtcctttttttaaaattcagaactttttttattgataatggagattgctgtttgagtttttaaacttaatctagaacagaggagtattaaaagtaatgctgtgctgcattatttaagactatcagcaaattatttgatagattgttcttacaacttgtattctgattacagaaccatcatgagtgtggaataaatactggattaaatcctttatcctgggtcttggcttttcccccatttgttaaatttttttagcatatttatattgtggaaattgatgaaacgtcagtagagtcacactttgtgtacagggatgtcttagtgcccagatgacaagtgaattttggagaaatgcatagactgggattgggcatgtggtaatcaataatctttattagaatacttgataatggcagttccctttgtcagtggttgttacatgtgtcatttgattactttgttccatgtcaaagacgtttattgggataccttttacttggacaatatgttagcattttttaaaatttggacttgaaattctttaagataattcacccaattctttttagaaaagaaaatagaggcccaaagtaatgatgtcagtgctagggctaaaactcagtattctgacagtgtagtgaacctggcacgcacattgaggtttgttttatctcactggttatactggccaactaatgcgcactcagaagccaccttgcaaaaatgttaaatggagcaaacgagtacacttgcaagagtcctccatatgtgggcttaacatatgtaccactccattttagaaaaatctcattaaatgaattcttctaaaaatgatatgcttttttcttttttaagaaaattcctttgtcttttaaattgagcatcaagtgaattagtgctatagacacccagaagttagaaaaacctattgtataatatgaaagccactaaatttgtcttgtgttgaaaatctacttttagcatacctaaattatggagctactactttggatatggttccatgtgaaatgttttatctgactattttaagtaaaatgtggaaagaatttaaattacttcacatggaggtgaaagaactatcacctcgattgacagttcgatgatcgtcactacatttgatttcttgtggg

SEQ ID NO: 2597 - protein, 100 aa, Homo sapiens; identical to SEQ ID NO: 2591

SEQ ID NO: 2598 - DNA, 2573 bp, Homo sapiens
taattggtgttgtattggttttgtttctggatgcctctattttatgttttttattgtgtttacaaatctgaggtcctctatttaagctaacttattgttttcttccttagatatctgcagcgattatatttggaaatactgtatatctgaacacttaaatgtgtgtgagtgcaagcagttttacctttagctcttgttttcctgtttagataacaaatctcactttccttgtgtgcttgcactataggtttgggactgacaatagctgactaacatgtcctgagctgtgagagggcatagcaagaaggccttcatgcggacctagatgtgaaggctggtggaggctgtgtaatgaccattggagaaatgctacgatcttttctcacaaaactggagtggttttctaccttgtttccaagaattccagttccagttcaaaagaatattgatcaacagattaaaacccgacctagaaaaatcaagaaagatgggaaggaaggtgctgaggaaatagacagacatgttgaacgcagacgttcaaggtctccaaggagatctctgagtccacggaggtccccaagaaggtcaagaagtagaagtcatcatcgggagggccatgggtcttctagttttgacagagaattagaaagagagaaagaacgccagcgactagagcgtgaagccaaagaaagggagaaagaacggcgaagatcccgaagtattgaccgggggttagaacgcaggcgcagcagaagtagggaaaggcatagaagtcgcagtcgaagtcgtgataggaaaggggatagaagggacagggatcgagaaagagagaaagaaaatgagagaggtagaagacgagatcgtgactatgataaggaaagaggaaatgaacgagaaaaagagagagagcgatcaagagaaaggtccaaggaacagagaagtaggggagaggtagaagagaagaaacataaagaagacaaagatgataggcggcacagagatgacaaaagagattccaagaaagagaaaaaacacagtagaagcagaagcagagaaaggaaacacagaagtaggagtcgaagtagaaatgcagggaaacgaagtagaagtagaagcaaagagaaatcaagtaaacataaaaatgaaagtaaagaaaaatcaaataaacgaagtcgaagtggcagtcaaggaagaactgacagtgttgaaaaatcaaaaaaacgggaacatagtcccagcaaagaaaaatctagaaagcgtagtagaagcaaagaacgttcccacaaacgagatcacagtgatagtaaggaccagtcagacaaacatgatcgtcgaaggagccaaagtatagaacaagagagccaagaaaaacagcataaaaacaaagatgagactgtgtgaaaatattttgtaaaagtggatcacattgaatcctataaatgattaaatctgcttttttcccccacgttgagattgtgcagtagttcgcactcctcaagctctccctgtaggctgcattttcatttcctctttcgtgtagggaagtgcctttgtaattccatttattgcattggtgttttcacccaattgttaagtttgatacatgatgcacagattgttcttgcatttttattgtttgtttttgaaatgtacagtctgtacatatgtcctgaaaatgttttaattcctttggcatggttgccatgttggttaaatttgtataaggcaataaactgccactaatctatttttgttttgtaggtgtgggattatggtttgtgtactgaagttagcatggctgtgcttttcgtaatagaatgctaaagactttgagaatggatcttggatgtctattataggagaagtatgtgctgccaatgtacaagaaggcagcattgtaggattaacattcttgtctactgtatattatcttggaaggctcttgttaatatgttacacttaatattctccacagttacctttagagagaatttatgagaagttagtttctgatgcagaggtttttaggctgtgatttcatcaaaagtccttttagcattctacctcaaagggacacttagtatgcctaaaatttattcacttagttttccttttttatttgaaaaaatacatgacatgtaatctttttttcttgaattctttctcagattttaaagtactatattaaagaaaaaaattaatgtctaaagcctagcattcttgcagaaccctatactaacatgtaatggggagagggtggggcagatgagtagagaaacagattcaagcctcaagcttccaaagcatttttataaatggaaaatccttaaattatgaaacagcttgatatagtgtcctttttttaaaattcagaactttttttattgataatggagattgctgtttgagtttttaaacttaatctagaacagaggagtattaaaagtaatgctgtgctgcattatttaagactatcagcaaattatttgatagattgttcttacaacttgtattctgattacagaaccatcatgagtgtggaataaatactggattaaatcctttatcctggg

SEQ ID NO: 2599 - protein, 349 aa, Homo sapiens
MTIGEMLRSFLTKLEWFSTLFPRIPVPVQKNIDQQIKTRPRKIKKDGKEGAEEIDRHVERRRSRSPRRSLSPRRSPRRSRSRSHHREGHGSSSFDRELEREKERQRLEREAKEREKERRRSRSIDRGLERRRSRSRERHRSRSRSRDRKGDRRDRDREREKENERGRRRDRDYDKERGNEREKERERSRERSKEQRSRGEVEEKKHKEDKDDRRHRDDKRDSKKEKKHSRSRSRERKHRSRSRSRNAGKRSRSRSKEKSSKHKNESKEKSNKRSRSGSQGRTDSVEKSKKREHSPSKEKSRKRSRSKERSHKRDHSDSKDQSDKHDRRRSQSIEQESQEKQHKNKDETV

SEQ ID NO: 2600 - DNA, 3186 bp, Homo sapiens
taattggtgttgtattggttttgtttctggatgcctctattttatgttttttattgtgtttacaaatctgaggtcctctatttaagctaacttattgttttcttccttagatatctgcagcgattatatttggaaatactgtatatctgaacacttaaatgtgtgtgagtgcaagcagttttacctttagctcttgttttcctgtttagataacaaatctcactttccttgtgtgcttgcactataggtttgggactgacaatagctgactaacatgtcctgagctgtgagagggcatagcaagaaggccttcatgcggacctagatgtgaaggctggtggaggctgtgtaatgaccattggagaaatgctacgatcttttctcacaaaactggagtggttttctaccttgtttccaagaattccagttccagttcaaaagaatattgatcaacagattaaaacccgacctagaaaaatcaagaaagatgggaaggaaggtgctgaggaaatagacagacatgttgaacgcagacgttcaaggtctccaaggagatctctgagtccacggaggtccccaagaaggtcaagaagtagaagtcatcatcgggagggccatgggtcttctagttttgacagagaattagaaagagagaaagaacgccagcgactagagcgtgaagccaaagaaagggagaaagaacggcgaagatcccgaagtattgaccgggggttagaacgcaggcgcagcagaagtagggaaaggcatagaagtcgcagtcgaagtcgtgataggaaaggggatagaagggacagggatcgagaaagagagaaagaaaatgagagaggtagaagacgagatcgtgactatgataaggaaagaggaaatgaacgagaaaaagagagagagcgatcaagagaaaggtccaaggaacagagaagtaggggagaggtagaagagaagaaacataaagaagacaaagatgataggcggcacagagatgacaaaagagattccaagaaagagaaaaaacacagtagaagcagaagcagagaaaggaaacacagaagtaggagtcgaagtagaaatgcagggaaacgaagtagaagtagaagcaaagagaaatcaagtaaacataaaaatgaaagtaaagaaaaatcaaataaacgaagtcgaagtggcagtcaaggaagaactgacagtgttgaaaaatcaaaaaaacgggaacatagtcccagcaaagaaaaatctagaaagcgtagtagaagcaaagaacgttcccacaaacgagatcacagtgatagtaaggaccagtcagacaaacatgatcgtcgaaggagccaaagtatagaacaagagagccaagaaaaacagcataaaaacaaagatgagactgtgtgaaaatattttgtaaaagtggatcacattgaatcctataaatgattaaatctgcttttttcccccacgttgagattgtgcagtagttcgcactcctcaagctctccctgtaggctgcattttcatttcctctttcgtgtagggaagtgcctttgtaattccatttattgcattggtgttttcacccaattgttaagtttgatacatgatgcacagattgttcttgcatttttattgtttgtttttgaaatgtacagtctgtacatatgtcctgaaaatgttttaattcctttggcatggttgccatgttggttaaatttgtataaggcaataaactgccactaatctatttttgttttgtaggtgtgggattatggtttgtgtactgaagttagcatggctgtgcttttcgtaatagaatgctaaagactttgagaatggatcttggatgtctattataggagaagtatgtgctgccaatgtacaagaaggcagcattgtaggattaacattcttgtctactgtatattatcttggaaggctcttgttaatatgttacacttaatattctccacagttacctttagagagaatttatgagaagttagtttctgatgcagaggtttttaggctgtgatttcatcaaaagtccttttagcattctacctcaaagggacacttagtatgcctaaaatttattcacttagttttccttttttatttgaaaaaatacatgacatgtaatctttttttcttgaattctttctcagattttaaagtactatattaaagaaaaaaattaatgtctaaagcctagcattcttgcagaaccctatactaacatgtaatggggagagggtggggcagatgagtagagaaacagattcaagcctcaagcttccaaagcatttttataaatggaaaatccttaaattatgaaacagcttgatatagtgtcctttttttaaaattcagaactttttttattgataatggagattgctgtttgagtttttaaacttaatctagaacagaggagtattaaaagtaatgctgtgctgcattatttaagactatcagcaaattatttgatagattgttcttacaacttgtattctgattacagaaccatcatgagtgtggaataaatactggattaaatcctttatcctgggtcttggcttttcccccatttgttaaatttttttagcatatttatattgtggaaattgatgaaacgtcagtagagtcacactttgtgtacagggatgtcttagtgcccagatgacaagtgaattttggagaaatgcatagactgggattgggcatgtggtaatcaataatctttattagaatacttgataatggcagttccctttgtcagtggttgttacatgtgtcatttgattactttgttccatgtcaaagacgtttattgggataccttttacttggacaatatgttagcattttttaaaatttggacttgaaattctttaagataattcacccaattctttttagaaaagaaaatagaggcccaaagtaatgatgtcagtgctagggctaaaactcagtattctgacagtgtagtgaacctggcacgcacattgaggtttgttttatctcactggttatactggccaactaatgcgcactcagaagccaccttgcaaaaatgttaaatggagcaaacgagtacacttgcaagagtcctccatatgtgggcttaacatatgtaccactccattttagaaaaatctcattaaatgaattcttctaaaaatg

SEQ ID NO: 2601 - protein, 349 aa, Homo sapiens; identical to SEQ ID NO: 2599

SEQ ID NO: 2602 - DNA, 3504 bp, Homo sapiens
taattggtgttgtattggttttgtttctggatgcctctattttatgttttttattgtgtttacaaatctgaggtcctctatttaagctaacttattgttttcttccttagatatctgcagcgattatatttggaaatactgtatatctgaacacttaaatgtgtgtgagtgcaagcagttttacctttagctcttgttttcctgtttagataacaaatctcactttccttgtgtgcttgcactataggtttgggactgacaatagctgactaacatgtcctgagctgtgagagggcatagcaagaaggccttcatgcggacctagatgtgaaggctggtggaggctgtgtaatgaccattggagaaatgctacgatcttttctcacaaaactggagtggttttctaccttgtttccaagaattccagttccagttcaaaagaatattgatcaacagattaaaacccgacctagaaaaatcaagaaagatgggaaggaaggtgctgaggaaatagacagacatgttgaacgcagacgttcaaggtctccaaggagatctctgagtccacggaggtccccaagaaggtcaagaagtagaagtcatcatcgggagggccatgggtcttctagttttgacagagaattagaaagagagaaagaacgccagcgactagagcgtgaagccaaagaaagggagaaagaacggcgaagatcccgaagtattgaccgggggttagaacgcaggcgcagcagaagtagggaaaggcatagaagtcgcagtcgaagtcgtgataggaaaggggatagaagggacagggatcgagaaagagagaaagaaaatgagagaggtagaagacgagatcgtgactatgataaggaaagaggaaatgaacgagaaaaagagagagagcgatcaagagaaaggtccaaggaacagagaagtaggggagaggtagaagagaagaaacataaagaagacaaagatgataggcggcacagagatgacaaaagagattccaagaaagagaaaaaacacagtagaagcagaagcagagaaaggaaacacagaagtaggagtcgaagtagaaatgcagggaaacgaagtagaagtagaagcaaagagaaatcaagtaaacataaaaatgaaagtaaagaaaaatcaaataaacgaagtcgaagtggcagtcaaggaagaactgacagtgttgaaaaatcaaaaaaacgggaacatagtcccagcaaagaaaaatctagaaagcgtagtagaagcaaagaacgttcccacaaacgagatcacagtgatagtaaggaccagtcagacaaacatgatcgtcgaaggagccaaagtatagaacaagagagccaagaaaaacagcataaaaacaaagatgagactgtgtgaaaatattttgtaaaagtggatcacattgaatcctataaatgattaaatctgcttttttcccccacgttgagattgtgcagtagttcgcactcctcaagctctccctgtaggctgcattttcatttcctctttcgtgtagggaagtgcctttgtaattccatttattgcattggtgttttcacccaattgttaagtttgatacatgatgcacagattgttcttgcatttttattgtttgtttttgaaatgtacagtctgtacatatgtcctgaaaatgttttaattcctttggcatggttgccatgttggttaaatttgtataaggcaataaactgccactaatctatttttgttttgtaggtgtgggattatggtttgtgtactgaagttagcatggctgtgcttttcgtaatagaatgctaaagactttgagaatggatcttggatgtctattataggagaagtatgtgctgccaatgtacaagaaggcagcattgtaggattaacattcttgtctactgtatattatcttggaaggctcttgttaatatgttacacttaatattctccacagttacctttagagagaatttatgagaagttagtttctgatgcagaggtttttaggctgtgatttcatcaaaagtccttttagcattctacctcaaagggacacttagtatgcctaaaatttattcacttagttttccttttttatttgaaaaaatacatgacatgtaatctttttttcttgaattctttctcagattttaaagtactatattaaagaaaaaaattaatgtctaaagcctagcattcttgcagaaccctatactaacatgtaatggggagagggtggggcagatgagtagagaaacagattcaagcctcaagcttccaaagcatttttataaatggaaaatccttaaattatgaaacagcttgatatagtgtcctttttttaaaattcagaactttttttattgataatggagattgctgtttgagtttttaaacttaatctagaacagaggagtattaaaagtaatgctgtgctgcattatttaagactatcagcaaattatttgatagattgttcttacaacttgtattctgattacagaaccatcatgagtgtggaataaatactggattaaatcctttatcctgggtcttggcttttcccccatttgttaaatttttttagcatatttatattgtggaaattgatgaaacgtcagtagagtcacactttgtgtacagggatgtcttagtgcccagatgacaagtgaattttggagaaatgcatagactgggattgggcatgtggtaatcaataatctttattagaatacttgataatggcagttccctttgtcagtggttgttacatgtgtcatttgattactttgttccatgtcaaagacgtttattgggataccttttacttggacaatatgttagcattttttaaaatttggacttgaaattctttaagataattcacccaattctttttagaaaagaaaatagaggcccaaagtaatgatgtcagtgctagggctaaaactcagtattctgacagtgtagtgaacctggcacgcacattgaggtttgttttatctcactggttatactggccaactaatgcgcactcagaagccaccttgcaaaaatgttaaatggagcaaacgagtacacttgcaagagtcctccatatgtgggcttaacatatgtaccactccattttagaaaaatctcattaaatgaattcttctaaaaatgatatgcttttttcttttttaagaaaattcctttgtcttttaaattgagcatcaagtgaattagtgctatagacacccagaagttagaaaaacctattgtataatatgaaagccactaaatttgtcttgtgttgaaaatctacttttagcatacctaaattatggagctactactttggatatggttccatgtgaaatgttttatctgactattttaagtaaaatgtggaaagaatttaaattacttcacatggaggtgaaagaactatcacctcgattgacagttcgatgatcgtcactacatttgatttcttgtggg

SEQ ID NO: 2603 - protein, 349 aa, Homo sapiens; identical to SEQ ID NO: 2599

SEQ ID NO: 2604 - DNA, 1055 bp, Homo sapiens
actgcttcatggcagttggtttgctattgcttccagttttattagggcttcattttatattagagctgttaaaagataacctttagacaggaattatctaaagtagatcatatgtagctaggttatggtgcaaggtatatgatgtgtgcaaatatgtccacagaaataaatacatagtaggtatgtggaatgtaaatttaagtcaatcgttccgcatagtttagaaatgtaaggggctttttcatattgttaactgagtgagatcagttccctttatgcctgtgaggctgcagggtttgttctcacttgcatgcacacactaagcccaaatatttctgttcattcattgtcagatcaggatatgaaaataaaatttttctgttagttttttttgtattgagattccaaagatggtaatatttttataatattcatgtatatatggaaatactttttttgacggctagggtatcttttgtgtttctgtaggacctagatgtgaaggctggtggaggctgtgtaatgaccattggagaaatgctacgatcttttctcacaaaactggagtggttttctaccttgtttccaagaattccagttccagttcaaaagaatattgatcaacagattaaaacccgacctagaaaaatcaagaaagatgggaaggaaggtgctgaggaaatagacagacatgttgaacgcagacgttcaaggtctccaaggagatctctgagtccacggaggtccccaagaaggtcaagaagtagaagtcatcatcgggagggccatgggtcttctagttttgacagagaattagaaagagagaaagaacgccagcgactagagcgtgaagccaaagaaagggagaaagaacggcgaagatcccgaagtattgaccgggggttagaacgcaggcgcagcagaagtagggaaaggcatagaagtcgcagtcgaagtcgtgataggaaaggggatagaagggacagggatcgagaaagagagaaagaaaatgagagaggtagaagacgagatcgtgactatgataaggaaagagg

SEQ ID NO: 2605 - protein, 176 aa, Homo sapiens
MTIGEMLRSFLTKLEWFSTLFPRIPVPVQKNIDQQIKTRPRKIKKDGKEGAEEIDRHVERRRSRSPRRSLSPRRSPRRSRSRSHHREGHGSSSFDRELEREKERQRLEREAKEREKERRRSRSIDRGLERRRSRSRERHRSRSRSRDRKGDRRDRDREREKENERGRRRDRDYDKE

SEQ ID NO: 2606 - DNA, 2744 bp, Homo sapiens
actgcttcatggcagttggtttgctattgcttccagttttattagggcttcattttatattagagctgttaaaagataacctttagacaggaattatctaaagtagatcatatgtagctaggttatggtgcaaggtatatgatgtgtgcaaatatgtccacagaaataaatacatagtaggtatgtggaatgtaaatttaagtcaatcgttccgcatagtttagaaatgtaaggggctttttcatattgttaactgagtgagatcagttccctttatgcctgtgaggctgcagggtttgttctcacttgcatgcacacactaagcccaaatatttctgttcattcattgtcagatcaggatatgaaaataaaatttttctgttagttttttttgtattgagattccaaagatggtaatatttttataatattcatgtatatatggaaatactttttttgacggctagggtatcttttgtgtttctgtaggacctagatgtgaaggctggtggaggctgtgtaatgaccattggagaaatgctacgatcttttctcacaaaactggagtggttttctaccttgtttccaagaattccagttccagttcaaaagaatattgatcaacagattaaaacccgacctagaaaaatcaagaaagatgggaaggaaggtgctgaggaaatagacagacatgttgaacgcagacgttcaaggtctccaaggagatctctgagtccacggaggtccccaagaaggtcaagaagtagaagtcatcatcgggagggccatgggtcttctagttttgacagagaattagaaagagagaaagaacgccagcgactagagcgtgaagccaaagaaagggagaaagaacggcgaagatcccgaagtattgaccgggggttagaacgcaggcgcagcagaagtagggaaaggcatagaagtcgcagtcgaagtcgtgataggaaaggggatagaagggacagggatcgagaaagagagaaagaaaatgagagaggtagaagacgagatcgtgactatgataaggaaagaggaaatgaacgagaaaaagagagagagcgatcaagagaaaggtccaaggaacagagaagtaggggagaggtagaagagaagaaacataaagaagacaaagatgataggcggcacagagatgacaaaagagattccaagaaagagaaaaaacacagtagaagcagaagcagagaaaggaaacacagaagtaggagtcgaagtagaaatgcagggaaacgaagtagaagtagaagcaaagagaaatcaagtaaacataaaaatgaaagtaaagaaaaatcaaataaacgaagtcgaagtggcagtcaaggaagaactgacagtgttgaaaaatcaaaaaaacgggaacatagtcccagcaaagaaaaatctagaaagcgtagtagaagcaaagaacgttcccacaaacgagatcacagtgatagtaaggaccagtcagacaaacatgatcgtcgaaggagccaaagtatagaacaagagagccaagaaaaacagcataaaaacaaagatgagactgtgtgaaaatattttgtaaaagtggatcacattgaatcctataaatgattaaatctgcttttttcccccacgttgagattgtgcagtagttcgcactcctcaagctctccctgtaggctgcattttcatttcctctttcgtgtagggaagtgcctttgtaattccatttattgcattggtgttttcacccaattgttaagtttgatacatgatgcacagattgttcttgcatttttattgtttgtttttgaaatgtacagtctgtacatatgtcctgaaaatgttttaattcctttggcatggttgccatgttggttaaatttgtataaggcaataaactgccactaatctatttttgttttgtaggtgtgggattatggtttgtgtactgaagttagcatggctgtgcttttcgtaatagaatgctaaagactttgagaatggatcttggatgtctattataggagaagtatgtgctgccaatgtacaagaaggcagcattgtaggattaacattcttgtctactgtatattatcttggaaggctcttgttaatatgttacacttaatattctccacagttacctttagagagaatttatgagaagttagtttctgatgcagaggtttttaggctgtgatttcatcaaaagtccttttagcattctacctcaaagggacacttagtatgcctaaaatttattcacttagttttccttttttatttgaaaaaatacatgacatgtaatctttttttcttgaattctttctcagattttaaagtactatattaaagaaaaaaattaatgtctaaagcctagcattcttgcagaaccctatactaacatgtaatggggagagggtggggcagatgagtagagaaacagattcaagcctcaagcttccaaagcatttttataaatggaaaatccttaaattatgaaacagcttgatatagtgtcctttttttaaaattcagaactttttttattgataatggagattgctgtttgagtttttaaacttaatctagaacagaggagtattaaaagtaatgctgtgctgcattatttaagactatcagcaaattatttgatagattgttcttacaacttgtattctgattacagaaccatcatgagtgtggaataaatactggattaaatcctttatcctggg

SEQ ID NO: 2607 - protein, 349 aa, Homo sapiens; identical to SEQ ID NO: 2599

SEQ ID NO: 2608 - DNA, 3357 bp, Homo sapiens
actgcttcatggcagttggtttgctattgcttccagttttattagggcttcattttatattagagctgttaaaagataacctttagacaggaattatctaaagtagatcatatgtagctaggttatggtgcaaggtatatgatgtgtgcaaatatgtccacagaaataaatacatagtaggtatgtggaatgtaaatttaagtcaatcgttccgcatagtttagaaatgtaaggggctttttcatattgttaactgagtgagatcagttccctttatgcctgtgaggctgcagggtttgttctcacttgcatgcacacactaagcccaaatatttctgttcattcattgtcagatcaggatatgaaaataaaatttttctgttagttttttttgtattgagattccaaagatggtaatatttttataatattcatgtatatatggaaatactttttttgacggctagggtatcttttgtgtttctgtaggacctagatgtgaaggctggtggaggctgtgtaatgaccattggagaaatgctacgatcttttctcacaaaactggagtggttttctaccttgtttccaagaattccagttccagttcaaaagaatattgatcaacagattaaaacccgacctagaaaaatcaagaaagatgggaaggaaggtgctgaggaaatagacagacatgttgaacgcagacgttcaaggtctccaaggagatctctgagtccacggaggtccccaagaaggtcaagaagtagaagtcatcatcgggagggccatgggtcttctagttttgacagagaattagaaagagagaaagaacgccagcgactagagcgtgaagccaaagaaagggagaaagaacggcgaagatcccgaagtattgaccgggggttagaacgcaggcgcagcagaagtagggaaaggcatagaagtcgcagtcgaagtcgtgataggaaaggggatagaagggacagggatcgagaaagagagaaagaaaatgagagaggtagaagacgagatcgtgactatgataaggaaagaggaaatgaacgagaaaaagagagagagcgatcaagagaaaggtccaaggaacagagaagtaggggagaggtagaagagaagaaacataaagaagacaaagatgataggcggcacagagatgacaaaagagattccaagaaagagaaaaaacacagtagaagcagaagcagagaaaggaaacacagaagtaggagtcgaagtagaaatgcagggaaacgaagtagaagtagaagcaaagagaaatcaagtaaacataaaaatgaaagtaaagaaaaatcaaataaacgaagtcgaagtggcagtcaaggaagaactgacagtgttgaaaaatcaaaaaaacgggaacatagtcccagcaaagaaaaatctagaaagcgtagtagaagcaaagaacgttcccacaaacgagatcacagtgatagtaaggaccagtcagacaaacatgatcgtcgaaggagccaaagtatagaacaagagagccaagaaaaacagcataaaaacaaagatgagactgtgtgaaaatattttgtaaaagtggatcacattgaatcctataaatgattaaatctgcttttttcccccacgttgagattgtgcagtagttcgcactcctcaagctctccctgtaggctgcattttcatttcctctttcgtgtagggaagtgcctttgtaattccatttattgcattggtgttttcacccaattgttaagtttgatacatgatgcacagattgttcttgcatttttattgtttgtttttgaaatgtacagtctgtacatatgtcctgaaaatgttttaattcctttggcatggttgccatgttggttaaatttgtataaggcaataaactgccactaatctatttttgttttgtaggtgtgggattatggtttgtgtactgaagttagcatggctgtgcttttcgtaatagaatgctaaagactttgagaatggatcttggatgtctattataggagaagtatgtgctgccaatgtacaagaaggcagcattgtaggattaacattcttgtctactgtatattatcttggaaggctcttgttaatatgttacacttaatattctccacagttacctttagagagaatttatgagaagttagtttctgatgcagaggtttttaggctgtgatttcatcaaaagtccttttagcattctacctcaaagggacacttagtatgcctaaaatttattcacttagttttccttttttatttgaaaaaatacatgacatgtaatctttttttcttgaattctttctcagattttaaagtactatattaaagaaaaaaattaatgtctaaagcctagcattcttgcagaaccctatactaacatgtaatggggagagggtggggcagatgagtagagaaacagattcaagcctcaagcttccaaagcatttttataaatggaaaatccttaaattatgaaacagcttgatatagtgtcctttttttaaaattcagaactttttttattgataatggagattgctgtttgagtttttaaacttaatctagaacagaggagtattaaaagtaatgctgtgctgcattatttaagactatcagcaaattatttgatagattgttcttacaacttgtattctgattacagaaccatcatgagtgtggaataaatactggattaaatcctttatcctgggtcttggcttttcccccatttgttaaatttttttagcatatttatattgtggaaattgatgaaacgtcagtagagtcacactttgtgtacagggatgtcttagtgcccagatgacaagtgaattttggagaaatgcatagactgggattgggcatgtggtaatcaataatctttattagaatacttgataatggcagttccctttgtcagtggttgttacatgtgtcatttgattactttgttccatgtcaaagacgtttattgggataccttttacttggacaatatgttagcattttttaaaatttggacttgaaattctttaagataattcacccaattctttttagaaaagaaaatagaggcccaaagtaatgatgtcagtgctagggctaaaactcagtattctgacagtgtagtgaacctggcacgcacattgaggtttgttttatctcactggttatactggccaactaatgcgcactcagaagccaccttgcaaaaatgttaaatggagcaaacgagtacacttgcaagagtcctccatatgtgggcttaacatatgtaccactccattttagaaaaatctcattaaatgaattcttctaaaaatg

SEQ ID NO: 2609 - protein, 349 aa, Homo sapiens; identical to SEQ ID NO: 2599

SEQ ID NO: 2610 - DNA, 3675 bp, Homo sapiens
actgcttcatggcagttggtttgctattgcttccagttttattagggcttcattttatattagagctgttaaaagataacctttagacaggaattatctaaagtagatcatatgtagctaggttatggtgcaaggtatatgatgtgtgcaaatatgtccacagaaataaatacatagtaggtatgtggaatgtaaatttaagtcaatcgttccgcatagtttagaaatgtaaggggctttttcatattgttaactgagtgagatcagttccctttatgcctgtgaggctgcagggtttgttctcacttgcatgcacacactaagcccaaatatttctgttcattcattgtcagatcaggatatgaaaataaaatttttctgttagttttttttgtattgagattccaaagatggtaatatttttataatattcatgtatatatggaaatactttttttgacggctagggtatcttttgtgtttctgtaggacctagatgtgaaggctggtggaggctgtgtaatgaccattggagaaatgctacgatcttttctcacaaaactggagtggttttctaccttgtttccaagaattccagttccagttcaaaagaatattgatcaacagattaaaacccgacctagaaaaatcaagaaagatgggaaggaaggtgctgaggaaatagacagacatgttgaacgcagacgttcaaggtctccaaggagatctctgagtccacggaggtccccaagaaggtcaagaagtagaagtcatcatcgggagggccatgggtcttctagttttgacagagaattagaaagagagaaagaacgccagcgactagagcgtgaagccaaagaaagggagaaagaacggcgaagatcccgaagtattgaccgggggttagaacgcaggcgcagcagaagtagggaaaggcatagaagtcgcagtcgaagtcgtgataggaaaggggatagaagggacagggatcgagaaagagagaaagaaaatgagagaggtagaagacgagatcgtgactatgataaggaaagaggaaatgaacgagaaaaagagagagagcgatcaagagaaaggtccaaggaacagagaagtaggggagaggtagaagagaagaaacataaagaagacaaagatgataggcggcacagagatgacaaaagagattccaagaaagagaaaaaacacagtagaagcagaagcagagaaaggaaacacagaagtaggagtcgaagtagaaatgcagggaaacgaagtagaagtagaagcaaagagaaatcaagtaaacataaaaatgaaagtaaagaaaaatcaaataaacgaagtcgaagtggcagtcaaggaagaactgacagtgttgaaaaatcaaaaaaacgggaacatagtcccagcaaagaaaaatctagaaagcgtagtagaagcaaagaacgttcccacaaacgagatcacagtgatagtaaggaccagtcagacaaacatgatcgtcgaaggagccaaagtatagaacaagagagccaagaaaaacagcataaaaacaaagatgagactgtgtgaaaatattttgtaaaagtggatcacattgaatcctataaatgattaaatctgcttttttcccccacgttgagattgtgcagtagttcgcactcctcaagctctccctgtaggctgcattttcatttcctctttcgtgtagggaagtgcctttgtaattccatttattgcattggtgttttcacccaattgttaagtttgatacatgatgcacagattgttcttgcatttttattgtttgtttttgaaatgtacagtctgtacatatgtcctgaaaatgttttaattcctttggcatggttgccatgttggttaaatttgtataaggcaataaactgccactaatctatttttgttttgtaggtgtgggattatggtttgtgtactgaagttagcatggctgtgcttttcgtaatagaatgctaaagactttgagaatggatcttggatgtctattataggagaagtatgtgctgccaatgtacaagaaggcagcattgtaggattaacattcttgtctactgtatattatcttggaaggctcttgttaatatgttacacttaatattctccacagttacctttagagagaatttatgagaagttagtttctgatgcagaggtttttaggctgtgatttcatcaaaagtccttttagcattctacctcaaagggacacttagtatgcctaaaatttattcacttagttttccttttttatttgaaaaaatacatgacatgtaatctttttttcttgaattctttctcagattttaaagtactatattaaagaaaaaaattaatgtctaaagcctagcattcttgcagaaccctatactaacatgtaatggggagagggtggggcagatgagtagagaaacagattcaagcctcaagcttccaaagcatttttataaatggaaaatccttaaattatgaaacagcttgatatagtgtcctttttttaaaattcagaactttttttattgataatggagattgctgtttgagtttttaaacttaatctagaacagaggagtattaaaagtaatgctgtgctgcattatttaagactatcagcaaattatttgatagattgttcttacaacttgtattctgattacagaaccatcatgagtgtggaataaatactggattaaatcctttatcctgggtcttggcttttcccccatttgttaaatttttttagcatatttatattgtggaaattgatgaaacgtcagtagagtcacactttgtgtacagggatgtcttagtgcccagatgacaagtgaattttggagaaatgcatagactgggattgggcatgtggtaatcaataatctttattagaatacttgataatggcagttccctttgtcagtggttgttacatgtgtcatttgattactttgttccatgtcaaagacgtttattgggataccttttacttggacaatatgttagcattttttaaaatttggacttgaaattctttaagataattcacccaattctttttagaaaagaaaatagaggcccaaagtaatgatgtcagtgctagggctaaaactcagtattctgacagtgtagtgaacctggcacgcacattgaggtttgttttatctcactggttatactggccaactaatgcgcactcagaagccaccttgcaaaaatgttaaatggagcaaacgagtacacttgcaagagtcctccatatgtgggcttaacatatgtaccactccattttagaaaaatctcattaaatgaattcttctaaaaatgatatgcttttttcttttttaagaaaattcctttgtcttttaaattgagcatcaagtgaattagtgctatagacacccagaagttagaaaaacctattgtataatatgaaagccactaaatttgtcttgtgttgaaaatctacttttagcatacctaaattatggagctactactttggatatggttccatgtgaaatgttttatctgactattttaagtaaaatgtggaaagaatttaaattacttcacatggaggtgaaagaactatcacctcgattgacagttcgatgatcgtcactacatttgatttcttgtggg

SEQ ID NO: 2611 - protein, 349 aa, Homo sapiens; identical to SEQ ID NO: 2599

SEQ ID NO: 2612 - DNA, 663 bp, Homo sapiens
atggctggtggacgagagacatgtttgcctttgattggattcattcttatctgtcttaaaatggttgcttcagcaaaatcagctcctgaaatacccactattgatcaggcatattcaaaactcagcaacagtatcactgtagaatgggctacagtgccgggtgccaccagttacctcctcacggctgaagacggggacacagtcattgaaaccacggtggccaattccccaggcactgtgacgggactaaaggctgcaacctggtatgaaatcaccatcagatccatcagcgctgctgggagaagccaggcgtcacctccaaagcaggcaaagacagtgttggctgcaccaattctagaagtaagctctccaagttcagactccattcttgtgcagtgggaagctgtatatatggcaattgcattctccgtgtccattatgcgagccaatggcttggggagtatatggaaagagaatactacaaacacctccttgacattcaccagtttagaagccggaactctctacaccataaaggcctatgcatggaatgccaacagaatccctggggatgactccacctgcaatcagagaacaaaggtcccccgagcaaaggactctgcagcattacaactggaggtccaaattgagctgctggagtga

SEQ ID NO: 2613 - protein, 220 aa, Homo sapiens
MAGGRETCLPLIGFILICLKMVASAKSAPEIPTIDQAYSKLSNSITVEWATVPGATSYLLTAEDGDTVIETTVANSPGTVTGLKAATWYEITIRSISAAGRSQASPPKQAKTVLAAPILEVSSPSSDSILVQWEAVYMAIAFSVSIMRANGLGSIWKENTTNTSLTFTSLEAGTLYTIKAYAWNANRIPGDDSTCNQRTKVPRAKDSAALQLEVQIELLE

SEQ ID NO: 2614 - DNA, 2438 bp, Homo sapiens
aagtctctttcgatagtggagctctgaaggcatctttttcctgggcacgggcagaaggagctttcaattatactgtgatggctttgagcgactcttcagagctgacctgcagtacaactttcagttcctgcaccatctcttccctccagtgtggaactgaatacttgatttcagttttagcaagtaatgatgctggatctagcaaatcatcttcagcaatgaccctgaaaactgttgcttgtgcacccggaagagtgacgatccaagaagatccccctggccacctgtctgtggcttggtccagtgtagatctgggtgactactatgtggtctttgtgaagagtgatgatggcttggaagtacactgcaacacatctctcactcagtgcaacttcttatctgagtgtggcttcacttattttattagtgtttttgtctataacaaggcagggcaaagtcctttgggtgacatattcaattataccacagctccctgttgtcctagtgacattaaccccgtgttggtgtccagtgacagagttgagattgtctggtctcctgtccgtggtgccgaactgtatgaaaccaaggctgtagatgggtacaacatggttgagtgcaatgacactactcctgcgtgcaccctttcggctctagagtgtgacaccaagtacaacatcacagtgtattcattcaatgaagtccgaggcagcaatatgtcatgtactccccagttcataaccacagctccttgcagtcctgaaataaaaaatgtttcaagggatgcattctccatgattaatgtgcactggcgatccactaatgatgatgctacttacacggtgactgcccaaggggagaaaggactgtatcagtgcagcagcacaggagagtcctgcaccatgcggggcttgccctgtggctcagtgttctctgtcactgctgtggccgaaacacaggcaggacggagcctgcccagctacagtgtgcccctggaaacagtgccatgctgtccaaccggtctgacagtaactcaaatcacccagtcagtaatcaacgtgagctggactattgggagagtggctcaaacccatgttgcagttctggagtcacacactggacagtctaagtgtcacactcatcaaaaccactgcctcctaggatgcatcacatgtggcatcaattacacagtgacattaaaagcaattagtgccaccgggttgactgcagattgctcctaccaaagttatttctctggtgcctgctgccctttgggggtgaaattatataggctgggccctaatggcatccggatctactggcaagcctccaggggctctgccaattacagcactgacctctatggctccaaaggcattttcacgtgcaccccgagtgctggcctcagtttctgtgatgtcactgagataccctgtggggatgtatacactgtgatggtctcaccagttgctaaaacaggattgaagcttactttctgtccaaaaaaaatatattcagtaacttgctctggaagtacacttggaatggtgatttatagagggaagagaaatgaagaatgacaaagtgagccccagataaaaacaaaaacttgaccaaagttgtctcatttgttagtgattagagatggaaaagatctactagaatgtagaataaaaatgcctctaggataggaaaagctcctttggcctttagaagaacaactctgactctgcttcctgagggcaaggtcaggtgtgtcctcacctgcacagcagttggagatctgctatgtgaggactctggagagaaatgaatccagaaagtcccctggacggctgctagcctgagttggcacactgtgagaaccctggaaacaagaaagttctgcttagcagaaattctgagatttcacatccacacacaccacagacttcaacacatccacttcatgagtgttttacaacagcacttgtctgcagccccctcaggggctggaaatgttcactcccagaaagtcaagccacccacatgcagacagcacttatcccaagacaaacctccagcaggacttcagtataggttggaaagcagtagctgccagggcaacctgagataacaaacgccctcatcgcaagttaggagcaaagctgagctgcttgcagggttcgctgagccaaagcatcaggtggcgtgacatctatgggagcatctgggaaagcagagctgccagcctgttgctagaagggttgcagttatgctttctgcatgagagaagatgtcaaatggagagcctcaaactgtggccgactgacatgcgtgcatcttttgggggaggaccatccatcttattggccatatcccccactcatattgtaattacttttttcatctttggagggggaaggcaatgaaatataacataaatctctcatacctaa

SEQ ID NO: 2615 - protein, 500 aa, Homo sapiens
MALSDSSELTCSTTFSSCTISSLQCGTEYLISVLASNDAGSSKSSSAMTLKTVACAPGRVTIQEDPPGHLSVAWSSVDLGDYYVVFVKSDDGLEVHCNTSLTQCNFLSECGFTYFISVFVYNKAGQSPLGDIFNYTTAPCCPSDINPVLVSSDRVEIVWSPVRGAELYETKAVDGYNMVECNDTTPACTLSALECDTKYNITVYSFNEVRGSNMSCTPQFITTAPCSPEIKNVSRDAFSMINVHWRSTNDDATYTVTAQGEKGLYQCSSTGESCTMRGLPCGSVFSVTAVAETQAGRSLPSYSVPLETVPCCPTGLTVTQITQSVINVSWTIGRVAQTHVAVLESHTGQSKCHTHQNHCLLGCITCGINYTVTLKAISATGLTADCSYQSYFSGACCPLGVKLYRLGPNGIRIYWQASRGSANYSTDLYGSKGIFTCTPSAGLSFCDVTEIPCGDVYTVMVSPVAKTGLKLTFCPKKIYSVTCSGSTLGMVIYRGKRNEE

SEQ ID NO: 2616 - DNA, 520 bp, Homo sapiens
agacctttgtgctgaaggatagtcctgtccgagacctgctgcccactgtgaacttctctgggttgaaagaagattaggggaaaagaggtcaccttccagcagtgaaatgaacaaatagaagatgagaagtacaggcaagtggtttgtctttatccacccccactgttgtggtcagccccagagaattttatcttcttccttggcattggttcactggacatttccacgtgagcggcctccgtagctaacctccctgccctctgaggagccatcttcctgaatcgcattctctactggactctggcctgcttggagaggtggcagcaggcacctggtcttcagaaattgtttcctgtgaattctgtgactcctaataggccagtttgtgataagcttactctatgagtcttcatttttctaaaataaagtgaatgtatttttatattctctgtatatctggaagtcgatcctgctcctatttctttctctttttttagacagaatcttgctctgtcaccca

SEQ ID NO: 2617 - protein, 40 aa, Homo sapiens
MRSTGKWFVFIHPHCCGQPQRILSSSLALVHWTFPRERPP

SEQ ID NO: 2618 - DNA, 416 bp, Homo sapiens
ctaactggactctcgctcctgctggctggacatggaggatttggaggaagatgtaaggtttatttggtcagccccagagaattttatcttcttccttggcattggttcactggacatttccacgtgagcggcctccgtagctaacctccctgccctctgaggagccatcttcctgaatcgcattctctactggactctggcctgcttggagaggtggcagcaggcacctggtcttcagaaattgtttcctgtgaattctgtgactcctaataggccagtttgtgataagcttactctatgagtcttcatttttctaaaataaagtgaatgtatttttatattctctgtatatctggaagtcgatcctgctcctatttctttctctttttttagacagaatcttgctctgtcaccca

SEQ ID NO: 2619 - protein, 31 aa, Homo sapiens
MEDLEEDVRFIWSAPENFIFFLGIGSLDIST

SEQ ID NO: 2620 - DNA, 1822 bp, Homo sapiens
gcgggagaaagcctgttgcgtggaagataaggcggcgcgggaagtggacacagggtgggctggagctgcgagccttgggcagaatggatacctgaggaaaggtatggtttctctccggctcagatctaactggactctcgctcctgctggctggacatggaggatttggaggaagatgtaaggtttattgtggatgagaccttggactttggggggctgtcaccatctgacagccgtgaggaggaagacataacagtgttggtgactccagagaaaccacttcgacggggcctctcccaccgaagtgacccaaatgcagtggcacctgccccccagggtgtgaggctcagcctaggccccctcagtccagagaagctggaggagatcctcgatgaggccaaccggctggccgctcagctggagcagtgtgccctgcaggatcgggagagcgcaggcgagggcctggggcctcgccgagtgaagcccagtcctcggcgggagacctttgtgctgaaggatagtcctgtccgagacctgctgcccactgtgaactctttgacgcggagcaccccctccccaagcagcctgacgcctcgactccggagtaatgataggaaggggtcagtcagggctctccgggctacatctggaaagaggccctccaacatgaagagggagtcacccacttgcaatctgttccctgcatccaaaagcccagcatcttctcctcttacccgatcgactcccccagtccgggggagagccgggcccagtgggagagcagcagccagcccacccacccccatcagatccgtcctggccccacagccttctaccagcaactctcaacgcctgccccggccgcagggagcagctgctaaatcttccagtcaactgcccattccctcggccatccccaggcctgccagccgaatgccactcaccagccggagtgtgccacctggcagaggtgccctacctccggattctctgtcaactcgaaaagggcttccaagaccaagcactgcaggacacagagtgcgggaaagtggacacaaggttcctgtttcccagcgactaaatcttcctgtcatgggtgccactcgcagcaatctgcagccccccaggaaagtggcagtcccaggacctaccaggtaaagagatcaggacagcaagcaagacttcagtagcaaaccactacagtcagtacctggactcgcctctacccagcagaccctgactccagcagattctggcccagggacaggaggaagagatgccaccagggctggtctcccaggagtagagaccatgggaaatggggtggattaggattgagctggagaagacttaaactctctgggttgaaagaagattaggggaaaagaggtcaccttccagcagtgaaatgaacaaatagaagatgagaagtacaggcaagtggtttgtctttatccacccccactgttgtggtcagccccagagaattttatcttcttccttggcattggttcactggacatttccacgtgagcggcctccgtagctaacctccctgccctctgaggagccatcttcctgaatcgcattctctactggactctggcctgcttggagaggtggcagcaggcacctggtcttcagaaattgtttcctgtgaattctgtgactcctaataggccagtttgtgataagcttactctatgagtcttcatttttctaaaataaagtgaatgtatttttatattctctgtatatctggaagtcgatcctgctcctatttctttctctttttttagacagaatcttgctctgtcaccca

SEQ ID NO: 2621 - protein, 333 aa, Homo sapiens; identical to SEQ ID NO: 67

SEQ ID NO: 2622 - DNA, 1799 bp, Homo sapiens
gcgggagaaagcctgttgcgtggaagataaggcggcgcgggaagtggacacagggtgggctggaggtgtgcttcgcgtgtgatgccaggggagtggaaagatctaactggactctcgctcctgctggctggacatggaggatttggaggaagatgtaaggtttattgtggatgagaccttggactttggggggctgtcaccatctgacagccgtgaggaggaagacataacagtgttggtgactccagagaaaccacttcgacggggcctctcccaccgaagtgacccaaatgcagtggcacctgccccccagggtgtgaggctcagcctaggccccctcagtccagagaagctggaggagatcctcgatgaggccaaccggctggccgctcagctggagcagtgtgccctgcaggatcgggagagcgcaggcgagggcctggggcctcgccgagtgaagcccagtcctcggcgggagacctttgtgctgaaggatagtcctgtccgagacctgctgcccactgtgaactctttgacgcggagcaccccctccccaagcagcctgacgcctcgactccggagtaatgataggaaggggtcagtcagggctctccgggctacatctggaaagaggccctccaacatgaagagggagtcacccacttgcaatctgttccctgcatccaaaagcccagcatcttctcctcttacccgatcgactcccccagtccgggggagagccgggcccagtgggagagcagcagccagcccacccacccccatcagatccgtcctggccccacagccttctaccagcaactctcaacgcctgccccggccgcagggagcagctgctaaatcttccagtcaactgcccattccctcggccatccccaggcctgccagccgaatgccactcaccagccggagtgtgccacctggcagaggtgccctacctccggattctctgtcaactcgaaaagggcttccaagaccaagcactgcaggacacagagtgcgggaaagtggacacaaggttcctgtttcccagcgactaaatcttcctgtcatgggtgccactcgcagcaatctgcagccccccaggaaagtggcagtcccaggacctaccaggtaaagagatcaggacagcaagcaagacttcagtagcaaaccactacagtcagtacctggactcgcctctacccagcagaccctgactccagcagattctggcccagggacaggaggaagagatgccaccagggctggtctcccaggagtagagaccatgggaaatggggtggattaggattgagctggagaagacttaaactctctgggttgaaagaagattaggggaaaagaggtcaccttccagcagtgaaatgaacaaatagaagatgagaagtacaggcaagtggtttgtctttatccacccccactgttgtggtcagccccagagaattttatcttcttccttggcattggttcactggacatttccacgtgagcggcctccgtagctaacctccctgccctctgaggagccatcttcctgaatcgcattctctactggactctggcctgcttggagaggtggcagcaggcacctggtcttcagaaattgtttcctgtgaattctgtgactcctaataggccagtttgtgataagcttactctatgagtcttcatttttctaaaataaagtgaatgtatttttatattctctgtatatctggaagtcgatcctgctcctatttctttctctttttttagacagaatcttgctctgtcaccca

SEQ ID NO: 2623 - protein, 333 aa, Homo sapiens; identical to SEQ ID NO: 67

SEQ ID NO: 2624 - DNA, 1685 bp, Homo sapiens
agctgattcccgggactaggttgcgggagaaagcctgttgcgtggaagataaggcggcgcgggaagtggacacagggtgggctggagatctaactggactctcgctcctgctggctggacatggaggatttggaggaagatgtaaggtttattgtggatgagaccttggactttggggggctgtcaccatctgacagccgtgaggaggaagacataacagtgttggtgactccagagaaaccacttcgacggggcctctcccaccgaagtgacccaaatgcagtggcacctgccccccagggtgtgaggctcagcctaggccccctcagtccagagaagctggaggagatcctcgatgaggccaaccggctggccgctcagctggagcagtgtgccctgcaggatcgggagagcgcaggcgagggcctggggcctcgccgagtgaagcccagtcctcggcgggagacctttgtgctgaaggatagtcctgtccgagacctgctgcccactgtgaactctttgacgcggagcaccccctccccaagcagcctgacgcctcgactccggagtaatgataggaaggggtcagtcagggctctccgggctacatctggaaagaggccctccaacatgaagagggagtcacccacttgcaatctgttccctgcatccaaaagcccagcatcttctcctcttacccgatcgactcccccagtccgggggagagccgggcccagtgggagagcagcagccagtgaggagaccagagcagccaagttgcgggcctgccagccgaatgccactcaccagccggagtgtgccacctggcagaggtgccctacctccggattctctgtcaactcgaaaagggcttccaagaccaagcactgcaggacacagagtgcgggaaagtggacacaaggttcctgtttcccagcgactaaatcttcctgtcatgggtgccactcgcagcaatctgcagccccccaggaaagtggcagtcccaggacctaccaggtaaagagatcaggacagcaagcaagacttcagtagcaaaccactacagtcagtacctggactcgcctctacccagcagaccctgactccagcagattctggcccagggacaggaggaagagatgccaccagggctggtctcccaggagtagagaccatgggaaatggggtggattaggattgagctggagaagacttaaactctctgggttgaaagaagattaggggaaaagaggtcaccttccagcagtgaaatgaacaaatagaagatgagaagtacaggcaagtggtttgtctttatccacccccactgttgtggtcagccccagagaattttatcttcttccttggcattggttcactggacatttccacgtgagcggcctccgtagctaacctccctgccctctgaggagccatcttcctgaatcgcattctctactggactctggcctgcttggagaggtggcagcaggcacctggtcttcagaaattgtttcctgtgaattctgtgactcctaataggccagtttgtgataagcttactctatgagtcttcatttttctaaaataaagtgaatgtatttttatattctctgtatatctggaagtcgatcctgctcctatttctttctctttttttagacagaatcttgctctgtcaccca

SEQ ID NO: 2625 - protein, 310 aa, Homo sapiens; identical to SEQ ID NO: 63

SEQ ID NO: 2626 - DNA, 1876 bp, Homo sapiens
agctgattcccgggactaggttgcgggagaaagcctgttgcgtggaagataaggcggcgcgggaagtggacacagggtgggctggagatctaactggactctcgctcctgctggctggacatggaggatttggaggaagatgtaaggtttattgtggatgagaccttggactttggggggctgtcaccatctgacagccgtgaggaggaagacataacagtgttggtgactccagagaaaccacttcgacggggcctctcccaccgaagtgacccaaatgcagtggcacctgccccccagggtgtgaggctcagcctaggccccctcagtccagagaagctggaggagatcctcgatgaggccaaccggctggccgctcagctggagcagtgtgccctgcaggatcgggagagcgcaggcgagggcctggggcctcgccgagtgaagcccagtcctcggcgggagacctttgtgctgaaggatagtcctgtccgagacctgctgcccactgtgaactctttgacgcggagcaccccctccccaagcagcctgacgcctcgactccggagtaatgataggaaggggtcagtcagggctctccgggctacatctggaaagaggccctccaacatgaagagggagtcacccacttgcaatctgttccctgcatccaaaagcccagcatcttctcctcttacccgatcgactcccccagtccgggggagagccgggcccagtgggagagcagcagccagtgaggagaccagagcagccaagttgcgggtgagtgggagtggggagtttgtgggattgaccctgaaatttctccacccctctccaccaggcccacccacccccatcagatccgtcctggccccacagccttctaccagcaactctcaacgcctgccccggccgcagggagcagctgctaaatcttccagtcaactgcccattccctcggccatccccaggcctgccagccgaatgccactcaccagccggagtgtgccacctggcagaggtgccctacctccggattctctgtcaactcgaaaagggcttccaagaccaagcactgcaggacacagagtgcgggaaagtggacacaaggttcctgtttcccagcgactaaatcttcctgtcatgggtgccactcgcagcaatctgcagccccccaggaaagtggcagtcccaggacctaccaggtaaagagatcaggacagcaagcaagacttcagtagcaaaccactacagtcagtacctggactcgcctctacccagcagaccctgactccagcagattctggcccagggacaggaggaagagatgccaccagggctggtctcccaggagtagagaccatgggaaatggggtggattaggattgagctggagaagacttaaactctctgggttgaaagaagattaggggaaaagaggtcaccttccagcagtgaaatgaacaaatagaagatgagaagtacaggcaagtggtttgtctttatccacccccactgttgtggtcagccccagagaattttatcttcttccttggcattggttcactggacatttccacgtgagcggcctccgtagctaacctccctgccctctgaggagccatcttcctgaatcgcattctctactggactctggcctgcttggagaggtggcagcaggcacctggtcttcagaaattgtttcctgtgaattctgtgactcctaataggccagtttgtgataagcttactctatgagtcttcatttttctaaaataaagtgaatgtatttttatattctctgtatatctggaagtcgatcctgctcctatttctttctctttttttagacagaatcttgctctgtcaccca

SEQ ID NO: 2627 - protein, 363 aa, Homo sapiens; identical to SEQ ID NO: 65

SEQ ID NO: 2628 - DNA, 1823 bp, Homo sapiens
gggcctgagagattcgaaaggagccccgccccctcggagctgattcccgggactaggttgcgggagaaagcctgttgcgtggaagataaggcggcgcgggaagtggacacagggtgggctggagatctaactggactctcgctcctgctggctggacatggaggatttggaggaagatgtaaggtttattgtggatgagaccttggactttggggggctgtcaccatctgacagccgtgaggaggaagacataacagtgttggtgactccagagaaaccacttcgacggggcctctcccaccgaagtgacccaaatgcagtggcacctgccccccagggtgtgaggctcagcctaggccccctcagtccagagaagctggaggagatcctcgatgaggccaaccggctggccgctcagctggagcagtgtgccctgcaggatcgggagagcgcaggcgagggcctggggcctcgccgagtgaagcccagtcctcggcgggagacctttgtgctgaaggatagtcctgtccgagacctgctgcccactgtgaactctttgacgcggagcaccccctccccaagcagcctgacgcctcgactccggagtaatgataggaaggggtcagtcagggctctccgggctacatctggaaagaggccctccaacatgaagagggagtcacccacttgcaatctgttccctgcatccaaaagcccagcatcttctcctcttacccgatcgactcccccagtccgggggagagccgggcccagtgggagagcagcagccagcccacccacccccatcagatccgtcctggccccacagccttctaccagcaactctcaacgcctgccccggccgcagggagcagctgctaaatcttccagtcaactgcccattccctcggccatccccaggcctgccagccgaatgccactcaccagccggagtgtgccacctggcagaggtgccctacctccggattctctgtcaactcgaaaagggcttccaagaccaagcactgcaggacacagagtgcgggaaagtggacacaaggttcctgtttcccagcgactaaatcttcctgtcatgggtgccactcgcagcaatctgcagccccccaggaaagtggcagtcccaggacctaccaggtaaagagatcaggacagcaagcaagacttcagtagcaaaccactacagtcagtacctggactcgcctctacccagcagaccctgactccagcagattctggcccagggacaggaggaagagatgccaccagggctggtctcccaggagtagagaccatgggaaatggggtggattaggattgagctggagaagacttaaactctctgggttgaaagaagattaggggaaaagaggtcaccttccagcagtgaaatgaacaaatagaagatgagaagtacaggcaagtggtttgtctttatccacccccactgttgtggtcagccccagagaattttatcttcttccttggcattggttcactggacatttccacgtgagcggcctccgtagctaacctccctgccctctgaggagccatcttcctgaatcgcattctctactggactctggcctgcttggagaggtggcagcaggcacctggtcttcagaaattgtttcctgtgaattctgtgactcctaataggccagtttgtgataagcttactctatgagtcttcatttttctaaaataaagtgaatgtatttttatattctctgtatatctggaagtcgatcctgctcctatttctttctctttttttagacagaatcttgctctgtcaccca

SEQ ID NO: 2629 - protein, 333 aa, Homo sapiens; identical to SEQ ID NO: 67

SEQ ID NO: 2630 - DNA, 454 bp, Homo sapiens
agacctttgtgctgaaggatagtcctgtccgagacctgctgcccactgtgaacttctctgggttgaaagaagattaggggaaaagaggtcaccttccagcagtgaaatgaacaaatagaagatgagaagtacaggcaagtggtttgtctttatccacccccactgttgtggtcagccccagagaattttatcttcttccttggcattggttcactggacatttccacgtgagcggcctccgtagctaacctccctgccctctgaggagccatcttcctgaatcgcattctctactggactctggcctgcttggagaggtggcagcaggcacctggtcttcagaaattgtttcctgtgaattctgtgactcctaataggccagtttgtgataagcttactctatgagtcttcatttttctaaaataaagtgaatgtatttttatattctctgtat

SEQ ID NO: 2631 - protein, 40 aa, Homo sapiens; identical to SEQ ID NO: 2617

SEQ ID NO: 2632 - DNA, 2212 bp, Homo sapiens
ggtttctctccggctcagatctaactggactctcgctcctgctggctggacatggaggatttggaggaaggtaaggaaaggagggagggaagaatgaaagggaggagtgagacccagcgatggagagctgcatcagggacccatgactggctttcattcttctttccccttcagatgtaaggtttattgtggatgagaccttggactttggggggctgtcaccatctgacaggtaccagcctctttatcccacttattttcctctaacagtacctctttgtctcgaatcccttactgctgaattattggcttgggttggtaacttagcaaggtttggcgcacttggggctgctgggcggctggctgactcgggcctctatgacactattggtagcggggagagaagggagaagctggagttagatttcagggtgttaagaagaaggataagtggatttgctgcatctccatcctggcatcatttctgatgtccgtaaatgctaaaggcctattaggccccatagaaccaggtatctcatcgcccagaggccacatctcacagccagcatgggcatcggggcctagggtcatgtccctggctctgttgtggggcttttatgcagtctcccttgcataatctcctgttcccttttgcatgggcatgatgcctggtttgtttcctgtctcagccgtgaggaggaagacataacagtgttggtgactccagagaaaccacttcgacggggcctctcccaccgaagtgacccaaatgcagtggcacctgccccccagggtgtgaggctcagcctaggccccctcagtccagagaagctggaggagatcctcgatgaggccaaccggctggccgctcagctggagcagtgtgccctgcaggatcgggagagcgcaggcgagggcctggggcctcgccgagtgaagcccagtcctcggcgggagacctttgtgctgaaggatagtcctgtccgagacctgctgcccactgtgaactctttgacgcggagcaccccctccccaagcagcctgacgcctcgactccggagtaatgataggaaggggtcagtcagggctctccgggctacatctggaaagaggccctccaacatgaagagggagtcacccacttgcaatctgttccctgcatccaaaagcccagcatcttctcctcttacccgatcgactcccccagtccgggggagagccgggcccagtgggagagcagcagccagcccacccacccccatcagatccgtcctggccccacagccttctaccagcaactctcaacgcctgccccggccgcagggagcagctgctaaatcttccagtcaactgcccattccctcggccatccccaggcctgccagccgaatgccactcaccagccggagtgtgccacctggcagaggtgccctacctccggattctctgtcaactcgaaaagggcttccaagaccaagcactgcaggacacagagtgcgggaaagtggacacaaggttcctgtttcccagcgactaaatcttcctgtcatgggtgccactcgcagcaatctgcagccccccaggaaagtggcagtcccaggacctaccaggtaaagagatcaggacagcaagcaagacttcagtagcaaaccactacagtcagtacctggactcgcctctacccagcagaccctgactccagcagattctggcccagggacaggaggaagagatgccaccagggctggtctcccaggagtagagaccatgggaaatggggtggattaggattgagctggagaagacttaaactctctgggttgaaagaagattaggggaaaagaggtcaccttccagcagtgaaatgaacaaatagaagatgagaagtacaggcaagtggtttgtctttatccacccccactgttgtggtcagccccagagaattttatcttcttccttggcattggttcactggacatttccacgtgagcggcctccgtagctaacctccctgccctctgaggagccatcttcctgaatcgcattctctactggactctggcctgcttggagaggtggcagcaggcacctggtcttcagaaattgtttcctgtgaattctgtgactcctaataggccagtttgtgataagcttactctatgagtcttcatttttctaaaataaagtgaatgtatttttatattctctgtat

SEQ ID NO: 2633 - protein, 163 aa, Homo sapiens
MKRESPTCNLFPASKSPASSPLTRSTPPVRGRAGPSGRAAASPPTPIRSVLAPQPSTSNSQRLPRPQGAAAKSSSQLPIPSAIPRPASRMPLTSRSVPPGRGALPPDSLSTRKGLPRPSTAGHRVRESGHKVPVSQRLNLPVMGATRSNLQPPRKVAVPGPTR

SEQ ID NO: 2634 - DNA, 1733 bp, Homo sapiens
gcgggagaaagcctgttgcgtggaagataaggcggcgcgggaagtggacacagggtgggctggaggtgtgcttcgcgtgtgatgccaggggagtggaaagatctaactggactctcgctcctgctggctggacatggaggatttggaggaagatgtaaggtttattgtggatgagaccttggactttggggggctgtcaccatctgacagccgtgaggaggaagacataacagtgttggtgactccagagaaaccacttcgacggggcctctcccaccgaagtgacccaaatgcagtggcacctgccccccagggtgtgaggctcagcctaggccccctcagtccagagaagctggaggagatcctcgatgaggccaaccggctggccgctcagctggagcagtgtgccctgcaggatcgggagagcgcaggcgagggcctggggcctcgccgagtgaagcccagtcctcggcgggagacctttgtgctgaaggatagtcctgtccgagacctgctgcccactgtgaactctttgacgcggagcaccccctccccaagcagcctgacgcctcgactccggagtaatgataggaaggggtcagtcagggctctccgggctacatctggaaagaggccctccaacatgaagagggagtcacccacttgcaatctgttccctgcatccaaaagcccagcatcttctcctcttacccgatcgactcccccagtccgggggagagccgggcccagtgggagagcagcagccagcccacccacccccatcagatccgtcctggccccacagccttctaccagcaactctcaacgcctgccccggccgcagggagcagctgctaaatcttccagtcaactgcccattccctcggccatccccaggcctgccagccgaatgccactcaccagccggagtgtgccacctggcagaggtgccctacctccggattctctgtcaactcgaaaagggcttccaagaccaagcactgcaggacacagagtgcgggaaagtggacacaaggttcctgtttcccagcgactaaatcttcctgtcatgggtgccactcgcagcaatctgcagccccccaggaaagtggcagtcccaggacctaccaggtaaagagatcaggacagcaagcaagacttcagtagcaaaccactacagtcagtacctggactcgcctctacccagcagaccctgactccagcagattctggcccagggacaggaggaagagatgccaccagggctggtctcccaggagtagagaccatgggaaatggggtggattaggattgagctggagaagacttaaactctctgggttgaaagaagattaggggaaaagaggtcaccttccagcagtgaaatgaacaaatagaagatgagaagtacaggcaagtggtttgtctttatccacccccactgttgtggtcagccccagagaattttatcttcttccttggcattggttcactggacatttccacgtgagcggcctccgtagctaacctccctgccctctgaggagccatcttcctgaatcgcattctctactggactctggcctgcttggagaggtggcagcaggcacctggtcttcagaaattgtttcctgtgaattctgtgactcctaataggccagtttgtgataagcttactctatgagtcttcatttttctaaaataaagtgaatgtatttttatattctctgtat

SEQ ID NO: 2635 - protein, 333 aa, Homo sapiens; identical to SEQ ID NO: 67

SEQ ID NO: 2636 - DNA, 1756 bp, Homo sapiens
gcgggagaaagcctgttgcgtggaagataaggcggcgcgggaagtggacacagggtgggctggagctgcgagccttgggcagaatggatacctgaggaaaggtatggtttctctccggctcagatctaactggactctcgctcctgctggctggacatggaggatttggaggaagatgtaaggtttattgtggatgagaccttggactttggggggctgtcaccatctgacagccgtgaggaggaagacataacagtgttggtgactccagagaaaccacttcgacggggcctctcccaccgaagtgacccaaatgcagtggcacctgccccccagggtgtgaggctcagcctaggccccctcagtccagagaagctggaggagatcctcgatgaggccaaccggctggccgctcagctggagcagtgtgccctgcaggatcgggagagcgcaggcgagggcctggggcctcgccgagtgaagcccagtcctcggcgggagacctttgtgctgaaggatagtcctgtccgagacctgctgcccactgtgaactctttgacgcggagcaccccctccccaagcagcctgacgcctcgactccggagtaatgataggaaggggtcagtcagggctctccgggctacatctggaaagaggccctccaacatgaagagggagtcacccacttgcaatctgttccctgcatccaaaagcccagcatcttctcctcttacccgatcgactcccccagtccgggggagagccgggcccagtgggagagcagcagccagcccacccacccccatcagatccgtcctggccccacagccttctaccagcaactctcaacgcctgccccggccgcagggagcagctgctaaatcttccagtcaactgcccattccctcggccatccccaggcctgccagccgaatgccactcaccagccggagtgtgccacctggcagaggtgccctacctccggattctctgtcaactcgaaaagggcttccaagaccaagcactgcaggacacagagtgcgggaaagtggacacaaggttcctgtttcccagcgactaaatcttcctgtcatgggtgccactcgcagcaatctgcagccccccaggaaagtggcagtcccaggacctaccaggtaaagagatcaggacagcaagcaagacttcagtagcaaaccactacagtcagtacctggactcgcctctacccagcagaccctgactccagcagattctggcccagggacaggaggaagagatgccaccagggctggtctcccaggagtagagaccatgggaaatggggtggattaggattgagctggagaagacttaaactctctgggttgaaagaagattaggggaaaagaggtcaccttccagcagtgaaatgaacaaatagaagatgagaagtacaggcaagtggtttgtctttatccacccccactgttgtggtcagccccagagaattttatcttcttccttggcattggttcactggacatttccacgtgagcggcctccgtagctaacctccctgccctctgaggagccatcttcctgaatcgcattctctactggactctggcctgcttggagaggtggcagcaggcacctggtcttcagaaattgtttcctgtgaattctgtgactcctaataggccagtttgtgataagcttactctatgagtcttcatttttctaaaataaagtgaatgtatttttatattctctgtat

SEQ ID NO: 2637 - protein, 333 aa, Homo sapiens; identical to SEQ ID NO: 67

SEQ ID NO: 2638 - DNA, 1619 bp, Homo sapiens
agctgattcccgggactaggttgcgggagaaagcctgttgcgtggaagataaggcggcgcgggaagtggacacagggtgggctggagatctaactggactctcgctcctgctggctggacatggaggatttggaggaagatgtaaggtttattgtggatgagaccttggactttggggggctgtcaccatctgacagccgtgaggaggaagacataacagtgttggtgactccagagaaaccacttcgacggggcctctcccaccgaagtgacccaaatgcagtggcacctgccccccagggtgtgaggctcagcctaggccccctcagtccagagaagctggaggagatcctcgatgaggccaaccggctggccgctcagctggagcagtgtgccctgcaggatcgggagagcgcaggcgagggcctggggcctcgccgagtgaagcccagtcctcggcgggagacctttgtgctgaaggatagtcctgtccgagacctgctgcccactgtgaactctttgacgcggagcaccccctccccaagcagcctgacgcctcgactccggagtaatgataggaaggggtcagtcagggctctccgggctacatctggaaagaggccctccaacatgaagagggagtcacccacttgcaatctgttccctgcatccaaaagcccagcatcttctcctcttacccgatcgactcccccagtccgggggagagccgggcccagtgggagagcagcagccagtgaggagaccagagcagccaagttgcgggcctgccagccgaatgccactcaccagccggagtgtgccacctggcagaggtgccctacctccggattctctgtcaactcgaaaagggcttccaagaccaagcactgcaggacacagagtgcgggaaagtggacacaaggttcctgtttcccagcgactaaatcttcctgtcatgggtgccactcgcagcaatctgcagccccccaggaaagtggcagtcccaggacctaccaggtaaagagatcaggacagcaagcaagacttcagtagcaaaccactacagtcagtacctggactcgcctctacccagcagaccctgactccagcagattctggcccagggacaggaggaagagatgccaccagggctggtctcccaggagtagagaccatgggaaatggggtggattaggattgagctggagaagacttaaactctctgggttgaaagaagattaggggaaaagaggtcaccttccagcagtgaaatgaacaaatagaagatgagaagtacaggcaagtggtttgtctttatccacccccactgttgtggtcagccccagagaattttatcttcttccttggcattggttcactggacatttccacgtgagcggcctccgtagctaacctccctgccctctgaggagccatcttcctgaatcgcattctctactggactctggcctgcttggagaggtggcagcaggcacctggtcttcagaaattgtttcctgtgaattctgtgactcctaataggccagtttgtgataagcttactctatgagtcttcatttttctaaaataaagtgaatgtatttttatattctctgtat

SEQ ID NO: 2639 - protein, 310 aa, Homo sapiens; identical to SEQ ID NO: 63

SEQ ID NO: 2640 - DNA, 1757 bp, Homo sapiens
gggcctgagagattcgaaaggagccccgccccctcggagctgattcccgggactaggttgcgggagaaagcctgttgcgtggaagataaggcggcgcgggaagtggacacagggtgggctggagatctaactggactctcgctcctgctggctggacatggaggatttggaggaagatgtaaggtttattgtggatgagaccttggactttggggggctgtcaccatctgacagccgtgaggaggaagacataacagtgttggtgactccagagaaaccacttcgacggggcctctcccaccgaagtgacccaaatgcagtggcacctgccccccagggtgtgaggctcagcctaggccccctcagtccagagaagctggaggagatcctcgatgaggccaaccggctggccgctcagctggagcagtgtgccctgcaggatcgggagagcgcaggcgagggcctggggcctcgccgagtgaagcccagtcctcggcgggagacctttgtgctgaaggatagtcctgtccgagacctgctgcccactgtgaactctttgacgcggagcaccccctccccaagcagcctgacgcctcgactccggagtaatgataggaaggggtcagtcagggctctccgggctacatctggaaagaggccctccaacatgaagagggagtcacccacttgcaatctgttccctgcatccaaaagcccagcatcttctcctcttacccgatcgactcccccagtccgggggagagccgggcccagtgggagagcagcagccagcccacccacccccatcagatccgtcctggccccacagccttctaccagcaactctcaacgcctgccccggccgcagggagcagctgctaaatcttccagtcaactgcccattccctcggccatccccaggcctgccagccgaatgccactcaccagccggagtgtgccacctggcagaggtgccctacctccggattctctgtcaactcgaaaagggcttccaagaccaagcactgcaggacacagagtgcgggaaagtggacacaaggttcctgtttcccagcgactaaatcttcctgtcatgggtgccactcgcagcaatctgcagccccccaggaaagtggcagtcccaggacctaccaggtaaagagatcaggacagcaagcaagacttcagtagcaaaccactacagtcagtacctggactcgcctctacccagcagaccctgactccagcagattctggcccagggacaggaggaagagatgccaccagggctggtctcccaggagtagagaccatgggaaatggggtggattaggattgagctggagaagacttaaactctctgggttgaaagaagattaggggaaaagaggtcaccttccagcagtgaaatgaacaaatagaagatgagaagtacaggcaagtggtttgtctttatccacccccactgttgtggtcagccccagagaattttatcttcttccttggcattggttcactggacatttccacgtgagcggcctccgtagctaacctccctgccctctgaggagccatcttcctgaatcgcattctctactggactctggcctgcttggagaggtggcagcaggcacctggtcttcagaaattgtttcctgtgaattctgtgactcctaataggccagtttgtgataagcttactctatgagtcttcatttttctaaaataaagtgaatgtatttttatattctctgtat

SEQ ID NO: 2641 - protein, 333 aa, Homo sapiens; identical to SEQ ID NO: 67

SEQ ID NO: 2642 - DNA, 1847 bp, Homo sapiens
gggcctgagagattcgaaaggagccccgccccctcggagctgattcccgggactaggttgcgggagaaagcctgttgcgtggaagataaggcggcgcgggaagtggacacagggtgggctggagatctaactggactctcgctcctgctggctggacatggaggatttggaggaagatgtaaggtttattgtggatgagaccttggactttggggggctgtcaccatctgacagccgtgaggaggaagacataacagtgttggtgactccagagaaaccacttcgacggggcctctcccaccgaagtgacccaaatgcagtggcacctgccccccagggtgtgaggctcagcctaggccccctcagtccagagaagctggaggagatcctcgatgaggccaaccggctggccgctcagctggagcagtgtgccctgcaggatcgggagagcgcaggcgagggcctggggcctcgccgagtgaagcccagtcctcggcgggagacctttgtgctgaaggatagtcctgtccgagacctgctgcccactgtgaactctttgacgcggagcaccccctccccaagcagcctgacgcctcgactccggagtaatgataggaaggggtcagtcagggctctccgggctacatctggaaagaggccctccaacatgaagagggagtcacccacttgcaatctgttccctgcatccaaaagcccagcatcttctcctcttacccgatcgactcccccagtccgggggagagccgggcccagtgggagagcagcagccagtgaggagaccagagcagccaagttgcgggtgagtgggagtggggagtttgtgggattgaccctgaaatttctccacccctctccaccaggcccacccacccccatcagatccgtcctggccccacagccttctaccagcaactctcaacgcctgccccggccgcagggagcagctgctaaatcttccagtcaactgcccattccctcggccatccccaggcctgccagccgaatgccactcaccagccggagtgtgccacctggcagaggtgccctacctccggattctctgtcaactcgaaaagggcttccaagaccaagcactgcaggacacagagtgcgggaaagtggacacaaggttcctgtttcccagcgactaaatcttcctgtcatgggtgccactcgcagcaatctgcagccccccaggaaagtggcagtcccaggacctaccaggtaaagagatcaggacagcaagcaagacttcagtagcaaaccactacagtcagtacctggactcgcctctacccagcagaccctgactccagcagattctggcccagggacaggaggaagagatgccaccagggctggtctcccaggagtagagaccatgggaaatggggtggattaggattgagctggagaagacttaaactctctgggttgaaagaagattaggggaaaagaggtcaccttccagcagtgaaatgaacaaatagaagatgagaagtacaggcaagtggtttgtctttatccacccccactgttgtggtcagccccagagaattttatcttcttccttggcattggttcactggacatttccacgtgagcggcctccgtagctaacctccctgccctctgaggagccatcttcctgaatcgcattctctactggactctggcctgcttggagaggtggcagcaggcacctggtcttcagaaattgtttcctgtgaattctgtgactcctaataggccagtttgtgataagcttactctatgagtcttcatttttctaaaataaagtgaatgtatttttatattctctgtat

SEQ ID NO: 2643 - protein, 363 aa, Homo sapiens; identical to SEQ ID NO: 65

SEQ ID NO: 2644 - DNA, 348 bp, Homo sapiens
ctaactggactctcgctcctgctggctggacatggaggatttggaggaagatgtaaggtttatttggtcagccccagagaattttatcttcttccttggcattggttcactggacatttccacgtgagcggcctccgtagctaacctccctgccctctgaggagccatcttcctgaatcgcattctctactggactctggcctgcttggagaggtggcagcaggcacctggtcttcagaaattgtttcctgtgaattctgtgactcctaataggccagtttgtgataagcttactctatgagtcttcatttttctaaaataaagtgaatgtatttttatattctctgt

SEQ ID NO: 2645 - protein, 31 aa, Homo sapiens; identical to SEQ ID NO: 2619

SEQ ID NO: 2646 - DNA, 1741 bp, Homo sapiens
aagataaggcggcgcgggaagtggacacagggtgggctggagcatgacccccgaccctggcttgcaccctgaatctagctgcgagccttgggcagaatggatacctgaggaaaggtatggtttctctccggctcagatctaactggactctcgctcctgctggctggacatggaggatttggaggaagatgtaaggtttattgtggatgagaccttggactttggggggctgtcaccatctgacagccgtgaggaggaagacataacagtgttggtgactccagagaaaccacttcgacggggcctctcccaccgaagtgacccaaatgcagtggcacctgccccccagggtgtgaggctcagcctaggccccctcagtccagagaagctggaggagatcctcgatgaggccaaccggctggccgctcagctggagcagtgtgccctgcaggatcgggagagcgcaggcgagggcctggggcctcgccgagtgaagcccagtcctcggcgggagacctttgtgctgaaggatagtcctgtccgagacctgctgcccactgtgaactctttgacgcggagcaccccctccccaagcagcctgacgcctcgactccggagtaatgataggaaggggtcagtcagggctctccgggctacatctggaaagaggccctccaacatgaagagggtgagttgagagagttgagttggaggtgtgccccagacatggtgtgtgccatgatgcagggagtggtttccttattggtaaaacagggatagcatttctacatctagaattgttggaattaaatgagaaccatgaaaaaagagaaccaaaactcttaccacagtgtctgagtatatgtctatgataaactcaataaatggtattggcaatagtgatggtgatggtgatgtggtgatgttagcagctaacttctacccttccttactgggatgtagacaactctccacctctatttcttaattccttaagccacagaacagatattttttccactctagtcttttttctctctctctttgtgtttcaggagtcacccacttgcaatctgttccctgcatccaaaagcccagcatcttctcctcttacccgatcgactcccccagtccgggggagagccgggcccagtgggagagcagcagccagtgaggagaccagagcagccaagttgcgggtgagtgggagtggggagtttgtgggattgaccctgaaatttctccacccctctccaccaggcccacccacccccatcagatccgtcctggccccacagccttctaccagcaactctcaacgcctgccccggccgcagggagcagctgctaaatcttccagtcaactgcccattccctcggccatccccaggcctgccagccgaatgccactcaccagccggagtgtgccacctggcagaggtgccctacctccggattctctgtcaactcgaaaagggcttccaagaccaagcactgcaggacacagagtgcgggaaagtggacacaagggtaagaggtcaggaggaagaatgcccgcccttgcccagcgtgtcctcaccctcccagagctgtcaacagtgaccacttttgccatccttattgcaattcaattggaagatggggagactgagttacagagaggatatggggctggacagagtctgagtcttagttttcaaatacctcatggtcagggggagagtactaatcccacactcgc

SEQ ID NO: 2647 - protein, 175 aa, Homo sapiens
MEDLEEDVRFIVDETLDFGGLSPSDSREEEDITVLVTPEKPLRRGLSHRSDPNAVAPAPQGVRLSLGPLSPEKLEEILDEANRLAAQLEQCALQDRESAGEGLGPRRVKPSPRRETFVLKDSPVRDLLPTVNSLTRSTPSPSSLTPRLRSNDRKGSVRALRATSGKRPSNMKRVS

SEQ ID NO: 2648 - DNA, 1791 bp, Homo sapiens
attcccgggactaggttgcgggagaaagcctgttgcgtggaagataaggcggcgcgggaagtggacacagggtgggctggagatctaactggactctcgctcctgctggctggacatggaggatttggaggaaggtaaggaaaggagggagggaagaatgaaagggaggagtgagacccagcgatggagagctgcatcagggacccatgactggctttcattcttctttccccttcagatgtaaggtttattgtggatgagaccttggactttggggggctgtcaccatctgacagccgtgaggaggaagacataacagtgttggtgactccagagaaaccacttcgacggggcctctcccaccgaagtgacccaaatgcagtggcacctgccccccagggtgtgaggctcagcctaggccccctcagtccagagaagctggaggagatcctcgatgaggccaaccggctggccgctcagctggagcagtgtgccctgcaggatcgggagagcgcaggcgagggcctggggcctcgccgagtgaagcccagtcctcggcgggagacctttgtgctgaaggatagtcctgtccgagacctgctgcccactgtgaactctttgacgcggagcaccccctccccaagcagcctgacgcctcgactccggagtaatgataggaaggggtcagtcagggctctccgggctacatctggaaagaggccctccaacatgaagagggtgagttgagagagttgagttggaggtgtgccccagacatggtgtgtgccatgatgcagggagtggtttccttattggtaaaacagggatagcatttctacatctagaattgttggaattaaatgagaaccatgaaaaaagagaaccaaaactcttaccacagtgtctgagtatatgtctatgataaactcaataaatggtattggcaatagtgatggtgatggtgatgtggtgatgttagcagctaacttctacccttccttactgggatgtagacaactctccacctctatttcttaattccttaagccacagaacagatattttttccactctagtcttttttctctctctctttgtgtttcaggagtcacccacttgcaatctgttccctgcatccaaaagcccagcatcttctcctcttacccgatcgactcccccagtccgggggagagccgggcccagtgggagagcagcagccagtgaggagaccagagcagccaagttgcgggtgagtgggagtggggagtttgtgggattgaccctgaaatttctccacccctctccaccaggcccacccacccccatcagatccgtcctggccccacagccttctaccagcaactctcaacgcctgccccggccgcagggagcagctgctaaatcttccagtcaactgcccattccctcggccatccccaggcctgccagccgaatgccactcaccagccggagtgtgccacctggcagaggtgccctacctccggattctctgtcaactcgaaaagggcttccaagaccaagcactgcaggacacagagtgcgggaaagtggacacaagggtaagaggtcaggaggaagaatgcccgcccttgcccagcgtgtcctcaccctcccagagctgtcaacagtgaccacttttgccatccttattgcaattcaattggaagatggggagactgagttacagagaggatatggggctggacagagtctgagtcttagttttcaaatacctcatggtcagggggagagtactaatcccacactcgc

SEQ ID NO: 2649 - protein, 111 aa, Homo sapiens
MPLTSRSVPPGRGALPPDSLSTRKGLPRPSTAGHRVRESGHKGKRSGGRMPALAQRVLTLPELSTVTTFAILIAIQLEDGETELQRGYGAGQSLSLSFQIPHGQGESTNPT

SEQ ID NO: 2650 - DNA, 1745 bp, Homo sapiens
attcccgggactaggttgcgggagaaagcctgttgcgtggaagataaggcggcgcgggaagtggacacagggtgggctggagctgcgagccttgggcagaatggatacctgaggaaaggtatggtttctctccggctcagatctaactggactctcgctcctgctggctggacatggaggatttggaggaagatgtaaggtttattgtggatgagaccttggactttggggggctgtcaccatctgacagccgtgaggaggaagacataacagtgttggtgactccagagaaaccacttcgacggggcctctcccaccgaagtgacccaaatgcagtggcacctgccccccagggtgtgaggctcagcctaggccccctcagtccagagaagctggaggagatcctcgatgaggccaaccggctggccgctcagctggagcagtgtgccctgcaggatcgggagagcgcaggcgagggcctggggcctcgccgagtgaagcccagtcctcggcgggagacctttgtgctgaaggatagtcctgtccgagacctgctgcccactgtgaactctttgacgcggagcaccccctccccaagcagcctgacgcctcgactccggagtaatgataggaaggggtcagtcagggctctccgggctacatctggaaagaggccctccaacatgaagagggtgagttgagagagttgagttggaggtgtgccccagacatggtgtgtgccatgatgcagggagtggtttccttattggtaaaacagggatagcatttctacatctagaattgttggaattaaatgagaaccatgaaaaaagagaaccaaaactcttaccacagtgtctgagtatatgtctatgataaactcaataaatggtattggcaatagtgatggtgatggtgatgtggtgatgttagcagctaacttctacccttccttactgggatgtagacaactctccacctctatttcttaattccttaagccacagaacagatattttttccactctagtcttttttctctctctctttgtgtttcaggagtcacccacttgcaatctgttccctgcatccaaaagcccagcatcttctcctcttacccgatcgactcccccagtccgggggagagccgggcccagtgggagagcagcagccagtgaggagaccagagcagccaagttgcgggtgagtgggagtggggagtttgtgggattgaccctgaaatttctccacccctctccaccaggcccacccacccccatcagatccgtcctggccccacagccttctaccagcaactctcaacgcctgccccggccgcagggagcagctgctaaatcttccagtcaactgcccattccctcggccatccccaggcctgccagccgaatgccactcaccagccggagtgtgccacctggcagaggtgccctacctccggattctctgtcaactcgaaaagggcttccaagaccaagcactgcaggacacagagtgcgggaaagtggacacaagggtaagaggtcaggaggaagaatgcccgcccttgcccagcgtgtcctcaccctcccagagctgtcaacagtgaccacttttgccatccttattgcaattcaattggaagatggggagactgagttacagagaggatatggggctggacagagtctgagtcttagttttcaaatacctcatggtcagggggagagtactaatcccacactcgc

SEQ ID NO: 2651 - protein, 175 aa, Homo sapiens; identical to SEQ ID NO: 2647

SEQ ID NO: 2652 - DNA, 2018 bp, Homo sapiens
attcccgggactaggttgcgggagaaagcctgttgcgtggaagataaggcggcgcgggaagtggacacagggtgggctggaggtgtgcttcgcgtgtgatgccaggggagtggaaaggtggcttggggagtgcagaaccctgaggatagtggcggggaggaagatggggcgtgcaggccgcccccagtgaggagaggccaggatgcagggcggctccagggcaatctgggcagttgggggagccctccgtatcgttcccggaggtagcaggagtagctgtgcgggaggtgccactcctgggcgcttgctttgcctccagcatgacccccgaccctggcttgcaccctgaatctagctgcgagccttgggcagaatggatacctgaggaaaggtatggtttctctccggctcagatctaactggactctcgctcctgctggctggacatggaggatttggaggaagatgtaaggtttattgtggatgagaccttggactttggggggctgtcaccatctgacagccgtgaggaggaagacataacagtgttggtgactccagagaaaccacttcgacggggcctctcccaccgaagtgacccaaatgcagtggcacctgccccccagggtgtgaggctcagcctaggccccctcagtccagagaagctggaggagatcctcgatgaggccaaccggctggccgctcagctggagcagtgtgccctgcaggatcgggagagcgcaggcgagggcctggggcctcgccgagtgaagcccagtcctcggcgggagacctttgtgctgaaggatagtcctgtccgagacctgctgcccactgtgaactctttgacgcggagcaccccctccccaagcagcctgacgcctcgactccggagtaatgataggaaggggtcagtcagggctctccgggctacatctggaaagaggccctccaacatgaagagggtgagttgagagagttgagttggaggtgtgccccagacatggtgtgtgccatgatgcagggagtggtttccttattggtaaaacagggatagcatttctacatctagaattgttggaattaaatgagaaccatgaaaaaagagaaccaaaactcttaccacagtgtctgagtatatgtctatgataaactcaataaatggtattggcaatagtgatggtgatggtgatgtggtgatgttagcagctaacttctacccttccttactgggatgtagacaactctccacctctatttcttaattccttaagccacagaacagatattttttccactctagtcttttttctctctctctttgtgtttcaggagtcacccacttgcaatctgttccctgcatccaaaagcccagcatcttctcctcttacccgatcgactcccccagtccgggggagagccgggcccagtgggagagcagcagccagtgaggagaccagagcagccaagttgcgggtgagtgggagtggggagtttgtgggattgaccctgaaatttctccacccctctccaccaggcccacccacccccatcagatccgtcctggccccacagccttctaccagcaactctcaacgcctgccccggccgcagggagcagctgctaaatcttccagtcaactgcccattccctcggccatccccaggcctgccagccgaatgccactcaccagccggagtgtgccacctggcagaggtgccctacctccggattctctgtcaactcgaaaagggcttccaagaccaagcactgcaggacacagagtgcgggaaagtggacacaagggtaagaggtcaggaggaagaatgcccgcccttgcccagcgtgtcctcaccctcccagagctgtcaacagtgaccacttttgccatccttattgcaattcaattggaagatggggagactgagttacagagaggatatggggctggacagagtctgagtcttagttttcaaatacctcatggtcagggggagagtactaatcccacactcgc

SEQ ID NO: 2653 - protein, 175 aa, Homo sapiens; identical to SEQ ID NO: 2647

SEQ ID NO: 2654 - DNA, 1723 bp, Homo sapiens
gattcccgggactaggttgcgggagaaagcctgttgcgtggaagataaggcggcgcgggaagtggacacagggtgggctggaggtgtgcttcgcgtgtgatgccaggggagtggaaagatctaactggactctcgctcctgctggctggacatggaggatttggaggaagatgtaaggtttattgtggatgagaccttggactttggggggctgtcaccatctgacagccgtgaggaggaagacataacagtgttggtgactccagagaaaccacttcgacggggcctctcccaccgaagtgacccaaatgcagtggcacctgccccccagggtgtgaggctcagcctaggccccctcagtccagagaagctggaggagatcctcgatgaggccaaccggctggccgctcagctggagcagtgtgccctgcaggatcgggagagcgcaggcgagggcctggggcctcgccgagtgaagcccagtcctcggcgggagacctttgtgctgaaggatagtcctgtccgagacctgctgcccactgtgaactctttgacgcggagcaccccctccccaagcagcctgacgcctcgactccggagtaatgataggaaggggtcagtcagggctctccgggctacatctggaaagaggccctccaacatgaagagggtgagttgagagagttgagttggaggtgtgccccagacatggtgtgtgccatgatgcagggagtggtttccttattggtaaaacagggatagcatttctacatctagaattgttggaattaaatgagaaccatgaaaaaagagaaccaaaactcttaccacagtgtctgagtatatgtctatgataaactcaataaatggtattggcaatagtgatggtgatggtgatgtggtgatgttagcagctaacttctacccttccttactgggatgtagacaactctccacctctatttcttaattccttaagccacagaacagatattttttccactctagtcttttttctctctctctttgtgtttcaggagtcacccacttgcaatctgttccctgcatccaaaagcccagcatcttctcctcttacccgatcgactcccccagtccgggggagagccgggcccagtgggagagcagcagccagtgaggagaccagagcagccaagttgcgggtgagtgggagtggggagtttgtgggattgaccctgaaatttctccacccctctccaccaggcccacccacccccatcagatccgtcctggccccacagccttctaccagcaactctcaacgcctgccccggccgcagggagcagctgctaaatcttccagtcaactgcccattccctcggccatccccaggcctgccagccgaatgccactcaccagccggagtgtgccacctggcagaggtgccctacctccggattctctgtcaactcgaaaagggcttccaagaccaagcactgcaggacacagagtgcgggaaagtggacacaagggtaagaggtcaggaggaagaatgcccgcccttgcccagcgtgtcctcaccctcccagagctgtcaacagtgaccacttttgccatccttattgcaattcaattggaagatggggagactgagttacagagaggatatggggctggacagagtctgagtcttagttttcaaatacctcatggtcagggggagagtactaatcccacactcgc

SEQ ID NO: 2655 - protein, 175 aa, Homo sapiens; identical to SEQ ID NO: 2647

SEQ ID NO: 2656 - DNA, 1688 bp, Homo sapiens
gattcccgggactaggttgcgggagaaagcctgttgcgtggaagataaggcggcgcgggaagtggacacagggtgggctggagatctaactggactctcgctcctgctggctggacatggaggatttggaggaagatgtaaggtttattgtggatgagaccttggactttggggggctgtcaccatctgacagccgtgaggaggaagacataacagtgttggtgactccagagaaaccacttcgacggggcctctcccaccgaagtgacccaaatgcagtggcacctgccccccagggtgtgaggctcagcctaggccccctcagtccagagaagctggaggagatcctcgatgaggccaaccggctggccgctcagctggagcagtgtgccctgcaggatcgggagagcgcaggcgagggcctggggcctcgccgagtgaagcccagtcctcggcgggagacctttgtgctgaaggatagtcctgtccgagacctgctgcccactgtgaactctttgacgcggagcaccccctccccaagcagcctgacgcctcgactccggagtaatgataggaaggggtcagtcagggctctccgggctacatctggaaagaggccctccaacatgaagagggtgagttgagagagttgagttggaggtgtgccccagacatggtgtgtgccatgatgcagggagtggtttccttattggtaaaacagggatagcatttctacatctagaattgttggaattaaatgagaaccatgaaaaaagagaaccaaaactcttaccacagtgtctgagtatatgtctatgataaactcaataaatggtattggcaatagtgatggtgatggtgatgtggtgatgttagcagctaacttctacccttccttactgggatgtagacaactctccacctctatttcttaattccttaagccacagaacagatattttttccactctagtcttttttctctctctctttgtgtttcaggagtcacccacttgcaatctgttccctgcatccaaaagcccagcatcttctcctcttacccgatcgactcccccagtccgggggagagccgggcccagtgggagagcagcagccagtgaggagaccagagcagccaagttgcgggtgagtgggagtggggagtttgtgggattgaccctgaaatttctccacccctctccaccaggcccacccacccccatcagatccgtcctggccccacagccttctaccagcaactctcaacgcctgccccggccgcagggagcagctgctaaatcttccagtcaactgcccattccctcggccatccccaggcctgccagccgaatgccactcaccagccggagtgtgccacctggcagaggtgccctacctccggattctctgtcaactcgaaaagggcttccaagaccaagcactgcaggacacagagtgcgggaaagtggacacaagggtaagaggtcaggaggaagaatgcccgcccttgcccagcgtgtcctcaccctcccagagctgtcaacagtgaccacttttgccatccttattgcaattcaattggaagatggggagactgagttacagagaggatatggggctggacagagtctgagtcttagttttcaaatacctcatggtcagggggagagtactaatcccacactcgc

SEQ ID NO: 2657 - protein, 175 aa, Homo sapiens; identical to SEQ ID NO: 2647

SEQ ID NO: 2658 - DNA, 1020 bp, Homo sapiens
gcgggagaaagcctgttgcgtggaagataaggcggcgcgggaagtggacacagggtgggctggaggtgtgcttcgcgtgtgatgccaggggagtggaaagatctaactggactctcgctcctgctggctggacatggaggatttggaggaagatgtaaggtttattgtggatgagaccttggactttggggggctgtcaccatctgacagccgtgaggaggaagacataacagtgttggtgactccagagaaaccacttcgacggggcctctcccaccgaagtgacccaaatgcagtggcacctgccccccagggtgtgaggctcagcctaggccccctcagtccagagaagctggaggagatcctcgatgaggccaaccggctggccgctcagctggagcagtgtgccctgcaggatcgggagagcgcaggcgagggcctggggcctcgccgagtgaagcccagtcctcggcgggagacctttgtgctgaaggatagtcctgtccgagacctgctgcccactgtgaactctttgacgcggagcaccccctccccaagcagcctgacgcctcgactccggagtaatgataggaaggggtcagtcagggctctccgggctacatctggaaagaggccctccaacatgaagagggagtcacccacttgcaatctgttccctgcatccaaaagcccagcatcttctcctcttacccgatcgactcccccagtccgggggagagccgggcccagtgggagagcagcagccagtgaggagaccagagcagccaagttgcggccttctaccagcaactctcaacgcctgccccggccgcagggagcagctgctaaatcttccagtcaactgcccattccctcggccatccccaggcctgccagccgaatgccactcaccagccggagtgtgccacctggcagaggtgccctacctccggattctctgtcaactcgaaaagggcttccaagaccaagcactgcaggacacagagtgcgggaaagtgg

SEQ ID NO: 2659 - protein, 294 aa, Homo sapiens
MEDLEEDVRFIVDETLDFGGLSPSDSREEEDITVLVTPEKPLRRGLSHRSDPNAVAPAPQGVRLSLGPLSPEKLEEILDEANRLAAQLEQCALQDRESAGEGLGPRRVKPSPRRETFVLKDSPVRDLLPTVNSLTRSTPSPSSLTPRLRSNDRKGSVRALRATSGKRPSNMKRESPTCNLFPASKSPASSPLTRSTPPVRGRAGPSGRAAASEETRAAKLRPSTSNSQRLPRPQGAAAKSSSQLPIPSAIPRPASRMPLTSRSVPPGRGALPPDSLSTRKGLPRPSTAGHRVRE

SEQ ID NO: 2660 - DNA, 897 bp, Homo sapiens
agctgattcccgggactaggttgcgggagaaagcctgttgcgtggaagataaggcggcgcgggaagtggacacagggtgggctggagatctaactggactctcgctcctgctggctggacatggaggatttggaggaagatgtaaggtttattgtggatgagaccttggactttggggggctgtcaccatctgacagccgtgaggaggaagacataacagtgttggtgactccagagaaaccacttcgacggggcctctcccaccgaagtgacccaaatgcagtggcacctgccccccagggtgtgaggctcagcctaggccccctcagtccagagaagctggaggagatcctcgatgaggccaaccggctggccgctcagctggagcagtgtgccctgcaggatcgggagagcgcaggcgagggcctggggcctcgccgagtgaagcccagtcctcggcgggagacctttgtgctgaaggatagtcctgtccgagacctgctgcccactgtgaactctttgacgcggagcaccccctccccaagcagcctgacgcctcgactccggagtaatgataggaaggggtcagtcagggctctccgggctacatctggaaagaggccctccaacatgaagagggagtcacccacttgcaatctgttccctgcatccaaaagcccagcatcttctcctcttacccgatcgactcccccagtccgggggagagccgggcccagtgggagagcagcagccagtgaggagaccagagcagccaagttgcggccttctaccagcaactctcaacgcctgccccggccgcagggagcagctgctaaatcttccagtcaactgcccattccctcggccatccccaggcctgccagccgaatgccactc

SEQ ID NO: 2661 - protein, 258 aa, Homo sapiens
MEDLEEDVRFIVDETLDFGGLSPSDSREEEDITVLVTPEKPLRRGLSHRSDPNAVAPAPQGVRLSLGPLSPEKLEEILDEANRLAAQLEQCALQDRESAGEGLGPRRVKPSPRRETFVLKDSPVRDLLPTVNSLTRSTPSPSSLTPRLRSNDRKGSVRALRATSGKRPSNMKRESPTCNLFPASKSPASSPLTRSTPPVRGRAGPSGRAAASEETRAAKLRPSTSNSQRLPRPQGAAAKSSSQLPIPSAIPRPASRMP

SEQ ID NO: 2662 - DNA, 769 bp, Homo sapiens
gattcccgggactaggttgcgggagaaagcctgttgcgtggaagataaggcggcgcgggaagtggacacagggtgggctggagatctaactggactctcgctcctgctggctggacatggaggatttggaggaagatgtaaggtttattgtggatgagaccttggactttggggggctgtcaccatctgacagccgtgaggaggaagacataacagtgttggtgactccagagaaaccacttcgacggggcctctcccaccgaagtgacccaaatgcagtggcacctgccccccagggtgtgaggctcagcctaggccccctcagtccagagaagctggaggagatcctcgatgaggccaaccggctggccgctcagctggagcagtgtgccctgcaggatcgggagagcgcaggcgagggcctggggcctcgccgagtgaagcccagtccccccctccccaagcagcctgacgcctcgactccggagtaatgataggaaggggtcagtcagggctctccgggctacatctggaaagaggccctccaacatgaagagggtgagttgagagagttgagttggaggtgtgccccagacatggtgtgtgccatgatgcagggagtggtttccttattggtaaaacagggatagcatttctacatctagaattgttggaattaaatgagaaccatgaaaaaagagaaccaaaactcttaccacagtgtctgagtatatgtctatgataaactcaataaatggtattggcaata

SEQ ID NO: 2663 - protein, 124 aa, Homo sapiens
MEDLEEDVRFIVDETLDFGGLSPSDSREEEDITVLVTPEKPLRRGLSHRSDPNAVAPAPQGVRLSLGPLSPEKLEEILDEANRLAAQLEQCALQDRESAGEGLGPRRVKPSPPLPKQPDASTPE

SEQ ID NO: 2664 - DNA, 615 bp, Homo sapiens
agcctgttgcgtggaagataaggcggcgcgggaagtggacacagggtgggctggaggtgtgcttcgcgtgtgatgccaggggagtggaaaggtggcttggggagtgcagaaccctgaggatagtggcggggaggaagatggggcgtgcaggccgcccccagtgaggagaggccaggatgcagggcggctccagggcaatctgggcagttgggggagccctccgtatcgttcccggaggtagcaggagtagctgtgcgggaggtgccactcctgggcgcttgctttgcctccagcatgacccccgaccctggcttgcaccctgaatctagctgcgagccttgggcagaatggatacctgaggaaaggtatggtttctctccggctcagatctaactggactctcgctcctgctggctggacatggaggatttggaggaaggtaaggaaaggagggagggaagaatgaaagggaggagtgagacccagcgatggagagctgcatcagggacccatgactggctttcattcttctttccccttcagatgtaaggtttattgtggatgagaccttggactttggggggctgtcaccatctgacagccgtgaggaggaag

SEQ ID NO: 2665 - protein, 48 aa, Homo sapiens
MQGGSRAIWAVGGALRIVPGGSRSSCAGGATPGRLLCLQHDPRPWLAP

SEQ ID NO: 2666 - DNA, 1022 bp, Homo sapiens
ccagcatggaggcagccacagctccggaggtggccgcaggatccaagctgaaggtgaaagaagccagcccagcggatgctgaaccaccccaggcttcacctggacagggggctggcagccccactccccagctcctgccccctatagaagcccaagatcatctggctgaagaacaagatggatatccaaggcaaccctaagtacagagccctgactcacctgggaatctgctccctagagatccgcaagccgggtccctttgatggaggcatctatacctgcaaggcggtgaaccccctaggggaggcatctgtggactgtcgggtggatgtgaaagttcctaattgaggacacctaagaaggcatggtactctgacaaaggtgtgtggtcccaagcagcacattattggcaaaagacagctcagctcatcatttagaaccggacagctcttttagattttccgtcattcacattagctatgttgtgaacaaagtgatgcataaggcgaaaaagaagcttgagacagaactaaagagaacaagttcccagtgtcctctctgacttgtagctgctggctgatggaaattggaaatgaatttgatcccataagacatttatttaaggctctcactggtatgtagcaaatgaaagcctaaaggggtgcgttacaagtacagacttctcaggaaagcgctctccgacagtcggcttgcagagacaactctccctccctcacctccctctctgtgttaatgatacttgtgttcgtgttagttgcccctttccctctctcacagccagtgcccagcaatgaagtgaattcatggcacaggagccagggaccgtgacaacggtgccctcagcagcctggtgtcctctggccatttgctgtcatggctacaaagtgctccctcttttcagtgcctccaggaagcccgccagtggtgagactgtgtcctcaaggagcttcggcaccatgtctggtttggattcatctaaataaatatgtggttccccagtg

SEQ ID NO: 2667 - protein, 64 aa, Homo sapiens
MEAATAPEVAAGSKLKVKEASPADAEPPQASPGQGAGSPTPQLLPPIEAQDHLAEEQDGYPRQP

SEQ ID NO: 2668 - DNA, 1372 bp, Homo sapiens
accagcagtgaaaatctagagctggagctcagcctctgggaaggcccagcatggaggcagccacagctccggaggtggccgcaggatccaagctgaaggtgaaagaagccagcccagcggatgctgaaccaccccaggcttcacctggacagggggctggcagccccactccccagctcctgccccctatagaagagcaccccaagatctggctacctcgggccctgaggcagacctacatccggaaggttggggacacagtgaacctactaatcccattccagggcaagcccaaacctcaagccatctggacacatgatggctgtgccttggacaccaggcgtgtgagtgtgcggaatggggagcaagactccatcctcttcatccgagaagcccaacgtgctgactcaggtcgctaccaactccgcgtgcagctgggtgggctggaggccaccgccaccattgacatcctggtgattgagaggccaggccctcctcagagtattaagctggtggacgtttggggcttcagcgctacactggaatggacaccgccccaagatacggggaatacagcacttctgggatacacggtgcagaaggctgacacaaaatccgggctgtggttcacggtgctggagcactatcaccgcaccagctgcatcgtctctgacctcatcatcggcaactcctatgccttccgtgtctttgctgaaaaccagtgcggactcagtgaaacagcccccatcactacggacctcgcccacatccagaaagcagctactgtttacaagaccaaggggtttgcccaacgagacttctctgaagccccaaagtttacccagcctctggccgactgcactacagtcaccggctataatacccagctcttctgctgtgtccgcgcctctccccggcccaagatcatctggctgaagaacaagatggatatccaaggcaaccctaagtacagagccctgactcacctgggaatctgctccctagagatccgcaagccgggtccctttgatggaggcatctatacctgcaaggcggtgaaccccctaggggaggcatctgtggactgtcgggtggatgtgaaagttcctaattgaggacacctaagaaggcatggtactctgacaaagccagtgcccagcaatgaagtgaattcatggcacaggagccagggaccgtgacaacggtgccctcagcagcctggtgtcctctggccatttgctgtcatggctacaaagtgctccctcttttcagtgcctccaggaagcccgccagtggtgagactgtgtcctcaaggagcttcggcaccatgtctggtttggattcatctaaataaatatgtggttccccagtg

SEQ ID NO: 2669 - protein, 354 aa, Homo sapiens
MEAATAPEVAAGSKLKVKEASPADAEPPQASPGQGAGSPTPQLLPPIEEHPKIWLPRALRQTYIRKVGDTVNLLIPFQGKPKPQAIWTHDGCALDTRRVSVRNGEQDSILFIREAQRADSGRYQLRVQLGGLEATATIDILVIERPGPPQSIKLVDVWGFSATLEWTPPQDTGNTALLGYTVQKADTKSGLWFTVLEHYHRTSCIVSDLIIGNSYAFRVFAENQCGLSETAPITTDLAHIQKAATVYKTKGFAQRDFSEAPKFTQPLADCTTVTGYNTQLFCCVRASPRPKIIWLKNKMDIQGNPKYRALTHLGICSLEIRKPGPFDGGIYTCKAVNPLGEASVDCRVDVKVPN

SEQ ID NO: 2670 - DNA, 612 bp, Homo sapiens
ctcagagtattaagctggtggacgtttggggcttcagcgctacactggaatggacaccgccccaagatacggggaatacagcacttctgggatacacggtgcagaaggctgacacaaaatccgggctgtggttcacggtgctggagcactatcaccgcaccagctgcatcgtctctgacctcatcatcggcaactcctatgccttccgtgtctttgctgaaaaccagtgcggactcagtgaaacagcccccatcactacggacctcgcccacatccagaaagcaggtaagggaggcatggggatcatgagctgggaagacttaaggataggccgggcacagtggctcacgcctctaattccagcactttgggaggccaaggcaggcggatcacctgaggtcaggagttcaagaccagcctggacaacatggtgaaacctcatctctactaaaaatacaaaaattagccaggcatggtggtgcacgcctgtactcccagctactcaggaggctaaggcaggagaattgcttgaacttgggagttggaggttgcagtgagctgagatcgtgccactgcactccagcctgggcaatagagtgagactccacctca

SEQ ID NO: 2671 - protein, 45 aa, Homo sapiens
MGIMSWEDLRIGRAQWLTPLIPALWEAKAGGSPEVRSSRPAWTTW

SEQ ID NO: 2672 - DNA, 7040 bp, Homo sapiens
ggcgggggtgggcgggcgcgccgggcggcaggtgtcggcgtcggcggcattcggcggcgatggagcggccctggggagctgcggacggcctctcgcgctggccccatggcctcggcctcctcctcctcctgcagctgctgccgccgtcgaccctcagccaggaccggctggacgcgccgccgccgcccgctgcgccgctgccgcgctggtctggccccatcggggtgagctgggggctgcgggcggccgcagccgggggcgcgtttccccgcggcggccgttggcgtcgcagcgcgccgggcgaggacgaggagtgcggccgggtccgggacttcgtcgccaagctggccaacaacacgcaccagcatgtgtttgatgatctcagaggctcagtatccttgtcctgggttggagatagcactggggtcattctagtcttgactaccttccatgtaccactggtaattatgacttttggacagtccaagctatatcgaagtgaggattatgggaagaactttaaggatattacagatctcatcaataacacctttattcggactgaatttggcatggctattggtcctgagaactctggaaaggtggtgttaacagcagaggtgtctggaggaagtcgtggaggaagaatctttagatcatcagattttgcgaagaattttgtgcaaacagatctcccttttcatcctctcactcagatgatgtatagccctcagaattctgattatcttttagctctcagcactgaaaatggcctgtgggtgtccaagaattttgggggaaaatgggaagaaatccacaaagcagtatgtttggccaaatggggatcagacaacaccatcttctttacaacctatgcaaatggctcctgcaaagctgaccttggggctctggaattatggagaacttcagacttgggaaaaagcttcaaaactattggtgtgaaaatctactcatttggtcttgggggacgtttcctttttgcctctgtgatggctgataaggatacaacaagaaggatccacgtttcaacagatcaaggggacacatggagcatggcccagctcccctccgtgggacaggaacagttctattctattctggcagcaaatgatgacatggtattcatgcatgtagatgaacctggagacactgggtttggcacaatctttacctcagatgatcgaggcattgtctattccaagtctttggaccgacatctctacactaccacaggcggagagacggactttaccaacgtgacctccctccgcggcgtctacataacaagcgtgctctccgaagataattctatccagaccatgatcacttttgaccaaggaggaaggtggacgcacctgaggaagcctgaaaacagtgaatgtgatgctacagcaaaaaacaagaatgagtgcagccttcatattcatgcttcctacagcatctcccagaaactgaatgttccaatggccccactctcagagccgaatgccgtaggcattgtcattgctcatggtagcgtgggggatgccatctcagtgatggttccagatgtgtacatctcagatgatgggggttactcctggacaaagatgctggaaggaccccactattacaccatcctggattctggaggcatcattgtggccattgagcacagcagccgtcctatcaatgtgattaagttctccacagacgaaggtcaatgctggcaaacctacacgttcaccagggaccccatctatttcactggcctagcttcagaacctggagctaggtccatgaatatcagcatttggggcttcacagaatctttcctgaccagccagtgggtctcctacaccattgattttaaagatatccttgaaaggaactgtgaagagaaggactataccatatggctggcacactccacagaccctgaagattatgaagatggctgcattttgggctacaaagaacagtttctgcggctacgcaagtcatccgtgtgtcagaatggtcgagactatgttgtgaccaagcagccctccatctgcctctgttccctggaggactttctctgtgattttggctactaccgtccagaaaatgactccaagtgtgtggaacagccagaactgaagggccacgacctggagttttgtctgtacggaagagaagaacacctaacaacaaatgggtaccggaaaattccaggggacaaatgccagggtggggtaaatccagttcgagaagtaaaagacttgaaaaagaaatgcacaagcaactttttgagtccggaaaaacagaattccaagtcaaattctgttccaattatcctggccatcgtgggattgatgctggtcacagtcgtagcaggagtgctcattgtgaagaaatatgtctgtgggggaaggttcctggtgcatcgatactctgtgctgcagcagcatgcagaggccaatggtgtggatggtgtggatgctttggacacagcctcccacactaataaaagtggttatcatgatgactcagatgaggacctcttggaatagctcttcagaggagctggacccagcatggatggtggaaccacagtacctcttacactccctgtggctccaacttcaggaaataaatttcccattgcgagggacccagctctgtttctgctgcttccatcaaagccaaaaggacctacactaaagaaatgcagggtgggggtggggaaccctgagcacttttttacaattggctctgagaaaaagggagacattttaaattctttaacttcttatttctcgtcctgtctctttgcaaagtatgggcttttttgtttttgttttttaagggaaacgaaatggaattcgaagggaccttttcactaaccccacttctgtgtgttctgcatggcgcctgccccagggcatctgccaactccagtatcagctctcacagtgtacttggtaccatccctgggctctgctggcgagacgaaacagctgtagagatgaaaacaggctgcagaggctggcacagcctggccggcttttctccatctggggacagtcctactccaagaacactgcacaccagctcctcacacagatcccacttactctttttttttttttcagagaccacagaccacagtgatttttcttttcccttgtttaattaggcaatacccttgttaattgccctttggcaactaacttaaccatgtgcttcccacacagtacatcaggaaaacttacagggcaatatttttaacttggggcaggaagaagggagcagcagagaattgactagatatagcacctattaaaagagaactcttgcttcttctgagatttttcaagctgtgctttgtgtgtgtgccagtagacttacgcaaggacagggtacaaacttagctggaagtctgcccaggctgaatgatctcttccctagagttgattgtcgggtacacagtgtgaacccccgaagacggaacctcacagtcttccatgttcccttcttaactgtcgtgtggctcgttgctaaatcatgacaatggctgcctatctgctgcttcttaggttgctgttgtacatggaaccaggactagagattttttcagatttatagacttaaaaaattagaattttattaccaggctttccttctcaccccttttttctgactttgccaagtaatttgttgacacgaaaattttggaggaaccaattgaaaacacacttccagtctagatgatgctttgtgtgatacattaagttcttattttggattaaaagaagttttccatttgatacctctctaaattaaataaattatagaatgtagttgggtggattttggggtggccatatagtaatggaaagctgcaataattagttttaatacagcttgaatatttgctatatagaaatatagtatggaaagtttttggtcttaatgtagctactgtgcgggtcacagtttctcccaatgattatgactgggacattctttggtagataccatttgctactagtttattttgtggctagaaagtcagttttgtgtgtttttttttttttttatttgaagtgccaaattaactttagtcagaatgtgagcagatggctaagttctctcctccccagaatggattaacagctgcgtggaaagtgggggagagagtggatggagacttttagagatgttaaaactgcagtagaatgaaatgagtcagggagcttcagttagaaaataaagttgaggcagtttttgtgaagataatatggttagggctggagtgcactagtctttttgcttattcattttgcatggttttaaaattaaaaataattccgaagatacaccagctcacaaatgaaaacgtcagcctctgccccaccctccctcctgcccaaagtgaatttggtactcagaaaagaactgtttataccactcacctttctcccagcatgtactcactgtgggcagatgcaccaatacatggtaatcctcttactcattttaagacgtaggaaactcaatattcttctctaaccatatacgatagggctcttcgcttttaatgatatctgggatttctgtggaacttggcaaattttcagagcaccttcactcacataatgtcatttgaacctcacaatgttcttgggatggagtcagttgttcagggtccccgtgtgtgtgataagcagtgctggctggctgtcttcagaactcttggaaatctttacacatgcgagtgctaaccactttgagcaaggctgccttcttgtagatgacttgctgttctttatgacagggatcagtggcatttgtttcctagcagtatttagcacctttttgccaccttggtgaacagaaaattgtattttcctgtctttcatggctgaaaacaaaagtaatgggaattttaaatacgtttgcagaaactgcccctcccctcattgagggtcactgctcaagagtgcaggagtggactctccactgatgggtctccctccccatcctggtttccaccccgggctggctagctctgttggtttgaagactgacagccagcctggctcattctcattattggctagttagctttctttatcaacctgctcactcacaaatgtgtgccctcagccagagagtaagaaagcccaaatctgttacagcttctaaaaaaatagatttctaatttgtcctactcatgttaggagcattatctttgaaggtaaaacatagtgtatcattgtgtaaactcccaggcttgatgtagcagaagagatcatttctggaggcttcagcaatggaatttagcattataagagagattggacaaaccagtccaaagtggtccgagttcttaaatccaggtagggaactcactcttctttcttctctggacctaattgggcattgggctttagtgagaccacagaccaggcccgtctctcctgtaggcttttaattcaatggcaactctatttcaaagaataaaagcctttggagagttgcggcagttctgggggcgggctcaggagagtccatagatcagccgtaactggaacgtagaatctacgtctgcctctgaatggacttcccacctcctctctcttgctctgatgcttgcctctgggcctctccatgcccaaggtggtctttcatccttgacaggctggtaatgtgctggccacctccagctcctgcatcgagtctgtaaaccagagctggttctcatggccttcgtcacgataccaggatacggaggggagcccagggccatccatacccaccccagggtaacggggctggcctggcattagtcattatttagtttccaggccaaccatccagatagagattccctctttcctttgagcagtgctctcaagagctccgtgcctgtccacaatgacctagagtgcatcctgctcattgtcagtgtagcccctcgcccctatattcatccaggatacttggaagtgctaaaataggaagggattcggctttcaactttgctaccatcttccctgaagcaggaaaatgaacatggacttaaatgttctttgaaaaaaccaaagttttaagatttgctgtgtgatgaagtgacagggagggccggagtcagcaggtgccagactttctgttctgtctgccatgggtttgtccagctcaggtagctctaggagcaccatcctgccctagcagagcccaggccttgccctcatgaagcatcattgaaatagcaggagcatgttgatttcttggttaggttgcattataataacaagagtcagaacattaattcgaaacaacttgcagtatgcatttcttcacaccagtacattcttaagtgtacttgtttataaggaataacataaactaatctgtacctttatatatatgtgtgtgtacatatatacatatataaactgtatagtgtacatggtaatgatttattgctatgccccagatccttaatgtagttctcatcctccgcatgccctcagccacaagcgggtgactgactgttccctgatgatttggcccacctcctgtgtttggacctctagggaggagggttttggtcatactctccttatcctcgtgcacagaaatgctcagggtccccatgtgcctgttgttcagccctctctcttgttccctttctgagcatgtggtccttccccaggctgtgggacagctgccttcccacgaaagtgtaaagcagtattaagatcattactgcatgtgccctaaaaacccaagttttctattcccttaggacagaaaattgcatgtgaggtgggataatcgagtttcagtgacccacgtcagttacacattaaagccagaccccatgataaaattccacaaaatggaaataaaactcaaatttctttagcattgtgtaaataaatctgaatgtgtttaactttgtactggtaattttctgtatatttggaatatttgggttaaaaataaaacagactggactttgttacctgacctactgaaatgactaa

SEQ ID NO: 2673 - protein, 831 aa, Homo sapiens; identical to SEQ ID NO: 73

SEQ ID NO: 2674 - DNA, 6954 bp, Homo sapiens
ggcgggggtgggcgggcgcgccgggcggcaggtgtcggcgtcggcggcattcggcggcgatggagcggccctggggagctgcggacggcctctcgcgctggccccatggcctcggcctcctcctcctcctgcagctgctgccgccgtcgaccctcagccaggaccggctggacgcgccgccgccgcccgctgcgccgctgccgcgctggtctggccccatcggggtgagctgggggctgcgggcggccgcagccgggggcgcgtttccccgcggcggccgttggcgtcgcagcgcgccgggcgaggacgaggagtgcggccgggtccgggacttcgtcgccaagctggccaacaacacgcaccagcatgtgtttgatgatctcagaggctcagtatccttgtcctgggttggagatagcactggggtcattctagtcttgactaccttccatgtaccactggtaattatgacttttggacagtccaagctatatcgaagtgaggattatgggaagaactttaaggatattacagatctcatcaataacacctttattcggactgaatttggcatggctattggtcctgagaactctggaaaggtggtgttaacagcagaggtgtctggaggaagtcgtggaggaagaatctttagatcatcagattttgcgaagaattttgtgcaaacagatctcccttttcatcctctcactcagatgatgtatagccctcagaattctgattatcttttagctctcagcactgaaaatggcctgtgggtgtccaagaattttgggggaaaatgggaagaaatccacaaagcagtatgtttggccaaatggggatcagacaacaccatcttctttacaacctatgcaaatggctcctgcaaagctgaccttggggctctggaattatggagaacttcagacttgggaaaaagcttcaaaactattggtgtgaaaatctactcatttggtcttgggggacgtttcctttttgcctctgtgatggctgataaggatacaacaagaaggatccacgtttcaacagatcaaggggacacatggagcatggcccagctcccctccgtgggacaggaacagttctattctattctggcagcaaatgatgacatggtattcatgcatgtagatgaacctggagacactgggtttggcacaatctttacctcagatgatcgaggcattgtctattccaagtctttggaccgacatctctacactaccacaggcggagagacggactttaccaacgtgacctccctccgcggcgtctacataacaagcgtgctctccgaagataattctatccagaccatgatcacttttgaccaaggaggaaggtggacgcacctgaggaagcctgaaaacagtgaatgtgatgctacagcaaaaaacaagaatgagtgcagccttcatattcatgcttcctacagcatctcccagaaactgaatgttccaatggccccactctcagagccgaatgccgtaggcattgtcattgctcatggtagcgtgggggatgccatctcagtgatggttccagatgtgtacatctcagatgatgggggttactcctggacaaagatgctggaaggaccccactattacaccatcctggattctggaggcatcattgtggccattgagcacagcagccgtcctatcaatgtgattaagttctccacagacgaaggtcaatgctggcaaacctacacgttcaccagggaccccatctatttcactggcctagcttcagaacctggagctaggtccatgaatatcagcatttggggcttcacagaatctttcctgaccagccagtgggtctcctacaccattgattttaaagatatccttgaaaggaactgtgaagagaaggactataccatatggctggcacactccacagaccctgaagattatgaagatggctgcattttgggctacaaagaacagtttctgcggctacgcaagtcatccgtgtgtcagaatggtcgagactatgttgtgaccaagcagccctccatctgcctctgttccctggaggactttctctgtgattttggctactaccgtccagaaaatgactccaagtgtgtggaacagccagaactgaagggccacgacctggagttttgtctgtacggaagagaagaacacctaacaacaaatgggtaccggaaaattccaggggacaaatgccagggtggggtaaatccagttcgagaagtaaaagacttgaaaaagaaatgcacaagcaactttttgagtccggaaaaacagaattccaagtcaaattctgttccaattatcctggccatcgtgggattgatgctggtcacagtcgtagcaggagtgctcattgtgaagaaatatgtctgtgggggaaggttcctggtgcatcgatactctgtgctgcagcagcatgcagaggccaatggtgtggatggtgtggatgctttggacacagcctcccacactaataaaagtggttatcatgatgactcagatgaggacctcttggaatagctcttcagaggagctggacccagcatggatggtggaaccacagtacctcttacactccctgtggctccaacttcaggaaataaatttcccattgcgagggacccagctctgtttctgctgcttccatcaaagccaaaaggacctacactaaagaaatgcagggtgggggtggggaaccctgagcacttttttacaattggctctgagaaaaagggagacattttaaattctttaacttcttatttctcgtcctgtctctttgcaaagtatgggcttttttgtttttgttttttaagggaaacgaaatggaattcgaagggaccttttcactaaccccacttctgtgtgttctgcatggcgcctgccccagggcatctgccaactccagtatcagctctcacagtgtacttggtaccatccctgggctctgctggcgagacgaaacagctgtagagatgaaaacaggctgcagaggctggcacagcctggccggcttttctccatctggggacagtcctactccaagaacactgcacaccagctcctcacacagatcccacttactctttttttttttttcagagaccacagaccacagtgatttttcttttcccttgtttaattaggcaatacccttgttaattgccctttggcaactaacttaaccatgtgcttcccacacagtacatcaggaaaacttacagggcaatatttttaacttggggcaggaagaagggagcagcagagaattgactagatatagcacctattaaaagagaactcttgcttcttctgagatttttcaagctgtgctttgtgtgtgtgccagtagacttacgcaaggacagggtacaaacttagctggaagtctgcccaggctgaatgatctcttccctagagttgattgtcgggtacacagtgtgaacccccgaagacggaacctcacagtcttccatgttcccttcttaactgtcgtgtggctcgttgctaaatcatgacaatggctgcctatctgctgcttcttaggttgctgttgtacatggaaccaggactagagattttttcagatttatagacttaaaaaattagaattttattaccaggctttccttctcaccccttttttctgactttgccaagtaatttgttgacacgaaaattttggaggaaccaattgaaaacacacttccagtctagatgatgctttgtgtgatacattaagttcttattttggattaaaagaagttttccatttgatacctctctaaattaaataaattatagaatgtagttgggtggattttggggtggccatatagtaatggaaagctgcaataattagttttaatacagcttgaatatttgctatatagaaatatagtatggaaagtttttggtcttaatgtagctactgtgcgggtcacagtttctcccaatgattatgactgggacattctttggtagataccatttgctactagtttattttgtggctagaaagtcagttttgtgtgtttttttttttttttatttgaagtgccaaattaactttagtcagaatgtgagcagatggctaagttctctcctccccagaatggattaacagctgcgtggaaagtgggggagagagtggatggagacttttagagatgttaaaactgcagtagaatgaaatgagtcagggagcttcagttagaaaataaagttgaggcagtttttgtgaagataatatggttagggctggagtgcactagtctttttgcttattcattttgcatggttttaaaattaaaaataattccgaagatacaccagctcacaaatgaaaacgtcagcctctgccccaccctccctcctgcccaaagtgaatttggtactcagaaaagaactgtttataccactcacctttctcccagcatgtactcactgtgggcagatgcaccaatacatggtaatcctcttactcattttaagacgtaggaaactcaatattcttctctaaccatatacgatagggctcttcgcttttaatgatatctgggatttctgtggaacttggcaaattttcagagcaccttcactcacataatgtcatttgaacctcacaatgttcttgggatggagtcagttgttcagggtccccgtgtgtgtgataagcagtgctggctggctgtcttcagaactcttggaaatctttacacatgcgagtgctaaccactttgagcaaggctgccttcttgtagatgacttgctgttctttatgacagggatcagtggcatttgtttcctagcagtatttagcacctttttgccaccttggtgaacagaaaattgtattttcctgtctttcatggctgaaaacaaaagtaatgggaattttaaatacgtttgcagaaactgcccctcccctcattgagggtcactgctcaagagtgcaggagtggactctccactgatgggtctccctccccatcctggtttccaccccgggctggctagctctgttggtttgaagactgacagccagcctggctcattctcattattggctagttagctttctttatcaacctgctcactcacaaatgtgtgccctcagccagagagtaagaaagcccaaatctgttacagcttctaaaaaaatagatttctaatttgtcctactcatgttaggagcattatctttgaaggtaaaacatagtgtatcattgtgtaaactcccaggcttgatgtagcagaagagatcatttctggaggcttcagcaatggaatttagcattataagagagattggacaaaccagtccaaagtggtccgagttcttaaatccaggtagggaactcactcttctttcttctctggacctaattgggcattgggctttagtgagaccacagaccaggcccgtctctcctgtaggcttttaattcaatggcaactctatttcaaagaataaaagcctttggagagttgcggcagttctgggggcgggctcaggagagtccatagatcagccgtaactggaacgtagaatctacgtctgcctctgaatggacttcccacctcctctctcttgctctgatgcttgcctctgggcctctccatgcccaaggtggtctttcatccttgacaggctggtaatgtgctggccacctccagctcctgcatcgagtctgtaaaccagagctggttctcatggccttcgtcacgataccaggatacggaggggagcccagggccatccatacccaccccagggtaacggggctggcctggcattagtcattatttagtttccaggccaaccatccagatagagattccctctttcctttgagcagtgctctcaagagctccgtgcctgtccacaatgacctagagtgcatcctgctcattgtcagtgtagcccctcgcccctatattcatccaggatacttggaagtgctaaaataggaagggattcggctttcaactttgctaccatcttccctgaagcaggaaaatgaacatggacttaaatgttctttgaaaaaaccaaagttttaagatttgctgtgtgatgaagtgacagggagggccggagtcagcaggtgccagactttctgttctgtctgccatgggtttgtccagctcaggtagctctaggagcaccatcctgccctagcagagcccaggccttgccctcatgaagcatcattgaaatagcaggagcatgttgatttcttggttaggttgcattataataacaagagtcagaacattaattcgaaacaacttgcagtatgcatttcttcacaccagtacattcttaagtgtacttgtttataaggaataacataaactaatctgtacctttatatatatgtgtgtgtacatatatacatatataaactgtatagtgtacatggtaatgatttattgctatgccccagatccttaatgtagttctcatcctccgcatgccctcagccacaagcgggtgactgactgttccctgatgatttggcccacctcctgtgtttggacctctagggaggagggttttggtcatactctccttatcctcgtgcacagaaatgctcagggtccccatgtgcctgttgttcagccctctctcttgttccctttctgagcatgtggtccttccccaggctgtgggacagctgccttcccacgaaagtgtaaagcagtattaagatcattactgcatgtgccctaaaaacccaagttttctattcccttaggacagaaaattgcatgtgaggtgggataatcgagtttcagtgacccacgtcagttacacattaaagccagaccccatgataaaattccacaaaatggaaataaaactcaaatttctttagcattgtgtaaataaatctgaatgtgtttaactttg

SEQ ID NO: 2675 - protein, 831 aa, Homo sapiens; identical to SEQ ID NO: 73

SEQ ID NO: 2676 - DNA, 2649 bp, Homo sapiens
ggcgggcgcgccgggcggcaggtgtcggcgtcggcggcattcggcggcgatggagcggccctggggagctgcggacggcctctcgcgctggccccatggcctcggcctcctcctcctcctgcagctgctgccgccgtcgaccctcagccaggaccggctggacgcgccgccgccgcccgctgcgccgctgccgcgctggtctggccccatcggggtgagctgggggctgcgggcggccgcagccgggggcgcgtttccccgcggcggccgttggcgtcgcagcgcgccgggcgaggacgaggagtgcggccgggtccgggacttcgtcgccaagctggccaacaacacgcaccagcatgtgtttgatgatctcagaggctcagtatccttgtcctgggttggagatagcactggggtcattctagtcttgactaccttccatgtaccactggtaattatgacttttggacagtccaagctatatcgaagtgaggattatgggaagaactttaaggatattacagatctcatcaataacacctttattcggactgaatttggcatggctattggtcctgagaactctggaaaggtggtgttaacagcagaggtgtctggaggaagtcgtggaggaagaatctttagatcatcagattttgcgaagaattttgtgcaaacagatctcccttttcatcctctcactcagatgatgtatagccctcagaattctgattatcttttagctctcagcactgaaaatggcctgtgggtgtccaagaattttgggggaaaatgggaagaaatccacaaagcagtatgtttggccaaatggggatcagacaacaccatcttctttacaacctatgcaaatggctcctgcaaagctgaccttggggctctggaattatggagaacttcagacttgggaaaaagcttcaaaactattggtgtgaaaatctactcatttggtcttgggggacgtttcctttttgcctctgtgatggctgataaggatacaacaagaaggatccacgtttcaacagatcaaggggacacatggagcatggcccagctcccctccgtgggacaggaacagttctattctattctggcagcaaatgatgacatggtattcatgcatgtagatgaacctggagacactgggtttggcacaatctttacctcagatgatcgaggcattgtctattccaagtctttggaccgacatctctacactaccacaggcggagagacggactttaccaacgtgacctccctccgcggcgtctacataacaagcgtgctctccgaagataattctatccagaccatgatcacttttgaccaaggaggaaggtggacgcacctgaggaagcctgaaaacagtgaatgtgatgctacagcaaaaaacaagaatgagtgcagccttcatattcatgcttcctacagcatctcccagaaactgaatgttccaatggccccactctcagagccgaatgccgtaggcattgtcattgctcatggtagcgtgggggatgccatctcagtgatggttccagatgtgtacatctcagatgatgggggttactcctggacaaagatgctggaaggaccccactattacaccatcctggattctggaggcatcattgtggccattgagcacagcagccgtcctatcaatgtgattaagttctccacagacgaaggtcaatgctggcaaacctacacgttcaccagggaccccatctatttcactggcctagcttcagaacctggagctaggtccatgaatatcagcatttggggcttcacagaatctttcctgaccagccagtgggtctcctacaccattgattttaaagatatccttgaaaggaactgtgaagagaaggactataccatatggctggcacactccacagaccctgaagattatgaagatggctgcattttgggctacaaagaacagtttctgcggctacgcaagtcatccgtgtgtcagaatggtcgagactatgttgtgaccaagcagccctccatctgcctctgttccctggaggactttctctgtgattttggctactaccgtccagaaaatgactccaagtgtgtggaacagccagaactgaagggccacgacctggagttttgtctgtacggaagagaagaacacctaacaacaaatgggtaccggaaaattccaggggacaaatgccagggtggggtaaatccagttcgagaagtaaaagacttgaaaaagaaatgcacaagcaactttttgagtccggaaaaacagaattccaagtcaaattctgttccaattatcctggccatcgtgggattgatgctggtcacagtcgtagcaggagtgctcattgtgaagaaatatgtctgtgggggaaggttcctggtgcatcgatactctgtgctgcagcagcatgcagaggccaatggtgtggatggtgtggatgctttggacacagcctcccacactaataaaagtggttatcatgatgactcagatgaggacctcttggaatagctcttcagaggagctggacccagcatggatggtggaaccacagtacctcttacactccctgtggctccaacttcaggaaataaatttcccattgcgagggaccc

SEQ ID NO: 2677 - protein, 831 aa, Homo sapiens; identical to SEQ ID NO: 73

SEQ ID NO: 2678 - DNA, 573 bp, Homo sapiens
gggcggcaggtgtcggcgtcggcggcattcggcggcgatggagcggccctggggagctgcggacggcctctcgcgctggccccatggcctcggcctcctcctcctcctgcagctgctgccgccgtcgaccctcagccaggaccggctggacgcgccgccgccgcccgctgcgccgctgccgcgctggtctggccccatcggggtgagctgggggctgcgggcggccgcagccgggggcgcgtttccccgcggcggccgttggcgtcgcagcgcgccgggcgaggacgaggagtgcggccgggtccgggacttcgtcgccaagctggccaacaacacgcaccagcatgtgtttgatgatctcagaggctcagtatccttgtcctgggttggagatagcactggggtcattctagtcttgactaccttccatgtaccactggtaattatgacttttggacagtccaagctatatcgaagtgaggattatgggaagaactttaaggatattacagatcatcagattttgcgaagaattttgtgcaaacagatctcccttttcatcctctcactcag

SEQ ID NO: 2679 - protein, 177 aa, Homo sapiens
MERPWGAADGLSRWPHGLGLLLLLQLLPPSTLSQDRLDAPPPPAAPLPRWSGPIGVSWGLRAAAAGGAFPRGGRWRRSAPGEDEECGRVRDFVAKLANNTHQHVFDDLRGSVSLSWVGDSTGVILVLTTFHVPLVIMTFGQSKLYRSEDYGKNFKDITDHQILRRILCKQISLFILS

SEQ ID NO: 2680 - DNA, 2238 bp, Homo sapiens
gccatttatcttaatatctcttattttttggttctagtctcgtccctttggagtagcattattatttggaggagttgatgagaaaggaccccagctgtttcatatggacccatctgggacctttgtacagtgtgatgctcgagcaattggctctgcttcagagggtgcccagagctccttgcaagaagtttaccacaagtctatgactttgaaagaagccatcaagtcttcactcatcatcctcaaacaagtaatggaggagaagctgaatgcaacaaacattgagctagccacagtgcagcctggccagaatttccacatgttcacaaaggaagaacttgaagaggttatcaaggacatttaaggaatcctgatcctcagaacttctctgggacaatttcagttctaataatgtccttaaattttatttccagctcctgttccttggaaaatctccattgtatgtgcattttttaaatgatgtctgtacataaaggcagttctgaaataaagaaaattttaaaatatttgttaatagactgttctcttctaatagtcttttttttttttttttttttaagagatgaggtctcactatattgcccaggctggtttcaaactcctgggttcaagtgatcttcccgcctctgcctcctgaagtgctaggattataggcgagagccactgtgcccagccattgtaatacagtcttttgtttgaaatgcaaatgttagtgggccaaaaggacagtgttattaatatccctattctatgaagatgtctgttctaaaactgttttagtgatgctctataacagaatcaactatatccattaatcccatggtgttgataaatgaactagtccagctcttcccagtggttaatagatgttaacagcactgtaaatccatttcggccctataatttctggagcaaacgtgtatttttgctgcttttcttataaggagatgctactaattgactatcagaagaacatgttttgaggtcctcctcaaaacattgatgggttggaatcagccatcaacagtgttgtaccagttcttgggtcttgatagacaatttggaaagagatttccttgtttacgaagtgaaggactaagaattaaattaatgaccttggcctcactggcaatcaattacaaatctctatatcagtaagagaattgtaaaattcagaagcagtttacattagactttggaatgaatgatgaactttccccattagagctgccatcatatgattggtggagattgtttaaagaatcattctatctcagcctcaaaaattaccacgggaagatggtatcagtatcactacttaacagatgaagaatctaatgctgtgtgcccatggacacacaaaattaagctgttgggacttgaacagctcaaattttcttgtttcagatcaccagctcttgagtaatagggaaatctggagatttgaaaagtacttgcactgtccacaacatggctaatccatatgtggatgatgcagaattgatttaattcactaacagggaccccataattatttgctgggctctgggtatattgatgtgtaggaagttgtactatatgttaataaattatgactatttggataggctgaattcatactaaatccatactgtagttcaacaaaaaacaacatgtttatatacatttggaaactgcaatgataggaaacatttggaagaaagggattttgccctagaataacacataaggaaagcagagaattagagtatattgttactgaatgttccagagacttctagtgattttaacacttattaagtatagcatgttgatggggagatttgtttctctaaagatcactttgttttattaaatcctaatagaaaatacccttgaaaatcctatctcatttattcctgtaacaaatttattgagcacctacctactatatgccaagaaatgtattagccatcaggcagagagctgttcaaatggtagatatgatctgtgctcctgtgaaacttctagtggggagagccaaacaataaacaatattcctttttaactctaggttaatgcagaaatggataaagcccatgttgcttttgggagaggtgagttgtgtctctgaatcacatgcatttcatagggggaaaaatgcccaaatactaaggagtagctcttagcctatgtccgttcgcctcagcttaagttgttttccctcccactggctgg

SEQ ID NO: 2681 - protein, 86 aa, Homo sapiens
MDPSGTFVQCDARAIGSASEGAQSSLQEVYHKSMTLKEAIKSSLIILKQVMEEKLNATNIELATVQPGQNFHMFTKEELEEVIKDI

SEQ ID NO: 2682 - DNA, 2650 bp, Homo sapiens
gttggtccttagtactgcggccgtgtgggtgagttggctgccggtgagttgggtgccggtggagtcgtgttggtcctcagaatccccgcgtagccgctgcctcctcctaccctcgccatgtttcttacccggtctgagtacgacagcttggttctacagccattgggatccagacatcagagggtgtgtgcctagctgtggagaagagaattacttccccactgatggagcccagcagcattgagaaaattgtagagattgatgctcacataggttgtgccatgagtgggctaattgctgatgctaagactttaattgataaagccagagtggagacacagaaccactggttcacctacaatgagacaatgacagtggagagtgtgacccaagctgtgtccaatctggctttgcagtttggagaagaagatgcagatccaggtgccatgtctcgtccctttggagtagcattattatttggaggagttgatgagaaaggaccccagctgtttcatatggacccatctgggacctttgtacagtgtgatgctcgagcaattggctctgcttcagagggtgcccagagctccttgcaagaagtttaccacaagtctatgactttgaaagaagccatcaagtcttcactcatcatcctcaaacaagtaatggaggagaagctgaatgcaacaaacattgagctagccacagtgcagcctggccagaatttccacatgttcacaaaggaagaacttgaagaggttatcaaggacatttaaggaatcctgatcctcagaacttctctgggacaatttcagttctaataatgtccttaaattttatttccagctcctgttccttggaaaatctccattgtatgtgcattttttaaatgatgtctgtacataaaggcagttctgaaataaagaaaattttaaaatatttgttaatagactgttctcttctaatagtcttttttttttttttttttttaagagatgaggtctcactatattgcccaggctggtttcaaactcctgggttcaagtgatcttcccgcctctgcctcctgaagtgctaggattataggcgagagccactgtgcccagccattgtaatacagtcttttgtttgaaatgcaaatgttagtgggccaaaaggacagtgttattaatatccctattctatgaagatgtctgttctaaaactgttttagtgatgctctataacagaatcaactatatccattaatcccatggtgttgataaatgaactagtccagctcttcccagtggttaatagatgttaacagcactgtaaatccatttcggccctataatttctggagcaaacgtgtatttttgctgcttttcttataaggagatgctactaattgactatcagaagaacatgttttgaggtcctcctcaaaacattgatgggttggaatcagccatcaacagtgttgtaccagttcttgggtcttgatagacaatttggaaagagatttccttgtttacgaagtgaaggactaagaattaaattaatgaccttggcctcactggcaatcaattacaaatctctatatcagtaagagaattgtaaaattcagaagcagtttacattagactttggaatgaatgatgaactttccccattagagctgccatcatatgattggtggagattgtttaaagaatcattctatctcagcctcaaaaattaccacgggaagatggtatcagtatcactacttaacagatgaagaatctaatgctgtgtgcccatggacacacaaaattaagctgttgggacttgaacagctcaaattttcttgtttcagatcaccagctcttgagtaatagggaaatctggagatttgaaaagtacttgcactgtccacaacatggctaatccatatgtggatgatgcagaattgatttaattcactaacagggaccccataattatttgctgggctctgggtatattgatgtgtaggaagttgtactatatgttaataaattatgactatttggataggctgaattcatactaaatccatactgtagttcaacaaaaaacaacatgtttatatacatttggaaactgcaatgataggaaacatttggaagaaagggattttgccctagaataacacataaggaaagcagagaattagagtatattgttactgaatgttccagagacttctagtgattttaacacttattaagtatagcatgttgatggggagatttgtttctctaaagatcactttgttttattaaatcctaatagaaaatacccttgaaaatcctatctcatttattcctgtaacaaatttattgagcacctacctactatatgccaagaaatgtattagccatcaggcagagagctgttcaaatggtagatatgatctgtgctcctgtgaaacttctagtggggagagccaaacaataaacaatattcctttttaactctaggttaatgcagaaatggataaagcccatgttgcttttgggagaggtgagttgtgtctctgaatcacatgcatttcatagggggaaaaatgcccaaatactaaggagtagctcttagcctatgtccgttcgcctcagcttaagttgttttccctcccactggctgg

SEQ ID NO: 2683 - protein, 183 aa, Homo sapiens
MEPSSIEKIVEIDAHIGCAMSGLIADAKTLIDKARVETQNHWFTYNETMTVESVTQAVSNLALQFGEEDADPGAMSRPFGVALLFGGVDEKGPQLFHMDPSGTFVQCDARAIGSASEGAQSSLQEVYHKSMTLKEAIKSSLIILKQVMEEKLNATNIELATVQPGQNFHMFTKEELEEVIKDI

SEQ ID NO: 2684 - DNA, 2730 bp, Homo sapiens
ggtcgcacgcgcagttggtccttagtactgcggccgtgtgggtgagttggctgccggtgagttgggtgccggtggagtcgtgttggtcctcagaatccccgcgtagccgctgcctcctcctaccctcgccatgtttcttacccggtctgagtacgacaggggcgtgaatactttttctcccgaaggaagattatttcaagtggaatatgccattgaggctatcaagcttggttctacagccattgggatccagacatcagagggtgtgtgcctagctgtggagaagagaattacttccccactgatggagcccagcagcattgagaaaattgtagagattgatgctcacataggttgtgccatgagtgggctaattgctgatgctaagactttaattgataaagccagagtggagacacagaaccactggttcacctacaatgagacaatgacagtggagagtgtgacccaagctgtgtccaatctggctttgcagtttggagaagaagatgcagatccaggtgccatgtctcgtccctttggagtagcattattatttggaggagttgatgagaaaggaccccagctgtttcatatggacccatctgggacctttgtacagtgtgatgctcgagcaattggctctgcttcagagggtgcccagagctccttgcaagaagtttaccacaagtctatgactttgaaagaagccatcaagtcttcactcatcatcctcaaacaagtaatggaggagaagctgaatgcaacaaacattgagctagccacagtgcagcctggccagaatttccacatgttcacaaaggaagaacttgaagaggttatcaaggacatttaaggaatcctgatcctcagaacttctctgggacaatttcagttctaataatgtccttaaattttatttccagctcctgttccttggaaaatctccattgtatgtgcattttttaaatgatgtctgtacataaaggcagttctgaaataaagaaaattttaaaatatttgttaatagactgttctcttctaatagtcttttttttttttttttttttaagagatgaggtctcactatattgcccaggctggtttcaaactcctgggttcaagtgatcttcccgcctctgcctcctgaagtgctaggattataggcgagagccactgtgcccagccattgtaatacagtcttttgtttgaaatgcaaatgttagtgggccaaaaggacagtgttattaatatccctattctatgaagatgtctgttctaaaactgttttagtgatgctctataacagaatcaactatatccattaatcccatggtgttgataaatgaactagtccagctcttcccagtggttaatagatgttaacagcactgtaaatccatttcggccctataatttctggagcaaacgtgtatttttgctgcttttcttataaggagatgctactaattgactatcagaagaacatgttttgaggtcctcctcaaaacattgatgggttggaatcagccatcaacagtgttgtaccagttcttgggtcttgatagacaatttggaaagagatttccttgtttacgaagtgaaggactaagaattaaattaatgaccttggcctcactggcaatcaattacaaatctctatatcagtaagagaattgtaaaattcagaagcagtttacattagactttggaatgaatgatgaactttccccattagagctgccatcatatgattggtggagattgtttaaagaatcattctatctcagcctcaaaaattaccacgggaagatggtatcagtatcactacttaacagatgaagaatctaatgctgtgtgcccatggacacacaaaattaagctgttgggacttgaacagctcaaattttcttgtttcagatcaccagctcttgagtaatagggaaatctggagatttgaaaagtacttgcactgtccacaacatggctaatccatatgtggatgatgcagaattgatttaattcactaacagggaccccataattatttgctgggctctgggtatattgatgtgtaggaagttgtactatatgttaataaattatgactatttggataggctgaattcatactaaatccatactgtagttcaacaaaaaacaacatgtttatatacatttggaaactgcaatgataggaaacatttggaagaaagggattttgccctagaataacacataaggaaagcagagaattagagtatattgttactgaatgttccagagacttctagtgattttaacacttattaagtatagcatgttgatggggagatttgtttctctaaagatcactttgttttattaaatcctaatagaaaatacccttgaaaatcctatctcatttattcctgtaacaaatttattgagcacctacctactatatgccaagaaatgtattagccatcaggcagagagctgttcaaatggtagatatgatctgtgctcctgtgaaacttctagtggggagagccaaacaataaacaatattcctttttaactctaggttaatgcagaaatggataaagcccatgttgcttttgggagaggtgagttgtgtctctgaatcacatgcatttcatagggggaaaaatgcccaaatactaaggagtagctcttagcctatgtccgttcgcctcagcttaagttgttttccctcccactggctgg

SEQ ID NO: 2685 - protein, 241 aa, Homo sapiens; identical to SEQ ID NO: 75

SEQ ID NO: 2686 - DNA, 2653 bp, Homo sapiens
acaggagggcgggctaaagaggtcgcggtcgcacgcgcagttggtccttagtactgcggccgtgtgggtgagttggctgccggggcgtgaatactttttctcccgaaggaagattatttcaagtggaatatgccattgaggctatcaagcttggttctacagccattgggatccagacatcagagggtgtgtgcctagctgtggagaagagaattacttccccactgatggagcccagcagcattgagaaaattgtagagattgatgctcacataggttgtgccatgagtgggctaattgctgatgctaagactttaattgataaagccagagtggagacacagaaccactggttcacctacaatgagacaatgacagtggagagtgtgacccaagctgtgtccaatctggctttgcagtttggagaagaagatgcagatccaggtgccatgtctcgtccctttggagtagcattattatttggaggagttgatgagaaaggaccccagctgtttcatatggacccatctgggacctttgtacagtgtgatgctcgagcaattggctctgcttcagagggtgcccagagctccttgcaagaagtttaccacaagtctatgactttgaaagaagccatcaagtcttcactcatcatcctcaaacaagtaatggaggagaagctgaatgcaacaaacattgagctagccacagtgcagcctggccagaatttccacatgttcacaaaggaagaacttgaagaggttatcaaggacatttaaggaatcctgatcctcagaacttctctgggacaatttcagttctaataatgtccttaaattttatttccagctcctgttccttggaaaatctccattgtatgtgcattttttaaatgatgtctgtacataaaggcagttctgaaataaagaaaattttaaaatatttgttaatagactgttctcttctaatagtcttttttttttttttttttttaagagatgaggtctcactatattgcccaggctggtttcaaactcctgggttcaagtgatcttcccgcctctgcctcctgaagtgctaggattataggcgagagccactgtgcccagccattgtaatacagtcttttgtttgaaatgcaaatgttagtgggccaaaaggacagtgttattaatatccctattctatgaagatgtctgttctaaaactgttttagtgatgctctataacagaatcaactatatccattaatcccatggtgttgataaatgaactagtccagctcttcccagtggttaatagatgttaacagcactgtaaatccatttcggccctataatttctggagcaaacgtgtatttttgctgcttttcttataaggagatgctactaattgactatcagaagaacatgttttgaggtcctcctcaaaacattgatgggttggaatcagccatcaacagtgttgtaccagttcttgggtcttgatagacaatttggaaagagatttccttgtttacgaagtgaaggactaagaattaaattaatgaccttggcctcactggcaatcaattacaaatctctatatcagtaagagaattgtaaaattcagaagcagtttacattagactttggaatgaatgatgaactttccccattagagctgccatcatatgattggtggagattgtttaaagaatcattctatctcagcctcaaaaattaccacgggaagatggtatcagtatcactacttaacagatgaagaatctaatgctgtgtgcccatggacacacaaaattaagctgttgggacttgaacagctcaaattttcttgtttcagatcaccagctcttgagtaatagggaaatctggagatttgaaaagtacttgcactgtccacaacatggctaatccatatgtggatgatgcagaattgatttaattcactaacagggaccccataattatttgctgggctctgggtatattgatgtgtaggaagttgtactatatgttaataaattatgactatttggataggctgaattcatactaaatccatactgtagttcaacaaaaaacaacatgtttatatacatttggaaactgcaatgataggaaacatttggaagaaagggattttgccctagaataacacataaggaaagcagagaattagagtatattgttactgaatgttccagagacttctagtgattttaacacttattaagtatagcatgttgatggggagatttgtttctctaaagatcactttgttttattaaatcctaatagaaaatacccttgaaaatcctatctcatttattcctgtaacaaatttattgagcacctacctactatatgccaagaaatgtattagccatcaggcagagagctgttcaaatggtagatatgatctgtgctcctgtgaaacttctagtggggagagccaaacaataaacaatattcctttttaactctaggttaatgcagaaatggataaagcccatgttgcttttgggagaggtgagttgtgtctctgaatcacatgcatttcatagggggaaaaatgcccaaatactaaggagtagctcttagcctatgtccgttcgcctcagcttaagttgttttccctcccactggctgg

SEQ ID NO: 2687 - protein, 183 aa, Homo sapiens; identical to SEQ ID NO: 2683

SEQ ID NO: 2688 - DNA, 335 bp, Homo sapiens
actttgctgctgcttttgtgatccctgttgaagtgacttcaagaagtgacaatgatgccaggcatttggttaagtatgatgtgctagccacagtgcagcctggccagaatttccacatgttcacaaaggaagaacttgaagaggttatcaaggacatttaaggaatcctgatcctcagaacttctctgggacaatttcagttctaataatgtccttaaattttatttccagctcctgttccttggaaaatctccattgtatgtgcattttttaaatgatgtctgtacataaaggcagttctgaaataaagaaaattttaaaatatttgttaatag

SEQ ID NO: 2689 - protein, 39 aa, Homo sapiens
SSELLWDNFSSNNVLKFYFQLLFLGKSPLYVHFLNDVCT

SEQ ID NO: 2690 - DNA, 539 bp, Homo sapiens
ggggttttttttcctgaaaaaatgtattctacttatttgccatttacttgagttctggagatacttgtaatgcaccatactaagtaagatgtttgacatacttgctaaatacttttttcagtgagataaagggaaaatctttgaaggaaggacggattgtgcataattaataggcatcttcttgccttctttgtttcaagtctatgactttgaaagaagccatcaagtcttcactcatcatcctcaaacaagtaatggaggagaagctgaatgcaacaaacattgagctagccacagtgcagcctggccagaatttccacatgttcacaaaggaagaacttgaagaggttatcaaggacatttaaggaatcctgatcctcagaacttctctgggacaatttcagttctaataatgtccttaaattttatttccagctcctgttccttggaaaatctccattgtatgtgcattttttaaatgatgtctgtacataaaggcagttctgaaataaagaaaattttaaaatatttgttaatag

SEQ ID NO: 2691 - protein, 53 aa, Homo sapiens
MTLKEAIKSSLIILKQVMEEKLNATNIELATVQPGQNFHMFTKEELEEVIKDI

SEQ ID NO: 2692 - DNA, 538 bp, Homo sapiens
gccatttatcttaatatctcttattttttggttctagtctcgtccctttggagtagcattattatttggaggagttgatgagaaaggaccccagctgtttcatatggacccatctgggacctttgtacagtgtgatgctcgagcaattggctctgcttcagagggtgcccagagctccttgcaagaagtttaccacaagtctatgactttgaaagaagccatcaagtcttcactcatcatcctcaaacaagtaatggaggagaagctgaatgcaacaaacattgagctagccacagtgcagcctggccagaatttccacatgttcacaaaggaagaacttgaagaggttatcaaggacatttaaggaatcctgatcctcagaacttctctgggacaatttcagttctaataatgtccttaaattttatttccagctcctgttccttggaaaatctccattgtatgtgcattttttaaatgatgtctgtacataaaggcagttctgaaataaagaaaattttaaaatatttgttaatag

SEQ ID NO: 2693 - protein, 86 aa, Homo sapiens; identical to SEQ ID NO: 2681

SEQ ID NO: 2694 - DNA, 1861 bp, Homo sapiens
tctgagtacgacaggtccgtgcagctgggggacgtcgggtgggaattatgggtgggcaggcccgggacctggccgcgcggcctgggttctgccgtgtcatggggctccccaggaacccgagactggccggacctggggatgttatgccctcctcaggcgcccgccgtccttccccaagctagaccacatcggcggcacttgtcctaccgctgagtcacccctgggtcctaactcggtgcggaagcgagaagctccggctggtgcttggtaaagaaggcgtgaggagccggaactcctaccttgaacccggagaaggccaagggtcactctttgctccgttcatcttttcgtgcctagtatgactgccttgaacaaacaaacaaaaagttaaacgtgcttcctggaagaaaaagcaactggtttgtagtagggcatgctgcggtgtatagtttcttcagaagcgcgaaggcagtcgtagctttggctggatatattgtctggagtctgattttataggaactggaatttagaatggttttcaagagatttctcatcatgccgattccaattgaccaaaattttttctgactttttaaaagtttaaagcaagttttaaaaaacttttgtggtatgaaaatgttcacaatattaagttgtacatatatatgctgtagacatttttactttcagtttctgttttcgtcagttaagtttttacatagctactcttttttaaagtcagggaaggcagacattttctttgtactgagtggtatgagatgctgcatttcctgtcaagtatatgctgatcctgtcgaagttttaccacctgcagttaccactttttcatcttttttactgactcgtagaagatgtgtgtgaagttttgacatatttccccactgtcctataaagtgactttgttggtcgatatttaacttccagaacattgaagagaatcatcttcgggtgacataattttgagttagggggcgtgaatactttttctcccgaaggaagattatttcaagtggaatatgccattgaggctatcaagcttggttctacagccattgggatccagacatcagagggtgtgtgcctagctgtggagaagagaattacttccccactgatggagcccagcagcattgagaaaattgtagagattgatgctcacataggttgtgccatgagtgggctaattgctgatgctaagactttaattgataaagccagagtggagacacagaaccactggttcacctacaatgagacaatgacagtggagagtgtgacccaagctgtgtccaatctggctttgcagtttggagaagaagatgcagatccaggtgccatgtctcgtccctttggagtagcattattatttggaggagttgatgagaaaggaccccagctgtttcatatggacccatctgggacctttgtacagtgtgatgctcgagcaattggctctgcttcagagggtgcccagagctccttgcaagaagtttaccacaagtctatgactttgaaagaagccatcaagtcttcactcatcatcctcaaacaagtaatggaggagaagctgaatgcaacaaacattgagctagccacagtgcagcctggccagaatttccacatgttcacaaaggaagaacttgaagaggttatcaaggacatttaaggaatcctgatcctcagaacttctctgggacaatttcagttctaataatgtccttaaattttatttccagctcctgttccttggaaaatctccattgtatgtgcattttttaaatgatgtctgtacataaaggcagttctgaaataaagaaaattttaaaatatttgttaatag

SEQ ID NO: 2695 - protein, 183 aa, Homo sapiens; identical to SEQ ID NO: 2683

SEQ ID NO: 2696 - DNA, 950 bp, Homo sapiens
gttggtccttagtactgcggccgtgtgggtgagttggctgccggtgagttgggtgccggtggagtcgtgttggtcctcagaatccccgcgtagccgctgcctcctcctaccctcgccatgtttcttacccggtctgagtacgacagcttggttctacagccattgggatccagacatcagagggtgtgtgcctagctgtggagaagagaattacttccccactgatggagcccagcagcattgagaaaattgtagagattgatgctcacataggttgtgccatgagtgggctaattgctgatgctaagactttaattgataaagccagagtggagacacagaaccactggttcacctacaatgagacaatgacagtggagagtgtgacccaagctgtgtccaatctggctttgcagtttggagaagaagatgcagatccaggtgccatgtctcgtccctttggagtagcattattatttggaggagttgatgagaaaggaccccagctgtttcatatggacccatctgggacctttgtacagtgtgatgctcgagcaattggctctgcttcagagggtgcccagagctccttgcaagaagtttaccacaagtctatgactttgaaagaagccatcaagtcttcactcatcatcctcaaacaagtaatggaggagaagctgaatgcaacaaacattgagctagccacagtgcagcctggccagaatttccacatgttcacaaaggaagaacttgaagaggttatcaaggacatttaaggaatcctgatcctcagaacttctctgggacaatttcagttctaataatgtccttaaattttatttccagctcctgttccttggaaaatctccattgtatgtgcattttttaaatgatgtctgtacataaaggcagttctgaaataaagaaaattttaaaatatttgttaatag

SEQ ID NO: 2697 - protein, 183 aa, Homo sapiens; identical to SEQ ID NO: 2683

SEQ ID NO: 2698 - DNA, 1030 bp, Homo sapiens
ggtcgcacgcgcagttggtccttagtactgcggccgtgtgggtgagttggctgccggtgagttgggtgccggtggagtcgtgttggtcctcagaatccccgcgtagccgctgcctcctcctaccctcgccatgtttcttacccggtctgagtacgacaggggcgtgaatactttttctcccgaaggaagattatttcaagtggaatatgccattgaggctatcaagcttggttctacagccattgggatccagacatcagagggtgtgtgcctagctgtggagaagagaattacttccccactgatggagcccagcagcattgagaaaattgtagagattgatgctcacataggttgtgccatgagtgggctaattgctgatgctaagactttaattgataaagccagagtggagacacagaaccactggttcacctacaatgagacaatgacagtggagagtgtgacccaagctgtgtccaatctggctttgcagtttggagaagaagatgcagatccaggtgccatgtctcgtccctttggagtagcattattatttggaggagttgatgagaaaggaccccagctgtttcatatggacccatctgggacctttgtacagtgtgatgctcgagcaattggctctgcttcagagggtgcccagagctccttgcaagaagtttaccacaagtctatgactttgaaagaagccatcaagtcttcactcatcatcctcaaacaagtaatggaggagaagctgaatgcaacaaacattgagctagccacagtgcagcctggccagaatttccacatgttcacaaaggaagaacttgaagaggttatcaaggacatttaaggaatcctgatcctcagaacttctctgggacaatttcagttctaataatgtccttaaattttatttccagctcctgttccttggaaaatctccattgtatgtgcattttttaaatgatgtctgtacataaaggcagttctgaaataaagaaaattttaaaatatttgttaatag

SEQ ID NO: 2699 - protein, 241 aa, Homo sapiens; identical to SEQ ID NO: 75

SEQ ID NO: 2700 - DNA, 953 bp, Homo sapiens
acaggagggcgggctaaagaggtcgcggtcgcacgcgcagttggtccttagtactgcggccgtgtgggtgagttggctgccggggcgtgaatactttttctcccgaaggaagattatttcaagtggaatatgccattgaggctatcaagcttggttctacagccattgggatccagacatcagagggtgtgtgcctagctgtggagaagagaattacttccccactgatggagcccagcagcattgagaaaattgtagagattgatgctcacataggttgtgccatgagtgggctaattgctgatgctaagactttaattgataaagccagagtggagacacagaaccactggttcacctacaatgagacaatgacagtggagagtgtgacccaagctgtgtccaatctggctttgcagtttggagaagaagatgcagatccaggtgccatgtctcgtccctttggagtagcattattatttggaggagttgatgagaaaggaccccagctgtttcatatggacccatctgggacctttgtacagtgtgatgctcgagcaattggctctgcttcagagggtgcccagagctccttgcaagaagtttaccacaagtctatgactttgaaagaagccatcaagtcttcactcatcatcctcaaacaagtaatggaggagaagctgaatgcaacaaacattgagctagccacagtgcagcctggccagaatttccacatgttcacaaaggaagaacttgaagaggttatcaaggacatttaaggaatcctgatcctcagaacttctctgggacaatttcagttctaataatgtccttaaattttatttccagctcctgttccttggaaaatctccattgtatgtgcattttttaaatgatgtctgtacataaaggcagttctgaaataaagaaaattttaaaatatttgttaatag

SEQ ID NO: 2701 - protein, 183 aa, Homo sapiens; identical to SEQ ID NO: 2683

SEQ ID NO: 2702 - DNA, 414 bp, Homo sapiens
atagaaaaatgttgaaagagttgggcgcagtggcctgtaatcccagcactttgggaggctgagacaggtggatcgcttgagggcaggagttcaagaccagcctgcccaacatggtgaaaccccatctctactaaaaatacaaaaattagccaggcgtggtggtggacgcctgtaatcccagctacttgggaagctgaggcatgagaatcacttgaacccgggaggtggaggttacagtgagccgagattgcaccactgcactccagcctgggcgacagaacgagactccgtcccgaaaaaaaaaaaagctgaaagaaataaaaggagaggtatggaccagcttgggaatgtccttttttagtatgctaagagtagacaggagcaaaggaagtaatgacgagtaaagataggtgg

SEQ ID NO: 2703 - protein, 44 aa, Homo sapiens
SQHFGRLRQVDRLRAGVQDQPAQHGETPSLLKIQKLARRGGGRL

SEQ ID NO: 2704 - DNA, 850 bp, Homo sapiens
ggtcgcacgcgcagttggtccttagtactgcggccgtgtgggtgagttggctgccggtgagttgggtgccggtggagtcgtgttggtcctcagaatccccgcgtagccgctgcctcctcctaccctcgccatgtttcttacccggtctgagtacgacaggggcgtgaatactttttctcccgaaggaagattatttcaagtggaatatgccattgaggctatcaagcttggttctacagccattgggatccagacatcagagggtgtgtgcctagctgtggagaagagaattacttccccactgatggagcccagcagcattgagaaaattgtagagattgatgctcacataggttgtgccatgagtgggctaattgctgatgctaagactttaattgataaagccagagtggagacacagaaccactggttcacctacaatgagacaatgacagtggagagtgtgacccaagctgtgtccaatctggctttgcagtttggagaagaagatgcagatccaggtgccatgtctcgtccctttggagtagcattattatttggaggagttgatgagaaaggaccccagctgtttcatatggacccatctgggacctttgtacagtgtgatgctcgagcaattggctctgcttcagagggtgcccagagctccttgcaagaagtttaccacaagtctatgactttgaaagaagccatcaagtcttcactcatcatcctcaaacaagtaatggaggagaagctgaatgcaacaaacattgagagatggggtcttgctgtgttgcccagactggtcttaaactcctggcctcaggcaattctcctgcctcagcct

SEQ ID NO: 2705 - protein, 239 aa, Homo sapiens
MFLTRSEYDRGVNTFSPEGRLFQVEYAIEAIKLGSTAIGIQTSEGVCLAVEKRITSPLMEPSSIEKIVEIDAHIGCAMSGLIADAKTLIDKARVETQNHWFTYNETMTVESVTQAVSNLALQFGEEDADPGAMSRPFGVALLFGGVDEKGPQLFHMDPSGTFVQCDARAIGSASEGAQSSLQEVYHKSMTLKEAIKSSLIILKQVMEEKLNATNIERWGLAVLPRLVLNSWPQAILLPQ

SEQ ID NO: 2706 - DNA, 640 bp, Homo sapiens
ggtcgcacgcgcagttggtccttagtactgcggccgtgtgggtgagttggctgccggtgagttgggtgccggtggagtcgtgttggtcctcagaatccccgcgtagccgctgcctcctcctaccctcgccatgtttcttacccggtctgagtacgacaggggcgtgaatactttttctcccgaaggaagattatttcaagtggaatatgccattgaggctatcaagcttggttctacagccattgggatccagacatcagagggtgtgtgcctagctgtggagaagagaattacttccccactgatggagcccagcagcattgagaaaattgtagagattgatgctcacataggttgtgccatgagtgggctaattgctgatgctaagactttaattgataaagccagagtggagacacagaaccactggttcacctacaatgagacaatgacagtggagagtgtgacccaagctgtgtccaatctggctttgcagtttggagaagaagatgcagatccaggtgccatgtctcgtccctttggagtagcattattatttggaggagttgatgagaaaggaccccagctgtaagtaccattttgtaattttcccccatgcttttgcagggaattattttaa

SEQ ID NO: 2707 - protein, 153 aa, Homo sapiens
MFLTRSEYDRGVNTFSPEGRLFQVEYAIEAIKLGSTAIGIQTSEGVCLAVEKRITSPLMEPSSIEKIVEIDAHIGCAMSGLIADAKTLIDKARVETQNHWFTYNETMTVESVTQAVSNLALQFGEEDADPGAMSRPFGVALLFGGVDEKGPQL

SEQ ID NO: 2708 - DNA, 926 bp, Homo sapiens
agttggtccttagtactgcggccgtgtgggtgagttggctgccggtgagttgggtgccggtggagtcgtgttggtcctcagaatccccgcgtagccgctgcctcctcctaccctcgccatgtttcttacccggtctgagtacgacaggggcgtgaatactttttctcccgaaggaagattatttcaagtggaatatgccattgaggctatcaagcttggttctacagccattgggatccagacatcagagggtgtgtgcctagctgtggagaagagaattacttccccactgatggagcccagcagcattgagaaaattgtagagattgatgctcacataggttgtgccatgagtgggctaattgctgatgctaagactttaattgataaagccagagtggagacacaggtaaaattggcattatctcctttttaccaggatgcttgagttccttgtttagtgattatctagctgcctgggctatactgcaggtacctgtgtcaatattagatgtggctcttgggagtaattttgggtagaattcccagttagaacttcctggggcttggagtttagctgtccaatcattgcagttttaaagaggctctggtcagtagtgctgacagtgtcttccttttttttttggctttgcctatatataaagcatgcattgtttcctaattgactttgtgtgggagcatcatggcaggaggtggacgtagttaaaggatattctcccctcagctgcctttgctgccaggcttgtaaataacagcccgcctttggtgagtaataacttgtaccaactgacaaatactggtcagggatactgttttttttttttttaaactttgtagctgctgcttgaagataggctagtaagaaaaatacatcacatggtaaaattttttgtacttatttgcaa

SEQ ID NO: 2709 - protein, 109 aa, Homo sapiens
MFLTRSEYDRGVNTFSPEGRLFQVEYAIEAIKLGSTAIGIQTSEGVCLAVEKRITSPLMEPSSIEKIVEIDAHIGCAMSGLIADAKTLIDKARVETQVKLALSPFYQDA

SEQ ID NO: 2710 - DNA, 551 bp, Homo sapiens
agtactgcggccgtgtgggtgagttggctgccggggcgtgaatactttttctcccgaaggaagattatttcaagtggaatatgccattgaggctatcaagcttggttctacagccattgggatccagacatcagagggtgtgtgcctagctgtggagaagagaattacttccccactgatggagcccagcagcattgagaaaattgtagagattgatgctcacataggttgtgccatgagtgggctaattgctgatgctaagactttaattgataaagccagagtggagacacaggtaaaattggcattatctcctttttaccaggatgcttgagttccttgtttagtgattatctagctgcctgggctatactgcaggtacctgtgtcaatattagatgtggctcttgggagtaattttgggtagaattcccagttagaacttcctggggcttggagtttagctgtccaatcattgcagttttaaagaggctctggtcagtagtgctgacagtgtcttccttttttttttggctttgcctatatataaag

SEQ ID NO: 2711 - protein, 51 aa, Homo sapiens
MEPSSIEKIVEIDAHIGCAMSGLIADAKTLIDKARVETQVKLALSPFYQDA

SEQ ID NO: 2712 - DNA, 1868 bp, Homo sapiens
acaaacaaacaaaaagttaaacgtgcttcctggaagaaaaagcaactggtttgtagtagggcatgctgcggtgtatagtttcttcagaagcgcgaaggcagtcgtagctttggctggatatattgtctggagtctgattttataggaactggaatttagaatggttttcaagagatttctcatcatgccgattccaattgaccaaaattttttctgactttttaaaagtttaaagcaagttttaaaaaacttttgtggtatgaaaatgttcacaatattaagttgtacatatatatgctgtagacatttttactttcagtttctgttttcgtcagttaagtttttacatagctactcttttttaaagtcagggaaggcagacattttctttgtactgagtggtatgagatgctgcatttcctgtcaagtatatgctgatcctgtcgaagttttaccacctgcagttaccactttttcatcttttttactgactcgtagaagatgtgtgtgaagttttgacatatttccccactgtcctataaagtgactttgttggtcgatatttaacttccagaacattgaagagaatcatcttcgggtgacataattttgagttagggtgtgtatgatagaaattgttatgcttatcagaaggcatttattaaattttgtggccatttacttgtctccaaaaaaaaaaaagaattgtttacagaagtaactatagtgtgagtcagaaatatattaatgccattagagaaattcaaatcaattaataaagacagtgagatcaatagttgtgggttggagaatatgggataaatgaaggaggggcaatggaaaagcacaatacattttgggaaaagtccagtctgactggcacatatgatacgtgtatgggaacagcaggagataatgggaaaaacaggatgctgctagatattgaatggtttttaatacgaggctaaggagtttgggtcctatttctgtaggcaactgtgtgctgttaaataataattgtgttttacagagattaattgtctgaattaggggaaagtgagtcaatacctgttagtgttaggctattaacaatagttaggtgaaaggtaatgagggcattgagaaggaagagtgatgtgttactgtggaggaggaattgatatgaattggtatgacttagcatatagttggatatgggaaaagatggggaggaatgagtcagatcatttagaacttcgtatgttgggaacactggaagatttgagatgttttaaattaaaactgaaattggaatggcaggagatgaagtcaattttgcaaggtggctggatttaaagagataatatttcaaactggaaaacgttaagtgttaagtgctaataggatatgcaagtggaaatgttcagcaaacatttaaattagttaggaaagaggtgaaactggtagtagagatttggaagtaacttgtgcttagcactctaaaagcactactatatgacatgttacctgttgtaaagtctggactccataaaccacggattgcaaccatctcattcatttgttcacatattttttgtgtccattgtgtgctcaaagcttttatagctgagaccatgattggtgcctcttctccgtagggatttccagcacacttgagcaaggaaaggtggaaagtgttaagtgttaaggggaagtgtttagagaggaaagcagtctgacatgtaagttatataaatattgagtgaatgaactaggttagaattaggaactacatggatctcagtctgttaagataacaatagtaattcatacaaataagtagagaaatgtacctgtgactaacttttagtaaaaagtaataattaggc

SEQ ID NO: 2713 - protein, 31 aa, Homo sapiens
MIEIVMLIRRHLLNFVAIYLSPKKKKNCLQK

SEQ ID NO: 2714 - DNA, 1034 bp, Homo sapiens
gtactgcggccgtgtgggtgagttggctgccggtgagttgggtgccggtggagtcgtgttggtcctcagaatccccgcgtagccgctgcctcctcctaccctcgccatgtttcttacccggtctgagtacgacaggcgcccgccgtccttccccaagctagaccacatcggcggcacttgtcctaccgctgagtcacccctgggtcctaactcggtgcggaagcgagaagctccggctggtgcttggtaaagaaggcgtgaggagccggaactcctaccttgaacccggagaaggccaagggtcactctttgctccgttcatcttttcgtgcctagtatgactgccttgaacaaacaaacaaaaagttaaacgtgcttcctggaagaaaaagcaactggtttgtagtagggcatgctgcggtgtatagtttcttcagaagcgcgaaggcagtcgtagctttggctggatatattgtctggagtctgattttataggaactggaatttagaatggttttcaagagatttctcatcatgccgattccaattgaccaaaattttttctgactttttaaaagtttaaagcaagttttaaaaaacttttgtggtatgaaaatgttcacaatattaagttgtacatatatatgctgtagacatttttactttcagtttctgttttcgtcagttaagtttttacatagctactcttttttaaagtcagggaaggcagacattttctttgtactgagtggtatgagatgctgcatttcctgtcaagtatatgctgatcctgtcgaagttttaccacctgcagttaccactttttcatcttttttactgactcgtagaagatgtgtgtgaagttttgacatatttccccactgtcctataaagtgactttgttggtcgatatttaacttccagaacattgaagagaatcatcttcgggtgacataattttgagttagggtgtgtatgatagaaattgttatgcttatcagaaggcatttattaaattttgtggccatttactt

SEQ ID NO: 2715 - protein, 47 aa, Homo sapiens
MFLTRSEYDRRPPSFPKLDHIGGTCPTAESPLGPNSVRKREAPAGAW

SEQ ID NO: 2716 - DNA, 5147 bp, Homo sapiens
aaggtgcccggcgagcggagaaagggagcagagggggcgggaggagggttcgggagcgcacgccacgtgacccggcggccaagttcgctgcgagtttgacagaagtttgaatccgagtcgggggctttctgctgccggcggggcaccgcggcggccgcagcctctgagagcacgaacagcagcgcccccgcgtcccagccagccagccagccagactggactccggcccaccgacggccgctcgcgctccggccccgctcgcctgctctgccccggacctgcagctccccgctcccccgccgtgtccgccgcctcccggccagagagccaagccaccacgccgcgcccagcgctcgccgcgccagcatgtcctcgaccgagagcgccggccgcacggcggacaagtcgccgcgccagcaggtggaccgcctactcgtggggctgcgctggcggcggctggaggagccgctgggcttcatcaaagttctccagtggctctttgctattttcgccttcgggtcctgtggctcctacagcggggagacaggagcaatggttcgctgcaacaacgaagccaaggacgtgagctccatcatcgttgcatttggctatcccttcaggttgcaccggatccaatatgagatgcccctctgcgatgaagagtccagctccaagaccatgcacctcatgggggacttctctgcacccgccgagttcttcgtgacccttggcatcttttccttcttctataccatggctgccctagttatctacctgcgcttccacaacctctacacagagaacaaacgcttcccgctggtggacttctgtgtgactgtctccttcaccttcttctggctggtagctgcagctgcctggggcaagggcctgaccgatgtcaagggggccacacgaccatccagcttgacagcagccatgtcagtgtgccatggagaggaagcagtgtgcagtgccggggccacgccctctatgggcctggccaacatctccgtggtgagacctgtggccactgcaggaagcagcaccagccctgctgcccaggcctgtcccagctagcaggtcctgaaaggaaagagagggtgtcccagagctggtgtcccctgcacctggagctggtgccctcactgcgcttcatgctggctgctggctcctggctgaccctgagaggacattttgggatgaggggaacccaaaagccacttagccttctgttccttcctccttctgcactctgcctccaattcccttctcatttccccacctctaggcacgctctctgtgatgtctcccctcctcctgcctgttctacacaatgtgtgtgaacacataaaggggagcctggggctgtggctgagcttgaagctgcgagcagacccagcatgagtgggaaggggcttactgtcactcagccctccagcctggaaaggggctttggagcagtagtgggtctgctggatgcatatggatttggccatcccagttgttagaatgttgaaatatgtccatatccattggtaaagagctgaggtcttgagcttctcaaatgctgcccgtcatcccagccacctcagccctgctctgaaaatgacttgttcccacatctgaaatgtttaatggctggcacaccaggaacacacgtctggaacttgctggaaccctgcttatggttcccccccaaaaaaattttattgtagaaatgttcacaggtacaacaaagttgaaagaattttacagtgaatacccatgcactcaccacctagactgtgccattaactttttactagacttgctttatcacatatttattcacttcttcatccatcaatccgtcttgtttttagtgcatttcaaagataatttgggacatcagtacacttccctctaagtacttcctgctgtgaggtttttaaaatatgttgaataactatttgaacatagccctggctaggtgcctgatcacagggaaggagcaccttggacagctcctgccacacctacctggcggaaggtgctccgaacagggcctcacgcgtgctgtgggaggcgccccagggctgacttttgcttggctccttgctatgctttgcacgatgctcctctaaagggtcagattctgctagtgaccaagctacagcttgggtgcatggtgtggacagaattagacactttcacctgggattcccctaaacagttgatggtcctgagccctgcctctataccgagctctctgtcttagtctttctagtcctctgtgcttcttccctgcacaagccccaaccccaactgcaataggaactccccctccctgttcccacaatgaccccctgactattctcacaaattcccctgatgtctttgcagctctttggctttatcaacttcttcctgtgggccgggaactgttggtttgtgttcaaggagaccccgtggcatggacagggccagggccaggaccaggaccaggaccaggaccagggccagggtcccagccaggagagtgcagctgagcagggagcagtggagaagcagtaagcagccccccacctggctattcccgaactggacagcacctcttcaaccacctccggcttccaggacctttctcttcctcctcctccaattcccctcccccatcattctggtctttgagctttgagacgatgggcaggcatcagctgttggaaacctgggcagccctctcagtggcttcctatcctccttcttgctggagccatgaatggcaggagctcagtgcttcttgtgcagtgcctggacccaggtatcttacttggggtcttacttgtacccttacagtctctgagaaccagcctctgctgcaggtgagggttgggggcaggaaaccagtgctctgagactggttcctagcagccacctttctgtcaacctgtccggcttcaacaatattagggggaagggaaatcagctagtagccttcccctctggtcccttgtgtggaggccccaatagtggtttggcgacccctcctcagtggctgtcatctagtccctgcgtctgatctccagtcatcccatgactcagtgtgccttccactgtcttctctggcctctgcctgcccacagaatccaccatgtgtgaaccagagaggtccaccagcctagaaaacagcccttcagagggtcctgatgaggccttcctggactcagctgggagcaagataaattgcaactgagttgcagcttcaagaaagtaaagccagtaagcttgctggcagaatcaatttcttctatcccctcaatcctcccacccaccaggctggggcactttccaccaacactctaaactctactttagaaacgccctatcttcctccctgtcctccttcttggtctcacacttgggactcaaaaatgtggagtcaggacctgcctcctaatccccttacttctctgtccatctcccttccccagcatcgtgcatctgaggcatttgagatcctttttgaagtctgtccaggccttccttttattcctgtggggccagacaggggcttaggaagggccaaaggaccatcatgaggctaagttgccccagagccccaggatggatgggcccattttttccttattccctgctcagttttttcccctgctccttctctagtccttctttcatatttctccttctcatcttgaaaacaggatgttccctcttcccttgctgtcccatttctcccctgtgtccttatttctcccagtctctatcccctctcaagtccagggcaggccgatgctattggtgcttcttcactttgggacccagttccatatttgtctttagtgtatatcctcttcctgatacctccttcagtccctctctgggccccaaggctgagaatcagtgttaactgggtaaggatcatttgcttcctacccagctcaatctgccctggccatagggcttcccagggaaggaagaagagggaagaatccgaccactttccaatccagtgccaattggcccactaagcatcctaaaggtgaatgtgccctgtgccaatctctcctcaggactgagtcaacccccttcaacctcctcacctctctaaacaccatccatagtaacatgtgcattactggggtacctaggagtcaggacttttgacttcaggccagtcatttcctcccgatggggaaagggtgagatttacatccccaaatgcttgagtccctcagtgaaagaattagtttttgtttgtttgtttaagattttggggaagagatttgaggaggaaagaaaggagatggggtgagagggtttttaagtctgaaactctctgtcatgagctgtccccatggttactcaaggacaaggggggacagttttgcctacagctccagagacacagagaacaaaggggtgaccttcatttttcttcaagccggcctctgtgggggtctgtgagcagcttctactggatctttgtttggattctgtgtctgtatttataatttatttgaaatgtgctgggtagtgttctcatttgggggctgaagttagcaactgggccttcagctagggaaagcagttgcgggcagggggtggggggagattatattcactcctgccaaggactcccagcccaggactctctttagagcaaggaagcctcgttctctttcttctcaagaggctctcttgttctccatcaggagagccttgatttaggctacggcctcactctctatggccaccctaagaggaaaggctacttcacctcattacctccagagggctgggcagggccaagtgcctcataggactcatgttctctccaaccagggctggcatcactgctttgcaaagtggggcctgaggtagaagaaggtgtctggtttctccagctgctgtaggaggctaatgggcagggtacttgccctttgtcccactagactctaacccagcaccagggtgcccacctaggacctttcctggacatgagtttccttcactatcatagtcatgagcctcctacttctgggattgcagatcaggggtggggggagaatgttgcatgttgttttctggtgcttgttattatatatttgaataaacagtgctgcaagtacttgccatgaaggatctga

SEQ ID NO: 2717 - protein, 236 aa, Homo sapiens
MSSTESAGRTADKSPRQQVDRLLVGLRWRRLEEPLGFIKVLQWLFAIFAFGSCGSYSGETGAMVRCNNEAKDVSSIIVAFGYPFRLHRIQYEMPLCDEESSSKTMHLMGDFSAPAEFFVTLGIFSFFYTMAALVIYLRFHNLYTENKRFPLVDFCVTVSFTFFWLVAAAAWGKGLTDVKGATRPSSLTAAMSVCHGEEAVCSAGATPSMGLANISVVRPVATAGSSTSPAAQACPS

SEQ ID NO: 2718 - DNA, 2662 bp, Homo sapiens
aggaccaggaccaggaccagggccagggtcccagccaggagagtgcagctgagcagggagcagtggagaagcagtaagcagccccccacctggctattcccgaactggacagcacctcttcaaccacctccggcttccaggacctttctcttcctcctcctccaattcccctcccccatcattctggtctttgagctttgagacgatgggcaggcatcagctgttggaaacctgggcagccctctcagtggcttcctatcctccttcttgctggagccatgaatggcaggagctcagtgcttcttgtgcagtgcctggacccaggtatcttacttggggtcttacttgtacccttacagtctctgagaaccagcctctgctgcaggtgagggttgggggcaggaaaccagtgctctgagactggttcctagcagccacctttctgtcaacctgtccggcttcaacaatattagggggaagggaaatcagctagtagccttcccctctggtcccttgtgtggaggccccaatagtggtttggcgacccctcctcagtggctgtcatctagtccctgcgtctgatctccagtcatcccatgactcagtgtgccttccactgtcttctctggcctctgcctgcccacagaatccaccatgtgtgaaccagagaggtccaccagcctagaaaacagcccttcagagggtcctgatgaggccttcctggactcagctgggagcaagataaattgcaactgagttgcagcttcaagaaagtaaagccagtaagcttgctggcagaatcaatttcttctatcccctcaatcctcccacccaccaggctggggcactttccaccaacactctaaactctactttagaaacgccctatcttcctccctgtcctccttcttggtctcacacttgggactcaaaaatgtggagtcaggacctgcctcctaatccccttacttctctgtccatctcccttccccagcatcgtgcatctgaggcatttgagatcctttttgaagtctgtccaggccttccttttattcctgtggggccagacaggggcttaggaagggccaaaggaccatcatgaggctaagttgccccagagccccaggatggatgggcccattttttccttattccctgctcagttttttcccctgctccttctctagtccttctttcatatttctccttctcatcttgaaaacaggatgttccctcttcccttgctgtcccatttctcccctgtgtccttatttctcccagtctctatcccctctcaagtccagggcaggccgatgctattggtgcttcttcactttgggacccagttccatatttgtctttagtgtatatcctcttcctgatacctccttcagtccctctctgggccccaaggctgagaatcagtgttaactgggtaaggatcatttgcttcctacccagctcaatctgccctggccatagggcttcccagggaaggaagaagagggaagaatccgaccactttccaatccagtgccaattggcccactaagcatcctaaaggtgaatgtgccctgtgccaatctctcctcaggactgagtcaacccccttcaacctcctcacctctctaaacaccatccatagtaacatgtgcattactggggtacctaggagtcaggacttttgacttcaggccagtcatttcctcccgatggggaaagggtgagatttacatccccaaatgcttgagtccctcagtgaaagaattagtttttgtttgtttgtttaagattttggggaagagatttgaggaggaaagaaaggagatggggtgagagggtttttaagtctgaaactctctgtcatgagctgtccccatggttactcaaggacaaggggggacagttttgcctacagctccagagacacagagaacaaaggggtgaccttcatttttcttcaagccggcctctgtgggggtctgtgagcagcttctactggatctttgtttggattctgtgtctgtatttataatttatttgaaatgtgctgggtagtgttctcatttgggggctgaagttagcaactgggccttcagctagggaaagcagttgcgggcagggggtggggggagattatattcactcctgccaaggactcccagcccaggactctctttagagcaaggaagcctcgttctctttcttctcaagaggctctcttgttctccatcaggagagccttgatttaggctacggcctcactctctatggccaccctaagaggaaaggctacttcacctcattacctccagagggctgggcagggccaagtgcctcataggactcatgttctctccaaccagggctggcatcactgctttgcaaagtggggcctgaggtagaagaaggtgtctggtttctccagctgctgtaggaggctaatgggcagggtacttgccctttgtcccactagactctaacccagcaccagggtgcccacctaggacctttcctggacatgagtttccttcactatcatagtcatgagcctcctacttctgggattgcagatcaggggtggggggagaatgttgcatgttgttttctggtgcttgttattatatatttgaataaacagtgctgcaagtacttgccatga

SEQ ID NO: 2719 - protein, 110 aa, Homo sapiens
MRLSCPRAPGWMGPFFPYSLLSFFPCSFSSPSFIFLLLILKTGCSLFPCCPISPLCPYFSQSLSPLKSRAGRCYWCFFTLGPSSIFVFSVYPLPDTSFSPSLGPKAENQC

SEQ ID NO: 2720 - DNA, 302 bp, Homo sapiens
tacggcctcactctctatggccaccctaagaggaaaggctacttcacctcattacctccactgctgtaggaggctaatgggcagggtacttgccctttgtcccactagactctaacccagcaccagggtgcccacctaggacctttcctggacatgagtttccttcactatcatagtcatgagcctcctacttctgggattgcagatcaggggtggggggagaatgttgcatgttgttttctggtgcttgttattatatatttgaataaacagtgctgcaagtacttgccatgaaggatctg

SEQ ID NO: 2721 - protein, 32 aa, Homo sapiens [sequence omitted]

SEQ ID NO: 2722 - DNA, 2316 bp, Homo sapiens
gcgtccgcggcggtgatggcggtgcgtgaacgcgcggcggcagcaatggccgctctggagcggcgggtgccgagtctcgatgacttcgcgggacagagctggagctcgtgggtggagcgggccgacctgcccgcggctgacggggctgagctggaggagagtagcaaaaacacgaagaagttggatgccatgaccctcattaaagaagacatgtccatcttcgggcactgccctgcccatgatgacttctacttggttgtgtgtaaccactgcagccaagtggtgaagcctcaagctttccagaagcactgcgaaagaagacatgggcccctcagcaagctttatggccgggccccacccccacctccagcccctgccagctctcagaaatgccatgtagtgaatgggcagggcccagcttgtagggccccaggttccacgaaaacctcctccagggagaagggccaggggtcccggagccgtggccaccagcctcctgagaagacccagaaggacaacctctgccagccagggggcctcaccaaggactcccctggaaaacctcccatggctcccccttctaaagaacctcctggcagagagaacatcgagatcatccccagtgaggggtccagtcactgggctgaaggcagccctcctgaaaaggagcccagtgggaccaggctgccccctaaaacccaccggaagatggctcggaaggagtgcgacctcaacaggcagtgtggggtaataaatccagagaccaaaaagatctgtacccgcctgttgacctgcaagatccactcagtacaccagcgccgggaagtccagggccgggccaaggactttgacgtgctggtggcagagctgaaggccaactcccgcaaaggggagtctcccaaggagaagagcccagggcgcaaggagcaagttctcgagcgcccctcccaggagctcccctcctcagtccaggttgtagcagcggtggctgctcccagcagcaccttctctgttcgtgccaagcagacctacccatactgtgcactgcccaggtcccgggcctcctccgagagtgaattggatgatgaaggcccctgtggtggtgatggggacccaggcctgttccccttccccatgccccggggtgggacccaggcctccagcgaagagagtgaggaggaggggacatctgacgacctccacccaccccctgactgccattatgcaacccggcccccacggccacaggcgttctgcacctttgggagccggctggtgagcccaggatgctatgtgtttagccgccggctggaccggttctgctcagcactcagctccatgctggaacggcacctcagcacacacatgtggaagaagatcccaccggcagctgaacctccagctcaccttgtcaactccccgttatctgctcccctgagcccatcctctacaggcacctgcccccgccttccaggtccaaccctgagacctgcctgcccagcctccatgccccccaccaaggacaaccttgtccccagctaccctgcaggctcccccagcgtggcggctgcctgtagccaggcagagtgcatgggcgggagccaggctatcacctcaccactgcctgccaacacgccatccccgtccttcagcaagctgccgccttccaaggccagcaagtcatccaaaggcaaggacggggtggaggtggaggccccttctcgaaagcggaagttatcccctggccctaccactcttaaacggacctgcatcctggagcccactggaaaagggaaaccctctggctgtaggggcctctcggccaaaactaaaacagccctgagcatggggcttaatgggacaatggggccaagagtgaagcgggcagggcccctggactgtcgtggctcccctcatcagctccccacaccagtcaaggcttctcagctggagaaccggggagcagctggacacccagccaaggccctgccaaccaactgcctctctgaggaggaggtggccaagaagcggaaaaacctggccacttattgccggccagtgaaggccaagcactgtcaggctggtgcccctgctgatgtggcctgctctgtgcgccgcaagaagccaggcccggccctggcctttgaggagaagtgctctacactgaagtcaaaagcccattaacgagaaagtgcctgcccactgcaacggagccgccagcacctcctcccctccagatccgggccccaggctgctgccgctttttataactttatattatttttttttaagaaaaaaagctctttaaaatacctc

SEQ ID NO: 2723 - protein, 722 aa, Homo sapiens; identical to SEQ ID NO: 77

SEQ ID NO: 2724 - DNA, 750 bp, Homo sapiens
cggcagcaatggccgctctggagcggcgggtgccgagtctcgatgacttcgcgggacagagctggagctcgtgggtggagcgggccgacctgcccgcggctgacggggctgagctggaggagagtagcaaaaacacgaagaagttggatgccatgaccctcattaaagaagacatgtccatcttcgggcactgccctgcccatgatgacttctacttggttgtgtgtaaccactgcagccaagtggtgaagcctcaagctttccagaagcactgcgaaagaagacatgggcccctcagcaagctttatggccgggccccacccccacctccagcccctgccagctctcagaaatgccatgtagtgaatgggcagggcccagcttgtagggccccaggttccacgaaaacctcctccagggagaagggccaggggtcccggagccgtggccaccagcctcctgagaagacccagaaggacaacctctgccttttcgtgcctgtggtgaatctggagaagatgtccagtctcccgaagcctgatggacatggaatcagggtggccccaccctctgcttttctcagccagccagggggcctcaccaaggactcccctggaaaacctcccatggctcccccttctaaagaacctcctggcagagagaacatcgagatcatccccagtgaggggtccagtcactgggctgaaggcagccctcctgaaaaggagcccagtgggaccaggctgcccc

SEQ ID NO: 2725 - protein, 246 aa, Homo sapiens
MAALERRVPSLDDFAGQSWSSWVERADLPAADGAELEESSKNTKKLDAMTLIKEDMSIFGHCPAHDDFYLVVCNHCSQVVKPQAFQKHCERRHGPLSKLYGRAPPPPPAPASSQKCHVVNGQGPACRAPGSTKTSSREKGQGSRSRGHQPPEKTQKDNLCLFVPVVNLEKMSSLPKPDGHGIRVAPPSAFLSQPGGLTKDSPGKPPMAPPSKEPPGRENIEIIPSEGSSHWAEGSPPEKEPSGTRL

SEQ ID NO: 2726 - DNA, 4370 bp, Homo sapiens
ggggacctgggagagtatctatttgggatgccacatagtagcagaaaggacccatcgagaaatctcaagaagagactcagggacttatagaaacattggttaaggacggtttcccctttaaatggggaagcaggcccagaaaagagatgatacttacccacaatcacccaactagttagcagtggaaccctaaactgcaccttgaagtgaagggtcccataagaaaggtggatggattcttcttagtggggccatcttagtccagatgcagcaggtgaaggaagatgggcatttgagaatggacccactgaaaggttccccaagtggtcctagcaccaggagcttgtcacggagtgtgggcttcatactgttgagctgcaggccctgcttggggcttctggaaaggggacaacctctgggttgtcttctgggaagaacagtctctggtaaggagaggctggagactctctaaaactggccctgacccttctgagctgtgtttctcctctaggggctgagctggaggagagtagcaaaaacacgaagaagttggatgccatgaccctcattaaagaaggtgggagtcgacacacattagggctgggacccagggcagacaggaccacgctccacttttccaccacactacagaaggaggtggctgcttgaagcagctgtctggggaccctcattttgataggtccgagtcggccggttgttctggctcctgtgacctgtcgttggagatcataatcataggtgattgcccactcacctgaaagcgtataccctttgggactgcttagatcgaactctggaagctggaagcattcagcatggagcttgttatatcagcggggaggtgaagtgccttctgagtgtggggtgggagtgctctccgatcttccagagaaaccctgggatcttcagccccagtgacatgggcttctgtcattgcagacatgtccatcttcgggcactgccctgcccatgatgacttctacttggttgtgtgtaaccactgcagccaagtggtgaagcctcaagctttccagaagcactgcgaaagaagacatgggcccctcagcaagctttatggccgggccccacccccacctccagcccctgccagctctcagaaatgccatgtagtgaatgggcagggcccagcttgtagggccccaggttccacgaaaacctcctccagggagaagggccaggggtcccggagccgtggccaccagcctcctgagaagacccagaaggacaacctctgccttttcgtgcctgtggtgaatctggagaagatgtccagtctcccgaagcctgatggacatggaatcagggtggccccaccctctgcttttctcagccagccagggggcctcaccaaggactcccctggaaaacctcccatggctcccccttctaaagaacctcctggcagagagaacatcgagatcatccccagtgaggggtccagtcactgggctgaaggcagccctcctgaaaaggagcccagtgggaccaggctgccccctaaaacccaccggaagatggctcggaaggagtgcgacctcaacaggcagtgtggggtaataaatccagagaccaaaaagatctgtacccgcctgttgacctgcaagatccactcagtacaccagcgccgggaagtccagggccgggccaaggactttgacgtgctggtggcagagctgaaggccaactcccgcaaaggggagtctcccaaggagaagagcccagggcgcaaggagcaagttctcgagcgcccctcccaggagctcccctcctcagtccaggttgtagcagcggtggctgctcccagcagcaccttctctgttcgtgccaagcagacctacccatactgtgcactgcccaggtacgtctagaatccaacccctacctcacctgggggtacttggcccctaagccatcaggggcccctggaaacaggctcagggagtgtcctggaagaggcactccctcagccctgagtgtgggggtattcctggggctcctgacagtggtgtggaagcaggagactcccctgtttccaaccaggcataccacagcaccccagcctctcggcagtgtgccagatccaacactcaggatatgaacattttcccagctgcctccaacagaccgaaacttgtcactggggagctgaaagggtcacactcctgggcaaggcagccctatgtgtattcactcactggccccttcgcgtgcagaggctatgccggaccccagggagagcctgacttgctgaaggagacacacatgcatctctgcctgtcacacaaggggcagacacgaaacacaggctcagctcacagacaggctcacaggaatatgtgatgcaagaagggggttgagcgagttgactgggctgaccagagctgggtacagttttaactgtgaagattttctggaggaggcggatctgcagcagattatcccctgaggaggaaggggctgggaggtgaaggggctggggagagaatcccttgggagcagtctctctgtctcttactctgtgagctgtgtcgttccctcctgtccttcccttccctctgtcctcttctgattgccctgcagggtgtctgccctggtgccctgctctttgagctcggcaggttcaaggatgcccctactctgaccccacaacagtcacattcccctggcatcccttttggcccttccaggtcccgggcctcctccgagagtgaattggatgatgaaggcccctgtggtggtgatggggacccaggcctgttccccttccccatgccccggggtgggacccaggcctccagcgaagagagtgaggaggaggggacatctgacgacctccacccaccccctgactgccattatgcaacccggcccccacggccacaggcgttctgcacctttgggagccggctggtgagcccaggatgctatgtgtttagccgccggctggaccggttctgctcagcactcagctccatgctggaacggcacctcagcacacacatgtggaagaagatcccaccggcagctgaacctccagctcaccttgtcaactccccgttatctgctcccctgagcccatcctctacaggcacctgcccccgccttccaggtccaaccctgagacctgcctgcccagcctccatgccccccaccaaggacaaccttgtccccagctaccctgcaggctcccccagcgtggcggctgcctgtagccaggcagagtgcatgggcgggagccaggctatcacctcaccactgcctgccaacacgccatccccgtccttcagcaagctgccgccttccaaggccagcaagtcatccaaaggcaaggacggggtggaggtggaggccccttctcgaaagcggaagttatcccctggccctaccactcttaaacggacctgcatcctggagcccactggaaaagggaaaccctctggctgtaggggcctctcggccaaaactaaaacagccctgagcatggggcttaatgggacaatggggccaagagtgaagcgggcagggcccctggactgtcgtggctcccctcatcagctccccacaccagtcaaggcttctcagctggagaaccggggagcagctggacacccagccaaggccctgccaaccaactgcctctctgaggaggaggtggccaagaagcggaaaaacctggccacttattgccggccagtgaaggccaagcactgtcaggctggtgcccctgctgatgtggcctgctctgtgcgccgcaagaagccaggcccggccctggcctttgaggagaagtgctctacactgaaggtaccagccaggctccctgaagattgatgagggtggggcacacagggggtacctgatacagagaagatgctacattggtgtttgtgcagggaaagggaggaaggggaagttgagagagttcctggactgttttctttaggaagaggtaggtcagttcttagcaaagtgactccagctttttgcctggtgaaccttcccctatccctaaccctttcccttgggctgaggagatgcggcacccctccacccctgcttttgctataatcaaagggctacttctttctgaattggctgtgaccctcattccaggtactggagctacctctgttccctgaaggaaagggagtttgagtccctgggtcacagcctaacatgccgagcagcaagtcaaaagcccattaacgagaaagtgcctgcccactgcaacggagccgccagcacctcctcccctccagatccgggccccaggctgctgccgctttttataactttatattatttttttttaagaaaaaaagctcttt

SEQ ID NO: 2727 - protein, 353 aa, Homo sapiens
MPRGGTQASSEESEEEGTSDDLHPPPDCHYATRPPRPQAFCTFGSRLVSPGCYVFSRRLDRFCSALSSMLERHLSTHMWKKIPPAAEPPAHLVNSPLSAPLSPSSTGTCPRLPGPTLRPACPASMPPTKDNLVPSYPAGSPSVAAACSQAECMGGSQAITSPLPANTPSPSFSKLPPSKASKSSKGKDGVEVEAPSRKRKLSPGPTTLKRTCILEPTGKGKPSGCRGLSAKTKTALSMGLNGTMGPRVKRAGPLDCRGSPHQLPTPVKASQLENRGAAGHPAKALPTNCLSEEEVAKKRKNLATYCRPVKAKHCQAGAPADVACSVRRKKPGPALAFEEKCSTLKVPARLPED

SEQ ID NO: 2728 - DNA, 1561 bp, Homo sapiens
cgggaagtccagggccgggccaaggactttgacgtgctggtggcagagctgaaggccaactcccgcaaaggggagtctcccaaggagaagagcccagggcgcaaggagcaagttctcgagcgcccctcccaggagctcccctcctcagtccaggttgtagcagcggtggctgctcccagcagcaccttctctgttcgtgccaagcagacctacccatactgtgcactgcccaggtcccgggcctcctccgagagtgaattggatgatgaaggcccctgtggtggtgatggggacccaggcctgttccccttccccatgccccggggtgggacccaggcctccagcgaagagagtgaggaggaggggacatctgacgacctccacccaccccctgactgccattatgcaacccggcccccacggccacaggcgttctgcacctttgggagccggctggtgagcccaggatgctatgtgtttagccgccggctggaccggttctgctcagcactcagctccatgctggaacggcacctcagcacacacatgtggaagaagatcccaccggcagctgaacctccagctcaccttgtcaactccccgttatctgctcccctgagcccatcctctacaggcacctgcccccgccttccaggtccaaccctgagacctgcctgcccagcctccatgccccccaccaaggacaaccttgtccccagctaccctgcaggctcccccagcgtggcggctgcctgtagccaggcagagtgcatgggcgggagccaggctatcacctcaccactgcctgccaacacgccatccccgtccttcagcaagctgccgccttccaaggccagcaagtcatccaaaggcaaggacggggtggaggtggaggccccttctcgaaagcggaagttatcccctggccctaccactcttaaacggacctgcatcctggagcccactggaaaagggaaaccctctggctgtaggggcctctcggccaaaactaaaacagccctgagcatggggcttaatgggacaatggggccaagagtgaagcgggcagggcccctggactgtcgtggctcccctcatcagctccccacaccagtcaaggcttctcagctggagaaccggggagcagctggacacccagccaaggccctgccaaccaactgcctctctgaggaggaggtggccaagaagcggaaaaacctggccacttattgccggccagtgaaggccaagcactgtcaggctggtgcccctgctgatgtggcctgctctgtgcgccgcaagaagccaggcccggccctggcctttgaggagaagtgctctacactgaagtcaaaagcccattaacgagaaagtgcctgcccactgcaacggagccgccagcacctcctcccctccagatccgggccccaggctgctgccgctttttataactttatattatttttttttaagaaaaaaagctctttaaaatacctcaagactgtctccctgttctgttgctgctatgaaaatataaaaacagaaacatagaaaaggaagg

SEQ ID NO: 2729 - protein, 349 aa, Homo sapiens
MPRGGTQASSEESEEEGTSDDLHPPPDCHYATRPPRPQAFCTFGSRLVSPGCYVFSRRLDRFCSALSSMLERHLSTHMWKKIPPAAEPPAHLVNSPLSAPLSPSSTGTCPRLPGPTLRPACPASMPPTKDNLVPSYPAGSPSVAAACSQAECMGGSQAITSPLPANTPSPSFSKLPPSKASKSSKGKDGVEVEAPSRKRKLSPGPTTLKRTCILEPTGKGKPSGCRGLSAKTKTALSMGLNGTMGPRVKRAGPLDCRGSPHQLPTPVKASQLENRGAAGHPAKALPTNCLSEEEVAKKRKNLATYCRPVKAKHCQAGAPADVACSVRRKKPGPALAFEEKCSTLKSKAH

SEQ ID NO: 2730 - DNA, 1707 bp, Homo sapiens
cagctcacagacaggctcacaggaatatgtgatgcaagaagggggttgagcgagttgactgggctgaccagagctgggtacagttttaactgtgaagattttctggaggaggcggatctgcagcagattatcccctgaggaggaaggggctgggaggtgaaggggctggggagagaatcccttgggagcagtctctctgtctcttactctgtgagctgtgtcgttccctcctgtccttcccttccctctgtcctcttctgattgccctgcagggtgtctgccctggtgccctgctctttgagctcggcaggttcaaggatgcccctactctgaccccacaacagtcacattcccctggcatcccttttggcccttccaggtcccgggcctcctccgagagtgaattggatgatgaaggcccctgtggtggtgatggggacccaggcctgttccccttccccatgccccggggtgggacccaggcctccagcgaagagagtgaggaggaggggacatctgacgacctccacccaccccctgactgccattatgcaacccggcccccacggccacaggcgttctgcacctttgggagccggctggtgagcccaggatgctatgtgtttagccgccggctggaccggttctgctcagcactcagctccatgctggaacggcacctcagcacacacatgtggaagaagatcccaccggcagctgaacctccagctcaccttgtcaactccccgttatctgctcccctgagcccatcctctacaggcacctgcccccgccttccaggtccaaccctgagacctgcctgcccagcctccatgccccccaccaaggacaaccttgtccccagctaccctgcaggctcccccagcgtggcggctgcctgtagccaggcagagtgcatgggcgggagccaggctatcacctcaccactgcctgccaacacgccatccccgtccttcagcaagctgccgccttccaaggccagcaagtcatccaaaggcaaggacggggtggaggtggaggccccttctcgaaagcggaagttatcccctggccctaccactcttaaacggacctgcatcctggagcccactggaaaagggaaaccctctggctgtaggggcctctcggccaaaactaaaacagccctgagcatggggcttaatgggacaatggggccaagagtgaagcgggcagggcccctggactgtcgtggctcccctcatcagctccccacaccagtcaaggcttctcagctggagaaccggggagcagctggacacccagccaaggccctgccaaccaactgcctctctgaggaggaggtggccaagaagcggaaaaacctggccacttattgccggccagtgaaggccaagcactgtcaggctggtgcccctgctgatgtggcctgctctgtgcgccgcaagaagccaggcccggccctggcctttgaggagaagtgctctacactgaagtcaaaagcccattaacgagaaagtgcctgcccactgcaacggagccgccagcacctcctcccctccagatccgggccccaggctgctgccgctttttataactttatattatttttttttaagaaaaaaagctctttaaaatacctcaagactgtctccctgttctgttgctgctatgaaaatataaaaacagaaacatagaaaaggaagg

SEQ ID NO: 2731 - protein, 349 aa, Homo sapiens; identical to SEQ ID NO: 2729

SEQ ID NO: 2732 - DNA, 4788 bp, Homo sapiens
ctctcctgcagccgccaccgcctccgcgatcgcaaacccggaagacgtgttcgggcagctggagtgtacgggcccgcgggccacggccatgcagcccctggagttctgcctctgcatggctgaagccatcctactcttctcacctgaacactccctgttcttcttctgctcccgaaaagcacggatccggctccactgggcagggcagaccctagccatcctctgtgcagctctgggcctgggcttcatcatctccagcaggacccgcagtgagctgcctcatctggtgtcctggcacagctgggtgggagccctgacactgctggccactgctgtccaggcactgtgtgggctctgcctcctttgtccccgggcagccagggtctcaagggtggctcgcctcaagctctaccatctgacatgtggactggtggtctacctgatggctacagtaacggtgcttctgggcatgtactcagtatggttccaggcccagatcaaaggtgcggcctggtacctgtgcctggcactgcccgtctatccagccctggtgatcatgcaccagatttccagatcctacttgccgaggaagaaaatggaaatgtgagttcctgcgaacgctgaatctaggtgggacgcttgccttgaacatcatggttcctttggtgatctataagggatctatttaagaagtggtcaggttttcgcacttcttggctggtccagggactgcagaaaccaaagctgctattgttgaggaataattcagtgggtcaaaatggggagatgtactgggtatgagtggaaggtgatggagagcctgatcctgaagcctctacttgatgagagacagagttttgggtggtgatagtgatgtgctggtggtcatttcttgcttgtgtgcctgatgaaaaactgggttcctgtaagttatgaatggcatccagggatatttgggttacttttaagaaagcagtgtgatgtagtggagagagcccatgggtcttatttatgggatatggtcctcttaggctctgttgtacaaccttaggtacattccatatcttaagaccactgtttcttcatctgtgaaatgtttctaaacaatctctaagtcccttccttctctaatatacagcgtctgtcaggtcgatgtctcagaacactctcccagctgtggaccacgtggaccacttagcagactcagggggtagttctttactctccctttactaccctggagggacagctctgcccttgaggcccttcagaaatttgtgctgatttggtccctgtgccagggcacagggggtcaggcactgtggaaagaagggactcaggtgagggtcttctggactctaagacggtaaaggcactaaagtcactttaaagcttttggagaagcaggagggcattggcttaaccaagccgaaggctgctggctgggctgcctagcccagctaagatcttccttcagcccacctcaggatccgggcttgagggctgcagggcctgcgtgcgctccctcccccgaaatcacttctcagggcaaaggagccccaggcatctcatgctttgcccttcttagggctcaggttcttgccttagcacatagcttctgggagcttttttgaagcatttcataagggccaaggaagtggggcagggcttttctgatccaaagaaaacaaagtttctctggttacccctcttcccttgttatctaagctttcctcagttgtcatctcttcccagctctttggtccaagagggggctgagtttggtgccagctggcaaatgagggctggactctcttccctccagagaccaccccgctccttgctgcagctgaaagtagttccccaggctgccctcggtggtgaggactggatgctagactgctgagctgtggtctgggctcagttgagaagataggatctccctagatcatggcaaggcctgacaacagctgagccaggaaagtgctgctgaggcaagtcgacatagctcacagggaactctgggaagcctgggatgtaggcgctggagctccagttcccaggagcaggggcaggtgttcctagatgttagtgttgtggatgtccttggtcttctgaagattcaggtcctcctctccgggtagcttagaagtaaggaggttggtttgattcaatagtatggggacagaatggggacagcaagggcagaagtgtcctctccacgtaactcattatgcccctcctgggggagattgcatctccaggacaagcatctaaaggaggcccctgctgtgcagaggggtattgttcctgtctctttcattgtcctccctcctctcaaactctccagtgtggtgtgaactcagaagaaacggttactggggctgcatggagaatttcacctgcggtgattttgatccagggactgcatctcctctttcctcatcacagccagtgctgagaggctccttctacctgccgcagggtaggagggccaggcaaagttcaccagcttgctctaagagcaagcaggcaatgccgtaaagcctgagcctgcctgaggtgctgcctcctcccaggtggtgcgggggctggtgggcgggcgggcaggcgtgctgacagccggcagtttgcgtgggctgtgccatctgatgtctattcccagccctgggaggaagggggagtcatttatattctgcaggaggaaggggccccagctgtcgcctttctgaccagcaggcctggagggcaggggcacagagcagagaggagggcactggtggtctcctgcttagcctggtctgactgcagtgtagggaataggtcaccaggaggagcccttcatcctggcaggccggattgtggagggacttccctccccctcttttccatttctccctccatcaccacctgccctcacatcctggggcagcagctggacagccattagacctcagtgccagggcactcttcctccagctgggatctcagtggctcccagctgcatgggctcctgcttgtgtgttccctcctccgccatcctctgttccccgcacctcccttattctgctcatgtctggggtattcacttggctcctcagcaaggaagcaaacgccttggaggagaagcacatggttgcccttttgtccttgctccctggctagggaaagctgctagtggtcagcctgttttgcctttttttaaaaaaaaaaaaaaagccagggcagggtgcttagattttaaaaatttgcgtgtcatttgcacaaattttcatatcaagctaagtcctgattccaaatttgattatattccaaatttgattatattccaaatttgattatattcagattcaaccttgaggacattagaaatatagatggcttctgtatccaaatctgaatggaaatgagattacccttctgggttcagatacccctcccaagcccccgtcttttctgtaaccacccctcctctgagccccatcatggctggggttggtatggaatgggagcagctctgtatctggggaagtcctccagcctcaccttcttggctcttaagtggtaggctgttaccacttgccagcctgggcctcctctctccccaccctttcacaaggcaggctgcccttccgcactcactggcccatcccttctttctcatcgtcccacccttccacccccgtgcatggctgctgtaggtctggtttttttggtttttgttttttttaagacggagtctcactctgccgccaggctggagtgcagtggcagaatcttggctcactgcaacctctgcctcccaggttcaagcgattctcctgcctcagcctcccgagtagctgggactacaggcacgtgccaccatatccagctaatttttgtatttttagtagagatggggtttcaccatgttggccaggatctcttgacctcgtgatctgcccgcctcggcctcccaaagtgctgtgattacaggcgtgagccaccgtgcctagccaggtcttgttttgaaaacctcactgtgggagattcaggcatcctccctaagccagctggccgctgtgctaaagcctgttcagagttaataataatcattagctgaatggtgctggggcctttcagcttcagatctctaagcacttgcaggctgagtcagtcagccctcaccttccccctccttcctgggctgcagagtgtaacagaatgggaaggcactgtgggaaggaagtcaggaatcttgctgctagccacgccttgcagtgacttctcgtctgggagtgggcactgagtcctctcagtaaactaataagacttgcacctgacaaaggtcaagatatgtagggaacacagtgtatgctaggctgagacctatggtggtggcaggggtggctgttgagcctgaacttccagtactcctgcccttccttctgtttacctggcttggcctacagggggcacccctggtcttgatgcctcaagcccagcatttctgggtcccctctgcaagctcagagagcagggaggcttctggtagtgctcttgatgctcctgtgtctggttggcacaaagatcctgtgtaacatgaaatgaaaggtgcatcagcttgggggctgggaaacctgcagtatgggtttactccgtccctatcactggtgtggctgtgggcaaaccacttattgcctgacctacctcacagggatgttgtgagggtttgatgagagaatgaatgttaataggaattggaaaattcaaagcattaaacacatgtaaacaggtggtattatt

SEQ ID NO: 2733 - protein, 172 aa, Homo sapiens
MQPLEFCLCMAEAILLFSPEHSLFFFCSRKARIRLHWAGQTLAILCAALGLGFIISSRTRSELPHLVSWHSWVGALTLLATAVQALCGLCLLCPRAARVSRVARLKLYHLTCGLVVYLMATVTVLLGMYSVWFQAQIKGAAWYLCLALPVYPALVIMHQISRSYLPRKKMEM

SEQ ID NO: 2734 - DNA, 5009 bp, Homo sapiens
gatcgcaaacccggaagacgtgttcgggcagctggagtgtacgggcccgcgggccacggccatgcagcccctggaggtaggtctggttcccgctccagctggggagccgagactgacccgctggctgcggagaggcagtgggatcttggcgcacctggtagctttgggcttcaccatctttctgacagcgctgtcccggccaggaaccagtcttttctcctggcaccctgtattcatggccttggcggatgtatgagagcacctcctttttctcaggcctccaagccagacatgaggcttactggctctctcctatgttcacagttctgcctctgcatggctgaagccatcctactcttctcacctgaacactccctgttcttcttctgctcccgaaaagcacggatccggctccactgggcagggcagaccctagccatcctctgtgcagctctgggcctgggcttcatcatctccagcaggacccgcagtgagctgcctcatctggtgtcctggcacagctgggtgggagccctgacactgctggccactgctgtccaggcactgtgtgggctctgcctcctttgtccccgggcagccagggtctcaagggtggctcgcctcaagctctaccatctgacatgtggactggtggtctacctgatggctacagtaacggtgcttctgggcatgtactcagtatggttccaggcccagatcaaaggtgcggcctggtacctgtgcctggcactgcccgtctatccagccctggtgatcatgcaccagatttccagatcctacttgccgaggaagaaaatggaaatgtgagttcctgcgaacgctgaatctaggtgggacgcttgccttgaacatcatggttcctttggtgatctataagggatctatttaagaagtggtcaggttttcgcacttcttggctggtccagggactgcagaaaccaaagctgctattgttgaggaataattcagtgggtcaaaatggggagatgtactgggtatgagtggaaggtgatggagagcctgatcctgaagcctctacttgatgagagacagagttttgggtggtgatagtgatgtgctggtggtcatttcttgcttgtgtgcctgatgaaaaactgggttcctgtaagttatgaatggcatccagggatatttgggttacttttaagaaagcagtgtgatgtagtggagagagcccatgggtcttatttatgggatatggtcctcttaggctctgttgtacaaccttaggtacattccatatcttaagaccactgtttcttcatctgtgaaatgtttctaaacaatctctaagtcccttccttctctaatatacagcgtctgtcaggtcgatgtctcagaacactctcccagctgtggaccacgtggaccacttagcagactcagggggtagttctttactctccctttactaccctggagggacagctctgcccttgaggcccttcagaaatttgtgctgatttggtccctgtgccagggcacagggggtcaggcactgtggaaagaagggactcaggtgagggtcttctggactctaagacggtaaaggcactaaagtcactttaaagcttttggagaagcaggagggcattggcttaaccaagccgaaggctgctggctgggctgcctagcccagctaagatcttccttcagcccacctcaggatccgggcttgagggctgcagggcctgcgtgcgctccctcccccgaaatcacttctcagggcaaaggagccccaggcatctcatgctttgcccttcttagggctcaggttcttgccttagcacatagcttctgggagcttttttgaagcatttcataagggccaaggaagtggggcagggcttttctgatccaaagaaaacaaagtttctctggttacccctcttcccttgttatctaagctttcctcagttgtcatctcttcccagctctttggtccaagagggggctgagtttggtgccagctggcaaatgagggctggactctcttccctccagagaccaccccgctccttgctgcagctgaaagtagttccccaggctgccctcggtggtgaggactggatgctagactgctgagctgtggtctgggctcagttgagaagataggatctccctagatcatggcaaggcctgacaacagctgagccaggaaagtgctgctgaggcaagtcgacatagctcacagggaactctgggaagcctgggatgtaggcgctggagctccagttcccaggagcaggggcaggtgttcctagatgttagtgttgtggatgtccttggtcttctgaagattcaggtcctcctctccgggtagcttagaagtaaggaggttggtttgattcaatagtatggggacagaatggggacagcaagggcagaagtgtcctctccacgtaactcattatgcccctcctgggggagattgcatctccaggacaagcatctaaaggaggcccctgctgtgcagaggggtattgttcctgtctctttcattgtcctccctcctctcaaactctccagtgtggtgtgaactcagaagaaacggttactggggctgcatggagaatttcacctgcggtgattttgatccagggactgcatctcctctttcctcatcacagccagtgctgagaggctccttctacctgccgcagggtaggagggccaggcaaagttcaccagcttgctctaagagcaagcaggcaatgccgtaaagcctgagcctgcctgaggtgctgcctcctcccaggtggtgcgggggctggtgggcgggcgggcaggcgtgctgacagccggcagtttgcgtgggctgtgccatctgatgtctattcccagccctgggaggaagggggagtcatttatattctgcaggaggaaggggccccagctgtcgcctttctgaccagcaggcctggagggcaggggcacagagcagagaggagggcactggtggtctcctgcttagcctggtctgactgcagtgtagggaataggtcaccaggaggagcccttcatcctggcaggccggattgtggagggacttccctccccctcttttccatttctccctccatcaccacctgccctcacatcctggggcagcagctggacagccattagacctcagtgccagggcactcttcctccagctgggatctcagtggctcccagctgcatgggctcctgcttgtgtgttccctcctccgccatcctctgttccccgcacctcccttattctgctcatgtctggggtattcacttggctcctcagcaaggaagcaaacgccttggaggagaagcacatggttgcccttttgtccttgctccctggctagggaaagctgctagtggtcagcctgttttgcctttttttaaaaaaaaaaaaaaagccagggcagggtgcttagattttaaaaatttgcgtgtcatttgcacaaattttcatatcaagctaagtcctgattccaaatttgattatattccaaatttgattatattccaaatttgattatattcagattcaaccttgaggacattagaaatatagatggcttctgtatccaaatctgaatggaaatgagattacccttctgggttcagatacccctcccaagcccccgtcttttctgtaaccacccctcctctgagccccatcatggctggggttggtatggaatgggagcagctctgtatctggggaagtcctccagcctcaccttcttggctcttaagtggtaggctgttaccacttgccagcctgggcctcctctctccccaccctttcacaaggcaggctgcccttccgcactcactggcccatcccttctttctcatcgtcccacccttccacccccgtgcatggctgctgtaggtctggtttttttggtttttgttttttttaagacggagtctcactctgccgccaggctggagtgcagtggcagaatcttggctcactgcaacctctgcctcccaggttcaagcgattctcctgcctcagcctcccgagtagctgggactacaggcacgtgccaccatatccagctaatttttgtatttttagtagagatggggtttcaccatgttggccaggatctcttgacctcgtgatctgcccgcctcggcctcccaaagtgctgtgattacaggcgtgagccaccgtgcctagccaggtcttgttttgaaaacctcactgtgggagattcaggcatcctccctaagccagctggccgctgtgctaaagcctgttcagagttaataataatcattagctgaatggtgctggggcctttcagcttcagatctctaagcacttgcaggctgagtcagtcagccctcaccttccccctccttcctgggctgcagagtgtaacagaatgggaaggcactgtgggaaggaagtcaggaatcttgctgctagccacgccttgcagtgacttctcgtctgggagtgggcactgagtcctctcagtaaactaataagacttgcacctgacaaaggtcaagatatgtagggaacacagtgtatgctaggctgagacctatggtggtggcaggggtggctgttgagcctgaacttccagtactcctgcccttccttctgtttacctggcttggcctacagggggcacccctggtcttgatgcctcaagcccagcatttctgggtcccctctgcaagctcagagagcagggaggcttctggtagtgctcttgatgctcctgtgtctggttggcacaaagatcctgtgtaacatgaaatgaaaggtgcatcagcttgggggctgggaaacctgcagtatgggtttactccgtccctatcactggtgtggctgtgggcaaaccacttattgcctgacctacctcacagggatgttgtgagggtttgatgagagaatgaatgttaataggaattggaaaattcaaagcattaaacacatgtaaacaggtggtattatt

SEQ ID NO: 2735 - protein, 64 aa, Homo sapiens
MQPLEVGLVPAPAGEPRLTRWLRRGSGILAHLVALGFTIFLTALSRPGTSLFSWHPVFMALADV

SEQ ID NO: 2736 - DNA, 4929 bp, Homo sapiens
cgcaaacccggaagacgtgttcgggcagctggagtgtacgggcccgcgggccacggccatgcagcccctggaggtaggtctggttcccgctccagctggggagccgagactgacccgctggctgcggagaggcagtgggatcttggcgcacctggtagctttgggcttcaccatctttctgacagcgctgtcccggccaggaaccagtcttttctcctggcaccctgtattcatggccttggcgttctgcctctgcatggctgaagccatcctactcttctcacctgaacactccctgttcttcttctgctcccgaaaagcacggatccggctccactgggcagggcagaccctagccatcctctgtgcagctctgggcctgggcttcatcatctccagcaggacccgcagtgagctgcctcatctggtgtcctggcacagctgggtgggagccctgacactgctggccactgctgtccaggcactgtgtgggctctgcctcctttgtccccgggcagccagggtctcaagggtggctcgcctcaagctctaccatctgacatgtggactggtggtctacctgatggctacagtaacggtgcttctgggcatgtactcagtatggttccaggcccagatcaaaggtgcggcctggtacctgtgcctggcactgcccgtctatccagccctggtgatcatgcaccagatttccagatcctacttgccgaggaagaaaatggaaatgtgagttcctgcgaacgctgaatctaggtgggacgcttgccttgaacatcatggttcctttggtgatctataagggatctatttaagaagtggtcaggttttcgcacttcttggctggtccagggactgcagaaaccaaagctgctattgttgaggaataattcagtgggtcaaaatggggagatgtactgggtatgagtggaaggtgatggagagcctgatcctgaagcctctacttgatgagagacagagttttgggtggtgatagtgatgtgctggtggtcatttcttgcttgtgtgcctgatgaaaaactgggttcctgtaagttatgaatggcatccagggatatttgggttacttttaagaaagcagtgtgatgtagtggagagagcccatgggtcttatttatgggatatggtcctcttaggctctgttgtacaaccttaggtacattccatatcttaagaccactgtttcttcatctgtgaaatgtttctaaacaatctctaagtcccttccttctctaatatacagcgtctgtcaggtcgatgtctcagaacactctcccagctgtggaccacgtggaccacttagcagactcagggggtagttctttactctccctttactaccctggagggacagctctgcccttgaggcccttcagaaatttgtgctgatttggtccctgtgccagggcacagggggtcaggcactgtggaaagaagggactcaggtgagggtcttctggactctaagacggtaaaggcactaaagtcactttaaagcttttggagaagcaggagggcattggcttaaccaagccgaaggctgctggctgggctgcctagcccagctaagatcttccttcagcccacctcaggatccgggcttgagggctgcagggcctgcgtgcgctccctcccccgaaatcacttctcagggcaaaggagccccaggcatctcatgctttgcccttcttagggctcaggttcttgccttagcacatagcttctgggagcttttttgaagcatttcataagggccaaggaagtggggcagggcttttctgatccaaagaaaacaaagtttctctggttacccctcttcccttgttatctaagctttcctcagttgtcatctcttcccagctctttggtccaagagggggctgagtttggtgccagctggcaaatgagggctggactctcttccctccagagaccaccccgctccttgctgcagctgaaagtagttccccaggctgccctcggtggtgaggactggatgctagactgctgagctgtggtctgggctcagttgagaagataggatctccctagatcatggcaaggcctgacaacagctgagccaggaaagtgctgctgaggcaagtcgacatagctcacagggaactctgggaagcctgggatgtaggcgctggagctccagttcccaggagcaggggcaggtgttcctagatgttagtgttgtggatgtccttggtcttctgaagattcaggtcctcctctccgggtagcttagaagtaaggaggttggtttgattcaatagtatggggacagaatggggacagcaagggcagaagtgtcctctccacgtaactcattatgcccctcctgggggagattgcatctccaggacaagcatctaaaggaggcccctgctgtgcagaggggtattgttcctgtctctttcattgtcctccctcctctcaaactctccagtgtggtgtgaactcagaagaaacggttactggggctgcatggagaatttcacctgcggtgattttgatccagggactgcatctcctctttcctcatcacagccagtgctgagaggctccttctacctgccgcagggtaggagggccaggcaaagttcaccagcttgctctaagagcaagcaggcaatgccgtaaagcctgagcctgcctgaggtgctgcctcctcccaggtggtgcgggggctggtgggcgggcgggcaggcgtgctgacagccggcagtttgcgtgggctgtgccatctgatgtctattcccagccctgggaggaagggggagtcatttatattctgcaggaggaaggggccccagctgtcgcctttctgaccagcaggcctggagggcaggggcacagagcagagaggagggcactggtggtctcctgcttagcctggtctgactgcagtgtagggaataggtcaccaggaggagcccttcatcctggcaggccggattgtggagggacttccctccccctcttttccatttctccctccatcaccacctgccctcacatcctggggcagcagctggacagccattagacctcagtgccagggcactcttcctccagctgggatctcagtggctcccagctgcatgggctcctgcttgtgtgttccctcctccgccatcctctgttccccgcacctcccttattctgctcatgtctggggtattcacttggctcctcagcaaggaagcaaacgccttggaggagaagcacatggttgcccttttgtccttgctccctggctagggaaagctgctagtggtcagcctgttttgcctttttttaaaaaaaaaaaaaaagccagggcagggtgcttagattttaaaaatttgcgtgtcatttgcacaaattttcatatcaagctaagtcctgattccaaatttgattatattccaaatttgattatattccaaatttgattatattcagattcaaccttgaggacattagaaatatagatggcttctgtatccaaatctgaatggaaatgagattacccttctgggttcagatacccctcccaagcccccgtcttttctgtaaccacccctcctctgagccccatcatggctggggttggtatggaatgggagcagctctgtatctggggaagtcctccagcctcaccttcttggctcttaagtggtaggctgttaccacttgccagcctgggcctcctctctccccaccctttcacaaggcaggctgcccttccgcactcactggcccatcccttctttctcatcgtcccacccttccacccccgtgcatggctgctgtaggtctggtttttttggtttttgttttttttaagacggagtctcactctgccgccaggctggagtgcagtggcagaatcttggctcactgcaacctctgcctcccaggttcaagcgattctcctgcctcagcctcccgagtagctgggactacaggcacgtgccaccatatccagctaatttttgtatttttagtagagatggggtttcaccatgttggccaggatctcttgacctcgtgatctgcccgcctcggcctcccaaagtgctgtgattacaggcgtgagccaccgtgcctagccaggtcttgttttgaaaacctcactgtgggagattcaggcatcctccctaagccagctggccgctgtgctaaagcctgttcagagttaataataatcattagctgaatggtgctggggcctttcagcttcagatctctaagcacttgcaggctgagtcagtcagccctcaccttccccctccttcctgggctgcagagtgtaacagaatgggaaggcactgtgggaaggaagtcaggaatcttgctgctagccacgccttgcagtgacttctcgtctgggagtgggcactgagtcctctcagtaaactaataagacttgcacctgacaaaggtcaagatatgtagggaacacagtgtatgctaggctgagacctatggtggtggcaggggtggctgttgagcctgaacttccagtactcctgcccttccttctgtttacctggcttggcctacagggggcacccctggtcttgatgcctcaagcccagcatttctgggtcccctctgcaagctcagagagcagggaggcttctggtagtgctcttgatgctcctgtgtctggttggcacaaagatcctgtgtaacatgaaatgaaaggtgcatcagcttgggggctgggaaacctgcagtatgggtttactccgtccctatcactggtgtggctgtgggcaaaccacttattgcctgacctacctcacagggatgttgtgagggtttgatgagagaatgaatgttaataggaattggaaaattcaaagcattaaacacatgtaaacaggtggtattatt

SEQ ID NO: 2737 - protein, 229 aa, Homo sapiens; identical to SEQ ID NO: 79

SEQ ID NO: 2738 - DNA, 723 bp, Homo sapiens
gcaaacccggaagacgtgttcgggcagctggagtgtacgggcccgcgggccacggccatgcagcccctggaggtaggtctggttcccgctccagctggggagccgagactgacccgctggctgcggagaggcagtgggatcttggcgcacctggtagctttgggcttcaccatctttctgacagcgctgtcccggccaggaaccaaaacaggtcccctgatggaggatagaagtgaaggaggccgggcgcggtgggtcatgcctgaaatcccagcactttgggaggccgacgcgggtggatcacttgaggtcttttctcctggcaccctgtattcatggccttggcgttctgcctctgcatggctgaagccatcctactcttctcacctgaacactccctgttcttcttctgctcccgaaaagcacggatccggctccactgggcagggcagaccctagccatcctctgtgcagctctgggcctgggcttcatcatctccagcaggacccgcagtgagctgcctcatctggtgtcctggcacagctgggtgggagccctgacactgctggccactgctgtccaggcactgtgtgggctctgcctcctttgtccccgggcagccagggtctcaagggtggctcgcctcaagctctaccatctgacatgtggactggtggtctacctgatggctacagtaacggtgcttctgggcatgtactcag

SEQ ID NO: 2739 - protein, 133 aa, Homo sapiens
MQPLEVGLVPAPAGEPRLTRWLRRGSGILAHLVALGFTIFLTALSRPGTKTGPLMEDRSEGGRARWVMPEIPALWEADAGGSLEVFSPGTLYSWPWRSASAWLKPSYSSHLNTPCSSSAPEKHGSGSTGQGRP

SEQ ID NO: 2740 - DNA, 577 bp, Homo sapiens
gtgtacgggcccgcgggccacggccatgcagcccctggaggtaggtctggttcccgctccagctggggagccgagactgacccgctggctgcggagaggcagtgggatcttggcgcacctggtagctttgggcttcaccatctttctgacagcgctgtcccggccaggaaccaaaacaggtcccctgatggaggatagaagtgaaggaggccgggcgcggtgggtcatgcctgaaatcccagcactttgggaggccgacgcgggtggatcacttgaggtcttttctcctggcaccctgtattcatggccttggcggatgtatgagagcacctcctttttctcaggcctccaagccagacatgaggcttactggctctctcctatgttcacagttctgcctctgcatggctgaagccatcctactcttctcacctgaacactccctgttcttcttctgctcccgaaaagcacggatccggctccactgggcagggcagaccctagccatcctctgtgcagctctgggcctgggcttcatcatctccagcaggacccgcagtgagctgcctcatctggt

SEQ ID NO: 2741 - protein, 128 aa, Homo sapiens
MQPLEVGLVPAPAGEPRLTRWLRRGSGILAHLVALGFTIFLTALSRPGTKTGPLMEDRSEGGRARWVMPEIPALWEADAGGSLEVFSPGTLYSWPWRMYESTSFFSGLQARHEAYWLSPMFTVLPLHG

SEQ ID NO: 2742 - DNA, 2013 bp, Homo sapiens
caaggcctgacaacagctgagccaggaaagtgctgctgaggcaagtcgacatagctcacagggaactctgggaagcctgggatgtaggcgctggagctccagttcccaggagcaggggcaggtgttcctagatgttagtgttgtggatgtccttggtcttctgaagattcaggtcctcctctccgggtagcttagaagtaaggaggttggtttgattcaatagtatggggacagaatggggacagcaagggcagaagtgtcctctccacgtaactcattatgcccctcctgggggagattgcatctccaggacaagcatctaaaggaggcccctgctgtgcagaggggtattgttcctgtctctttcattgtcctccctcctctcaaactctccagtgtggtgtgaactcagaagaaacggttactggggctgcatggagaatttcacctgcggtgattttgatccagggactgcatctcctctttcctcatcacagccagtgctgagaggctccttctacctgccgcagggtaggagggccaggcaaagttcaccagcttgctctaagagcaagcaggcaatgccgtaaagcctgagcctgcctgaggtgctgcctcctcccaggtggtgcgggggctggtgggcgggcgggcaggcgtgctgacagccggcagtttgcgtgggctgtgccatctgatgtctattcccagccctgggaggaagggggagtcatttatattctgcaggaggaaggggccccagctcctcaccttcttggctcttaagtggtaggctgttaccacttgccagcctgggcctcctctctccccaccctttcacaaggcaggctgcccttccgcactcactggcccatcccttctttctcatcgtcccacccttccacccccgtgcatggctgctgtaggtctggtttttttggtttttgttttttttaagacggagtctcactctgccgccaggctggagtgcagtggcagaatcttggctcactgcaacctctgcctcccaggttcaagcgattctcctgcctcagcctcccgagtagctgggactacaggcacgtgccaccatatccagctaatttttgtatttttagtagagatggggtttcaccatgttggccaggatctcttgacctcgtgatctgcccgcctcggcctcccaaagtgctgtgattacaggcgtgagccaccgtgcctagccaggtcttgttttgaaaacctcactgtgggagattcaggcatcctccctaagccagctggccgctgtgctaaagcctgttcagagttaataataatcattagctgaatggtgctggggcctttcagcttcagatctctaagcacttgcaggctgagtcagtcagccctcaccttccccctccttcctgggctgcagagtgtaacagaatgggaaggcactgtgggaaggaagtcaggaatcttgctgctagccacgccttgcagtgacttctcgtctgggagtgggcactgagtcctctcagtaaactaataagacttgcacctgacaaaggtcaagatatgtagggaacacagtgtatgctaggctgagacctatggtggtggcaggggtggctgttgagcctgaacttccagtactcctgcccttccttctgtttacctggcttggcctacagggggcacccctggtcttgatgcctcaagcccagcatttctgggtcccctctgcaagctcagagagcagggaggcttctggtagtgctcttgatgctcctgtgtctggttggcacaaagatcctgtgtaacatgaaatgaaaggtgcatcagcttgggggctgggaaacctgcagtatgggtttactccgtccctatcactggtgtggctgtgggcaaaccacttattgcctgacctacctcacagggatgttgtgagggtttgatgagagaatgaatgttaataggaattggaaaattcaaagcattaaacacatgtaaacaggtggtattatt

SEQ ID NO: 2743 - protein, 31 aa, Homo sapiens
MSIPSPGRKGESFIFCRRKGPQLLTFLALKW

SEQ ID NO: 2744 - DNA, 5115 bp, Homo sapiens
gctccctccgctgggatcgctgcgcctccggctccccgcaccgatccgcgccaggcctgcggacctggaggcagcgaccgcggtcggtgggctccggcgggctcagcggtcgaggcggtggcagggtgagcggagcggggccccgcaagtccccgggaggcgacggtgccgggcgcgggcccctgcgtaaggtgggcgcagtgacaggccggccggtgaggcgccgccgggagaggccgcgacggagctcccagaccggccatgggctgagacacgtcctcgccgagcagtgacccttccgtaccccaccagaacatgcccgggtgacctcctcccagatcttccttgtggccttcctcgcccactccagtgacactatgcacccccaccgtgacccgagaggcctctggctcctgctgccgtccttgtccctgctgctttttgaggtggccagagctggccgagccgtggttagctgtcctgccgcctgcttgtgcgccagcaacatcctcagctgctccaagcagcagctgcccaatgtgccccattccttgcccagttacacagcactactggacctcagtcacaacaacctgagccgcctgcgggccgagtggacccccacgcgcctgacccaactgcactccctgctgctgagccacaaccacctgaacttcatctcctctgaggccttttccccggtacccaacctgcgctacctggacctctcctccaaccagctgcgtacactggatgagttcctgttcagtgacctgcaagtactggaggtgctgctgctctacaataaccacatcatggcggtggaccggtgcgccttcgatgacatggcccagctgcagaaactctacttgagccagaaccagatctctcgcttccctctggaactggtcaaggaaggagccaagctacccaaactaacgctcctggatctctcttctaacaagctgaagaacttgccattgcctgacctgcagaagctgccggcctggatcaagaatgggctgtacctacataacaaccccctgaactgcgactgtgagctctaccagctgttttcacactggcagtatcggcagctgagctccgtgatggactttcaagaggatctgtactgcatgaactccaagaagctgcacaatgtcttcaacctgagtttcctcaactgtggcgagtacaaggagcgtgcctgggaggcccacctgggtgacaccttgatcatcaagtgtgacaccaagcagcaagggatgaccaaggtgtgggtgacaccaagtaatgaacgggtgctagatgaggtgaccaatggcacagtgagtgtgtctaaggatggcagtcttcttttccagcaggtgcaggtcgaggacggtggtgtgtatacctgctatgccatgggagagactttcaatgagacactgtctgtggaattgaaagtgcacaatttcaccttgcacggacaccatgacaccctcaacacagcctataccaccctagtgggctgtatccttagtgtggtcctggtcctcatatacctatacctcaccccttgccgctgctggtgccggggtgtagagaagccttccagccatcaaggagacagcctcagctcttccatgcttagtaccacacccaaccatgatcctatggctggtggggacaaagatgatggttttgaccggcgggtggctttcctggaacctgctggacctgggcagggtcaaaacggcaagctcaagccaggcaacaccctgccagtgcctgaggccacaggcaagggccaacggaggatgtcggatccagaatcagtcagctcggtcttctctgatacgcccattgtggtgtgagcaggatgggttggtggggagattctgccccaggagaggtaatgcacccctgaaggatatgaggggatggaagagagggctggctgcccaagggaatggattcctcctgacctcaagggaattggtcccaggtacaacagagagcaagaccccaaacagggcgtggctgccacgattttcaaatgggggtatattaatcctcaggcaaatgctacacccgtacccaaagccctgccaattctcagtgtggtagaggaagagaagcatgtctgagttggatgggaatgaggaaggagtgaggggaagaacagattccctaaactttcatgaggtcatccctagctccttaagagaaaaacatttagaaaaaaaaattttttctatctctgcccacccacacctgtgatgttgtgtgtgttgggggagcttccacaggagccacactggggaaaagctgtagtatcttctttgtttagcaagtcaaacttcacagctggggaagttgaaaacctttggaaaatgagtcaggaaaaggctgagacctcaatcggtaacaattccccaaagctgttgtaagactttgcattaaagccttcctttttcctgatgtgccctgggtggatggatctttgcaggagcctggcctgctgccttttagttacaacagcaatgtgggatgtggtatctgtgccttgtcctgggaccaatggcacagagggttatagcatgaactgaagggtccatgtcacagcataggtgccagcacgaaacttgtagatggggggtgaattccagataggctaattccctggttggtgaaacccttggttagtatttgattcccagcatctgtgtgtcaggccagagtgggggctgctgaaggcagagcttttatggatgcctgccacagacgtggtacatgggcccacttcacgatagaaggatgaaggtaaatcagcctctattatgtagcatccagctggacctagctgattctcaatgtatgccatctcttcatccagtctccttatcaagctcaggtgggattctgaattttccctaatatgctgctctgtaaagggaggagtccaagaaagcctggccccagctggcttagagtaggcttggcgatagtgaaaatccagtatatatctcctctgtgtggacaaggttgccttgctcctctcagagataccacctctgctgcaaagtcaaagcatggggttttgacatcagaagggttggaattgggtggtctctaccccagaatggcaatttggagtgcagcttcaagttctgccctctccacagattccaggcaatcctgaagcagagataatcagtagtactaaactttcagaaggggagttctgccaccccattcctccatcgagaggtctttgcagttgtggttgtgaggccagaggaacttaagaagaatgagctcaacattccattccatccaaggttgcagaatactttgagtatggagatgaccgatccctttaacctttccctttgactacactgcatgccctgtgagtggctgctctgagctttggcgggggatgagcagggtgaaggtgaaaatgttctctgatgttggtttttcttagggtctcttctctcccacgtttctagtccattggaagttctccagatcctctagatttctgacctctttttacattctaagaggtgtcatttacctgtgggtgaggggcttggagggcctgactattaagcttcctattatgattggggaaggggactcaacatcttccccttgtctggtcctgggaactcaagactgctgtccatcctttattagtaacctagttttgttgagagagaggtgcagcatttccctcaagtacctgcatgctcataggtatgcatgcttataggtatgcatgcacaccagcaccttgacttccaccaggacagtgaatctgtagtccccattaatgatactctcagaatggtctccaccaatgtgcacaacttcatgcacacaattgtattcctctttaggagagacagtgaccatgccaggctcttcaaatacacactcctgtattttcatttctgaactccctgaagcttcacccacatctccatggcactgaatcacttttctgcccaggctggagttagaagaaccatgggttgaaggccttgggagaagaggtggtaaggagctacctggttctttggactcctcagaaacctcccgtgaagactatatatatgagcaatatatgagcaattaagatagaactaggtcattgaaggactcagaaggaaactggcaaggggctaagtagctgtgagctgctcttcctgttaactgtcctcaggagagaaaagttgtcttgatttattccagagactcctgagaattttgttactggagctataggaactaggactccctcctcagactcatcaggaaatctgggaaaatctcatctccatgctgcagtctccccgcttggcaccatctagggctctgaagatctttaaagtgagcgttaaatgaagcaggccttctggggcatcgtgatggagctcctgaggactgggagggccgttttcttcataattcctacccagtttagggaatgagaaaaggccctgtggctcttaagtctcctgactatatccactagtttggccttgagtttgagacacctggtagatgtacctggctgccctaccaagagatttgatttgtttcttcccgtggtttcaggtgatagaacccaaaggtagctttttaattggagaattgaataatcagcatatgtaagcgcactagaaccctgtgttgaaaactgccaggtgtgggtataagaaaaggccgagagatcaccacctcctcttaccctaccccacacccataaaccagacatgtctcccaggaagcaggtgtccctggagacagaggatgacagggctctacaatctgtgtaattattattattattattattttgtatttatggggcccaagaaaggggccaggagagggtacaccccagctggggagagcaaagcagatggatccagttttctgtgtgttcttacctctgtacttcctcgtagctctgctgacaaagcaagcaggcctcccgtgtccaagaccccattcctcccacttgtgtacacctaggctggcaaatcttggagcctctgggctctgaaaactagacaatgatcattaaacctggcttgagtctctgttctggcacaa

SEQ ID NO: 2745 - protein, 493 aa, Homo sapiens; identical to SEQ ID NO: 81

SEQ ID NO: 2746 - DNA, 2465 bp, Homo sapiens
gctccctccgctgggatcgctgcgcctccggctccccgcaccgatccgcgccaggcctgcggacctggaggcagcgaccgcggtcggtgggctccggcgggctcagcggtcgaggcggtggcagggtgagcggagcggggccccgcaagtccccgggaggcgacggtgccgggcgcgggcccctgcgtaaggtgggcgcagtgacaggccggccggtgaggcgccgccgggagaggccgcgacggagctcccagaccggccatgggctgagacacgtcctcgccgagcagtgacccttccgtaccccaccagaacatgcccgggtgacctcctcccagatcttccttgtggccttcctcgcccactccagtgacactatgcacccccaccgtgacccgagaggcctctggctcctgctgccgtccttgtccctgctgctttttgaggtggccagagctggccgagccgtggttagctgtcctgccgcctgcttgtgcgccagcaacatcctcagctgctccaagcagcagctgcccaatgtgccccattccttgcccagttacacagcactactggacctcagtcacaacaacctgagccgcctgcgggccgagtggacccccacgcgcctgacccaactgcactccctgctgctgagccacaaccacctgaacttcatctcctctgaggccttttccccggtacccaacctgcgctacctggacctctcctccaaccagctgcgtacactggatgagttcctgttcagtgacctgcaagtactggaggtgctgctgctctacaataaccacatcatggcggtggaccggtgcgccttcgatgacatggcccagctgcagaaactctacttgagccagaaccagatctctcgcttccctctggaactggtcaaggaaggagccaagctacccaaactaacgctcctggatctctcttctaacaagctgaagaacttgccattgcctgacctgcagaagctgccggcctggatcaagaatgggctgtacctacataacaaccccctgaactgcgactgtgagctctaccagctgttttcacactggcagtatcggcagctgagctccgtgatggactttcaagaggatctgtactgcatgaactccaagaagctgcacaatgtcttcaacctgagtttcctcaactgtggcgagtacaaggagcgtgcctgggaggcccacctgggtgacaccttgatcatcaagtgtgacaccaagcagcaagggatgaccaaggtgtgggtgacaccaagtaatgaacgggtgctagatgaggtgaccaatggcacagtgagtgtgtctaaggatggcagtcttcttttccagcaggtgcaggtcgaggacggtggtgtgtatacctgctatgccatgggagagactttcaatgagacactgtctgtggaattgaaagtgcacaatttcaccttgcacggacaccatgacaccctcaacacagcctataccaccctagtgggctgtatccttagtgtggtcctggtcctcatatacctatacctcaccccttgccgctgctggtgccggggtgtagagaagccttccagccatcaaggagacagcctcagctcttccatgcttagtaccacacccaaccatgatcctatggctggtggggacaaagatgatggttttgaccggcgggtggctttcctggaacctgctggacctgggcagggtcaaaacggcaagctcaagccaggcaacaccctgccagtgcctgaggccacaggcaagggccaacggaggatgtcggatccagaatcagtcagctcggtcttctctgatacgcccattgtggtgtgagcaggatgggttggtggggagattctgccccaggagaggtaatgcacccctgaaggatatgaggggatggaagagagggctggctgcccaagggaatggattcctcctgacctcaagggaattggtcccaggtacaacagagagcaagaccccaaacagggcgtggctgccacgattttcaaatgggggtatattaatcctcaggcaaatgctacacccgtacccaaagccctgccaattctcagtgtggtagaggaagagaagcatgtctgagttggatgggaatgaggaaggagtgaggggaagaacagattccctaaactttcatgaggtcatccctagctccttaagagaaaaacatttagaaaaaaaaattttttctatctctgcccacccacacctgtgatgttgtgtgtgttgggggagcttccacaggagccacactggggaaaagctgtagtatcttctttgtttagcaagtcaaacttcacagctggggaagttgaaaacctttggaaaatgagtcaggaaaaggctgagacctcaatcggtaacaattccccaaagctgttgtaagactttgcattaaagccttcctttttcctg

SEQ ID NO: 2747 - protein, 493 aa, Homo sapiens; identical to SEQ ID NO: 81

SEQ ID NO: 2748 - DNA, 370 bp, Homo sapiens
gctgcccccacgccgctccctccgctgggatcgctgcgcctccggctccccgcaccgatccgcgccaggcctgcggaccggacgcgtcctacccagcccggtgccctgttgaccttccctcagctcctcccaaaaggcacaccgaccccacctccaaaccctgcccgtgccatccctgtgactcccagcagtccctgccatcctgtgcatacctgcagcctgcacccctgtgaccccagcccagtaggccctcgggccacctcctcttcggccgatatttacagcccactgcctgcacagtgcctggaaactacccagcatctctctctcctagcccaaagggggtggaggtaagggtgggaggggaagt

SEQ ID NO: 2749 - protein, 117 aa, Homo sapiens
AAPTPLPPLGSLRLRLPAPIRARPADRTRPTQPGALLTFPQLLPKGTPTPPPNPARAIPVTPSSPCHPVHTCSLHPCDPSPVGPRATSSSADIYSPLPAQCLETTQHLSLLAQRGWR

SEQ ID NO: 2750 - DNA, 2709 bp, Homo sapiens
ggagagaaatggctgaaagtggaaacccggagcggtttggggcgcttcgcaaagttctccagctcggcgagccggcggtgtgtctaccagaggctgggggccagtccatctggtcctgcccgacgccacttccaccccgcgagctctgggaaaggtctctacgtgacgccaagggccgtcgcggccccggggagagggatcgaaagactcactctgcgaggtgtttacactggaggtgggggacgggaagggactgggcaaagttacctggactcaactaaattcctgcgcttgcttagtgttgacatttgaataggatccgagatgttctgcttttatcccgggcagccctgatatgtcagcaacaggctgaggttccagacctgaaatcgcactgcaagaaaaaggggtttgctgaactaactccaagctggtgtgcctagcgtccgcgcggctgccggcccaagagctggagtcaccatggcggccggagttgcggcctggctgccttttgcccgggctgcggccatcgggtggatgccggtggccaactgccccatgcccctggccccggccgacaagaacaagcggcaggatgagctgattgtcctcaacgtgagtgggcggaggttccagacctggaggaccacgctggagcgctacccggacaccctgctgggcagcacggagaaggagttcttcttcaacgaggacaccaaggagtacttcttcgaccgggaccccgaggtgttccgctgcgtgctcaacttctaccgcacggggaagctgcactacccgcgctacgagtgcatctctgcctacgacgacgagctggccttctacggcatcctcccggagatcatcggggactgctgctacgaggagtacaaggaccgcaagagggagaacgccgagcggctcatggacgacaacgactcggagaacaaccaggagtccatgccctcgctcagcttccgccagaccatgtggcgggccttcgagaacccccacaccagcacgctggccctggtcttctactacgtgactggcttcttcatcgctgtctcggtcatcaccaacgtggtggagacggtgccgtgcggcacggtcccgggcagcaaggagctgccgtgcggggagcgctactcggtggccttcttctgcctggacacggcgtgcgtcatgatcttcaccgtggagtacctcctgcggctcttcgcggctcccagccgctaccgcttcatccgcagcgtcatgagcatcatcgacgtggtggccatcatgccctactacatcggtctggtcatgaccaacaacgaggacgtgtccggcgccttcgtcacgctccgggtcttccgcgtcttcaggatcttcaagttttcccgccactcccagggcctgcggatcctgggctacacactgaagagctgtgcctccgaactgggctttcttctcttctccctcaccatggccatcatcatctttgccactgtgatgttttatgccgagaagggctcctcggccagcaagttcacaagcatccctgcctcgttttggtacaccattgtcaccatgaccacactgggatacggagacatggtgcctaagacgattgcagggaagatcttcggctccatctgctccttgagtggcgtcctggtcattgccctgccagtccctgtgattgtttccaactttagccggatttaccaccagaatcagagagctgataaacgcagggcacaaaagaaggcccgccttgccaggatccgtgtggccaaaacaggcagttcgaatgcatacctgcacagcaagcgcaacgggctcctcaacgaggcgctggagctgacgggcaccccagaagaggagcacatgggcaagaccacctcactcatcgagagccagcatcatcacctgctgcactgcctggaaaaaaccactgggttgtcctatcttgtggatgatcccctgttatctgtacgaacctccaccatcaagaaccacgagtttattgatgagcagatgtttgagcagaactgcatggagagttcaatgcagaactacccatccacaagaagtccctcactgtccagccacccaggcctcactaccacctgctgctcccgtcgtagtaagaagaccacacacctgcccaattctaacctgccagctactcgcctgcgcagcatgcaagagctcagcacgatccacatccagggcagtgagcagccctccctcacaaccagtcgctccagccttaatttgaaagcagacgacggactgagaccaaactgcaaaacatcccagatcaccacagccatcatcagcatccccactcccccagcgctaaccccagagggggaaagtcggccaccccctgccagcccaggccccaacacgaacattccttccatagccagcaatgttgtcaaggtctccgccttgtaaaaccactggacagagggccagagtgggtagtggggaatgaaggggactggcatgttggtgggtggtcactgagaccactccctcccccctttccccactatttctgcctgccccattgtacccctagcactgagacttgtgcctggaaggaaaaagaggtagcaaaggggcacctgaggttcacgctgctagcgtggacatagccctgtgatactgcatctcactggggccagaggaagggagggagggtgggggggtcgg

SEQ ID NO: 2751 - protein, 655 aa, Homo sapiens; identical to SEQ ID NO: 83

SEQ ID NO: 2752 - DNA, 2652 bp, Homo sapiens
ggagagaaatggctgaaagtggaaacccggagcggtttggggcgcttcgcaaagttctccagctcggcgagccggcggtgtgtctaccagaggctgggggccagtccatctggtcctgcccgacgccacttccaccccgcgagctctgggaaaggtctctacgtgacgccaagggccgtcgcggccccggggagagggatcgaaagactcactctgcgaggtgtttacactggaggtgggggacgggaagggactgggcaaagttacctggactcaactaaattcctgcgcttgcttagtgttgacatttgaataggatccgagatgttctgcttttatcccgggcagccctgatatgtcagcaacaggctgaggttccagacctgaaatcgcactgcaagaaaaaggggtttgctgaactaactccaagctggtgtgcctagcgtccgcgcggctgccggcccaagagctggagtcaccatggcggccggagttgcggcctggctgccttttgcccgggctgcggccatcgggtggatgccggtggccaactgccccatgcccctggccccggccgacaagaacaagcggcaggatgagctgattgtcctcaacgtgagtgggcggaggttccagacctggaggaccacgctggagcgctacccggacaccctgctgggcagcacggagaaggagttcttcttcaacgaggacaccaaggagtacttcttcgaccgggaccccgaggtgttccgctgcgtgctcaacttctaccgcacggggaagctgcactacccgcgctacgagtgcatctctgcctacgacgacgagctggccttctacggcatcctcccggagatcatcggggactgctgctacgaggagtacaaggaccgcaagagggagaacgccgagcggctcatggacgacaacgactcggagaacaaccaggagtccatgccctcgctcagcttccgccagaccatgtggcgggccttcgagaacccccacaccagcacgctggccctggtcttctactacgtgactggcttcttcatcgctgtctcggtcatcaccaacgtggtggagacggtgccgtgcggcacggtcccgggcagcaaggagctgccgtgcggggagcgctactcggtggccttcttctgcctggacacggcgtgcgtcatgatcttcaccgtggagtacctcctgcggctcttcgcggctcccagccgctaccgcttcatccgcagcgtcatgagcatcatcgacgtggtggccatcatgccctactacatcggtctggtcatgaccaacaacgaggacgtgtccggcgccttcgtcacgctccgggtcttccgcgtcttcaggatcttcaagttttcccgccactcccagggcctgcggatcctgggctacacactgaagagctgtgcctccgaactgggctttcttctcttctccctcaccatggccatcatcatctttgccactgtgatgttttatgccgagaagggctcctcggccagcaagttcacaagcatccctgcctcgttttggtacaccattgtcaccatgaccacactgggatacggagacatggtgcctaagacgattgcagggaagatcttcggctccatctgctccttgagtggcgtcctggtcattgccctgccagtccctgtgattgtttccaactttagccggatttaccaccagaatcagagagctgataaacgcagggcacaaaagaaggcccgccttgccaggatccgtgtggccaaaacaggcagttcgaatgcatacctgcacagcaagcgcaacgggctcctcaacgaggcgctggagctgacgggcaccccagaagaggagcacatgggcaagaccacctcactcatcgagagccagcatcatcacctgctgcactgcctggaaaaaaccactaaccacgagtttattgatgagcagatgtttgagcagaactgcatggagagttcaatgcagaactacccatccacaagaagtccctcactgtccagccacccaggcctcactaccacctgctgctcccgtcgtagtaagaagaccacacacctgcccaattctaacctgccagctactcgcctgcgcagcatgcaagagctcagcacgatccacatccagggcagtgagcagccctccctcacaaccagtcgctccagccttaatttgaaagcagacgacggactgagaccaaactgcaaaacatcccagatcaccacagccatcatcagcatccccactcccccagcgctaaccccagagggggaaagtcggccaccccctgccagcccaggccccaacacgaacattccttccatagccagcaatgttgtcaaggtctccgccttgtaaaaccactggacagagggccagagtgggtagtggggaatgaaggggactggcatgttggtgggtggtcactgagaccactccctcccccctttccccactatttctgcctgccccattgtacccctagcactgagacttgtgcctggaaggaaaaagaggtagcaaaggggcacctgaggttcacgctgctagcgtggacatagccctgtgatactgcatctcactggggccagaggaagggagggagggtgggggggtcgg

SEQ ID NO: 2753 - protein, 636 aa, Homo sapiens; identical to SEQ ID NO: 85

SEQ ID NO: 2754 - DNA, 375 bp, Homo sapiens
ctggtttctctcaggcagaagaggccctccccctcttcctgccctgcttagctgcttgcccagaggacaggggacaggatctcacaaggctcaaaaaaccttcaaacaataatccactcagcagatatttagcaaacatctaccttatatgaaccactctcctgagcactggagctacgctggtgaacagagaataaacagcctcatctctcataactatcgtgtttggagcaagtaccaaatgccaagcactgtattatgcattctagaagccatctcatgcaatcctcacaaaaactcaaaaaggtggtgttttacagatgatgaaactgaggttaatcatttattcattcaataaaccgttattgagcacct

SEQ ID NO: 2755 - protein, 69 aa, Homo sapiens
MNHSPEHWSYAGEQRINSLISHNYRVWSKYQMPSTVLCILEAISCNPHKNSKRWCFTDDETEVNHLFIQ

SEQ ID NO: 2756 - DNA, 944 bp, Homo sapiens
tttctcagcctggagactgaaagctctctttggctgttggccctcccaggcagagtccactggctgttagggtgaaatggggctgatgcttcctggaatccaccagaagtatgcaaattgcaccatctctttcagctgcctgcgcctgcattccatcgaggattccggctcgtcccccagtggcaacaactagagaggaggtgaggatccccggcgctgccatctgataggctgtctccctagctcctcttgcactggcaatcctttcatcacacaggccttgttttgaagggacctattccacccacagtcgtttctcacctctaggaggccaaaaagctgtagtcattgctgtggtatcaggaactcgagttcctctcagaggtgttgtgaagagcttcccttccaacagtacatggcctaaataccagggaggaagtttctgactttttccatcttcagtaaaacagaacctctgttgtggatgcagtggctttgcaaggagagtggcattgtctcttggtgaatgtagttgttcaagtcatggggaggaggcaggtttagttttgatgcatatattttcactattagttctcaatagtgaaaatcttaattcacagatgagccaagatagaagggcatcttcccaacataaatgagacacaaagacaatgtgggtaaaagtgaaatcagctttattgtgaaactgtaatcaaagaagaactggctattggtgctaccacctggattcaagaagatggacaaagtgacctcagaatcaacccacaagtacttactgaccacccacagtttgtcaggtactctctatcctaagtctgtttcctctagagctgtgctgttactctagagcagggaccagcaaactatggctcttgggccaaatctagccacctgcttcagtcaataaagttttattagaatgt

SEQ ID NO: 2757 - protein, 38 aa, Homo sapiens
MGLMLPGIHQKYANCTISFSCLRLHSIEDSGSSPSGNN

SEQ ID NO: 2758 - DNA, 3424 bp, Homo sapiens
gcagagtctgcagtgcggagggggcgggaagtccaggccccgcactcgatccacgctggctccctacggaggcccacctactcgaggcccaccgactcctactgcaatcagtactatgcgatcgtcctagagagtccattcagctgcacttccgcctcagtatggcatcacagctgcaagtgttttcgcccccatcagtgtcgtcgagtgccttctgcagtgcgaagaaactgaaaatagagccctctggctgggatgtttcaggacagagtagcaacgacaaatattatacccacagcaaaaccctcccagccacacaagggcaagccaactcctctcaccaggtagcaaatttcaacatccctgcttacgaccagggcctcctcctcccagctcctgcagtggagcatattgttgtaacagccgctgatagctcgggcagtgctgctacatcaaccttccaaagcagccagaccctgactcacagaagcaacgtttctttgcttgagccatatcaaaaatgtggattgaaacgaaaaagtgaggaagttgacagcaacggtagtgtgcagatcatagaagaacatccccctctcatgctgcaaaacaggactgtggtgggtgctgctgccacaaccaccactgtgaccacaaagagtagcagttccagcggagaaggggattaccagctggtccagcatgagatcctttgctctatgaccaatagctatgaagtcttggagttcctaggccgggggacatttggacaggtggctaagtgctggaagaggagcaccaaggaaattgtggctattaaaatcttgaagaaccacccctcctatgccagacaaggacagattgaagtgagcatcctttcccgcctaagcagtgaaaatgctgatgagtataattttgtccgttcatacgagtgctttcagcataagaatcacacctgccttgtttttgaaatgttggagcagaacttatatgattttctaaagcaaaacaaatttagcccactgccactcaagtacatcagaccaatcttgcagcaggtggccacagccttgatgaagctcaagagtcttggtctgatccacgctgaccttaagcctgaaaacatcatgctggttgatccagttcgccagccctaccgagtgaaggtcattgactttggttctgctagtcacgtttccaaagctgtgtgctcaacctacttacagtcacgttactacaggcaactcctgaaattattcttgggttaccattttgtgaagctattgatatgtggtcactgggctgtgtgatagctgagctgttcctgggatggcctctttatcctggtgcttcagaatatgatcagattcgttatatttcacaaacacaaggcttgccagctgaatatcttctcagtgccggaacaaaaacaaccaggtttttcaacagagatcctaatttggggtacccactgtggaggcttaagacacctgaagaacatgaactggagactggaataaaatcaaaagaagctcggaagtacatttttaattgcttagatgacatggctcaggtgaatatgtctacagacctggagggaacagacatgttggcagagaaggcagaccgaagagaatacattgatctgttaaagaaaatgctcacaattgatgcagataagagaattacccctctaaaaactcttaaccatcagtttgtgacaatgactcaccttttggattttccacatagcaatcatgttaagtcttgttttcagaacatggagatctgcaagcggagggttcacatgtatgatacagtgagtcagatcaagagtcccttcactacacatgttgccccaaatacaagcacaaatctaaccatgagcttcagcaatcagctcaatacagtgcacaatcaggccagtgttctagcttccagttctactgcagcagctgctactctttctctggctaattcagatgtctcactactaaactaccagtcagctttgtacccatcatctgctgcaccagttcctggagttgcccagcagggtgtttccttgcagcctggaaccacccagatttgcactcagacagatccattccaacagacatttatagtatgtccacctgcgtttcaaactggactacaagcaacaacaaagcattctggattccctgtgaggatggataatgctgtaccgattgtaccccaggcaccagctgctcagccactacagattcagtcaggagttctcacgcagggaagctgtacaccactaatggtagcaactctccaccctcaagtagccaccatcacaccgcagtatgcggtgccctttactctgagctgcgcagccggccggccggcgctggttgaacagactgccgctgtactgcaggcgtggcctggagggactcagcaaattctcctgccttcaacttggcaacagttgcctggggtagctctacacaactctgtccagcccacagcaatgattccagaggccatggggagtggacagcagctagctgactggaggaatgcccactctcatggcaaccagtacagcactatcatgcagcagccatccttgctgactaaccatgtgacattggccactgctcagcctctgaatgttggtgttgcccatgttgtcagacaacaacaatccagttccctcccttcgaagaagaataagcagtcagctccagtctcttccaagtcctctctagatgttctgccttcccaagtctattctctggttgggagcagtcccctccgcaccacatcttcttataattccttggtccctgtccaagatcagcatcagcccatcatcattccagatactcccagccctcctgtgagtgtcatcactatccgaagtgacactgatgaggaagaggacaacaaatacaagcccagtagctctggactgaagccaaggtctaatgtcatcagttatgtcactgtcaatgattctccagactctgactcttctttgagcagcccttattccactgataccctgagtgctctccgaggcaatagtggatccgttttggaggggcctggcagagttgtggcagatggcactggcacccgcactatcattgtgcctccactgaaaactcagcttggtgactgcactgtagcaacccaggcctcaggtctcctgagcaataagactaagccagtcgcttcagtgagtgggcagtcatctggatgctgtatcacccccacagggtatcgagctcaacgcggggggaccagtgcagcacaaccactcaatcttagccaggtaagtgctatgggctactgccttctgtttgggccctgcactgttgttactttctggagaaccctgcttctggctggatgctgaataaagccaaatgaagccccttttgtgtcaaac

SEQ ID NO: 2759 - protein, 701 aa, Homo sapiens
MWSLGCVIAELFLGWPLYPGASEYDQIRYISQTQGLPAEYLLSAGTKTTRFFNRDPNLGYPLWRLKTPEEHELETGIKSKEARKYIFNCLDDMAQVNMSTDLEGTDMLAEKADRREYIDLLKKMLTIDADKRITPLKTLNHQFVTMTHLLDFPHSNHVKSCFQNMEICKRRVHMYDTVSQIKSPFTTHVAPNTSTNLTMSFSNQLNTVHNQASVLASSSTAAAATLSLANSDVSLLNYQSALYPSSAAPVPGVAQQGVSLQPGTTQICTQTDPFQQTFIVCPPAFQTGLQATTKHSGFPVRMDNAVPIVPQAPAAQPLQIQSGVLTQGSCTPLMVATLHPQVATITPQYAVPFTLSCAAGRPALVEQTAAVLQAWPGGTQQILLPSTWQQLPGVALHNSVQPTAMIPEAMGSGQQLADWRNAHSHGNQYSTIMQQPSLLTNHVTLATAQPLNVGVAHVVRQQQSSSLPSKKNKQSAPVSSKSSLDVLPSQVYSLVGSSPLRTTSSYNSLVPVQDQHQPIIIPDTPSPPVSVITIRSDTDEEEDNKYKPSSSGLKPRSNVISYVTVNDSPDSDSSLSSPYSTDTLSALRGNSGSVLEGPGRVVADGTGTRTIIVPPLKTQLGDCTVATQASGLLSNKTKPVASVSGQSSGCCITPTGYRAQRGGTSAAQPLNLSQVSAMGYCLLFGPCTVVTFWRTLLLAGC

SEQ ID NO: 2760 - DNA, 8087 bp, Homo sapiens
gcagagtctgcagtgcggagggggcgggaagtccaggccccgcactcgatccacgctggctccctacggaggcccacctactcgaggcccaccgactcctactgcaatcagtactatgcgatcgtcctagagagtccattcagctgcacttccgcctcagtatggcatcacagctgcaagtgttttcgcccccatcagtgtcgtcgagtgccttctgcagtgcgaagaaactgaaaatagagccctctggctgggatgtttcaggacagagtagcaacgacaaatattatacccacagcaaaaccctcccagccacacaagggcaagccaactcctctcaccaggtagcaaatttcaacatccctgcttacgaccagggcctcctcctcccagctcctgcagtggagcatattgttgtaacagccgctgatagctcgggcagtgctgctacatcaaccttccaaagcagccagaccctgactcacagaagcaacgtttctttgcttgagccatatcaaaaatgtggattgaaacgaaaaagtgaggaagttgacagcaacggtagtgtgcagatcatagaagaacatccccctctcatgctgcaaaacaggactgtggtgggtgctgctgccacaaccaccactgtgaccacaaagagtagcagttccagcggagaaggggattaccagctggtccagcatgagatcctttgctctatgaccaatagctatgaagtcttggagttcctaggccgggggacatttggacaggtggctaagtgctggaagaggagcaccaaggaaattgtggctattaaaatcttgaagaaccacccctcctatgccagacaaggacagattgaagtgagcatcctttcccgcctaagcagtgaaaatgctgatgagtataattttgtccgttcatacgagtgctttcagcataagaatcacacctgccttgtttttgaaatgttggagcagaacttatatgattttctaaagcaaaacaaatttagcccactgccactcaagtacatcagaccaatcttgcagcaggtggccacagccttgatgaagctcaagagtcttggtctgatccacgctgaccttaagcctgaaaacatcatgctggttgatccagttcgccagccctaccgagtgaaggtcattgactttggttctgctagtcacgtttccaaagctgtgtgctcaacctacttacagtcacgttactacaggcaactcctgaaattattcttgggttaccattttgtgaagctattgatatgtggtcactgggctgtgtgatagctgagctgttcctgggatggcctctttatcctggtgcttcagaatatgatcagattcgttatatttcacaaacacaaggcttgccagctgaatatcttctcagtgccggaacaaaaacaaccaggtttttcaacagagatcctaatttggggtacccactgtggaggcttaagacacctgaagaacatgaactggagactggaataaaatcaaaagaagctcggaagtacatttttaattgcttagatgacatggctcaggtgaatatgtctacagacctggagggaacagacatgttggcagagaaggcagaccgaagagaatacattgatctgttaaagaaaatgctcacaattgatgcagataagagaattacccctctaaaaactcttaaccatcagtttgtgacaatgactcaccttttggattttccacatagcaatcatgttaagtcttgttttcagaacatggagatctgcaagcggagggttcacatgtatgatacagtgagtcagatcaagagtcccttcactacacatgttgccccaaatacaagcacaaatctaaccatgagcttcagcaatcagctcaatacagtgcacaatcaggccagtgttctagcttccagttctactgcagcagctgctactctttctctggctaattcagatgtctcactactaaactaccagtcagctttgtacccatcatctgctgcaccagttcctggagttgcccagcagggtgtttccttgcagcctggaaccacccagatttgcactcagacagatccattccaacagacatttatagtatgtccacctgcgtttcaaactggactacaagcaacaacaaagcattctggattccctgtgaggatggataatgctgtaccgattgtaccccaggcaccagctgctcagccactacagattcagtcaggagttctcacgcagggaagctgtacaccactaatggtagcaactctccaccctcaagtagccaccatcacaccgcagtatgcggtgccctttactctgagctgcgcagccggccggccggcgctggttgaacagactgccgctgtactgcaggcgtggcctggagggactcagcaaattctcctgccttcaacttggcaacagttgcctggggtagctctacacaactctgtccagcccacagcaatgattccagaggccatggggagtggacagcagctagctgactggaggaatgcccactctcatggcaaccagtacagcactatcatgcagcagccatccttgctgactaaccatgtgacattggccactgctcagcctctgaatgttggtgttgcccatgttgtcagacaacaacaatccagttccctcccttcgaagaagaataagcagtcagctccagtctcttccaagtcctctctagatgttctgccttcccaagtctattctctggttgggagcagtcccctccgcaccacatcttcttataattccttggtccctgtccaagatcagcatcagcccatcatcattccagatactcccagccctcctgtgagtgtcatcactatccgaagtgacactgatgaggaagaggacaacaaatacaagcccagtagctctggactgaagccaaggtctaatgtcatcagttatgtcactgtcaatgattctccagactctgactcttctttgagcagcccttattccactgataccctgagtgctctccgaggcaatagtggatccgttttggaggggcctggcagagttgtggcagatggcactggcacccgcactatcattgtgcctccactgaaaactcagcttggtgactgcactgtagcaacccaggcctcaggtctcctgagcaataagactaagccagtcgcttcagtgagtgggcagtcatctggatgctgtatcacccccacagggtatcgagctcaacgcggggggaccagtgcagcacaaccactcaatcttagccagaaccagcagtcatcggcggctccaacctcacaggagagaagcagcaacccagccccccgcaggcagcaggcgtttgtggcccctctctcccaagccccctacaccttccagcatggcagcccgctacactcgacagggcacccacaccttgccccggcccctgctcacctgccaagccaggctcatctgtatacgtatgctgccccgacttctgctgctgcactgggctcaaccagctccattgctcatcttttctccccacagggttcctcaaggcatgctgcagcctataccactcaccctagcactttggtgcaccaggtccctgtcagtgttgggcccagcctcctcacttctgccagcgtggcccctgctcagtaccaacaccagtttgccacccaatcctacattgggtcttcccgaggctcaacaatttacactggatacccgctgagtcctaccaagatcagccagtattcctacttatagttggtgagcatgagggaggaggaatcatggctaccttctcctggccctgcgttcttaatattgggctatggagagatcctcctttaccctcttgaaatttcttagccagcaacttgttctgcaggggcccactgaagcagaaggtttttctctgggggaacctgtctcagtgttgactgcattgttgtagtcttcccaaagtttgccctatttttaaattcattatttttgtgacagtaattttggtacttggaagagttcagatgcccatcttctgcagttaccaaggaagagagattgttctgaagttaccctctgaaaaatattttgtctctctgacttgatttctataaatgcttttaaaaacaagtgaagcccctctttatttcattttgtgttattgtgattgctggtcaggaaaaatgctgatagaaggagttgaaatctgatgacaaaaaaagaaaaattactttttgtttgtttataaactcagacttgcctattttattttaaaagcggcttacacaatctcccttttgtttattggacatttaaacttacagagtttcagttttgttttaatgtcatattatacttaatgggcaattgttatttttgcaaaactggttacgtattactctgtgttactattgagattctctcaattgctcctgtgtttgttataaagtagtgtttaaaaggcagctcaccatttgctggtaacttaatgtgagagaatccatatctgcgtgaaaacaccaagtattctttttaaatgaagcaccatgaattcttttttaaattattttttaaaagtctttctctctctgattcagcttaaatttttttatcgaaaaagccattaaggtggttattattacatggtggtggtggttttattatatgcaaaatctctgtctattatgagatactggcattgatgagctttgcctaaagattagtatgaattttcagtaatacacctctgttttgctcatctctcccttctgttttatgtgatttgtttggggagaaagctaaaaaaacctgaaaccagataagaacatttcttgtgtatagcttttatacttcaaagtagcttcctttgtatgccagcagcaaattgaatgctctcttattaagacttatataataagtgcatgtaggaattgcaaaaaatattttaaaaatttattactgaatttaaaaatattttagaagttttgtaatggtggtgttttaatattttacataattaaatatgtacatattgattagaaaaatataacaagcaatttttcctgctaacccaaaatgttatttgtaatcaaatgtgtagtgattacacttgaattgtgtacttagtgtgtatgtgatcctccagtgttatcccggagatggattgatgtctccattgtatttaaaccaaaatgaactgatacttgttggaatgtatgtgaactaattgcaattatattagagcatattactgtagtgctgaatgagcaggggcattgcctgcaaggagaggagacccttggaattgttttgcacaggtgtgtctggtgaggagtttttcagtgtgtgtctcttccttccctttcttcctccttcccttattgtagtgccttatatgataatgtagtggttaatagagtttacagtgagcttgccttaggatggaccagcaagcccccgtggaccctaagttgttcaccgggatttatcagaacaggattagtagctgtattgtgtaatgcattgttctcagtttccctgccaacattgaaaaataaaaacagcagcttttctcctttaccaccacctctacccctttccattttggattctcggctgagttctcacagaagcattttccccatgtggctctctcactgtgcgttgctaccttgcttctgtgagaattcaggaagcaggtgagaggagtcaagccaatattaaatatgcattcttttaaagtatgtgcaatcacttttagaatgaatttttttttccttttcccatgtggcagtccttcctgcacatagttgacattcctagtaaaatatttgcttgttgaaaaaaacatgttaacagatgtgtttataccaaagagcctgttgtattgcttaccatgtccccatactatgaggagaagttttgtggtgccgctggtgacaaggaactcacagaaaggtttcttagctggtgaagaatatagagaaggaaccaaagcctgttgagtcattgaggcttttgaggtttcttttttaacagcttgtatagtcttggggcccttcaagctgtgaaattgtccttgtactctcagctcctgcatggatctgggtcaagtagaaggtactggggatggggacattcctgcccataaaggatttggggaaagaagattaatcctaaaatacaggtgtgttccatctgaattgaaaatgatatatttgagatataattttaggactggttctgtgtagatagagatggtgtcaaggaggtgcaggatggagatgggagatttcatggagcctggtcagccagctctgtaccaggttgaacaccgaggagctgtcaaagtatttggagtttcttcattgtaaggagtaagggcttccaagatggggcaggtagtccgtacagcctaccaggaacatgttgtgttttctttattttttaaaatcattatattgagttgtgttttcagcactatattggtcaagatagccaagcagtttgtataatttctgtcactagtgtcatacagttttctggtcaacatgtgtgatctttgtgtctcctttttgccaagcacattctgattttcttgttggaacacaggtctagtttctaaaggacaaattttttgttccttgtcttttttctgtaagggacaagatttgttgtttttgtaagaaatgagatgcaggaaagaaaaccaaatcccattcctgcaccccagtccaataagcagataccacttaagataggagtctaaactccacagaaaaggataataccaagagcttgtattgttaccttagtcacttgcctagcagtgtgtggctttaaaaactagagatttttcagtcttagtctgcaaactggcatttccgattttccagcataaaaatccacctgtgtctgctgaatgtgtatgtatgtgctcactgtggctttagattctgtccctggggttagccctgttggccctgacaggaagggaggaagcctggtgaatttagtgagcagctggcctgggtcacagtgacctgacctcaaaccagcttaaggctttaagtcctctctcagaacttggcatttccaacttcttcctttccgggtgagagaagaagcggagaagggttcagtgtagccactctgggctcatagggacacttggtcactccagagtttttaatagctcccaggaggtgatattattttcagtgctcagctgaaataccaaccccaggaataagaactccatttcaaacagttctggccattctgagcctgcttttgtgattgctcatccattgtcctccactagaggggctaagcttgactgcccttagccaggcaagcacagtaatgtgtgttttgttcagcattattatgcaaaaattcactagttgagatggtttgttttaggataggaaatgaaattgcctctcagtgacaggagtggcccgagcctgcttcctattttgattttttttttttttaactgatagatggtgcagcatgtctacatggttgtttgttgctaaactttatataatgtgtggtttcaattcagcttgaaaaataatctcactacatgtagcagtacattatatgtacattatatgtaatgttagtatttctgctttgaatccttgatattgcaatggaattcctactttattaaatgtatttgatatgctagttattgtgtgcgatttaaactttttttgctttctccctttttttggttgtgcgctttcttttacaacaagcctctagaaacagatagtttctgagaattactgagctatgtttgtaatgcagatgtacttagggagtatgtaaaataatcattttaacaaaagaaatagatatttaaaatttaatactaactatgggaaaagggtccattgtgtaaaacatagtttatctttggattcaatgtttgtctttggttttacaaagtagcttgtattttcagtattttctacataatatggtaaaatgtagagcaattgcaatgcatcaataaaatgggtaaattttctgactt

SEQ ID NO: 2761 - protein, 836 aa, Homo sapiens; identical to SEQ ID NO: 93

SEQ ID NO: 2762 - DNA, 8153 bp, Homo sapiens
gcagagtctgcagtgcggagggggcgggaagtccaggccccgcactcgatccacgctggctccctacggaggcccacctactcgaggcccaccgactcctactgcaatcagtactatgcgatcgtcctagagagtccattcagctgcacttccgcctcagtatggcatcacagctgcaagtgttttcgcccccatcagtgtcgtcgagtgccttctgcagtgcgaagaaactgaaaatagagccctctggctgggatgtttcaggacagagtagcaacgacaaatattatacccacagcaaaaccctcccagccacacaagggcaagccaactcctctcaccaggtagcaaatttcaacatccctgcttacgaccagggcctcctcctcccagctcctgcagtggagcatattgttgtaacagccgctgatagctcgggcagtgctgctacatcaaccttccaaagcagccagaccctgactcacagaagcaacgtttctttgcttgagccatatcaaaaatgtggattgaaacgaaaaagtgaggaagttgacagcaacggtagtgtgcagatcatagaagaacatccccctctcatgctgcaaaacaggactgtggtgggtgctgctgccacaaccaccactgtgaccacaaagagtagcagttccagcggagaaggggattaccagctggtccagcatgagatcctttgctctatgaccaatagctatgaagtcttggagttcctaggccgggggacatttggacaggtggctaagtgctggaagaggagcaccaaggaaattgtggctattaaaatcttgaagaaccacccctcctatgccagacaaggacagattgaagtgagcatcctttcccgcctaagcagtgaaaatgctgatgagtataattttgtccgttcatacgagtgctttcagcataagaatcacacctgccttgtttttgaaatgttggagcagaacttatatgattttctaaagcaaaacaaatttagcccactgccactcaagtacatcagaccaatcttgcagcaggtggccacagccttgatgaagctcaagagtcttggtctgatccacgctgaccttaagcctgaaaacatcatgctggttgatccagttcgccagccctaccgagtgaaggtcattgactttggttctgctagtcacgtttccaaagctgtgtgctcaacctacttacagtcacgttactacaggcaactcctgaaattattcttgggttaccattttgtgaagctattgatatgtggtcactgggctgtgtgatagctgagctgttcctgggatggcctctttatcctggtgcttcagaatatgatcagattcgttatatttcacaaacacaaggcttgccagctgaatatcttctcagtgccggaacaaaaacaaccaggtttttcaacagagatcctaatttggggtacccactgtggaggcttaagacacctgaagaacatgaactggagactggaataaaatcaaaagaagctcggaagtacatttttaattgcttagatgacatggctcaggtgaatatgtctacagacctggagggaacagacatgttggcagagaaggcagaccgaagagaatacattgatctgttaaagaaaatgctcacaattgatgcagataagagaattacccctctaaaaactcttaaccatcagtttgtgacaatgactcaccttttggattttccacatagcaatcatgttaagtcttgttttcagaacatggagatctgcaagcggagggttcacatgtatgatacagtgagtcagatcaagagtcccttcactacacatgttgccccaaatacaagcacaaatctaaccatgagcttcagcaatcagctcaatacagtgcacaatcaggccagtgttctagcttccagttctactgcagcagctgctactctttctctggctaattcagatgtctcactactaaactaccagtcagctttgtacccatcatctgctgcaccagttcctggagttgcccagcagggtgtttccttgcagcctggaaccacccagatttgcactcagacagatccattccaacagacatttatagtatgtccacctgcgtttcaaactggactacaagcaacaacaaagcattctggattccctgtgaggatggataatgctgtaccgattgtaccccaggcaccagctgctcagccactacagattcagtcaggagttctcacgcagggaagctgtacaccactaatggtagcaactctccaccctcaagtagccaccatcacaccgcagtatgcggtgccctttactctgagctgcgcagccggccggccggcgctggttgaacagactgccgctgtactgcaggcgtggcctggagggactcagcaaattctcctgccttcaacttggcaacagttgcctggggtagctctacacaactctgtccagcccacagcaatgattccagaggccatggggagtggacagcagctagctgactggaggaatgcccactctcatggcaaccagtacagcactatcatgcagcagccatccttgctgactaaccatgtgacattggccactgctcagcctctgaatgttggtgttgcccatgttgtcagacaacaacaatccagttccctcccttcgaagaagaataagcagtcagctccagtctcttccaagtcctctctagatgttctgccttcccaagtctattctctggttgggagcagtcccctccgcaccacatcttcttataattccttggtccctgtccaagatcagcatcagcccatcatcattccagatactcccagccctcctgtgagtgtcatcactatccgaagtgacactgatgaggaagaggacaacaaatacaagcccagtagctctggactgaagccaaggtctaatgtcatcagttatgtcactgtcaatgattctccagactctgactcttctttgagcagcccttattccactgataccctgagtgctctccgaggcaatagtggatccgttttggaggggcctggcagagttgtggcagatggcactggcacccgcactatcattgtgcctccactgaaaactcagcttggtgactgcactgtagcaacccaggcctcaggtctcctgagcaataagactaagccagtcgcttcagtgagtgggcagtcatctggatgctgtatcacccccacagggtatcgagctcaacgcggggggaccagtgcagcacaaccactcaatcttagccagaaccagcagtcatcggcggctccaacctcacaggagagaagcagcaacccagccccccgcaggcagcaggcgtttgtggcccctctctcccaagccccctacaccttccagcatggcagcccgctacactcgacagggcacccacaccttgccccggcccctgctcacctgccaagccaggctcatctgtatacgtatgctgccccgacttctgctgctgcactgggctcaaccagctccattgctcatcttttctccccacagggttcctcaaggcatgctgcagcctataccactcaccctagcactttggtgcaccaggtccctgtcagtgttgggcccagcctcctcacttctgccagcgtggcccctgctcagtaccaacaccagtttgccacccaatcctacattgggtcttcccgaggctcaacaatttacactggatacccgctgagtcctaccaagatcagccagtattcctacttatagttggtgagcatgagggaggaggaatcatggctaccttctcctggccctgcgttcttaatattgggctatggagagatcctcctttaccctcttgaaatttcttagccagcaacttgttctgcaggggcccactgaagcagaaggtttttctctgggggaacctgtctcagtgttgactgcattgttgtagtcttcccaaagtttgccctatttttaaattcattatttttgtgacagtaattttggtacttggaagagttcagatgcccatcttctgcagttaccaaggaagagagattgttctgaagttaccctctgaaaaatattttgtctctctgacttgatttctataaatgcttttaaaaacaagtgaagcccctctttatttcattttgtgttattgtgattgctggtcaggaaaaatgctgatagaaggagttgaaatctgatgacaaaaaaagaaaaattactttttgtttgtttataaactcagacttgcctattttattttaaaagcggcttacacaatctcccttttgtttattggacatttaaacttacagagtttcagttttgttttaatgtcatattatacttaatgggcaattgttatttttgcaaaactggttacgtattactctgtgttactattgagattctctcaattgctcctgtgtttgttataaagtagtgtttaaaaggcagctcaccatttgctggtaacttaatgtgagagaatccatatctgcgtgaaaacaccaagtattctttttaaatgaagcaccatgaattcttttttaaattattttttaaaagtctttctctctctgattcagcttaaatttttttatcgaaaaagccattaaggtggttattattacatggtggtggtggttttattatatgcaaaatctctgtctattatgagatactggcattgatgagctttgcctaaagattagtatgaattttcagtaatacacctctgttttgctcatctctcccttctgttttatgtgatttgtttggggagaaagctaaaaaaacctgaaaccagataagaacatttcttgtgtatagcttttatacttcaaagtagcttcctttgtatgccagcagcaaattgaatgctctcttattaagacttatataataagtgcatgtaggaattgcaaaaaatattttaaaaatttattactgaatttaaaaatattttagaagttttgtaatggtggtgttttaatattttacataattaaatatgtacatattgattagaaaaatataacaagcaatttttcctgctaacccaaaatgttatttgtaatcaaatgtgtagtgattacacttgaattgtgtacttagtgtgtatgtgatcctccagtgttatcccggagatggattgatgtctccattgtatttaaaccaaaatgaactgatacttgttggaatgtatgtgaactaattgcaattatattagagcatattactgtagtgctgaatgagcaggggcattgcctgcaaggagaggagacccttggaattgttttgcacaggtgtgtctggtgaggagtttttcagtgtgtgtctcttccttccctttcttcctccttcccttattgtagtgccttatatgataatgtagtggttaatagagtttacagtgagcttgccttaggatggaccagcaagcccccgtggaccctaagttgttcaccgggatttatcagaacaggattagtagctgtattgtgtaatgcattgttctcagtttccctgccaacattgaaaaataaaaacagcagcttttctcctttaccaccacctctacccctttccattttggattctcggctgagttctcacagaagcattttccccatgtggctctctcactgtgcgttgctaccttgcttctgtgagaattcaggaagcaggtgagaggagtcaagccaatattaaatatgcattcttttaaagtatgtgcaatcacttttagaatgaatttttttttccttttcccatgtggcagtccttcctgcacatagttgacattcctagtaaaatatttgcttgttgaaaaaaacatgttaacagatgtgtttataccaaagagcctgttgtattgcttaccatgtccccatactatgaggagaagttttgtggtgccgctggtgacaaggaactcacagaaaggtttcttagctggtgaagaatatagagaaggaaccaaagcctgttgagtcattgaggcttttgaggtttcttttttaacagcttgtatagtcttggggcccttcaagctgtgaaattgtccttgtactctcagctcctgcatggatctgggtcaagtagaaggtactggggatggggacattcctgcccataaaggatttggggaaagaagattaatcctaaaatacaggtgtgttccatctgaattgaaaatgatatatttgagatataattttaggactggttctgtgtagatagagatggtgtcaaggaggtgcaggatggagatgggagatttcatggagcctggtcagccagctctgtaccaggttgaacaccgaggagctgtcaaagtatttggagtttcttcattgtaaggagtaagggcttccaagatggggcaggtagtccgtacagcctaccaggaacatgttgtgttttctttattttttaaaatcattatattgagttgtgttttcagcactatattggtcaagatagccaagcagtttgtataatttctgtcactagtgtcatacagttttctggtcaacatgtgtgatctttgtgtctcctttttgccaagcacattctgattttcttgttggaacacaggtctagtttctaaaggacaaattttttgttccttgtcttttttctgtaagggacaagatttgttgtttttgtaagaaatgagatgcaggaaagaaaaccaaatcccattcctgcaccccagtccaataagcagataccacttaagataggagtctaaactccacagaaaaggataataccaagagcttgtattgttaccttagtcacttgcctagcagtgtgtggctttaaaaactagagatttttcagtcttagtctgcaaactggcatttccgattttccagcataaaaatccacctgtgtctgctgaatgtgtatgtatgtgctcactgtggctttagattctgtccctggggttagccctgttggccctgacaggaagggaggaagcctggtgaatttagtgagcagctggcctgggtcacagtgacctgacctcaaaccagcttaaggctttaagtcctctctcagaacttggcatttccaacttcttcctttccgggtgagagaagaagcggagaagggttcagtgtagccactctgggctcatagggacacttggtcactccagagtttttaatagctcccaggaggtgatattattttcagtgctcagctgaaataccaaccccaggaataagaactccatttcaaacagttctggccattctgagcctgcttttgtgattgctcatccattgtcctccactagaggggctaagcttgactgcccttagccaggcaagcacagtaatgtgtgttttgttcagcattattatgcaaaaattcactagttgagatggtttgttttaggataggaaatgaaattgcctctcagtgacaggagtggcccgagcctgcttcctattttgattttttttttttttaactgatagatggtgcagcatgtctacatggttgtttgttgctaaactttatataatgtgtggtttcaattcagcttgaaaaataatctcactacatgtagcagtacattatatgtacattatatgtaatgttagtatttctgctttgaatccttgatattgcaatggaattcctactttattaaatgtatttgatatgctagttattgtgtgcgatttaaactttttttgctttctccctttttttggttgtgcgctttcttttacaacaagcctctagaaacagatagtttctgagaattactgagctatgtttgtaatgcagatgtacttagggagtatgtaaaataatcattttaacaaaagaaatagatatttaaaatttaatactaactatgggaaaagggtccattgtgtaaaacatagtttatctttggattcaatgtttgtctttggttttacaaagtagcttgtattttcagtattttctacataatatggtaaaatgtagagcaattgcaatgcatcaataaaatgggtaaattttctgacttatgtggctgtttttgacttctgttataggatataaaggggatcaataaatgacatctttgaaagtg

SEQ ID NO: 2763 - protein, 836 aa, Homo sapiens; identical to SEQ ID NO: 93

SEQ ID NO: 2764 - DNA, 8022 bp, Homo sapiens
tatgatgacccggctgcggggccccagatctcgtctcctccgccgcctcctcacggcagccccagctcgcggctgagaaccagacacaccggcggtatggcatcacagctgcaagtgttttcgcccccatcagtgtcgtcgagtgccttctgcagtgcgaagaaactgaaaatagagccctctggctgggatgtttcaggacagagtagcaacgacaaatattatacccacagcaaaaccctcccagccacacaagggcaagccaactcctctcaccaggtagcaaatttcaacatccctgcttacgaccagggcctcctcctcccagctcctgcagtggagcatattgttgtaacagccgctgatagctcgggcagtgctgctacatcaaccttccaaagcagccagaccctgactcacagaagcaacgtttctttgcttgagccatatcaaaaatgtggattgaaacgaaaaagtgaggaagttgacagcaacggtagtgtgcagatcatagaagaacatccccctctcatgctgcaaaacaggactgtggtgggtgctgctgccacaaccaccactgtgaccacaaagagtagcagttccagcggagaaggggattaccagctggtccagcatgagatcctttgctctatgaccaatagctatgaagtcttggagttcctaggccgggggacatttggacaggtggctaagtgctggaagaggagcaccaaggaaattgtggctattaaaatcttgaagaaccacccctcctatgccagacaaggacagattgaagtgagcatcctttcccgcctaagcagtgaaaatgctgatgagtataattttgtccgttcatacgagtgctttcagcataagaatcacacctgccttgtttttgaaatgttggagcagaacttatatgattttctaaagcaaaacaaatttagcccactgccactcaagtacatcagaccaatcttgcagcaggtggccacagccttgatgaagctcaagagtcttggtctgatccacgctgaccttaagcctgaaaacatcatgctggttgatccagttcgccagccctaccgagtgaaggtcattgactttggttctgctagtcacgtttccaaagctgtgtgctcaacctacttacagtcacgttactacaggcaactcctgaaattattcttgggttaccattttgtgaagctattgatatgtggtcactgggctgtgtgatagctgagctgttcctgggatggcctctttatcctggtgcttcagaatatgatcagattcgttatatttcacaaacacaaggcttgccagctgaatatcttctcagtgccggaacaaaaacaaccaggtttttcaacagagatcctaatttggggtacccactgtggaggcttaagacacctgaagaacatgaactggagactggaataaaatcaaaagaagctcggaagtacatttttaattgcttagatgacatggctcaggtgaatatgtctacagacctggagggaacagacatgttggcagagaaggcagaccgaagagaatacattgatctgttaaagaaaatgctcacaattgatgcagataagagaattacccctctaaaaactcttaaccatcagtttgtgacaatgactcaccttttggattttccacatagcaatcatgttaagtcttgttttcagaacatggagatctgcaagcggagggttcacatgtatgatacagtgagtcagatcaagagtcccttcactacacatgttgccccaaatacaagcacaaatctaaccatgagcttcagcaatcagctcaatacagtgcacaatcaggccagtgttctagcttccagttctactgcagcagctgctactctttctctggctaattcagatgtctcactactaaactaccagtcagctttgtacccatcatctgctgcaccagttcctggagttgcccagcagggtgtttccttgcagcctggaaccacccagatttgcactcagacagatccattccaacagacatttatagtatgtccacctgcgtttcaaactggactacaagcaacaacaaagcattctggattccctgtgaggatggataatgctgtaccgattgtaccccaggcaccagctgctcagccactacagattcagtcaggagttctcacgcagggaagctgtacaccactaatggtagcaactctccaccctcaagtagccaccatcacaccgcagtatgcggtgccctttactctgagctgcgcagccggccggccggcgctggttgaacagactgccgctgtactgcaggcgtggcctggagggactcagcaaattctcctgccttcaacttggcaacagttgcctggggtagctctacacaactctgtccagcccacagcaatgattccagaggccatggggagtggacagcagctagctgactggaggaatgcccactctcatggcaaccagtacagcactatcatgcagcagccatccttgctgactaaccatgtgacattggccactgctcagcctctgaatgttggtgttgcccatgttgtcagacaacaacaatccagttccctcccttcgaagaagaataagcagtcagctccagtctcttccaagtcctctctagatgttctgccttcccaagtctattctctggttgggagcagtcccctccgcaccacatcttcttataattccttggtccctgtccaagatcagcatcagcccatcatcattccagatactcccagccctcctgtgagtgtcatcactatccgaagtgacactgatgaggaagaggacaacaaatacaagcccagtagctctggactgaagccaaggtctaatgtcatcagttatgtcactgtcaatgattctccagactctgactcttctttgagcagcccttattccactgataccctgagtgctctccgaggcaatagtggatccgttttggaggggcctggcagagttgtggcagatggcactggcacccgcactatcattgtgcctccactgaaaactcagcttggtgactgcactgtagcaacccaggcctcaggtctcctgagcaataagactaagccagtcgcttcagtgagtgggcagtcatctggatgctgtatcacccccacagggtatcgagctcaacgcggggggaccagtgcagcacaaccactcaatcttagccagaaccagcagtcatcggcggctccaacctcacaggagagaagcagcaacccagccccccgcaggcagcaggcgtttgtggcccctctctcccaagccccctacaccttccagcatggcagcccgctacactcgacagggcacccacaccttgccccggcccctgctcacctgccaagccaggctcatctgtatacgtatgctgccccgacttctgctgctgcactgggctcaaccagctccattgctcatcttttctccccacagggttcctcaaggcatgctgcagcctataccactcaccctagcactttggtgcaccaggtccctgtcagtgttgggcccagcctcctcacttctgccagcgtggcccctgctcagtaccaacaccagtttgccacccaatcctacattgggtcttcccgaggctcaacaatttacactggatacccgctgagtcctaccaagatcagccagtattcctacttatagttggtgagcatgagggaggaggaatcatggctaccttctcctggccctgcgttcttaatattgggctatggagagatcctcctttaccctcttgaaatttcttagccagcaacttgttctgcaggggcccactgaagcagaaggtttttctctgggggaacctgtctcagtgttgactgcattgttgtagtcttcccaaagtttgccctatttttaaattcattatttttgtgacagtaattttggtacttggaagagttcagatgcccatcttctgcagttaccaaggaagagagattgttctgaagttaccctctgaaaaatattttgtctctctgacttgatttctataaatgcttttaaaaacaagtgaagcccctctttatttcattttgtgttattgtgattgctggtcaggaaaaatgctgatagaaggagttgaaatctgatgacaaaaaaagaaaaattactttttgtttgtttataaactcagacttgcctattttattttaaaagcggcttacacaatctcccttttgtttattggacatttaaacttacagagtttcagttttgttttaatgtcatattatacttaatgggcaattgttatttttgcaaaactggttacgtattactctgtgttactattgagattctctcaattgctcctgtgtttgttataaagtagtgtttaaaaggcagctcaccatttgctggtaacttaatgtgagagaatccatatctgcgtgaaaacaccaagtattctttttaaatgaagcaccatgaattcttttttaaattattttttaaaagtctttctctctctgattcagcttaaatttttttatcgaaaaagccattaaggtggttattattacatggtggtggtggttttattatatgcaaaatctctgtctattatgagatactggcattgatgagctttgcctaaagattagtatgaattttcagtaatacacctctgttttgctcatctctcccttctgttttatgtgatttgtttggggagaaagctaaaaaaacctgaaaccagataagaacatttcttgtgtatagcttttatacttcaaagtagcttcctttgtatgccagcagcaaattgaatgctctcttattaagacttatataataagtgcatgtaggaattgcaaaaaatattttaaaaatttattactgaatttaaaaatattttagaagttttgtaatggtggtgttttaatattttacataattaaatatgtacatattgattagaaaaatataacaagcaatttttcctgctaacccaaaatgttatttgtaatcaaatgtgtagtgattacacttgaattgtgtacttagtgtgtatgtgatcctccagtgttatcccggagatggattgatgtctccattgtatttaaaccaaaatgaactgatacttgttggaatgtatgtgaactaattgcaattatattagagcatattactgtagtgctgaatgagcaggggcattgcctgcaaggagaggagacccttggaattgttttgcacaggtgtgtctggtgaggagtttttcagtgtgtgtctcttccttccctttcttcctccttcccttattgtagtgccttatatgataatgtagtggttaatagagtttacagtgagcttgccttaggatggaccagcaagcccccgtggaccctaagttgttcaccgggatttatcagaacaggattagtagctgtattgtgtaatgcattgttctcagtttccctgccaacattgaaaaataaaaacagcagcttttctcctttaccaccacctctacccctttccattttggattctcggctgagttctcacagaagcattttccccatgtggctctctcactgtgcgttgctaccttgcttctgtgagaattcaggaagcaggtgagaggagtcaagccaatattaaatatgcattcttttaaagtatgtgcaatcacttttagaatgaatttttttttccttttcccatgtggcagtccttcctgcacatagttgacattcctagtaaaatatttgcttgttgaaaaaaacatgttaacagatgtgtttataccaaagagcctgttgtattgcttaccatgtccccatactatgaggagaagttttgtggtgccgctggtgacaaggaactcacagaaaggtttcttagctggtgaagaatatagagaaggaaccaaagcctgttgagtcattgaggcttttgaggtttcttttttaacagcttgtatagtcttggggcccttcaagctgtgaaattgtccttgtactctcagctcctgcatggatctgggtcaagtagaaggtactggggatggggacattcctgcccataaaggatttggggaaagaagattaatcctaaaatacaggtgtgttccatctgaattgaaaatgatatatttgagatataattttaggactggttctgtgtagatagagatggtgtcaaggaggtgcaggatggagatgggagatttcatggagcctggtcagccagctctgtaccaggttgaacaccgaggagctgtcaaagtatttggagtttcttcattgtaaggagtaagggcttccaagatggggcaggtagtccgtacagcctaccaggaacatgttgtgttttctttattttttaaaatcattatattgagttgtgttttcagcactatattggtcaagatagccaagcagtttgtataatttctgtcactagtgtcatacagttttctggtcaacatgtgtgatctttgtgtctcctttttgccaagcacattctgattttcttgttggaacacaggtctagtttctaaaggacaaattttttgttccttgtcttttttctgtaagggacaagatttgttgtttttgtaagaaatgagatgcaggaaagaaaaccaaatcccattcctgcaccccagtccaataagcagataccacttaagataggagtctaaactccacagaaaaggataataccaagagcttgtattgttaccttagtcacttgcctagcagtgtgtggctttaaaaactagagatttttcagtcttagtctgcaaactggcatttccgattttccagcataaaaatccacctgtgtctgctgaatgtgtatgtatgtgctcactgtggctttagattctgtccctggggttagccctgttggccctgacaggaagggaggaagcctggtgaatttagtgagcagctggcctgggtcacagtgacctgacctcaaaccagcttaaggctttaagtcctctctcagaacttggcatttccaacttcttcctttccgggtgagagaagaagcggagaagggttcagtgtagccactctgggctcatagggacacttggtcactccagagtttttaatagctcccaggaggtgatattattttcagtgctcagctgaaataccaaccccaggaataagaactccatttcaaacagttctggccattctgagcctgcttttgtgattgctcatccattgtcctccactagaggggctaagcttgactgcccttagccaggcaagcacagtaatgtgtgttttgttcagcattattatgcaaaaattcactagttgagatggtttgttttaggataggaaatgaaattgcctctcagtgacaggagtggcccgagcctgcttcctattttgattttttttttttttaactgatagatggtgcagcatgtctacatggttgtttgttgctaaactttatataatgtgtggtttcaattcagcttgaaaaataatctcactacatgtagcagtacattatatgtacattatatgtaatgttagtatttctgctttgaatccttgatattgcaatggaattcctactttattaaatgtatttgatatgctagttattgtgtgcgatttaaactttttttgctttctccctttttttggttgtgcgctttcttttacaacaagcctctagaaacagatagtttctgagaattactgagctatgtttgtaatgcagatgtacttagggagtatgtaaaataatcattttaacaaaagaaatagatatttaaaatttaatactaactatgggaaaagggtccattgtgtaaaacatagtttatctttggattcaatgtttgtctttggttttacaaagtagcttgtattttcagtattttctacataatatggtaaaatgtagagcaattgcaatgcatcaataaaatgggtaaattttctgactt

SEQ ID NO: 2765 - protein, 836 aa, Homo sapiens; identical to SEQ ID NO: 93

SEQ ID NO: 2766 - DNA, 8088 bp, Homo sapiens
tatgatgacccggctgcggggccccagatctcgtctcctccgccgcctcctcacggcagccccagctcgcggctgagaaccagacacaccggcggtatggcatcacagctgcaagtgttttcgcccccatcagtgtcgtcgagtgccttctgcagtgcgaagaaactgaaaatagagccctctggctgggatgtttcaggacagagtagcaacgacaaatattatacccacagcaaaaccctcccagccacacaagggcaagccaactcctctcaccaggtagcaaatttcaacatccctgcttacgaccagggcctcctcctcccagctcctgcagtggagcatattgttgtaacagccgctgatagctcgggcagtgctgctacatcaaccttccaaagcagccagaccctgactcacagaagcaacgtttctttgcttgagccatatcaaaaatgtggattgaaacgaaaaagtgaggaagttgacagcaacggtagtgtgcagatcatagaagaacatccccctctcatgctgcaaaacaggactgtggtgggtgctgctgccacaaccaccactgtgaccacaaagagtagcagttccagcggagaaggggattaccagctggtccagcatgagatcctttgctctatgaccaatagctatgaagtcttggagttcctaggccgggggacatttggacaggtggctaagtgctggaagaggagcaccaaggaaattgtggctattaaaatcttgaagaaccacccctcctatgccagacaaggacagattgaagtgagcatcctttcccgcctaagcagtgaaaatgctgatgagtataattttgtccgttcatacgagtgctttcagcataagaatcacacctgccttgtttttgaaatgttggagcagaacttatatgattttctaaagcaaaacaaatttagcccactgccactcaagtacatcagaccaatcttgcagcaggtggccacagccttgatgaagctcaagagtcttggtctgatccacgctgaccttaagcctgaaaacatcatgctggttgatccagttcgccagccctaccgagtgaaggtcattgactttggttctgctagtcacgtttccaaagctgtgtgctcaacctacttacagtcacgttactacaggcaactcctgaaattattcttgggttaccattttgtgaagctattgatatgtggtcactgggctgtgtgatagctgagctgttcctgggatggcctctttatcctggtgcttcagaatatgatcagattcgttatatttcacaaacacaaggcttgccagctgaatatcttctcagtgccggaacaaaaacaaccaggtttttcaacagagatcctaatttggggtacccactgtggaggcttaagacacctgaagaacatgaactggagactggaataaaatcaaaagaagctcggaagtacatttttaattgcttagatgacatggctcaggtgaatatgtctacagacctggagggaacagacatgttggcagagaaggcagaccgaagagaatacattgatctgttaaagaaaatgctcacaattgatgcagataagagaattacccctctaaaaactcttaaccatcagtttgtgacaatgactcaccttttggattttccacatagcaatcatgttaagtcttgttttcagaacatggagatctgcaagcggagggttcacatgtatgatacagtgagtcagatcaagagtcccttcactacacatgttgccccaaatacaagcacaaatctaaccatgagcttcagcaatcagctcaatacagtgcacaatcaggccagtgttctagcttccagttctactgcagcagctgctactctttctctggctaattcagatgtctcactactaaactaccagtcagctttgtacccatcatctgctgcaccagttcctggagttgcccagcagggtgtttccttgcagcctggaaccacccagatttgcactcagacagatccattccaacagacatttatagtatgtccacctgcgtttcaaactggactacaagcaacaacaaagcattctggattccctgtgaggatggataatgctgtaccgattgtaccccaggcaccagctgctcagccactacagattcagtcaggagttctcacgcagggaagctgtacaccactaatggtagcaactctccaccctcaagtagccaccatcacaccgcagtatgcggtgccctttactctgagctgcgcagccggccggccggcgctggttgaacagactgccgctgtactgcaggcgtggcctggagggactcagcaaattctcctgccttcaacttggcaacagttgcctggggtagctctacacaactctgtccagcccacagcaatgattccagaggccatggggagtggacagcagctagctgactggaggaatgcccactctcatggcaaccagtacagcactatcatgcagcagccatccttgctgactaaccatgtgacattggccactgctcagcctctgaatgttggtgttgcccatgttgtcagacaacaacaatccagttccctcccttcgaagaagaataagcagtcagctccagtctcttccaagtcctctctagatgttctgccttcccaagtctattctctggttgggagcagtcccctccgcaccacatcttcttataattccttggtccctgtccaagatcagcatcagcccatcatcattccagatactcccagccctcctgtgagtgtcatcactatccgaagtgacactgatgaggaagaggacaacaaatacaagcccagtagctctggactgaagccaaggtctaatgtcatcagttatgtcactgtcaatgattctccagactctgactcttctttgagcagcccttattccactgataccctgagtgctctccgaggcaatagtggatccgttttggaggggcctggcagagttgtggcagatggcactggcacccgcactatcattgtgcctccactgaaaactcagcttggtgactgcactgtagcaacccaggcctcaggtctcctgagcaataagactaagccagtcgcttcagtgagtgggcagtcatctggatgctgtatcacccccacagggtatcgagctcaacgcggggggaccagtgcagcacaaccactcaatcttagccagaaccagcagtcatcggcggctccaacctcacaggagagaagcagcaacccagccccccgcaggcagcaggcgtttgtggcccctctctcccaagccccctacaccttccagcatggcagcccgctacactcgacagggcacccacaccttgccccggcccctgctcacctgccaagccaggctcatctgtatacgtatgctgccccgacttctgctgctgcactgggctcaaccagctccattgctcatcttttctccccacagggttcctcaaggcatgctgcagcctataccactcaccctagcactttggtgcaccaggtccctgtcagtgttgggcccagcctcctcacttctgccagcgtggcccctgctcagtaccaacaccagtttgccacccaatcctacattgggtcttcccgaggctcaacaatttacactggatacccgctgagtcctaccaagatcagccagtattcctacttatagttggtgagcatgagggaggaggaatcatggctaccttctcctggccctgcgttcttaatattgggctatggagagatcctcctttaccctcttgaaatttcttagccagcaacttgttctgcaggggcccactgaagcagaaggtttttctctgggggaacctgtctcagtgttgactgcattgttgtagtcttcccaaagtttgccctatttttaaattcattatttttgtgacagtaattttggtacttggaagagttcagatgcccatcttctgcagttaccaaggaagagagattgttctgaagttaccctctgaaaaatattttgtctctctgacttgatttctataaatgcttttaaaaacaagtgaagcccctctttatttcattttgtgttattgtgattgctggtcaggaaaaatgctgatagaaggagttgaaatctgatgacaaaaaaagaaaaattactttttgtttgtttataaactcagacttgcctattttattttaaaagcggcttacacaatctcccttttgtttattggacatttaaacttacagagtttcagttttgttttaatgtcatattatacttaatgggcaattgttatttttgcaaaactggttacgtattactctgtgttactattgagattctctcaattgctcctgtgtttgttataaagtagtgtttaaaaggcagctcaccatttgctggtaacttaatgtgagagaatccatatctgcgtgaaaacaccaagtattctttttaaatgaagcaccatgaattcttttttaaattattttttaaaagtctttctctctctgattcagcttaaatttttttatcgaaaaagccattaaggtggttattattacatggtggtggtggttttattatatgcaaaatctctgtctattatgagatactggcattgatgagctttgcctaaagattagtatgaattttcagtaatacacctctgttttgctcatctctcccttctgttttatgtgatttgtttggggagaaagctaaaaaaacctgaaaccagataagaacatttcttgtgtatagcttttatacttcaaagtagcttcctttgtatgccagcagcaaattgaatgctctcttattaagacttatataataagtgcatgtaggaattgcaaaaaatattttaaaaatttattactgaatttaaaaatattttagaagttttgtaatggtggtgttttaatattttacataattaaatatgtacatattgattagaaaaatataacaagcaatttttcctgctaacccaaaatgttatttgtaatcaaatgtgtagtgattacacttgaattgtgtacttagtgtgtatgtgatcctccagtgttatcccggagatggattgatgtctccattgtatttaaaccaaaatgaactgatacttgttggaatgtatgtgaactaattgcaattatattagagcatattactgtagtgctgaatgagcaggggcattgcctgcaaggagaggagacccttggaattgttttgcacaggtgtgtctggtgaggagtttttcagtgtgtgtctcttccttccctttcttcctccttcccttattgtagtgccttatatgataatgtagtggttaatagagtttacagtgagcttgccttaggatggaccagcaagcccccgtggaccctaagttgttcaccgggatttatcagaacaggattagtagctgtattgtgtaatgcattgttctcagtttccctgccaacattgaaaaataaaaacagcagcttttctcctttaccaccacctctacccctttccattttggattctcggctgagttctcacagaagcattttccccatgtggctctctcactgtgcgttgctaccttgcttctgtgagaattcaggaagcaggtgagaggagtcaagccaatattaaatatgcattcttttaaagtatgtgcaatcacttttagaatgaatttttttttccttttcccatgtggcagtccttcctgcacatagttgacattcctagtaaaatatttgcttgttgaaaaaaacatgttaacagatgtgtttataccaaagagcctgttgtattgcttaccatgtccccatactatgaggagaagttttgtggtgccgctggtgacaaggaactcacagaaaggtttcttagctggtgaagaatatagagaaggaaccaaagcctgttgagtcattgaggcttttgaggtttcttttttaacagcttgtatagtcttggggcccttcaagctgtgaaattgtccttgtactctcagctcctgcatggatctgggtcaagtagaaggtactggggatggggacattcctgcccataaaggatttggggaaagaagattaatcctaaaatacaggtgtgttccatctgaattgaaaatgatatatttgagatataattttaggactggttctgtgtagatagagatggtgtcaaggaggtgcaggatggagatgggagatttcatggagcctggtcagccagctctgtaccaggttgaacaccgaggagctgtcaaagtatttggagtttcttcattgtaaggagtaagggcttccaagatggggcaggtagtccgtacagcctaccaggaacatgttgtgttttctttattttttaaaatcattatattgagttgtgttttcagcactatattggtcaagatagccaagcagtttgtataatttctgtcactagtgtcatacagttttctggtcaacatgtgtgatctttgtgtctcctttttgccaagcacattctgattttcttgttggaacacaggtctagtttctaaaggacaaattttttgttccttgtcttttttctgtaagggacaagatttgttgtttttgtaagaaatgagatgcaggaaagaaaaccaaatcccattcctgcaccccagtccaataagcagataccacttaagataggagtctaaactccacagaaaaggataataccaagagcttgtattgttaccttagtcacttgcctagcagtgtgtggctttaaaaactagagatttttcagtcttagtctgcaaactggcatttccgattttccagcataaaaatccacctgtgtctgctgaatgtgtatgtatgtgctcactgtggctttagattctgtccctggggttagccctgttggccctgacaggaagggaggaagcctggtgaatttagtgagcagctggcctgggtcacagtgacctgacctcaaaccagcttaaggctttaagtcctctctcagaacttggcatttccaacttcttcctttccgggtgagagaagaagcggagaagggttcagtgtagccactctgggctcatagggacacttggtcactccagagtttttaatagctcccaggaggtgatattattttcagtgctcagctgaaataccaaccccaggaataagaactccatttcaaacagttctggccattctgagcctgcttttgtgattgctcatccattgtcctccactagaggggctaagcttgactgcccttagccaggcaagcacagtaatgtgtgttttgttcagcattattatgcaaaaattcactagttgagatggtttgttttaggataggaaatgaaattgcctctcagtgacaggagtggcccgagcctgcttcctattttgattttttttttttttaactgatagatggtgcagcatgtctacatggttgtttgttgctaaactttatataatgtgtggtttcaattcagcttgaaaaataatctcactacatgtagcagtacattatatgtacattatatgtaatgttagtatttctgctttgaatccttgatattgcaatggaattcctactttattaaatgtatttgatatgctagttattgtgtgcgatttaaactttttttgctttctccctttttttggttgtgcgctttcttttacaacaagcctctagaaacagatagtttctgagaattactgagctatgtttgtaatgcagatgtacttagggagtatgtaaaataatcattttaacaaaagaaatagatatttaaaatttaatactaactatgggaaaagggtccattgtgtaaaacatagtttatctttggattcaatgtttgtctttggttttacaaagtagcttgtattttcagtattttctacataatatggtaaaatgtagagcaattgcaatgcatcaataaaatgggtaaattttctgacttatgtggctgtttttgacttctgttataggatataaaggggatcaataaatgacatctttgaaagtg

SEQ ID NO: 2767 - protein, 836 aa, Homo sapiens; identical to SEQ ID NO: 93

SEQ ID NO: 2768 - DNA, 3066 bp, Homo sapiens
atagtaggcaatatttatgtgtcatttattattattgctattagtgttacctattattttctttttgaacccacttattgcctaattagtcatagtttgacaattgcccttgtattccaccatgtcaaatataaatttacatagatgaagctcctgaaattattcttgggttaccattttgtgaagctattgatatgtggtcactgggctgtgtgatagctgagctgttcctgggatggcctctttatcctggtgcttcagaatatgatcagattcgttatatttcacaaacacaaggcttgccagctgaatatcttctcagtgccggaacaaaaacaaccaggtttttcaacagagatcctaatttggggtacccactgtggaggcttaagacacctgaagaacatgaactggagactggaataaaatcaaaagaagctcggaagtacatttttaattgcttagatgacatggctcaggtgaatatgtctacagacctggagggaacagacatgttggcagagaaggcagaccgaagagaatacattgatctgttaaagaaaatgctcacaattgatgcagataagagaattacccctctaaaaactcttaaccatcagtttgtgacaatgactcaccttttggattttccacatagcaatcatgttaagtcttgttttcagaacatggagatctgcaagcggagggttcacatgtatgatacagtgagtcagatcaagagtcccttcactacacatgttgccccaaatacaagcacaaatctaaccatgagcttcagcaatcagctcaatacagtgcacaatcaggccagtgttctagcttccagttctactgcagcagctgctactctttctctggctaattcagatgtctcactactaaactaccagtcagctttgtacccatcatctgctgcaccagttcctggagttgcccagcagggtgtttccttgcagcctggaaccacccagatttgcactcagacagatccattccaacagacatttatagtatgtccacctgcgtttcaaactggactacaagcaacaacaaagcattctggattccctgtgaggatggataatgctgtaccgattgtaccccaggcaccagctgctcagccactacagattcagtcaggagttctcacgcagggaagctgtacaccactaatggtagcaactctccaccctcaagtagccaccatcacaccgcagtatgcggtgccctttactctgagctgcgcagccggccggccggcgctggttgaacagactgccgctgtactgcaggcgtggcctggagggactcagcaaattctcctgccttcaacttggcaacagttgcctggggtagctctacacaactctgtccagcccacagcaatgattccagaggccatggggagtggacagcagctagctgactggaggaatgcccactctcatggcaaccagtacagcactatcatgcagcagccatccttgctgactaaccatgtgacattggccactgctcagcctctgaatgttggtgttgcccatgttgtcagacaacaacaatccagttccctcccttcgaagaagaataagcagtcagctccagtctcttccaagtcctctctagatgttctgccttcccaagtctattctctggttgggagcagtcccctccgcaccacatcttcttataattccttggtccctgtccaagatcagcatcagcccatcatcattccagatactcccagccctcctgtgagtgtcatcactatccgaagtgacactgatgaggaagaggacaacaaatacaagcccagtagctctggactgaagccaaggtctaatgtcatcagttatgtcactgtcaatgattctccagactctgactcttctttgagcagcccttattccactgataccctgagtgctctccgaggcaatagtggatccgttttggaggggcctggcagagttgtggcagatggcactggcacccgcactatcattgtgcctccactgaaaactcagcttggtgactgcactgtagcaacccaggcctcaggtctcctgagcaataagactaagccagtcgcttcagtgagtgggcagtcatctggatgctgtatcacccccacagggtatcgagctcaacgcggggggaccagtgcagcacaaccactcaatcttagccagaaccagcagtcatcggcggctccaacctcacaggagagaagcagcaacccagccccccgcaggcagcaggcgtttgtggcccctctctcccaagccccctacaccttccagcatggcagcccgctacactcgacagggcacccacaccttgccccggcccctgctcacctgccaagccaggctcatctgtatacgtatgctgccccgacttctgctgctgcactgggctcaaccagctccattgctcatcttttctccccacagggttcctcaaggcatgctgcagcctataccactcaccctagcactttggtgcaccaggtccctgtcagtgttgggcccagcctcctcacttctgccagcgtggcccctgctcagtaccaacaccagtttgccacccaatcctacattgggtcttcccgaggctcaacaatttacactggatacccgctgagtcctaccaagatcagccagtattcctacttatagttggtgagcatgagggaggaggaatcatggctaccttctcctggccctgcgttcttaatattgggctatggagagatcctcctttaccctcttgaaatttcttagccagcaacttgttctgcaggggcccactgaagcagaaggtttttctctgggggaacctgtctcagtgttgactgcattgttgtagtcttcccaaagtttgccctatttttaaattcattatttttgtgacagtaattttggtacttggaagagttcagatgcccatcttctgcagttaccaaggaagagagattgttctgaagttaccctctgaaaaatattttgtctctctgacttgatttctataaatgctttt

SEQ ID NO: 2769 - protein, 836 aa, Homo sapiens; identical to SEQ ID NO: 93

SEQ ID NO: 2770 - DNA, 6996 bp, Homo sapiens
atagtaggcaatatttatgtgtcatttattattattgctattagtgttacctattattttctttttgaacccacttattgcctaattagtcatagtttgacaattgcccttgtattccaccatgtcaaatataaatttacatagatgaagctcctgaaattattcttgggttaccattttgtgaagctattgatatgtggtcactgggctgtgtgatagctgagctgttcctgggatggcctctttatcctggtgcttcagaatatgatcagattcgttatatttcacaaacacaaggcttgccagctgaatatcttctcagtgccggaacaaaaacaaccaggtttttcaacagagatcctaatttggggtacccactgtggaggcttaagacacctgaagaacatgaactggagactggaataaaatcaaaagaagctcggaagtacatttttaattgcttagatgacatggctcaggtgaatatgtctacagacctggagggaacagacatgttggcagagaaggcagaccgaagagaatacattgatctgttaaagaaaatgctcacaattgatgcagataagagaattacccctctaaaaactcttaaccatcagtttgtgacaatgactcaccttttggattttccacatagcaatcatgttaagtcttgttttcagaacatggagatctgcaagcggagggttcacatgtatgatacagtgagtcagatcaagagtcccttcactacacatgttgccccaaatacaagcacaaatctaaccatgagcttcagcaatcagctcaatacagtgcacaatcaggccagtgttctagcttccagttctactgcagcagctgctactctttctctggctaattcagatgtctcactactaaactaccagtcagctttgtacccatcatctgctgcaccagttcctggagttgcccagcagggtgtttccttgcagcctggaaccacccagatttgcactcagacagatccattccaacagacatttatagtatgtccacctgcgtttcaaactggactacaagcaacaacaaagcattctggattccctgtgaggatggataatgctgtaccgattgtaccccaggcaccagctgctcagccactacagattcagtcaggagttctcacgcagggaagctgtacaccactaatggtagcaactctccaccctcaagtagccaccatcacaccgcagtatgcggtgccctttactctgagctgcgcagccggccggccggcgctggttgaacagactgccgctgtactgcaggcgtggcctggagggactcagcaaattctcctgccttcaacttggcaacagttgcctggggtagctctacacaactctgtccagcccacagcaatgattccagaggccatggggagtggacagcagctagctgactggaggaatgcccactctcatggcaaccagtacagcactatcatgcagcagccatccttgctgactaaccatgtgacattggccactgctcagcctctgaatgttggtgttgcccatgttgtcagacaacaacaatccagttccctcccttcgaagaagaataagcagtcagctccagtctcttccaagtcctctctagatgttctgccttcccaagtctattctctggttgggagcagtcccctccgcaccacatcttcttataattccttggtccctgtccaagatcagcatcagcccatcatcattccagatactcccagccctcctgtgagtgtcatcactatccgaagtgacactgatgaggaagaggacaacaaatacaagcccagtagctctggactgaagccaaggtctaatgtcatcagttatgtcactgtcaatgattctccagactctgactcttctttgagcagcccttattccactgataccctgagtgctctccgaggcaatagtggatccgttttggaggggcctggcagagttgtggcagatggcactggcacccgcactatcattgtgcctccactgaaaactcagcttggtgactgcactgtagcaacccaggcctcaggtctcctgagcaataagactaagccagtcgcttcagtgagtgggcagtcatctggatgctgtatcacccccacagggtatcgagctcaacgcggggggaccagtgcagcacaaccactcaatcttagccagaaccagcagtcatcggcggctccaacctcacaggagagaagcagcaacccagccccccgcaggcagcaggcgtttgtggcccctctctcccaagccccctacaccttccagcatggcagcccgctacactcgacagggcacccacaccttgccccggcccctgctcacctgccaagccaggctcatctgtatacgtatgctgccccgacttctgctgctgcactgggctcaaccagctccattgctcatcttttctccccacagggttcctcaaggcatgctgcagcctataccactcaccctagcactttggtgcaccaggtccctgtcagtgttgggcccagcctcctcacttctgccagcgtggcccctgctcagtaccaacaccagtttgccacccaatcctacattgggtcttcccgaggctcaacaatttacactggatacccgctgagtcctaccaagatcagccagtattcctacttatagttggtgagcatgagggaggaggaatcatggctaccttctcctggccctgcgttcttaatattgggctatggagagatcctcctttaccctcttgaaatttcttagccagcaacttgttctgcaggggcccactgaagcagaaggtttttctctgggggaacctgtctcagtgttgactgcattgttgtagtcttcccaaagtttgccctatttttaaattcattatttttgtgacagtaattttggtacttggaagagttcagatgcccatcttctgcagttaccaaggaagagagattgttctgaagttaccctctgaaaaatattttgtctctctgacttgatttctataaatgcttttaaaaacaagtgaagcccctctttatttcattttgtgttattgtgattgctggtcaggaaaaatgctgatagaaggagttgaaatctgatgacaaaaaaagaaaaattactttttgtttgtttataaactcagacttgcctattttattttaaaagcggcttacacaatctcccttttgtttattggacatttaaacttacagagtttcagttttgttttaatgtcatattatacttaatgggcaattgttatttttgcaaaactggttacgtattactctgtgttactattgagattctctcaattgctcctgtgtttgttataaagtagtgtttaaaaggcagctcaccatttgctggtaacttaatgtgagagaatccatatctgcgtgaaaacaccaagtattctttttaaatgaagcaccatgaattcttttttaaattattttttaaaagtctttctctctctgattcagcttaaatttttttatcgaaaaagccattaaggtggttattattacatggtggtggtggttttattatatgcaaaatctctgtctattatgagatactggcattgatgagctttgcctaaagattagtatgaattttcagtaatacacctctgttttgctcatctctcccttctgttttatgtgatttgtttggggagaaagctaaaaaaacctgaaaccagataagaacatttcttgtgtatagcttttatacttcaaagtagcttcctttgtatgccagcagcaaattgaatgctctcttattaagacttatataataagtgcatgtaggaattgcaaaaaatattttaaaaatttattactgaatttaaaaatattttagaagttttgtaatggtggtgttttaatattttacataattaaatatgtacatattgattagaaaaatataacaagcaatttttcctgctaacccaaaatgttatttgtaatcaaatgtgtagtgattacacttgaattgtgtacttagtgtgtatgtgatcctccagtgttatcccggagatggattgatgtctccattgtatttaaaccaaaatgaactgatacttgttggaatgtatgtgaactaattgcaattatattagagcatattactgtagtgctgaatgagcaggggcattgcctgcaaggagaggagacccttggaattgttttgcacaggtgtgtctggtgaggagtttttcagtgtgtgtctcttccttccctttcttcctccttcccttattgtagtgccttatatgataatgtagtggttaatagagtttacagtgagcttgccttaggatggaccagcaagcccccgtggaccctaagttgttcaccgggatttatcagaacaggattagtagctgtattgtgtaatgcattgttctcagtttccctgccaacattgaaaaataaaaacagcagcttttctcctttaccaccacctctacccctttccattttggattctcggctgagttctcacagaagcattttccccatgtggctctctcactgtgcgttgctaccttgcttctgtgagaattcaggaagcaggtgagaggagtcaagccaatattaaatatgcattcttttaaagtatgtgcaatcacttttagaatgaatttttttttccttttcccatgtggcagtccttcctgcacatagttgacattcctagtaaaatatttgcttgttgaaaaaaacatgttaacagatgtgtttataccaaagagcctgttgtattgcttaccatgtccccatactatgaggagaagttttgtggtgccgctggtgacaaggaactcacagaaaggtttcttagctggtgaagaatatagagaaggaaccaaagcctgttgagtcattgaggcttttgaggtttcttttttaacagcttgtatagtcttggggcccttcaagctgtgaaattgtccttgtactctcagctcctgcatggatctgggtcaagtagaaggtactggggatggggacattcctgcccataaaggatttggggaaagaagattaatcctaaaatacaggtgtgttccatctgaattgaaaatgatatatttgagatataattttaggactggttctgtgtagatagagatggtgtcaaggaggtgcaggatggagatgggagatttcatggagcctggtcagccagctctgtaccaggttgaacaccgaggagctgtcaaagtatttggagtttcttcattgtaaggagtaagggcttccaagatggggcaggtagtccgtacagcctaccaggaacatgttgtgttttctttattttttaaaatcattatattgagttgtgttttcagcactatattggtcaagatagccaagcagtttgtataatttctgtcactagtgtcatacagttttctggtcaacatgtgtgatctttgtgtctcctttttgccaagcacattctgattttcttgttggaacacaggtctagtttctaaaggacaaattttttgttccttgtcttttttctgtaagggacaagatttgttgtttttgtaagaaatgagatgcaggaaagaaaaccaaatcccattcctgcaccccagtccaataagcagataccacttaagataggagtctaaactccacagaaaaggataataccaagagcttgtattgttaccttagtcacttgcctagcagtgtgtggctttaaaaactagagatttttcagtcttagtctgcaaactggcatttccgattttccagcataaaaatccacctgtgtctgctgaatgtgtatgtatgtgctcactgtggctttagattctgtccctggggttagccctgttggccctgacaggaagggaggaagcctggtgaatttagtgagcagctggcctgggtcacagtgacctgacctcaaaccagcttaaggctttaagtcctctctcagaacttggcatttccaacttcttcctttccgggtgagagaagaagcggagaagggttcagtgtagccactctgggctcatagggacacttggtcactccagagtttttaatagctcccaggaggtgatattattttcagtgctcagctgaaataccaaccccaggaataagaactccatttcaaacagttctggccattctgagcctgcttttgtgattgctcatccattgtcctccactagaggggctaagcttgactgcccttagccaggcaagcacagtaatgtgtgttttgttcagcattattatgcaaaaattcactagttgagatggtttgttttaggataggaaatgaaattgcctctcagtgacaggagtggcccgagcctgcttcctattttgattttttttttttttaactgatagatggtgcagcatgtctacatggttgtttgttgctaaactttatataatgtgtggtttcaattcagcttgaaaaataatctcactacatgtagcagtacattatatgtacattatatgtaatgttagtatttctgctttgaatccttgatattgcaatggaattcctactttattaaatgtatttgatatgctagttattgtgtgcgatttaaactttttttgctttctccctttttttggttgtgcgctttcttttacaacaagcctctagaaacagatagtttctgagaattactgagctatgtttgtaatgcagatgtacttagggagtatgtaaaataatcattttaacaaaagaaatagatatttaaaatttaatactaactatgggaaaagggtccattgtgtaaaacatagtttatctttggattcaatgtttgtctttggttttacaaagtagcttgtattttcagtattttctacataatatggtaaaatgtagagcaattgcaatgcatcaataaaatgggtaaattttctgactt

SEQ ID NO: 2771 - protein, 836 aa, Homo sapiens; identical to SEQ ID NO: 93

SEQ ID NO: 2772 - DNA, 7062 bp, Homo sapiens
atagtaggcaatatttatgtgtcatttattattattgctattagtgttacctattattttctttttgaacccacttattgcctaattagtcatagtttgacaattgcccttgtattccaccatgtcaaatataaatttacatagatgaagctcctgaaattattcttgggttaccattttgtgaagctattgatatgtggtcactgggctgtgtgatagctgagctgttcctgggatggcctctttatcctggtgcttcagaatatgatcagattcgttatatttcacaaacacaaggcttgccagctgaatatcttctcagtgccggaacaaaaacaaccaggtttttcaacagagatcctaatttggggtacccactgtggaggcttaagacacctgaagaacatgaactggagactggaataaaatcaaaagaagctcggaagtacatttttaattgcttagatgacatggctcaggtgaatatgtctacagacctggagggaacagacatgttggcagagaaggcagaccgaagagaatacattgatctgttaaagaaaatgctcacaattgatgcagataagagaattacccctctaaaaactcttaaccatcagtttgtgacaatgactcaccttttggattttccacatagcaatcatgttaagtcttgttttcagaacatggagatctgcaagcggagggttcacatgtatgatacagtgagtcagatcaagagtcccttcactacacatgttgccccaaatacaagcacaaatctaaccatgagcttcagcaatcagctcaatacagtgcacaatcaggccagtgttctagcttccagttctactgcagcagctgctactctttctctggctaattcagatgtctcactactaaactaccagtcagctttgtacccatcatctgctgcaccagttcctggagttgcccagcagggtgtttccttgcagcctggaaccacccagatttgcactcagacagatccattccaacagacatttatagtatgtccacctgcgtttcaaactggactacaagcaacaacaaagcattctggattccctgtgaggatggataatgctgtaccgattgtaccccaggcaccagctgctcagccactacagattcagtcaggagttctcacgcagggaagctgtacaccactaatggtagcaactctccaccctcaagtagccaccatcacaccgcagtatgcggtgccctttactctgagctgcgcagccggccggccggcgctggttgaacagactgccgctgtactgcaggcgtggcctggagggactcagcaaattctcctgccttcaacttggcaacagttgcctggggtagctctacacaactctgtccagcccacagcaatgattccagaggccatggggagtggacagcagctagctgactggaggaatgcccactctcatggcaaccagtacagcactatcatgcagcagccatccttgctgactaaccatgtgacattggccactgctcagcctctgaatgttggtgttgcccatgttgtcagacaacaacaatccagttccctcccttcgaagaagaataagcagtcagctccagtctcttccaagtcctctctagatgttctgccttcccaagtctattctctggttgggagcagtcccctccgcaccacatcttcttataattccttggtccctgtccaagatcagcatcagcccatcatcattccagatactcccagccctcctgtgagtgtcatcactatccgaagtgacactgatgaggaagaggacaacaaatacaagcccagtagctctggactgaagccaaggtctaatgtcatcagttatgtcactgtcaatgattctccagactctgactcttctttgagcagcccttattccactgataccctgagtgctctccgaggcaatagtggatccgttttggaggggcctggcagagttgtggcagatggcactggcacccgcactatcattgtgcctccactgaaaactcagcttggtgactgcactgtagcaacccaggcctcaggtctcctgagcaataagactaagccagtcgcttcagtgagtgggcagtcatctggatgctgtatcacccccacagggtatcgagctcaacgcggggggaccagtgcagcacaaccactcaatcttagccagaaccagcagtcatcggcggctccaacctcacaggagagaagcagcaacccagccccccgcaggcagcaggcgtttgtggcccctctctcccaagccccctacaccttccagcatggcagcccgctacactcgacagggcacccacaccttgccccggcccctgctcacctgccaagccaggctcatctgtatacgtatgctgccccgacttctgctgctgcactgggctcaaccagctccattgctcatcttttctccccacagggttcctcaaggcatgctgcagcctataccactcaccctagcactttggtgcaccaggtccctgtcagtgttgggcccagcctcctcacttctgccagcgtggcccctgctcagtaccaacaccagtttgccacccaatcctacattgggtcttcccgaggctcaacaatttacactggatacccgctgagtcctaccaagatcagccagtattcctacttatagttggtgagcatgagggaggaggaatcatggctaccttctcctggccctgcgttcttaatattgggctatggagagatcctcctttaccctcttgaaatttcttagccagcaacttgttctgcaggggcccactgaagcagaaggtttttctctgggggaacctgtctcagtgttgactgcattgttgtagtcttcccaaagtttgccctatttttaaattcattatttttgtgacagtaattttggtacttggaagagttcagatgcccatcttctgcagttaccaaggaagagagattgttctgaagttaccctctgaaaaatattttgtctctctgacttgatttctataaatgcttttaaaaacaagtgaagcccctctttatttcattttgtgttattgtgattgctggtcaggaaaaatgctgatagaaggagttgaaatctgatgacaaaaaaagaaaaattactttttgtttgtttataaactcagacttgcctattttattttaaaagcggcttacacaatctcccttttgtttattggacatttaaacttacagagtttcagttttgttttaatgtcatattatacttaatgggcaattgttatttttgcaaaactggttacgtattactctgtgttactattgagattctctcaattgctcctgtgtttgttataaagtagtgtttaaaaggcagctcaccatttgctggtaacttaatgtgagagaatccatatctgcgtgaaaacaccaagtattctttttaaatgaagcaccatgaattcttttttaaattattttttaaaagtctttctctctctgattcagcttaaatttttttatcgaaaaagccattaaggtggttattattacatggtggtggtggttttattatatgcaaaatctctgtctattatgagatactggcattgatgagctttgcctaaagattagtatgaattttcagtaatacacctctgttttgctcatctctcccttctgttttatgtgatttgtttggggagaaagctaaaaaaacctgaaaccagataagaacatttcttgtgtatagcttttatacttcaaagtagcttcctttgtatgccagcagcaaattgaatgctctcttattaagacttatataataagtgcatgtaggaattgcaaaaaatattttaaaaatttattactgaatttaaaaatattttagaagttttgtaatggtggtgttttaatattttacataattaaatatgtacatattgattagaaaaatataacaagcaatttttcctgctaacccaaaatgttatttgtaatcaaatgtgtagtgattacacttgaattgtgtacttagtgtgtatgtgatcctccagtgttatcccggagatggattgatgtctccattgtatttaaaccaaaatgaactgatacttgttggaatgtatgtgaactaattgcaattatattagagcatattactgtagtgctgaatgagcaggggcattgcctgcaaggagaggagacccttggaattgttttgcacaggtgtgtctggtgaggagtttttcagtgtgtgtctcttccttccctttcttcctccttcccttattgtagtgccttatatgataatgtagtggttaatagagtttacagtgagcttgccttaggatggaccagcaagcccccgtggaccctaagttgttcaccgggatttatcagaacaggattagtagctgtattgtgtaatgcattgttctcagtttccctgccaacattgaaaaataaaaacagcagcttttctcctttaccaccacctctacccctttccattttggattctcggctgagttctcacagaagcattttccccatgtggctctctcactgtgcgttgctaccttgcttctgtgagaattcaggaagcaggtgagaggagtcaagccaatattaaatatgcattcttttaaagtatgtgcaatcacttttagaatgaatttttttttccttttcccatgtggcagtccttcctgcacatagttgacattcctagtaaaatatttgcttgttgaaaaaaacatgttaacagatgtgtttataccaaagagcctgttgtattgcttaccatgtccccatactatgaggagaagttttgtggtgccgctggtgacaaggaactcacagaaaggtttcttagctggtgaagaatatagagaaggaaccaaagcctgttgagtcattgaggcttttgaggtttcttttttaacagcttgtatagtcttggggcccttcaagctgtgaaattgtccttgtactctcagctcctgcatggatctgggtcaagtagaaggtactggggatggggacattcctgcccataaaggatttggggaaagaagattaatcctaaaatacaggtgtgttccatctgaattgaaaatgatatatttgagatataattttaggactggttctgtgtagatagagatggtgtcaaggaggtgcaggatggagatgggagatttcatggagcctggtcagccagctctgtaccaggttgaacaccgaggagctgtcaaagtatttggagtttcttcattgtaaggagtaagggcttccaagatggggcaggtagtccgtacagcctaccaggaacatgttgtgttttctttattttttaaaatcattatattgagttgtgttttcagcactatattggtcaagatagccaagcagtttgtataatttctgtcactagtgtcatacagttttctggtcaacatgtgtgatctttgtgtctcctttttgccaagcacattctgattttcttgttggaacacaggtctagtttctaaaggacaaattttttgttccttgtcttttttctgtaagggacaagatttgttgtttttgtaagaaatgagatgcaggaaagaaaaccaaatcccattcctgcaccccagtccaataagcagataccacttaagataggagtctaaactccacagaaaaggataataccaagagcttgtattgttaccttagtcacttgcctagcagtgtgtggctttaaaaactagagatttttcagtcttagtctgcaaactggcatttccgattttccagcataaaaatccacctgtgtctgctgaatgtgtatgtatgtgctcactgtggctttagattctgtccctggggttagccctgttggccctgacaggaagggaggaagcctggtgaatttagtgagcagctggcctgggtcacagtgacctgacctcaaaccagcttaaggctttaagtcctctctcagaacttggcatttccaacttcttcctttccgggtgagagaagaagcggagaagggttcagtgtagccactctgggctcatagggacacttggtcactccagagtttttaatagctcccaggaggtgatattattttcagtgctcagctgaaataccaaccccaggaataagaactccatttcaaacagttctggccattctgagcctgcttttgtgattgctcatccattgtcctccactagaggggctaagcttgactgcccttagccaggcaagcacagtaatgtgtgttttgttcagcattattatgcaaaaattcactagttgagatggtttgttttaggataggaaatgaaattgcctctcagtgacaggagtggcccgagcctgcttcctattttgattttttttttttttaactgatagatggtgcagcatgtctacatggttgtttgttgctaaactttatataatgtgtggtttcaattcagcttgaaaaataatctcactacatgtagcagtacattatatgtacattatatgtaatgttagtatttctgctttgaatccttgatattgcaatggaattcctactttattaaatgtatttgatatgctagttattgtgtgcgatttaaactttttttgctttctccctttttttggttgtgcgctttcttttacaacaagcctctagaaacagatagtttctgagaattactgagctatgtttgtaatgcagatgtacttagggagtatgtaaaataatcattttaacaaaagaaatagatatttaaaatttaatactaactatgggaaaagggtccattgtgtaaaacatagtttatctttggattcaatgtttgtctttggttttacaaagtagcttgtattttcagtattttctacataatatggtaaaatgtagagcaattgcaatgcatcaataaaatgggtaaattttctgacttatgtggctgtttttgacttctgttataggatataaaggggatcaataaatgacatctttgaaagtg

SEQ ID NO: 2773 - protein, 836 aa, Homo sapiens; identical to SEQ ID NO: 93

SEQ ID NO: 2774 - DNA, 6806 bp, Homo sapiens
gagattgtttcacatcaccagtgtatcctcagctcctaacactgtgtctggtacacattgtttgatggttttgatgtttcagattcgttatatttcacaaacacaaggcttgccagctgaatatcttctcagtgccggaacaaaaacaaccaggtttttcaacagagatcctaatttggggtacccactgtggaggcttaagacacctgaagaacatgaactggagactggaataaaatcaaaagaagctcggaagtacatttttaattgcttagatgacatggctcaggtgaatatgtctacagacctggagggaacagacatgttggcagagaaggcagaccgaagagaatacattgatctgttaaagaaaatgctcacaattgatgcagataagagaattacccctctaaaaactcttaaccatcagtttgtgacaatgactcaccttttggattttccacatagcaatcatgttaagtcttgttttcagaacatggagatctgcaagcggagggttcacatgtatgatacagtgagtcagatcaagagtcccttcactacacatgttgccccaaatacaagcacaaatctaaccatgagcttcagcaatcagctcaatacagtgcacaatcaggccagtgttctagcttccagttctactgcagcagctgctactctttctctggctaattcagatgtctcactactaaactaccagtcagctttgtacccatcatctgctgcaccagttcctggagttgcccagcagggtgtttccttgcagcctggaaccacccagatttgcactcagacagatccattccaacagacatttatagtatgtccacctgcgtttcaaactggactacaagcaacaacaaagcattctggattccctgtgaggatggataatgctgtaccgattgtaccccaggcaccagctgctcagccactacagattcagtcaggagttctcacgcagggaagctgtacaccactaatggtagcaactctccaccctcaagtagccaccatcacaccgcagtatgcggtgccctttactctgagctgcgcagccggccggccggcgctggttgaacagactgccgctgtactgcaggcgtggcctggagggactcagcaaattctcctgccttcaacttggcaacagttgcctggggtagctctacacaactctgtccagcccacagcaatgattccagaggccatggggagtggacagcagctagctgactggaggaatgcccactctcatggcaaccagtacagcactatcatgcagcagccatccttgctgactaaccatgtgacattggccactgctcagcctctgaatgttggtgttgcccatgttgtcagacaacaacaatccagttccctcccttcgaagaagaataagcagtcagctccagtctcttccaagtcctctctagatgttctgccttcccaagtctattctctggttgggagcagtcccctccgcaccacatcttcttataattccttggtccctgtccaagatcagcatcagcccatcatcattccagatactcccagccctcctgtgagtgtcatcactatccgaagtgacactgatgaggaagaggacaacaaatacaagcccagtagctctggactgaagccaaggtctaatgtcatcagttatgtcactgtcaatgattctccagactctgactcttctttgagcagcccttattccactgataccctgagtgctctccgaggcaatagtggatccgttttggaggggcctggcagagttgtggcagatggcactggcacccgcactatcattgtgcctccactgaaaactcagcttggtgactgcactgtagcaacccaggcctcaggtctcctgagcaataagactaagccagtcgcttcagtgagtgggcagtcatctggatgctgtatcacccccacagggtatcgagctcaacgcggggggaccagtgcagcacaaccactcaatcttagccagaaccagcagtcatcggcggctccaacctcacaggagagaagcagcaacccagccccccgcaggcagcaggcgtttgtggcccctctctcccaagccccctacaccttccagcatggcagcccgctacactcgacagggcacccacaccttgccccggcccctgctcacctgccaagccaggctcatctgtatacgtatgctgccccgacttctgctgctgcactgggctcaaccagctccattgctcatcttttctccccacagggttcctcaaggcatgctgcagcctataccactcaccctagcactttggtgcaccaggtccctgtcagtgttgggcccagcctcctcacttctgccagcgtggcccctgctcagtaccaacaccagtttgccacccaatcctacattgggtcttcccgaggctcaacaatttacactggatacccgctgagtcctaccaagatcagccagtattcctacttatagttggtgagcatgagggaggaggaatcatggctaccttctcctggccctgcgttcttaatattgggctatggagagatcctcctttaccctcttgaaatttcttagccagcaacttgttctgcaggggcccactgaagcagaaggtttttctctgggggaacctgtctcagtgttgactgcattgttgtagtcttcccaaagtttgccctatttttaaattcattatttttgtgacagtaattttggtacttggaagagttcagatgcccatcttctgcagttaccaaggaagagagattgttctgaagttaccctctgaaaaatattttgtctctctgacttgatttctataaatgcttttaaaaacaagtgaagcccctctttatttcattttgtgttattgtgattgctggtcaggaaaaatgctgatagaaggagttgaaatctgatgacaaaaaaagaaaaattactttttgtttgtttataaactcagacttgcctattttattttaaaagcggcttacacaatctcccttttgtttattggacatttaaacttacagagtttcagttttgttttaatgtcatattatacttaatgggcaattgttatttttgcaaaactggttacgtattactctgtgttactattgagattctctcaattgctcctgtgtttgttataaagtagtgtttaaaaggcagctcaccatttgctggtaacttaatgtgagagaatccatatctgcgtgaaaacaccaagtattctttttaaatgaagcaccatgaattcttttttaaattattttttaaaagtctttctctctctgattcagcttaaatttttttatcgaaaaagccattaaggtggttattattacatggtggtggtggttttattatatgcaaaatctctgtctattatgagatactggcattgatgagctttgcctaaagattagtatgaattttcagtaatacacctctgttttgctcatctctcccttctgttttatgtgatttgtttggggagaaagctaaaaaaacctgaaaccagataagaacatttcttgtgtatagcttttatacttcaaagtagcttcctttgtatgccagcagcaaattgaatgctctcttattaagacttatataataagtgcatgtaggaattgcaaaaaatattttaaaaatttattactgaatttaaaaatattttagaagttttgtaatggtggtgttttaatattttacataattaaatatgtacatattgattagaaaaatataacaagcaatttttcctgctaacccaaaatgttatttgtaatcaaatgtgtagtgattacacttgaattgtgtacttagtgtgtatgtgatcctccagtgttatcccggagatggattgatgtctccattgtatttaaaccaaaatgaactgatacttgttggaatgtatgtgaactaattgcaattatattagagcatattactgtagtgctgaatgagcaggggcattgcctgcaaggagaggagacccttggaattgttttgcacaggtgtgtctggtgaggagtttttcagtgtgtgtctcttccttccctttcttcctccttcccttattgtagtgccttatatgataatgtagtggttaatagagtttacagtgagcttgccttaggatggaccagcaagcccccgtggaccctaagttgttcaccgggatttatcagaacaggattagtagctgtattgtgtaatgcattgttctcagtttccctgccaacattgaaaaataaaaacagcagcttttctcctttaccaccacctctacccctttccattttggattctcggctgagttctcacagaagcattttccccatgtggctctctcactgtgcgttgctaccttgcttctgtgagaattcaggaagcaggtgagaggagtcaagccaatattaaatatgcattcttttaaagtatgtgcaatcacttttagaatgaatttttttttccttttcccatgtggcagtccttcctgcacatagttgacattcctagtaaaatatttgcttgttgaaaaaaacatgttaacagatgtgtttataccaaagagcctgttgtattgcttaccatgtccccatactatgaggagaagttttgtggtgccgctggtgacaaggaactcacagaaaggtttcttagctggtgaagaatatagagaaggaaccaaagcctgttgagtcattgaggcttttgaggtttcttttttaacagcttgtatagtcttggggcccttcaagctgtgaaattgtccttgtactctcagctcctgcatggatctgggtcaagtagaaggtactggggatggggacattcctgcccataaaggatttggggaaagaagattaatcctaaaatacaggtgtgttccatctgaattgaaaatgatatatttgagatataattttaggactggttctgtgtagatagagatggtgtcaaggaggtgcaggatggagatgggagatttcatggagcctggtcagccagctctgtaccaggttgaacaccgaggagctgtcaaagtatttggagtttcttcattgtaaggagtaagggcttccaagatggggcaggtagtccgtacagcctaccaggaacatgttgtgttttctttattttttaaaatcattatattgagttgtgttttcagcactatattggtcaagatagccaagcagtttgtataatttctgtcactagtgtcatacagttttctggtcaacatgtgtgatctttgtgtctcctttttgccaagcacattctgattttcttgttggaacacaggtctagtttctaaaggacaaattttttgttccttgtcttttttctgtaagggacaagatttgttgtttttgtaagaaatgagatgcaggaaagaaaaccaaatcccattcctgcaccccagtccaataagcagataccacttaagataggagtctaaactccacagaaaaggataataccaagagcttgtattgttaccttagtcacttgcctagcagtgtgtggctttaaaaactagagatttttcagtcttagtctgcaaactggcatttccgattttccagcataaaaatccacctgtgtctgctgaatgtgtatgtatgtgctcactgtggctttagattctgtccctggggttagccctgttggccctgacaggaagggaggaagcctggtgaatttagtgagcagctggcctgggtcacagtgacctgacctcaaaccagcttaaggctttaagtcctctctcagaacttggcatttccaacttcttcctttccgggtgagagaagaagcggagaagggttcagtgtagccactctgggctcatagggacacttggtcactccagagtttttaatagctcccaggaggtgatattattttcagtgctcagctgaaataccaaccccaggaataagaactccatttcaaacagttctggccattctgagcctgcttttgtgattgctcatccattgtcctccactagaggggctaagcttgactgcccttagccaggcaagcacagtaatgtgtgttttgttcagcattattatgcaaaaattcactagttgagatggtttgttttaggataggaaatgaaattgcctctcagtgacaggagtggcccgagcctgcttcctattttgattttttttttttttaactgatagatggtgcagcatgtctacatggttgtttgttgctaaactttatataatgtgtggtttcaattcagcttgaaaaataatctcactacatgtagcagtacattatatgtacattatatgtaatgttagtatttctgctttgaatccttgatattgcaatggaattcctactttattaaatgtatttgatatgctagttattgtgtgcgatttaaactttttttgctttctccctttttttggttgtgcgctttcttttacaacaagcctctagaaacagatagtttctgagaattactgagctatgtttgtaatgcagatgtacttagggagtatgtaaaataatcattttaacaaaagaaatagatatttaaaatttaatactaactatgggaaaagggtccattgtgtaaaacatagtttatctttggattcaatgtttgtctttggttttacaaagtagcttgtattttcagtattttctacataatatggtaaaatgtagagcaattgcaatgcatcaataaaatgggtaaattttctgactt

SEQ ID NO: 2775 - protein, 816 aa, Homo sapiens; identical to SEQ ID NO: 89

SEQ ID NO: 2776 - DNA, 6872 bp, Homo sapiens
gagattgtttcacatcaccagtgtatcctcagctcctaacactgtgtctggtacacattgtttgatggttttgatgtttcagattcgttatatttcacaaacacaaggcttgccagctgaatatcttctcagtgccggaacaaaaacaaccaggtttttcaacagagatcctaatttggggtacccactgtggaggcttaagacacctgaagaacatgaactggagactggaataaaatcaaaagaagctcggaagtacatttttaattgcttagatgacatggctcaggtgaatatgtctacagacctggagggaacagacatgttggcagagaaggcagaccgaagagaatacattgatctgttaaagaaaatgctcacaattgatgcagataagagaattacccctctaaaaactcttaaccatcagtttgtgacaatgactcaccttttggattttccacatagcaatcatgttaagtcttgttttcagaacatggagatctgcaagcggagggttcacatgtatgatacagtgagtcagatcaagagtcccttcactacacatgttgccccaaatacaagcacaaatctaaccatgagcttcagcaatcagctcaatacagtgcacaatcaggccagtgttctagcttccagttctactgcagcagctgctactctttctctggctaattcagatgtctcactactaaactaccagtcagctttgtacccatcatctgctgcaccagttcctggagttgcccagcagggtgtttccttgcagcctggaaccacccagatttgcactcagacagatccattccaacagacatttatagtatgtccacctgcgtttcaaactggactacaagcaacaacaaagcattctggattccctgtgaggatggataatgctgtaccgattgtaccccaggcaccagctgctcagccactacagattcagtcaggagttctcacgcagggaagctgtacaccactaatggtagcaactctccaccctcaagtagccaccatcacaccgcagtatgcggtgccctttactctgagctgcgcagccggccggccggcgctggttgaacagactgccgctgtactgcaggcgtggcctggagggactcagcaaattctcctgccttcaacttggcaacagttgcctggggtagctctacacaactctgtccagcccacagcaatgattccagaggccatggggagtggacagcagctagctgactggaggaatgcccactctcatggcaaccagtacagcactatcatgcagcagccatccttgctgactaaccatgtgacattggccactgctcagcctctgaatgttggtgttgcccatgttgtcagacaacaacaatccagttccctcccttcgaagaagaataagcagtcagctccagtctcttccaagtcctctctagatgttctgccttcccaagtctattctctggttgggagcagtcccctccgcaccacatcttcttataattccttggtccctgtccaagatcagcatcagcccatcatcattccagatactcccagccctcctgtgagtgtcatcactatccgaagtgacactgatgaggaagaggacaacaaatacaagcccagtagctctggactgaagccaaggtctaatgtcatcagttatgtcactgtcaatgattctccagactctgactcttctttgagcagcccttattccactgataccctgagtgctctccgaggcaatagtggatccgttttggaggggcctggcagagttgtggcagatggcactggcacccgcactatcattgtgcctccactgaaaactcagcttggtgactgcactgtagcaacccaggcctcaggtctcctgagcaataagactaagccagtcgcttcagtgagtgggcagtcatctggatgctgtatcacccccacagggtatcgagctcaacgcggggggaccagtgcagcacaaccactcaatcttagccagaaccagcagtcatcggcggctccaacctcacaggagagaagcagcaacccagccccccgcaggcagcaggcgtttgtggcccctctctcccaagccccctacaccttccagcatggcagcccgctacactcgacagggcacccacaccttgccccggcccctgctcacctgccaagccaggctcatctgtatacgtatgctgccccgacttctgctgctgcactgggctcaaccagctccattgctcatcttttctccccacagggttcctcaaggcatgctgcagcctataccactcaccctagcactttggtgcaccaggtccctgtcagtgttgggcccagcctcctcacttctgccagcgtggcccctgctcagtaccaacaccagtttgccacccaatcctacattgggtcttcccgaggctcaacaatttacactggatacccgctgagtcctaccaagatcagccagtattcctacttatagttggtgagcatgagggaggaggaatcatggctaccttctcctggccctgcgttcttaatattgggctatggagagatcctcctttaccctcttgaaatttcttagccagcaacttgttctgcaggggcccactgaagcagaaggtttttctctgggggaacctgtctcagtgttgactgcattgttgtagtcttcccaaagtttgccctatttttaaattcattatttttgtgacagtaattttggtacttggaagagttcagatgcccatcttctgcagttaccaaggaagagagattgttctgaagttaccctctgaaaaatattttgtctctctgacttgatttctataaatgcttttaaaaacaagtgaagcccctctttatttcattttgtgttattgtgattgctggtcaggaaaaatgctgatagaaggagttgaaatctgatgacaaaaaaagaaaaattactttttgtttgtttataaactcagacttgcctattttattttaaaagcggcttacacaatctcccttttgtttattggacatttaaacttacagagtttcagttttgttttaatgtcatattatacttaatgggcaattgttatttttgcaaaactggttacgtattactctgtgttactattgagattctctcaattgctcctgtgtttgttataaagtagtgtttaaaaggcagctcaccatttgctggtaacttaatgtgagagaatccatatctgcgtgaaaacaccaagtattctttttaaatgaagcaccatgaattcttttttaaattattttttaaaagtctttctctctctgattcagcttaaatttttttatcgaaaaagccattaaggtggttattattacatggtggtggtggttttattatatgcaaaatctctgtctattatgagatactggcattgatgagctttgcctaaagattagtatgaattttcagtaatacacctctgttttgctcatctctcccttctgttttatgtgatttgtttggggagaaagctaaaaaaacctgaaaccagataagaacatttcttgtgtatagcttttatacttcaaagtagcttcctttgtatgccagcagcaaattgaatgctctcttattaagacttatataataagtgcatgtaggaattgcaaaaaatattttaaaaatttattactgaatttaaaaatattttagaagttttgtaatggtggtgttttaatattttacataattaaatatgtacatattgattagaaaaatataacaagcaatttttcctgctaacccaaaatgttatttgtaatcaaatgtgtagtgattacacttgaattgtgtacttagtgtgtatgtgatcctccagtgttatcccggagatggattgatgtctccattgtatttaaaccaaaatgaactgatacttgttggaatgtatgtgaactaattgcaattatattagagcatattactgtagtgctgaatgagcaggggcattgcctgcaaggagaggagacccttggaattgttttgcacaggtgtgtctggtgaggagtttttcagtgtgtgtctcttccttccctttcttcctccttcccttattgtagtgccttatatgataatgtagtggttaatagagtttacagtgagcttgccttaggatggaccagcaagcccccgtggaccctaagttgttcaccgggatttatcagaacaggattagtagctgtattgtgtaatgcattgttctcagtttccctgccaacattgaaaaataaaaacagcagcttttctcctttaccaccacctctacccctttccattttggattctcggctgagttctcacagaagcattttccccatgtggctctctcactgtgcgttgctaccttgcttctgtgagaattcaggaagcaggtgagaggagtcaagccaatattaaatatgcattcttttaaagtatgtgcaatcacttttagaatgaatttttttttccttttcccatgtggcagtccttcctgcacatagttgacattcctagtaaaatatttgcttgttgaaaaaaacatgttaacagatgtgtttataccaaagagcctgttgtattgcttaccatgtccccatactatgaggagaagttttgtggtgccgctggtgacaaggaactcacagaaaggtttcttagctggtgaagaatatagagaaggaaccaaagcctgttgagtcattgaggcttttgaggtttcttttttaacagcttgtatagtcttggggcccttcaagctgtgaaattgtccttgtactctcagctcctgcatggatctgggtcaagtagaaggtactggggatggggacattcctgcccataaaggatttggggaaagaagattaatcctaaaatacaggtgtgttccatctgaattgaaaatgatatatttgagatataattttaggactggttctgtgtagatagagatggtgtcaaggaggtgcaggatggagatgggagatttcatggagcctggtcagccagctctgtaccaggttgaacaccgaggagctgtcaaagtatttggagtttcttcattgtaaggagtaagggcttccaagatggggcaggtagtccgtacagcctaccaggaacatgttgtgttttctttattttttaaaatcattatattgagttgtgttttcagcactatattggtcaagatagccaagcagtttgtataatttctgtcactagtgtcatacagttttctggtcaacatgtgtgatctttgtgtctcctttttgccaagcacattctgattttcttgttggaacacaggtctagtttctaaaggacaaattttttgttccttgtcttttttctgtaagggacaagatttgttgtttttgtaagaaatgagatgcaggaaagaaaaccaaatcccattcctgcaccccagtccaataagcagataccacttaagataggagtctaaactccacagaaaaggataataccaagagcttgtattgttaccttagtcacttgcctagcagtgtgtggctttaaaaactagagatttttcagtcttagtctgcaaactggcatttccgattttccagcataaaaatccacctgtgtctgctgaatgtgtatgtatgtgctcactgtggctttagattctgtccctggggttagccctgttggccctgacaggaagggaggaagcctggtgaatttagtgagcagctggcctgggtcacagtgacctgacctcaaaccagcttaaggctttaagtcctctctcagaacttggcatttccaacttcttcctttccgggtgagagaagaagcggagaagggttcagtgtagccactctgggctcatagggacacttggtcactccagagtttttaatagctcccaggaggtgatattattttcagtgctcagctgaaataccaaccccaggaataagaactccatttcaaacagttctggccattctgagcctgcttttgtgattgctcatccattgtcctccactagaggggctaagcttgactgcccttagccaggcaagcacagtaatgtgtgttttgttcagcattattatgcaaaaattcactagttgagatggtttgttttaggataggaaatgaaattgcctctcagtgacaggagtggcccgagcctgcttcctattttgattttttttttttttaactgatagatggtgcagcatgtctacatggttgtttgttgctaaactttatataatgtgtggtttcaattcagcttgaaaaataatctcactacatgtagcagtacattatatgtacattatatgtaatgttagtatttctgctttgaatccttgatattgcaatggaattcctactttattaaatgtatttgatatgctagttattgtgtgcgatttaaactttttttgctttctccctttttttggttgtgcgctttcttttacaacaagcctctagaaacagatagtttctgagaattactgagctatgtttgtaatgcagatgtacttagggagtatgtaaaataatcattttaacaaaagaaatagatatttaaaatttaatactaactatgggaaaagggtccattgtgtaaaacatagtttatctttggattcaatgtttgtctttggttttacaaagtagcttgtattttcagtattttctacataatatggtaaaatgtagagcaattgcaatgcatcaataaaatgggtaaattttctgacttatgtggctgtttttgacttctgttataggatataaaggggatcaataaatgacatctttgaaagtg

SEQ ID NO: 2777 - protein, 816 aa, Homo sapiens; identical to SEQ ID NO: 89

SEQ ID NO: 2778 - DNA, 3095 bp, Homo sapiens
gagattctctcaattgctcctgtgtttgttataaagtggtgttttaatattttacataattaaatatgtacatattgattagaaaaatataacaagcaatttttcctgctaacccaaaatgttatttgtaatcaaatgtgtagtgattacacttgaattgtgtacttagtgtgtatgtgatcctccagtgttatcccggagatggattgatgtctccattgtatttaaaccaaaatgaactgatacttgttggaatgtatgtgaactaattgcaattatattagagcatattactgtagtgctgaatgagcaggggcattgcctgcaaggagaggagacccttggaattgttttgcacaggtgtgtctggtgaggagtttttcagtgtgtgtctcttccttccctttcttcctccttcccttattgtagtgccttatatgataatgtagtggttaatagagtttacagtgagcttgccttaggatggaccagcaagcccccgtggaccctaagttgttcaccgggatttatcagaacaggattagtagctgtattgtgtaatgcattgttctcagtttccctgccaacattgaaaaataaaaacagcagcttttctcctttaccaccacctctacccctttccattttggattctcggctgagttctcacagaagcattttccccatgtggctctctcactgtgcgttgctaccttgcttctgtgagaattcaggaagcaggtgagaggagtcaagccaatattaaatatgcattcttttaaagtatgtgcaatcacttttagaatgaatttttttttccttttcccatgtggcagtccttcctgcacatagttgacattcctagtaaaatatttgcttgttgaaaaaaacatgttaacagatgtgtttataccaaagagcctgttgtattgcttaccatgtccccatactatgaggagaagttttgtggtgccgctggtgacaaggaactcacagaaaggtttcttagctggtgaagaatatagagaaggaaccaaagcctgttgagtcattgaggcttttgaggtttcttttttaacagcttgtatagtcttggggcccttcaagctgtgaaattgtccttgtactctcagctcctgcatggatctgggtcaagtagaaggtactggggatggggacattcctgcccataaaggatttggggaaagaagattaatcctaaaatacaggtgtgttccatctgaattgaaaatgatatatttgagatataattttaggactggttctgtgtagatagagatggtgtcaaggaggtgcaggatggagatgggagatttcatggagcctggtcagccagctctgtaccaggttgaacaccgaggagctgtcaaagtatttggagtttcttcattgtaaggagtaagggcttccaagatggggcaggtagtccgtacagcctaccaggaacatgttgtgttttctttattttttaaaatcattatattgagttgtgttttcagcactatattggtcaagatagccaagcagtttgtataatttctgtcactagtgtcatacagttttctggtcaacatgtgtgatctttgtgtctcctttttgccaagcacattctgattttcttgttggaacacaggtctagtttctaaaggacaaattttttgttccttgtcttttttctgtaagggacaagatttgttgtttttgtaagaaatgagatgcaggaaagaaaaccaaatcccattcctgcaccccagtccaataagcagataccacttaagataggagtctaaactccacagaaaaggataataccaagagcttgtattgttaccttagtcacttgcctagcagtgtgtggctttaaaaactagagatttttcagtcttagtctgcaaactggcatttccgattttccagcataaaaatccacctgtgtctgctgaatgtgtatgtatgtgctcactgtggctttagattctgtccctggggttagccctgttggccctgacaggaagggaggaagcctggtgaatttagtgagcagctggcctgggtcacagtgacctgacctcaaaccagcttaaggctttaagtcctctctcagaacttggcatttccaacttcttcctttccgggtgagagaagaagcggagaagggttcagtgtagccactctgggctcatagggacacttggtcactccagagtttttaatagctcccaggaggtgatattattttcagtgctcagctgaaataccaaccccaggaataagaactccatttcaaacagttctggccattctgagcctgcttttgtgattgctcatccattgtcctccactagaggggctaagcttgactgcccttagccaggcaagcacagtaatgtgtgttttgttcagcattattatgcaaaaattcactagttgagatggtttgttttaggataggaaatgaaattgcctctcagtgacaggagtggcccgagcctgcttcctattttgattttttttttttttaactgatagatggtgcagcatgtctacatggttgtttgttgctaaactttatataatgtgtggtttcaattcagcttgaaaaataatctcactacatgtagcagtacattatatgtacattatatgtaatgttagtatttctgctttgaatccttgatattgcaatggaattcctactttattaaatgtatttgatatgctagttattgtgtgcgatttaaactttttttgctttctccctttttttggttgtgcgctttcttttacaacaagcctctagaaacagatagtttctgagaattactgagctatgtttgtaatgcagatgtacttagggagtatgtaaaataatcattttaacaaaagaaatagatatttaaaatttaatactaactatgggaaaagggtccattgtgtaaaacatagtttatctttggattcaatgtttgtctttggttttacaaagtagcttgtattttcagtattttctacataatatggtaaaatgtagagcaattgcaatgcatcaataaaatgggtaaattttctgactt

SEQ ID NO: 2779 - protein, 51 aa, Homo sapiens
MLTDVFIPKSLLYCLPCPHTMRRSFVVPLVTRNSQKGFLAGEEYREGTKAC

SEQ ID NO: 2780 - DNA, 3161 bp, Homo sapiens
gagattctctcaattgctcctgtgtttgttataaagtggtgttttaatattttacataattaaatatgtacatattgattagaaaaatataacaagcaatttttcctgctaacccaaaatgttatttgtaatcaaatgtgtagtgattacacttgaattgtgtacttagtgtgtatgtgatcctccagtgttatcccggagatggattgatgtctccattgtatttaaaccaaaatgaactgatacttgttggaatgtatgtgaactaattgcaattatattagagcatattactgtagtgctgaatgagcaggggcattgcctgcaaggagaggagacccttggaattgttttgcacaggtgtgtctggtgaggagtttttcagtgtgtgtctcttccttccctttcttcctccttcccttattgtagtgccttatatgataatgtagtggttaatagagtttacagtgagcttgccttaggatggaccagcaagcccccgtggaccctaagttgttcaccgggatttatcagaacaggattagtagctgtattgtgtaatgcattgttctcagtttccctgccaacattgaaaaataaaaacagcagcttttctcctttaccaccacctctacccctttccattttggattctcggctgagttctcacagaagcattttccccatgtggctctctcactgtgcgttgctaccttgcttctgtgagaattcaggaagcaggtgagaggagtcaagccaatattaaatatgcattcttttaaagtatgtgcaatcacttttagaatgaatttttttttccttttcccatgtggcagtccttcctgcacatagttgacattcctagtaaaatatttgcttgttgaaaaaaacatgttaacagatgtgtttataccaaagagcctgttgtattgcttaccatgtccccatactatgaggagaagttttgtggtgccgctggtgacaaggaactcacagaaaggtttcttagctggtgaagaatatagagaaggaaccaaagcctgttgagtcattgaggcttttgaggtttcttttttaacagcttgtatagtcttggggcccttcaagctgtgaaattgtccttgtactctcagctcctgcatggatctgggtcaagtagaaggtactggggatggggacattcctgcccataaaggatttggggaaagaagattaatcctaaaatacaggtgtgttccatctgaattgaaaatgatatatttgagatataattttaggactggttctgtgtagatagagatggtgtcaaggaggtgcaggatggagatgggagatttcatggagcctggtcagccagctctgtaccaggttgaacaccgaggagctgtcaaagtatttggagtttcttcattgtaaggagtaagggcttccaagatggggcaggtagtccgtacagcctaccaggaacatgttgtgttttctttattttttaaaatcattatattgagttgtgttttcagcactatattggtcaagatagccaagcagtttgtataatttctgtcactagtgtcatacagttttctggtcaacatgtgtgatctttgtgtctcctttttgccaagcacattctgattttcttgttggaacacaggtctagtttctaaaggacaaattttttgttccttgtcttttttctgtaagggacaagatttgttgtttttgtaagaaatgagatgcaggaaagaaaaccaaatcccattcctgcaccccagtccaataagcagataccacttaagataggagtctaaactccacagaaaaggataataccaagagcttgtattgttaccttagtcacttgcctagcagtgtgtggctttaaaaactagagatttttcagtcttagtctgcaaactggcatttccgattttccagcataaaaatccacctgtgtctgctgaatgtgtatgtatgtgctcactgtggctttagattctgtccctggggttagccctgttggccctgacaggaagggaggaagcctggtgaatttagtgagcagctggcctgggtcacagtgacctgacctcaaaccagcttaaggctttaagtcctctctcagaacttggcatttccaacttcttcctttccgggtgagagaagaagcggagaagggttcagtgtagccactctgggctcatagggacacttggtcactccagagtttttaatagctcccaggaggtgatattattttcagtgctcagctgaaataccaaccccaggaataagaactccatttcaaacagttctggccattctgagcctgcttttgtgattgctcatccattgtcctccactagaggggctaagcttgactgcccttagccaggcaagcacagtaatgtgtgttttgttcagcattattatgcaaaaattcactagttgagatggtttgttttaggataggaaatgaaattgcctctcagtgacaggagtggcccgagcctgcttcctattttgattttttttttttttaactgatagatggtgcagcatgtctacatggttgtttgttgctaaactttatataatgtgtggtttcaattcagcttgaaaaataatctcactacatgtagcagtacattatatgtacattatatgtaatgttagtatttctgctttgaatccttgatattgcaatggaattcctactttattaaatgtatttgatatgctagttattgtgtgcgatttaaactttttttgctttctccctttttttggttgtgcgctttcttttacaacaagcctctagaaacagatagtttctgagaattactgagctatgtttgtaatgcagatgtacttagggagtatgtaaaataatcattttaacaaaagaaatagatatttaaaatttaatactaactatgggaaaagggtccattgtgtaaaacatagtttatctttggattcaatgtttgtctttggttttacaaagtagcttgtattttcagtattttctacataatatggtaaaatgtagagcaattgcaatgcatcaataaaatgggtaaattttctgacttatgtggctgtttttgacttctgttataggatataaaggggatcaataaatgacatctttgaaagtg

SEQ ID NO: 2781 - protein, 51 aa, Homo sapiens; identical to SEQ ID NO: 2779

SEQ ID NO: 2782 - DNA, 1370 bp, Homo sapiens
ttcctgcttcctcccttcaagcctcacctccccagctcccagcttctactgaacaaggctgaaaacccactctattgcagggaaagggaaagattaatgaaaaatgtcagtttcttaagtcagcactggtgaaactttcctaaaacaggaatggcgtttgctgagttttctctggggtctctgctttctgcagctagcttccctgcttgactgcctagaaggcctctgctttcgggtttccatctctttcccctccagaggaccctacagcctaggcgggaggtggttaaggcttctggctgctgtgcaatggggccatctgtgtttgatcaatcctggcggaaaggagggggtgggggttgtaaagagaactgaaagcattccagagtagtgagagagacccagagatcaggagagaaggcaccgcccccaccccgcctccaaagctaaccctcgggcttgaggggaagaggctgactgtacgttccttctactctggcaccactctccaggctgccatggggcccagcacccctctcctcatcttgttccttttgtcatggtcgggacccctccaaggacagcagcaccaccttgtggagtacatggaacgccgactagctgctttagaggttgagatccgtagcattttagtgtccgagaggataattgctaagggagcagagacctcttcacaccttcatgcgcttagacctgcctagaggctcagatggctcagtggcactgctcacagagaacacaggctggaggacatggagtcggggtaggggcctaggtgaatctcagctaggctctttgcacatttagcacctctgcacatctggtttccttttctgcaggagtggaaggggatattgaagcctggctgagtttgctctttttttcccattcctgactcccgagttgggcctctccctgcctgggagttgtaaccctgcagcctccctcctgatcccccatcccttcaggaacggctggcccagtgccaggaccagagtagtcggcatgctgctgagctgcgggacttcaagaacaagatgctgccactgctggaggtggcagagaaggagcgggaggcactcagaactgaggccgacaccatctccgggagagtggatcgtctggagcgggaggtagactatctggagacccagaacccagctctgccctgtgtagagtttgatgagaaggtgactggaggccctgggaccaaaggcaagggaagaaggaatgagaagtacgatatggtgacaggtaaataatctgaaagcaggcccctaactcttctcagaaccgatattcttccttccttgcttcttactctttttttcgctttgtcccagtccatt

SEQ ID NO: 2783 - protein, 67 aa, Homo sapiens
MGPSTPLLILFLLSWSGPLQGQQHHLVEYMERRLAALEVEIRSILVSERIIAKGAETSSHLHALRPA

SEQ ID NO: 2784 - DNA, 2224 bp, Homo sapiens
ttcctgcttcctcccttcaagcctcacctccccagctcccagcttctactgaacaaggctgaaaacccactctattgcagggaaagggaaagattaatgaaaaatgtcagtttcttaagtcagcactggtgaaactttcctaaaacaggaatggcgtttgctgagttttctctggggtctctgctttctgcagctagcttccctgcttgactgcctagaaggcctctgctttcgggtttccatctctttcccctccagaggaccctacagcctaggcgggaggtggttaaggcttctggctgctgtgcaatggggccatctgtgtttgatcaatcctggcggaaaggagggggtgggggttgtaaagagaactgaaagcattccagagtagtgagagagacccagagatcaggagagaaggcaccgcccccaccccgcctccaaagctaaccctcgggcttgaggggaagaggctgactgtacgttccttctactctggcaccactctccaggctgccatggggcccagcacccctctcctcatcttgttccttttgtcatggtcgggacccctccaaggacagcagcaccaccttgtggagtacatggaacgccgactagctgctttagaggaacggctggcccagtgccaggaccagagtagtcggcatgctgctgagctgcgggacttcaagaacaagatgctgccactgctggaggtggcagagaaggagcgggaggcactcagaactgaggccgacaccatctccgggagagtggatcgtctggagcgggaggtagactatctggagacccagaacccagctctgccctgtgtagagtttgatgagaaggtgactggaggccctgggaccaaaggcaagggaagaaggaatgagaagtacgatatggtgacagactgtggctacacaatctctcaagtgagatcaatgaagattctgaagcgatttggtggcccagctggtctatggaccaaggatccactggggcaaacagagaagatctacgtgttagatgggacacagaatgacacagcctttgtcttcccaaggctgcgtgacttcacccttgccatggctgcccggaaagcttcccgagtccgggtgcccttcccctgggtaggcacagggcagctggtatatggtggctttctttattttgctcggaggcctcctggaagacctggtggaggtggtgagatggagaacactttgcagctaatcaaattccacctggcaaaccgaacagtggtggacagctcagtattcccagcagaggggctgatccccccctacggcttgacagcagacacctacatcgacctggcagctgatgaggaaggtctttgggctgtctatgccacccgggaggatgacaggcacttgtgtctggccaagttagatccacagacactggacacagagcagcagtgggacacaccatgtcccagagagaatgctgaggctgcctttgtcatctgtgggaccctctatgtcgtctataacacccgtcctgccagtcgggcccgcatccagtgctcctttgatgccagcggcaccctgacccctgaacgggcagcactcccttattttccccgcagatatggtgcccatgccagcctccgctataacccccgagaacgccagctctatgcctgggatgatggctaccagattgtctataagctggagatgaggaagaaagaggaggaggtttgaggagctagccttgttttttgcatctttctcactcccatacatttatattatatccccactaaatttcttgttcctcattcttcaaatgtgggccagttgtggctcaaatcctctatatttttagccaatggcaatcaaattctttcagctcctttgtttcatacggaactccagatcctgagtaatccttttagagcccgaagagtcaaaaccctcaatgttccctcctgctctcctgccccatgtcaacaaatttcaggctaaggatgccccagacccagggctctaaccttgtatgcgggcaggcccagggagcaggcagcagtgttcttcccctcagagtgacttggggagggagaaataggaggagacgtccagctctgtcctctcttcctcactcctcccttcagtgtcctgaggaacaggactttctccacattgttttgtattgcaacattttgcattaaaaggaaaatccactgctc

SEQ ID NO: 2785 - protein, 406 aa, Homo sapiens; identical to SEQ ID NO: 95

SEQ ID NO: 2786 - DNA, 2189 bp, Homo sapiens
ttcctgcttcctcccttcaagcctcacctccccagctcccagcttctactgaacaaggctgaaaacccactctattgcagggaaagggaaagattaatgaaaaatgtcagtttcttaagtcagcactggtgaaactttcctaaaacaggaatggcgtttgctgagttttctctggggtctctgctttctgcagctagcttccctgcttgactgcctagaaggcctctgctttcgggtttccatctctttcccctccagaggaccctacagcctaggcgggaggtggttaaggcttctggctgctgtgcaatggggccatctgtgtttgatcaatcctggcggaaaggagggggtgggggttgtaaagagaactgaaagcattccagagtagtgagagagacccagagatcaggagagaaggcaccgcccccaccccgcctccaaagctaaccctcgggcttgaggggaagaggctgactgtacgttccttctactctggcaccactctccaggctgccatggggcccagcacccctctcctcatcttgttccttttgtcatggtcgggacccctccaaggacagcagcaccaccttgtggagtacatggaacgccgactagctgctttagaggcatgctgctgagctgcgggacttcaagaacaagatgctgccactgctggaggtggcagagaaggagcgggaggcactcagaactgaggccgacaccatctccgggagagtggatcgtctggagcgggaggtagactatctggagacccagaacccagctctgccctgtgtagagtttgatgagaaggtgactggaggccctgggaccaaaggcaagggaagaaggaatgagaagtacgatatggtgacagactgtggctacacaatctctcaagtgagatcaatgaagattctgaagcgatttggtggcccagctggtctatggaccaaggatccactggggcaaacagagaagatctacgtgttagatgggacacagaatgacacagcctttgtcttcccaaggctgcgtgacttcacccttgccatggctgcccggaaagcttcccgagtccgggtgcccttcccctgggtaggcacagggcagctggtatatggtggctttctttattttgctcggaggcctcctggaagacctggtggaggtggtgagatggagaacactttgcagctaatcaaattccacctggcaaaccgaacagtggtggacagctcagtattcccagcagaggggctgatccccccctacggcttgacagcagacacctacatcgacctggcagctgatgaggaaggtctttgggctgtctatgccacccgggaggatgacaggcacttgtgtctggccaagttagatccacagacactggacacagagcagcagtgggacacaccatgtcccagagagaatgctgaggctgcctttgtcatctgtgggaccctctatgtcgtctataacacccgtcctgccagtcgggcccgcatccagtgctcctttgatgccagcggcaccctgacccctgaacgggcagcactcccttattttccccgcagatatggtgcccatgccagcctccgctataacccccgagaacgccagctctatgcctgggatgatggctaccagattgtctataagctggagatgaggaagaaagaggaggaggtttgaggagctagccttgttttttgcatctttctcactcccatacatttatattatatccccactaaatttcttgttcctcattcttcaaatgtgggccagttgtggctcaaatcctctatatttttagccaatggcaatcaaattctttcagctcctttgtttcatacggaactccagatcctgagtaatccttttagagcccgaagagtcaaaaccctcaatgttccctcctgctctcctgccccatgtcaacaaatttcaggctaaggatgccccagacccagggctctaaccttgtatgcgggcaggcccagggagcaggcagcagtgttcttcccctcagagtgacttggggagggagaaataggaggagacgtccagctctgtcctctcttcctcactcctcccttcagtgtcctgaggaacaggactttctccacattgttttgtattgcaacattttgcattaaaaggaaaatccactgctc

SEQ ID NO: 2787 - protein, 345 aa, Homo sapiens
MLPLLEVAEKEREALRTEADTISGRVDRLEREVDYLETQNPALPCVEFDEKVTGGPGTKGKGRRNEKYDMVTDCGYTISQVRSMKILKRFGGPAGLWTKDPLGQTEKIYVLDGTQNDTAFVFPRLRDFTLAMAARKASRVRVPFPWVGTGQLVYGGFLYFARRPPGRPGGGGEMENTLQLIKFHLANRTVVDSSVFPAEGLIPPYGLTADTYIDLAADEEGLWAVYATREDDRHLCLAKLDPQTLDTEQQWDTPCPRENAEAAFVICGTLYVVYNTRPASRARIQCSFDASGTLTPERAALPYFPRRYGAHASLRYNPRERQLYAWDDGYQIVYKLEMRKKEEEV

SEQ ID NO: 2788 - DNA, 2555 bp, Homo sapiens
ttcctgcttcctcccttcaagcctcacctccccagctcccagcttctactgaacaaggctgaaaacccactctattgcagggaaagggaaagattaatgaaaaatgtcagtttcttaagtcagcactggtgaaactttcctaaaacaggaatggcgtttgctgagttttctctggggtctctgctttctgcagctagcttccctgcttgactgcctagaaggcctctgctttcgggtttccatctctttcccctccagaggaccctacagcctaggcgggaggtggttaaggcttctggctgctgtgcaatggggccatctgtgtttgatcaatcctggcggaaaggagggggtgggggttgtaaagagaactgaaagcattccagagtagtgagagagacccagagatcaggagagaaggcaccgcccccaccccgcctccaaagctaaccctcgggcttgaggggaagaggctgactgtacgttccttctactctggcaccactctccaggctgccatggggcccagcacccctctcctcatcttgttccttttgtcatggtcgggacccctccaaggacagcagcaccaccttgtggagtacatggaacgccgactagctgctttagaggaacggctggcccagtgccaggaccagagtagtcggcatgctgctgagctgcgggacttcaagaacaagatgctgccactgctggaggtggcagagaaggagcgggaggcactcagaactgaggccgacaccatctccgggagagtggatcgtctggagcgggaggtagactatctggagacccagaacccagctctgccctgtgtagagtttgatgagaaggtgactggaggccctgggaccaaaggcaagggaagaaggaatgagaagtacgatatggtgacaggtaaataatctgaaagcaggcccctaactcttctcagaaccgatattcttccttccttgcttcttactctttttttcgctttgtcccagtccattgtggctctgtcttctggaatctgttttagggaaacctctgtaatgccaggtctattaaggagaggttctggggatccaggccgctgtggtacccgctctttctcaattctccctaagattggaggcaaccactgggcaaatgctcactattctccagatcacccaccctgggggagttcctgctggaggcatctaattcttgcctctatttccttttcctgtgcttttctcatcagactgtggctacacaatctctcaagtgagatcaatgaagattctgaagcgatttggtggcccagctggtctatggaccaaggatccactggggcaaacagagaagatctacgtgttagatgggacacagaatgacacagcctttgtcttcccaaggctgcgtgacttcacccttgccatggctgcccggaaagcttcccgagtccgggtgcccttcccctgggtaggcacagggcagctggtatatggtggctttctttattttgctcggaggcctcctggaagacctggtggaggtggtgagatggagaacactttgcagctaatcaaattccacctggcaaaccgaacagtggtggacagctcagtattcccagcagaggggctgatccccccctacggcttgacagcagacacctacatcgacctggcagctgatgaggaaggtctttgggctgtctatgccacccgggaggatgacaggcacttgtgtctggccaagttagatccacagacactggacacagagcagcagtgggacacaccatgtcccagagagaatgctgaggctgcctttgtcatctgtgggaccctctatgtcgtctataacacccgtcctgccagtcgggcccgcatccagtgctcctttgatgccagcggcaccctgacccctgaacgggcagcactcccttattttccccgcagatatggtgcccatgccagcctccgctataacccccgagaacgccagctctatgcctgggatgatggctaccagattgtctataagctggagatgaggaagaaagaggaggaggtttgaggagctagccttgttttttgcatctttctcactcccatacatttatattatatccccactaaatttcttgttcctcattcttcaaatgtgggccagttgtggctcaaatcctctatatttttagccaatggcaatcaaattctttcagctcctttgtttcatacggaactccagatcctgagtaatccttttagagcccgaagagtcaaaaccctcaatgttccctcctgctctcctgccccatgtcaacaaatttcaggctaaggatgccccagacccagggctctaaccttgtatgcgggcaggcccagggagcaggcagcagtgttcttcccctcagagtgacttggggagggagaaataggaggagacgtccagctctgtcctctcttcctcactcctcccttcagtgtcctgaggaacaggactttctccacattgttttgtattgcaacattttgcattaaaaggaaaatccactgctc

SEQ ID NO: 2789 - protein, 135 aa, Homo sapiens
MGPSTPLLILFLLSWSGPLQGQQHHLVEYMERRLAALEERLAQCQDQSSRHAAELRDFKNKMLPLLEVAEKEREALRTEADTISGRVDRLEREVDYLETQNPALPCVEFDEKVTGGPGTKGKGRRNEKYDMVTGK

SEQ ID NO: 2790 - DNA, 1872 bp, Homo sapiens
ttcctgcttcctcccttcaagcctcacctccccagctcccagcttctactgaacaaggctgaaaacccactctattgcagggaaagggaaagattaatgaaaaatgtcagtttcttaagtcagcactggtgaaactttcctaaaacaggaatggcgtttgctgagttttctctggggtctctgctttctgcagctagcttccctgcttgactgcctagaaggcctctgctttcgggtttccatctctttcccctccagaggaccctacagcctaggcgggaggtggttaaggcttctggctgctgtgcaatggggccatctgtgtttgatcaatcctggcggaaaggagggggtgggggttgtaaagagaactgaaagcattccagagtagtgagagagacccagagatcaggagagaaggcaccgcccccaccccgcctccaaagctaaccctcgggcttgaggggaagaggctgactgtacgttccttctactctggcaccactctccaggctgccatggggcccagcacccctctcctcatcttgttccttttgtcatggtcgggacccctccaaggacagcagcaccaccttgtggagtacatggaacgccgactagctgctttagaggaacggctggcccagtgccaggaccagagtagtcggcatgctgctgagctgcgggacttcaagaacaagatgctgccactgctggaggtggcagagaaggagcgggaggcactcagaactgaggccgacaccatctccgggtgcccttcccctgggtaggcacagggcagctggtatatggtggctttctttattttgctcggaggcctcctggaagacctggtggaggtggtgagatggagaacactttgcagctaatcaaattccacctggcaaaccgaacagtggtggacagctcagtattcccagcagaggggctgatccccccctacggcttgacagcagacacctacatcgacctggcagctgatgaggaaggtctttgggctgtctatgccacccgggaggatgacaggcacttgtgtctggccaagttagatccacagacactggacacagagcagcagtgggacacaccatgtcccagagagaatgctgaggctgcctttgtcatctgtgggaccctctatgtcgtctataacacccgtcctgccagtcgggcccgcatccagtgctcctttgatgccagcggcaccctgacccctgaacgggcagcactcccttattttccccgcagatatggtgcccatgccagcctccgctataacccccgagaacgccagctctatgcctgggatgatggctaccagattgtctataagctggagatgaggaagaaagaggaggaggtttgaggagctagccttgttttttgcatctttctcactcccatacatttatattatatccccactaaatttcttgttcctcattcttcaaatgtgggccagttgtggctcaaatcctctatatttttagccaatggcaatcaaattctttcagctcctttgtttcatacggaactccagatcctgagtaatccttttagagcccgaagagtcaaaaccctcaatgttccctcctgctctcctgccccatgtcaacaaatttcaggctaaggatgccccagacccagggctctaaccttgtatgcgggcaggcccagggagcaggcagcagtgttcttcccctcagagtgacttggggagggagaaataggaggagacgtccagctctgtcctctcttcctcactcctcccttcagtgtcctgaggaacaggactttctccacattgttttgtattgcaacattttgcattaaaaggaaaatccactgctc

SEQ ID NO: 2791 - protein, 90 aa, Homo sapiens
MGPSTPLLILFLLSWSGPLQGQQHHLVEYMERRLAALEERLAQCQDQSSRHAAELRDFKNKMLPLLEVAEKEREALRTEADTISGCPSPG

SEQ ID NO: 2792 - DNA, 2376 bp, Homo sapiens
ttcctgcttcctcccttcaagcctcacctccccagctcccagcttctactgaacaaggctgaaaacccactctattgcagggaaagggaaagattaatgaaaaatgtcagtttcttaagtcagcactggtgaaactttcctaaaacaggaatggcgtttgctgagttttctctggggtctctgctttctgcagctagcttccctgcttgactgcctagaaggcctctgctttcgggtttccatctctttcccctccagaggaccctacagcctaggcgggaggtggttaaggcttctggctgctgtgcaatggggccatctgtgtttgatcaatcctggcggaaaggagggggtgggggttgtaaagagaactgaaagcattccagagtagtgagagagacccagagatcaggagagaaggcaccgcccccaccccgcctccaaagctaaccctcgggcttgaggggaagaggctgactgtacgttccttctactctggcaccactctccaggctgccatggggcccagcacccctctcctcatcttgttccttttgtcatggtcgggacccctccaaggacagcagcaccaccttgtggagtacatggaacgccgactagctgctttagaggttgagatccgtagcattttagtgtccgagaggataattgctaagggagcagagacctcttcacaccttcatgcgcttagacctgcctagaggctcagatggctcagtggcactgctcacagagaacacaggctggaggacatggagtcggggaacggctggcccagtgccaggaccagagtagtcggcatgctgctgagctgcgggacttcaagaacaagatgctgccactgctggaggtggcagagaaggagcgggaggcactcagaactgaggccgacaccatctccgggagagtggatcgtctggagcgggaggtagactatctggagacccagaacccagctctgccctgtgtagagtttgatgagaaggtgactggaggccctgggaccaaaggcaagggaagaaggaatgagaagtacgatatggtgacagactgtggctacacaatctctcaagtgagatcaatgaagattctgaagcgatttggtggcccagctggtctatggaccaaggatccactggggcaaacagagaagatctacgtgttagatgggacacagaatgacacagcctttgtcttcccaaggctgcgtgacttcacccttgccatggctgcccggaaagcttcccgagtccgggtgcccttcccctgggtaggcacagggcagctggtatatggtggctttctttattttgctcggaggcctcctggaagacctggtggaggtggtgagatggagaacactttgcagctaatcaaattccacctggcaaaccgaacagtggtggacagctcagtattcccagcagaggggctgatccccccctacggcttgacagcagacacctacatcgacctggcagctgatgaggaaggtctttgggctgtctatgccacccgggaggatgacaggcacttgtgtctggccaagttagatccacagacactggacacagagcagcagtgggacacaccatgtcccagagagaatgctgaggctgcctttgtcatctgtgggaccctctatgtcgtctataacacccgtcctgccagtcgggcccgcatccagtgctcctttgatgccagcggcaccctgacccctgaacgggcagcactcccttattttccccgcagatatggtgcccatgccagcctccgctataacccccgagaacgccagctctatgcctgggatgatggctaccagattgtctataagctggagatgaggaagaaagaggaggaggtttgaggagctagccttgttttttgcatctttctcactcccatacatttatattatatccccactaaatttcttgttcctcattcttcaaatgtgggccagttgtggctcaaatcctctatatttttagccaatggcaatcaaattctttcagctcctttgtttcatacggaactccagatcctgagtaatccttttagagcccgaagagtcaaaaccctcaatgttccctcctgctctcctgccccatgtcaacaaatttcaggctaaggatgccccagacccagggctctaaccttgtatgcgggcaggcccagggagcaggcagcagtgttcttcccctcagagtgacttggggagggagaaataggaggagacgtccagctctgtcctctcttcctcactcctcccttcagtgtcctgaggaacaggactttctccacattgttttgtattgcaacattttgcattaaaaggaaaatccactgctc

SEQ ID NO: 2793 - protein, 386 aa, Homo sapiens
MAQWHCSQRTQAGGHGVGERLAQCQDQSSRHAAELRDFKNKMLPLLEVAEKEREALRTEADTISGRVDRLEREVDYLETQNPALPCVEFDEKVTGGPGTKGKGRRNEKYDMVTDCGYTISQVRSMKILKRFGGPAGLWTKDPLGQTEKIYVLDGTQNDTAFVFPRLRDFTLAMAARKASRVRVPFPWVGTGQLVYGGFLYFARRPPGRPGGGGEMENTLQLIKFHLANRTVVDSSVFPAEGLIPPYGLTADTYIDLAADEEGLWAVYATREDDRHLCLAKLDPQTLDTEQQWDTPCPRENAEAAFVICGTLYVVYNTRPASRARIQCSFDASGTLTPERAALPYFPRRYGAHASLRYNPRERQLYAWDDGYQIVYKLEMRKKEEEV

SEQ ID NO: 2794 - DNA, 2353 bp, Homo sapiens
ttcctgcttcctcccttcaagcctcacctccccagctcccagcttctactgaacaaggctgaaaacccactctattgcagggaaagggaaagattaatgaaaaatgtcagtttcttaagtcagcactggtgaaactttcctaaaacaggaatggcgtttgctgagttttctctggggtctctgctttctgcagctagcttccctgcttgactgcctagaaggcctctgctttcgggtttccatctctttcccctccagaggaccctacagcctaggcgggaggtggttaaggcttctggctgctgtgcaatggggccatctgtgtttgatcaatcctggcggaaaggagggggtgggggttgtaaagagaactgaaagcattccagagtagtgagagagacccagagatcaggagagaaggcaccgcccccaccccgcctccaaagctaaccctcgggcttgaggggaagaggctgactgtacgttccttctactctggcaccactctccaggctgccatggggcccagcacccctctcctcatcttgttccttttgtcatggtcgggacccctccaaggacagcagcaccaccttgtggagtacatggaacgccgactagctgctttagaggagtggaaggggatattgaagcctggctgagtttgctctttttttcccattcctgactcccgagttgggcctctccctgcctgggagttgtaaccctgcagcctccctcctgatcccccatcccttcaggaacggctggcccagtgccaggaccagagtagtcggcatgctgctgagctgcgggacttcaagaacaagatgctgccactgctggaggtggcagagaaggagcgggaggcactcagaactgaggccgacaccatctccgggagagtggatcgtctggagcgggaggtagactatctggagacccagaacccagctctgccctgtgtagagtttgatgagaaggtgactggaggccctgggaccaaaggcaagggaagaaggaatgagaagtacgatatggtgacagactgtggctacacaatctctcaagtgagatcaatgaagattctgaagcgatttggtggcccagctggtctatggaccaaggatccactggggcaaacagagaagatctacgtgttagatgggacacagaatgacacagcctttgtcttcccaaggctgcgtgacttcacccttgccatggctgcccggaaagcttcccgagtccgggtgcccttcccctgggtaggcacagggcagctggtatatggtggctttctttattttgctcggaggcctcctggaagacctggtggaggtggtgagatggagaacactttgcagctaatcaaattccacctggcaaaccgaacagtggtggacagctcagtattcccagcagaggggctgatccccccctacggcttgacagcagacacctacatcgacctggcagctgatgaggaaggtctttgggctgtctatgccacccgggaggatgacaggcacttgtgtctggccaagttagatccacagacactggacacagagcagcagtgggacacaccatgtcccagagagaatgctgaggctgcctttgtcatctgtgggaccctctatgtcgtctataacacccgtcctgccagtcgggcccgcatccagtgctcctttgatgccagcggcaccctgacccctgaacgggcagcactcccttattttccccgcagatatggtgcccatgccagcctccgctataacccccgagaacgccagctctatgcctgggatgatggctaccagattgtctataagctggagatgaggaagaaagaggaggaggtttgaggagctagccttgttttttgcatctttctcactcccatacatttatattatatccccactaaatttcttgttcctcattcttcaaatgtgggccagttgtggctcaaatcctctatatttttagccaatggcaatcaaattctttcagctcctttgtttcatacggaactccagatcctgagtaatccttttagagcccgaagagtcaaaaccctcaatgttccctcctgctctcctgccccatgtcaacaaatttcaggctaaggatgccccagacccagggctctaaccttgtatgcgggcaggcccagggagcaggcagcagtgttcttcccctcagagtgacttggggagggagaaataggaggagacgtccagctctgtcctctcttcctcactcctcccttcagtgtcctgaggaacaggactttctccacattgttttgtattgcaacattttgcattaaaaggaaaatccactgctc

SEQ ID NO: 2795 - protein, 345 aa, Homo sapiens; identical to SEQ ID NO: 2787

SEQ ID NO: 2796 - DNA, 733 bp, Homo sapiens
ccgagttgggcctctccctgcctgggagttgtaaccctgcagcctccctcctgatcccccatcccttcaggaacggctggcccagtgccaggaccagagtagtcggcatgctgctgagctgcgggacttcaagaacaagatgctgccactgctggaggtggcagagaaggagcgggaggcactcagaactgaggccgacaccatctccgggagagtggatcgtctggagcgggaggtagactatctggagacccagaacccagctctgccctgtgtagagtttgatgagaaggtgactggaggccctgggaccaaaggcaagggaagaaggaatgagaagtacgatatggtgacaggtcattcagggaaagaagactgcagcatttgctcatggagaggagctgaaatggaggtgaaaaatccactatttctgctcatcatccctccccacatgcgtagttctcagctgattagcagagccttggatggaggaagaccatactgacacccgcctgaggaaatggcaggaccaagaggagagtgggcttaggttttcctcatcctataggagaggaagaatatcctgactgaggaaggacttacagtggggactgtgaaggggatggagtgggatgaggaagggaattagagaatggggaacattctgcccgaggcgttgccttctcttatgtacagataatggtagctctcctttatttgaggagctactctg

SEQ ID NO: 2797 - protein, 121 aa, Homo sapiens
MLPLLEVAEKEREALRTEADTISGRVDRLEREVDYLETQNPALPCVEFDEKVTGGPGTKGKGRRNEKYDMVTGHSGKEDCSICSWRGAEMEVKNPLFLLIIPPHMRSSQLISRALDGGRPY

SEQ ID NO: 2798 - DNA, 1241 bp, Homo sapiens
cagactgtggctacacaatctctcaagtgagatcaatgaagattctgaagcgatttggtggcccagctggtctatggaccaaggatccactggggcaaacagagaagatctacgtgttagatgggacacagaatgacacagcctttgtcttcccaaggctgcgtgacttcacccttgccatggctgcccggaaagcttcccgagtccgggtgcccttcccctgggtaggcacagggcagctggtatatggtggctttctttattttgctcggaggcctcctggaagacctggtggaggtggtgagatggagaacactttgcagctaatcaaattccacctggcaaaccgaacagtggtggacagctcagtattcccagcagaggggctgatccccccctacggcttgacagcagacacctacatcgacctggcagctgatgaggaaggtctttgggctgtctatgccacccgggaggatgacaggcacttgtgtctggccaagttagatccacagacactggacacagagcagcagtgggacacaccatgtcccagagagaatgctgaggctgcctttgtcatctgtgggaccctctatgtcgtctataacacccgtcctgccagtcgggcccgcatccagtgctcctttgatgccagcggcaccctgacccctgaacgggcagcactcccttattttccccgcagatatggtgcccatgccagcctccgctataacccccgagaacgccagctctatgcctgggatgatggctaccagattgtctataagctggagatgaggaagaaagaggaggaggtttgaggagctagccttgttttttgcatctttctcactcccatacatttatattatatccccactaaatttcttgttcctcattcttcaaatgtgggccagttgtggctcaaatcctctatatttttttagagcccgaagagtcaaaaccctcaatgttccctcctgctctcctgccccatgtcaacaaatttcaggctaaggatgccccagacccagggctctaaccttgtatgcgggcaggcccagggagcaggcagcagtgttcttcccctcagagtgacttggggagggagaaataggaggagacgtccagctctgtcctctcttcctcactcctcccttcagtgtcctgaggaacaggactttctccacattgttttgtattgcaacattttgcattaaaaggaaaatccactgctc

SEQ ID NO: 2799 - protein, 36 aa, Homo sapiens
MWASCGSNPLYFFRARRVKTLNVPSCSPAPCQQISG

SEQ ID NO: 2800 - DNA, 4561 bp, Homo sapiens
gctttcgggaagcggtcggggctgcacactcggatcggcggggccggctcccgggcccggccggctggaggagggagggaaggaggcgggagggagcgagcggagccaggggcgcacgtacgccccagcgctgggatttatcggctcgcgaggagagcggagcaggcgcgcggcccaggcggaggagcgccgactctggagcagccggagctggaagaggaggaggaggagaggcggcggggaaggaggaggagggggagagtcgctcccgccgggcgagcatggggcgcctggcctcgaggccgctgctgctggcgctcctgtcgttggctctttgccgagggcgtgtggtgagagtccccacagcgaccctggttcgagtggtgggcactgagctggtcatcccctgcaacgtcagtgactatgatggccccagcgagcaaaactttgactggagcttctcatctttggggagcagctttgtggagcttgcaagcacctgggaggtggggttcccagcccagctgtaccaggagcggctgcagaggggcgagatcctgttaaggcggactgccaacgacgccgtggagctccacataaagaacgtccagccttcagaccaaggccactacaaatgttcaacccccagcacagatgccactgtccagggaaactatgaggacacagtgcaggttaaagtgctggccgactccctgcacgtgggccccagcgcgcggcccccgccgagcctgagcctgcgggagggggagcccttcgagctgcgctgcaccgccgcctccgcctcgccgctgcacacgcacctggcgctgctgtgggaggtgcaccgcggcccggccaggcggagcgtcctcgccctgacccacgagggcaggttccacccgggcctggggtacgagcagcgctaccacagtggggacgtgcgcctcgacaccgtgggcagcgacgcctaccgcctctcagtgtcccgggctctgtctgccgaccagggctcctacaggtgtatcgtcagcgagtggatcgccgagcagggcaactggcaggaaatccaagaaaaggccgtggaagttgccaccgtggtgatccagccatcagttctgcgagcagctgtgcccaagaatgtgtctgtggctgaaggaaaggaactggacctgacctgtaacatcacaacagaccgagccgatgacgtccggcccgaggtgacgtggtccttcagcaggatgcctgacagcaccctacctggctcccgcgtgttggcgcggcttgaccgtgattccctggtgcacagctcgcctcatgttgctttgagtcatgtggatgcacgctcctaccatttactggttcgggatgttagcaaagaaaactctggctactattactgccacgtgtccctgtgggcacccggacacaacaggagctggcacaaagtggcagaggccgtgtcttccccagctggtgtgggtgtgacctggctagaaccagactaccaggtgtacctgaatgcttccaaggtccccgggtttgcggatgaccccacagagctggcatgccgggtggtggacacgaagagtggggaggcgaatgtccgattcacggtttcgtggtactacaggatgaaccggcgcagcgacaatgtggtgaccagcgagctgcttgcagtcatggacggggactggacgctaaaatatggagagaggagcaagcagcgggcccaggatggagactttattttttctaaggaacatacagacacgttcaatttccggatccaaaggactacagaggaagacagaggcaattattactgtgttgtgtctgcctggaccaaacagcggaacaacagctgggtgaaaagcaaggatgtcttctccaagcctgttaacatattttgggcattagaagattccgtgcttgtggtgaaggcgaggcagccaaagcctttctttgctgccggaaatacatttgagatgacttgcaaagtatcttccaagaatattaagtcgccacgctactctgttctcatcatggctgagaagcctgtcggcgacctctccagtcccaatgaaacgaagtacatcatctctctggaccaggattctgtggtgaagctggagaattggacagatgcatcacgggtggatggcgttgttttagaaaaagtgcaggaggatgagttccgctatcgaatgtaccagactcaggtctcagacgcagggctgtaccgctgcatggtgacagcctggtctcctgtcaggggcagcctttggcgagaagcagcaaccagtctctccaatcctattgagatagacttccaaacctcaggtcctatatttaatgcttctgtgcattcagacacaccatcagtaattcggggagatctgatcaaattgttctgtatcatcactgtcgagggagcagcactggatccagatgacatggcctttgatgtgtcctggtttgcggtgcactcttttggcctggacaaggctcctgtgctcctgtcttccctggatcggaagggcatcgtgaccacctcccggagggactggaagagcgacctcagcctggagcgcgtgagtgtgctggaattcttgctgcaagtgcatggctccgaggaccaggactttggcaactactactgttccgtgactccatgggtgaagtcaccaacaggttcctggcagaaggaggcagagatccactccaagcccgtttttataactgtgaagatggatgtgctgaacgccttcaagtatcccttgctgatcggcgtcggtctgtccacggtcatcgggctcctgtcctgtctcatcgggtactgcagctcccactggtgttgtaagaaggaggttcaggagacacggcgcgagcgccgcaggctcatgtcgatggagatggactaggctggcccgggaggggagtgacagagggacgttctaggagcaattggggcaagaagaggacagtgatattttaaaacaaagtgtgttacactaaaaaccagtcctctctaatctcaggtgggacttggcgctctctcttttctgcatgtcaagttctgagcgcggacatgtttaccagcacacggctcttcttcccacggcactttctgatgtaacaatcgagtgtgtgttttcccaactgcagctttttaatggttaaccttcatctaattttttttctcccactggtttatagatcctctgacttgtgtgtgtttatagcttttgtttcgcggggttgtggtgaggaaggggtgatggcatgcggagttctttatcttcagtgagaatgtgcctgcccgcctgagagccagcttccgcgttggaggcacgtgttcagagagctgctgagcgccaccctctacccggctgacagacaacacagacctgtgccgaaggctaatttgtggcttttacgaccctaccccaccccctgttttcaggggtttagactacatttgaaatccaaacttggagtatataacttcttattgagcccaactgctttttttttttttttttttgcttctctgccccttttccatttcttttgtatttgttttctgtgagagcactgaaatggcagccctggaatctacaatttggctctccactgagcaccttatcttgccaccttagccttaagaatgaatatgaagaaaaatacacagccacctctgtccagggcagtaagaagggctgcaaggaaggggaggatggggacaaggaaaggatcagatacctgctccagtagttgtgaggccactgtgtctcaggggactccaggaggagcagaagagggatcccacgaagttattcttacgcagctggggccaggagggtcagagtggtgccaggtgcaagttaggctaaagaagccaccactattcctctctcttgcccattgtggggggcaaaggcattggtcaccaagagtcttgcagggggacccacagatatgccatgtccttcacacgtgcttgggctccttaacctgaaggcaaattgctacttgcaagactgactgacttcaaggaatcagaaattacctagaagcaccatgttttttctatgaccttttcagtccttcaggtcattttaaggtccactgcagggggttagtgagaaagggtatactttgtggtatgttttgctttcctaatagggacatgaaggaaacccagcaatttgctgttatgtgaatggcctgtagagcagagtcaagagcggtgtgctttgcccgactgctcccatcaggaataggagagtagacagagatcttccacatcccaggcttctgctgctgctttaaaagctctgtccttggagcctcccgctccctgaagtgtctcgccccctgcacagcactggcctttcggaagcatcccagtagggttttctgaggctcgctggtgactcatgccctaattgcaatcctctgcttttatcttgactttgaaggatctaacactgctctctcttccaaaggggaaaaaaagattcatttgttttgagcaataaactaatacaaaatgatggcc

SEQ ID NO: 2801 - protein, 879 aa, Homo sapiens; identical to SEQ ID NO: 97

SEQ ID NO: 2802 - DNA, 6312 bp, Homo sapiens
gctttcgggaagcggtcggggctgcacactcggatcggcggggccggctcccgggcccggccggctggaggagggagggaaggaggcgggagggagcgagcggagccaggggcgcacgtacgccccagcgctgggatttatcggctcgcgaggagagcggagcaggcgcgcggcccaggcggaggagcgccgactctggagcagccggagctggaagaggaggaggaggagaggcggcggggaaggaggaggagggggagagtcgctcccgccgggcgagcatggggcgcctggcctcgaggccgctgctgctggcgctcctgtcgttggctctttgccgagggcgtgtggtgagagtccccacagcgaccctggttcgagtggtgggcactgagctggtcatcccctgcaacgtcagtgactatgatggccccagcgagcaaaactttgactggagcttctcatctttggggagcagctttgtggagcttgcaagcacctgggaggtggggttcccagcccagctgtaccaggagcggctgcagaggggcgagatcctgttaaggcggactgccaacgacgccgtggagctccacataaagaacgtccagccttcagaccaaggccactacaaatgttcaacccccagcacagatgccactgtccagggaaactatgaggacacagtgcaggttaaagtgctggccgactccctgcacgtgggccccagcgcgcggcccccgccgagcctgagcctgcgggagggggagcccttcgagctgcgctgcaccgccgcctccgcctcgccgctgcacacgcacctggcgctgctgtgggaggtgcaccgcggcccggccaggcggagcgtcctcgccctgacccacgagggcaggttccacccgggcctggggtacgagcagcgctaccacagtggggacgtgcgcctcgacaccgtgggcagcgacgcctaccgcctctcagtgtcccgggctctgtctgccgaccagggctcctacaggtgtatcgtcagcgagtggatcgccgagcagggcaactggcaggaaatccaagaaaaggccgtggaagttgccaccgtggtgatccagccatcagttctgcgagcagctgtgcccaagaatgtgtctgtggctgaaggaaaggaactggacctgacctgtaacatcacaacagaccgagccgatgacgtccggcccgaggtgacgtggtccttcagcaggatgcctgacagcaccctacctggctcccgcgtgttggcgcggcttgaccgtgattccctggtgcacagctcgcctcatgttgctttgagtcatgtggatgcacgctcctaccatttactggttcgggatgttagcaaagaaaactctggctactattactgccacgtgtccctgtgggcacccggacacaacaggagctggcacaaagtggcagaggccgtgtcttccccagctggtgtgggtgtgacctggctagaaccagactaccaggtgtacctgaatgcttccaaggtccccgggtttgcggatgaccccacagagctggcatgccgggtggtggacacgaagagtggggaggcgaatgtccgattcacggtttcgtggtactacaggatgaaccggcgcagcgacaatgtggtgaccagcgagctgcttgcagtcatggacggggactggacgctaaaatatggagagaggagcaagcagcgggcccaggatggagactttattttttctaaggaacatacagacacgttcaatttccggatccaaaggactacagaggaagacagaggcaattattactgtgttgtgtctgcctggaccaaacagcggaacaacagctgggtgaaaagcaaggatgtcttctccaagcctgttaacatattttgggcattagaagattccgtgcttgtggtgaaggcgaggcagccaaagcctttctttgctgccggaaatacatttgagatgacttgcaaagtatcttccaagaatattaagtcgccacgctactctgttctcatcatggctgagaagcctgtcggcgacctctccagtcccaatgaaacgaagtacatcatctctctggaccaggattctgtggtgaagctggagaattggacagatgcatcacgggtggatggcgttgttttagaaaaagtgcaggaggatgagttccgctatcgaatgtaccagactcaggtctcagacgcagggctgtaccgctgcatggtgacagcctggtctcctgtcaggggcagcctttggcgagaagcagcaaccagtctctccaatcctattgagatagacttccaaacctcaggtcctatatttaatgcttctgtgcattcagacacaccatcagtaattcggggagatctgatcaaattgttctgtatcatcactgtcgagggagcagcactggatccagatgacatggcctttgatgtgtcctggtttgcggtgcactcttttggcctggacaaggctcctgtgctcctgtcttccctggatcggaagggcatcgtgaccacctcccggagggactggaagagcgacctcagcctggagcgcgtgagtgtgctggaattcttgctgcaagtgcatggctccgaggaccaggactttggcaactactactgttccgtgactccatgggtgaagtcaccaacaggttcctggcagaaggaggcagagatccactccaagcccgtttttataactgtgaagatggatgtgctgaacgccttcaagtatcccttgctgatcggcgtcggtctgtccacggtcatcgggctcctgtcctgtctcatcgggtactgcagctcccactggtgttgtaagaaggaggttcaggagacacggcgcgagcgccgcaggctcatgtcgatggagatggactaggctggcccgggaggggagtgacagagggacgttctaggagcaattggggcaagaagaggacagtgatattttaaaacaaagtgtgttacactaaaaaccagtcctctctaatctcaggtgggacttggcgctctctcttttctgcatgtcaagttctgagcgcggacatgtttaccagcacacggctcttcttcccacggcactttctgatgtaacaatcgagtgtgtgttttcccaactgcagctttttaatggttaaccttcatctaattttttttctcccactggtttatagatcctctgacttgtgtgtgtttatagcttttgtttcgcggggttgtggtgaggaaggggtgatggcatgcggagttctttatcttcagtgagaatgtgcctgcccgcctgagagccagcttccgcgttggaggcacgtgttcagagagctgctgagcgccaccctctacccggctgacagacaacacagacctgtgccgaaggctaatttgtggcttttacgaccctaccccaccccctgttttcaggggtttagactacatttgaaatccaaacttggagtatataacttcttattgagcccaactgctttttttttttttttttttgcttctctgccccttttccatttcttttgtatttgttttctgtgagagcactgaaatggcagccctggaatctacaatttggctctccactgagcaccttatcttgccaccttagccttaagaatgaatatgaagaaaaatacacagccacctctgtccagggcagtaagaagggctgcaaggaaggggaggatggggacaaggaaaggatcagatacctgctccagtagttgtgaggccactgtgtctcaggggactccaggaggagcagaagagggatcccacgaagttattcttacgcagctggggccaggagggtcagagtggtgccaggtgcaagttaggctaaagaagccaccactattcctctctcttgcccattgtggggggcaaaggcattggtcaccaagagtcttgcagggggacccacagatatgccatgtccttcacacgtgcttgggctccttaacctgaaggcaaattgctacttgcaagactgactgacttcaaggaatcagaaattacctagaagcaccatgttttttctatgaccttttcagtccttcaggtcattttaaggtccactgcagggggttagtgagaaagggtatactttgtggtatgttttgctttcctaatagggacatgaaggaaacccagcaatttgctgttatgtgaatggcctgtagagcagagtcaagagcggtgtgctttgcccgactgctcccatcaggaataggagagtagacagagatcttccacatcccaggcttctgctgctgctttaaaagctctgtccttggagcctcccgctccctgaagtgtctcgccccctgcacagcactggcctttcggaagcatcccagtagggttttctgaggctcgctggtgactcatgccctaattgcaatcctctgcttttatcttgactttgaaggatctaacactgctctctcttccaaaggggaaaaaaagattcatttgttttgagcaataaactaatacaaaatgatggccattcatgtgcagctctttgtcaccatgggccggatgagttgtgctcctcctggctcaccatttccccctgctcccccacagccggttctgcacttatcaccgagtcgcccctggaagcagattcccattgagttttccccaccaaggggaccatgcacatggtagaaacattagattctgcattgacagtagcctttccttggcccgggcctgtggtgggaagacgggcaacaagtataccccaccagggcctgagtgactagaggaagaggacgaggccttgttggcactagatttgggtattttctgcatgtcataacatatcctaactgctatttcagaagaggcagcttgtaggtgattgtacaagtgagaattaaagagagaacagatatttaaacaggtgctgtattagtaacagccagtgccctttcagcccttgcatctattaaaaggagattcaggattttattggcacaggcccttcttagtaggaagaaagggtgcttagctttggacctgaccgggtgtgtgtaaaaccatggactgagtcacagcagacactcgatggtggtaaatgtgatgggtgcttacacactgtaccttttcctttcatactgatgctgcagttcagggctggagttgttaaggcattgacctccacccacctgccccatgtccactgggctgcccaagctgcatgtcacctgagggctggcaggaaggggcgagaaatcccagggcattgtaccaaggacctagttccttctagggatataaatttccaggaatgtgtatttttaatgtggtgagatgcactcttttgttgtaccaaatagggctccccaccccacccctgcgacaagtgctcttctagaacaggttcctaccagcagcactggtgtgaatgaaagagagacccagccgcgtctcacacaggtggaattgcacttcttaacaaaaaggaactttataaaagtttgggattttttttcctaatcataaaaatagccccagaaagagcctaagctatgttcagatagaagcctcgaaattcctgtaaattgtttactttatgatgtttacatacacgtttcactttgaaaaaaaatgcaaatcgactttttaacaactgttgagatgtttcatgggacagtagaactctgactcaccaactgggctaaattttaatttaaaaatgtatttatttgagtgtctttccccccctcaccctcaccatctgaggggctccctgagatcttggtagaggaggcccctcctgcccagaccttcgtttgtttccccggtggcccttgcttcttgctttgcagactgcctgcagccatgattttgtcactgacatctgtgagccaaagactgagcctttttggcaggaataataagcaatactacacaacttgctactttcagaaaacttttttttagcttcaccgatgacaacagaggaagaagggaactgggatttgggtaagttctcctccactgtttgaccaaattctcagtgataaatatgtgtgcagatccctagaagagaaaacgctgactttctttttaagtgtggcacataaggatctgcagaattttccgtagacaaagaaaggatcttgtgtatttttgtccatatccaatgttatatgaactaattgtattgttttatactgtgaccacaaatattatgcaatgcaccatttgttttttatttcattaaaggaagtttaatttaaattgaa

SEQ ID NO: 2803 - protein, 879 aa, Homo sapiens; identical to SEQ ID NO: 97

SEQ ID NO: 2804 - DNA, 4006 bp, Homo sapiens
gcgaggagagcggagcaggcgcgcggcccaggcggaggagcgccgactctggagcaccttcagaccaaggccactacaaatgttcaacccccagcacagatgccactgtccagggaaactatgaggacacagtgcaggttaaagtgctggccgactccctgcacgtgggccccagcgcgcggcccccgccgagcctgagcctgcgggagggggagcccttcgagctgcgctgcaccgccgcctccgcctcgccgctgcacacgcacctggcgctgctgtgggaggtgcaccgcggcccggccaggcggagcgtcctcgccctgacccacgagggcaggttccacccgggcctggggtacgagcagcgctaccacagtggggacgtgcgcctcgacaccgtgggcagcgacgcctaccgcctctcagtgtcccgggctctgtctgccgaccagggctcctacaggtgtatcgtcagcgagtggatcgccgagcagggcaactggcaggaaatccaagaaaaggccgtggaagttgccaccgtggtgatccagccatcagttctgcgagcagctgtgcccaagaatgtgtctgtggctgaaggaaaggaactggacctgacctgtaacatcacaacagaccgagccgatgacgtccggcccgaggtgacgtggtccttcagcaggatgcctgacagcaccctacctggctcccgcgtgttggcgcggcttgaccgtgattccctggtgcacagctcgcctcatgttgctttgagtcatgtggatgcacgctcctaccatttactggttcgggatgttagcaaagaaaactctggctactattactgccacgtgtccctgtgggcacccggacacaacaggagctggcacaaagtggcagaggccgtgtcttccccagctggtgtgggtgtgacctggctagaaccagactaccaggtgtacctgaatgcttccaaggtccccgggtttgcggatgaccccacagagctggcatgccgggtggtggacacgaagagtggggaggcgaatgtccgattcacggtttcgtggtactacaggatgaaccggcgcagcgacaatgtggtgaccagcgagctgcttgcagtcatggacggggactggacgctaaaatatggagagaggagcaagcagcgggcccaggatggagactttattttttctaaggaacatacagacacgttcaatttccggatccaaaggactacagaggaagacagaggcaattattactgtgttgtgtctgcctggaccaaacagcggaacaacagctgggtgaaaagcaaggatgtcttctccaagcctgttaacatattttgggcattagaagattccgtgcttgtggtgaaggcgaggcagccaaagcctttctttgctgccggaaatacatttgagatgacttgcaaagtatcttccaagaatattaagtcgccacgctactctgttctcatcatggctgagaagcctgtcggcgacctctccagtcccaatgaaacgaagtacatcatctctctggaccaggattctgtggtgaagctggagaattggacagatgcatcacgggtggatggcgttgttttagaaaaagtgcaggaggatgagttccgctatcgaatgtaccagactcaggtctcagacgcagggctgtaccgctgcatggtgacagcctggtctcctgtcaggggcagcctttggcgagaagcagcaaccagtctctccaatcctattgagatagacttccaaacctcaggtcctatatttaatgcttctgtgcattcagacacaccatcagtaattcggggagatctgatcaaattgttctgtatcatcactgtcgagggagcagcactggatccagatgacatggcctttgatgtgtcctggtttgcggtgcactcttttggcctggacaaggctcctgtgctcctgtcttccctggatcggaagggcatcgtgaccacctcccggagggactggaagagcgacctcagcctggagcgcgtgagtgtgctggaattcttgctgcaagtgcatggctccgaggaccaggactttggcaactactactgttccgtgactccatgggtgaagtcaccaacaggttcctggcagaaggaggcagagatccactccaagcccgtttttataactgtgaagatggatgtgctgaacgccttcaagtatcccttgctgatcggcgtcggtctgtccacggtcatcgggctcctgtcctgtctcatcgggtactgcagctcccactggtgttgtaagaaggaggttcaggagacacggcgcgagcgccgcaggctcatgtcgatggagatggactaggctggcccgggaggggagtgacagagggacgttctaggagcaattggggcaagaagaggacagtgatattttaaaacaaagtgtgttacactaaaaaccagtcctctctaatctcaggtgggacttggcgctctctcttttctgcatgtcaagttctgagcgcggacatgtttaccagcacacggctcttcttcccacggcactttctgatgtaacaatcgagtgtgtgttttcccaactgcagctttttaatggttaaccttcatctaattttttttctcccactggtttatagatcctctgacttgtgtgtgtttatagcttttgtttcgcggggttgtggtgaggaaggggtgatggcatgcggagttctttatcttcagtgagaatgtgcctgcccgcctgagagccagcttccgcgttggaggcacgtgttcagagagctgctgagcgccaccctctacccggctgacagacaacacagacctgtgccgaaggctaatttgtggcttttacgaccctaccccaccccctgttttcaggggtttagactacatttgaaatccaaacttggagtatataacttcttattgagcccaactgctttttttttttttttttttgcttctctgccccttttccatttcttttgtatttgttttctgtgagagcactgaaatggcagccctggaatctacaatttggctctccactgagcaccttatcttgccaccttagccttaagaatgaatatgaagaaaaatacacagccacctctgtccagggcagtaagaagggctgcaaggaaggggaggatggggacaaggaaaggatcagatacctgctccagtagttgtgaggccactgtgtctcaggggactccaggaggagcagaagagggatcccacgaagttattcttacgcagctggggccaggagggtcagagtggtgccaggtgcaagttaggctaaagaagccaccactattcctctctcttgcccattgtggggggcaaaggcattggtcaccaagagtcttgcagggggacccacagatatgccatgtccttcacacgtgcttgggctccttaacctgaaggcaaattgctacttgcaagactgactgacttcaaggaatcagaaattacctagaagcaccatgttttttctatgaccttttcagtccttcaggtcattttaaggtccactgcagggggttagtgagaaagggtatactttgtggtatgttttgctttcctaatagggacatgaaggaaacccagcaatttgctgttatgtgaatggcctgtagagcagagtcaagagcggtgtgctttgcccgactgctcccatcaggaataggagagtagacagagatcttccacatcccaggcttctgctgctgctttaaaagctctgtccttggagcctcccgctccctgaagtgtctcgccccctgcacagcactggcctttcggaagcatcccagtagggttttctgaggctcgctggtgactcatgccctaattgcaatcctctgcttttatcttgactttgaaggatctaacactgctctctcttccaaaggggaaaaaaagattcatttgttttgagcaataaactaatacaaaatgatggcc

SEQ ID NO: 2805 - protein, 560 aa, Homo sapiens [sequence omitted]

SEQ ID NO: 2806 - DNA, 5757 bp, Homo sapiens
gcgaggagagcggagcaggcgcgcggcccaggcggaggagcgccgactctggagcaccttcagaccaaggccactacaaatgttcaacccccagcacagatgccactgtccagggaaactatgaggacacagtgcaggttaaagtgctggccgactccctgcacgtgggccccagcgcgcggcccccgccgagcctgagcctgcgggagggggagcccttcgagctgcgctgcaccgccgcctccgcctcgccgctgcacacgcacctggcgctgctgtgggaggtgcaccgcggcccggccaggcggagcgtcctcgccctgacccacgagggcaggttccacccgggcctggggtacgagcagcgctaccacagtggggacgtgcgcctcgacaccgtgggcagcgacgcctaccgcctctcagtgtcccgggctctgtctgccgaccagggctcctacaggtgtatcgtcagcgagtggatcgccgagcagggcaactggcaggaaatccaagaaaaggccgtggaagttgccaccgtggtgatccagccatcagttctgcgagcagctgtgcccaagaatgtgtctgtggctgaaggaaaggaactggacctgacctgtaacatcacaacagaccgagccgatgacgtccggcccgaggtgacgtggtccttcagcaggatgcctgacagcaccctacctggctcccgcgtgttggcgcggcttgaccgtgattccctggtgcacagctcgcctcatgttgctttgagtcatgtggatgcacgctcctaccatttactggttcgggatgttagcaaagaaaactctggctactattactgccacgtgtccctgtgggcacccggacacaacaggagctggcacaaagtggcagaggccgtgtcttccccagctggtgtgggtgtgacctggctagaaccagactaccaggtgtacctgaatgcttccaaggtccccgggtttgcggatgaccccacagagctggcatgccgggtggtggacacgaagagtggggaggcgaatgtccgattcacggtttcgtggtactacaggatgaaccggcgcagcgacaatgtggtgaccagcgagctgcttgcagtcatggacggggactggacgctaaaatatggagagaggagcaagcagcgggcccaggatggagactttattttttctaaggaacatacagacacgttcaatttccggatccaaaggactacagaggaagacagaggcaattattactgtgttgtgtctgcctggaccaaacagcggaacaacagctgggtgaaaagcaaggatgtcttctccaagcctgttaacatattttgggcattagaagattccgtgcttgtggtgaaggcgaggcagccaaagcctttctttgctgccggaaatacatttgagatgacttgcaaagtatcttccaagaatattaagtcgccacgctactctgttctcatcatggctgagaagcctgtcggcgacctctccagtcccaatgaaacgaagtacatcatctctctggaccaggattctgtggtgaagctggagaattggacagatgcatcacgggtggatggcgttgttttagaaaaagtgcaggaggatgagttccgctatcgaatgtaccagactcaggtctcagacgcagggctgtaccgctgcatggtgacagcctggtctcctgtcaggggcagcctttggcgagaagcagcaaccagtctctccaatcctattgagatagacttccaaacctcaggtcctatatttaatgcttctgtgcattcagacacaccatcagtaattcggggagatctgatcaaattgttctgtatcatcactgtcgagggagcagcactggatccagatgacatggcctttgatgtgtcctggtttgcggtgcactcttttggcctggacaaggctcctgtgctcctgtcttccctggatcggaagggcatcgtgaccacctcccggagggactggaagagcgacctcagcctggagcgcgtgagtgtgctggaattcttgctgcaagtgcatggctccgaggaccaggactttggcaactactactgttccgtgactccatgggtgaagtcaccaacaggttcctggcagaaggaggcagagatccactccaagcccgtttttataactgtgaagatggatgtgctgaacgccttcaagtatcccttgctgatcggcgtcggtctgtccacggtcatcgggctcctgtcctgtctcatcgggtactgcagctcccactggtgttgtaagaaggaggttcaggagacacggcgcgagcgccgcaggctcatgtcgatggagatggactaggctggcccgggaggggagtgacagagggacgttctaggagcaattggggcaagaagaggacagtgatattttaaaacaaagtgtgttacactaaaaaccagtcctctctaatctcaggtgggacttggcgctctctcttttctgcatgtcaagttctgagcgcggacatgtttaccagcacacggctcttcttcccacggcactttctgatgtaacaatcgagtgtgtgttttcccaactgcagctttttaatggttaaccttcatctaattttttttctcccactggtttatagatcctctgacttgtgtgtgtttatagcttttgtttcgcggggttgtggtgaggaaggggtgatggcatgcggagttctttatcttcagtgagaatgtgcctgcccgcctgagagccagcttccgcgttggaggcacgtgttcagagagctgctgagcgccaccctctacccggctgacagacaacacagacctgtgccgaaggctaatttgtggcttttacgaccctaccccaccccctgttttcaggggtttagactacatttgaaatccaaacttggagtatataacttcttattgagcccaactgctttttttttttttttttttgcttctctgccccttttccatttcttttgtatttgttttctgtgagagcactgaaatggcagccctggaatctacaatttggctctccactgagcaccttatcttgccaccttagccttaagaatgaatatgaagaaaaatacacagccacctctgtccagggcagtaagaagggctgcaaggaaggggaggatggggacaaggaaaggatcagatacctgctccagtagttgtgaggccactgtgtctcaggggactccaggaggagcagaagagggatcccacgaagttattcttacgcagctggggccaggagggtcagagtggtgccaggtgcaagttaggctaaagaagccaccactattcctctctcttgcccattgtggggggcaaaggcattggtcaccaagagtcttgcagggggacccacagatatgccatgtccttcacacgtgcttgggctccttaacctgaaggcaaattgctacttgcaagactgactgacttcaaggaatcagaaattacctagaagcaccatgttttttctatgaccttttcagtccttcaggtcattttaaggtccactgcagggggttagtgagaaagggtatactttgtggtatgttttgctttcctaatagggacatgaaggaaacccagcaatttgctgttatgtgaatggcctgtagagcagagtcaagagcggtgtgctttgcccgactgctcccatcaggaataggagagtagacagagatcttccacatcccaggcttctgctgctgctttaaaagctctgtccttggagcctcccgctccctgaagtgtctcgccccctgcacagcactggcctttcggaagcatcccagtagggttttctgaggctcgctggtgactcatgccctaattgcaatcctctgcttttatcttgactttgaaggatctaacactgctctctcttccaaaggggaaaaaaagattcatttgttttgagcaataaactaatacaaaatgatggccattcatgtgcagctctttgtcaccatgggccggatgagttgtgctcctcctggctcaccatttccccctgctcccccacagccggttctgcacttatcaccgagtcgcccctggaagcagattcccattgagttttccccaccaaggggaccatgcacatggtagaaacattagattctgcattgacagtagcctttccttggcccgggcctgtggtgggaagacgggcaacaagtataccccaccagggcctgagtgactagaggaagaggacgaggccttgttggcactagatttgggtattttctgcatgtcataacatatcctaactgctatttcagaagaggcagcttgtaggtgattgtacaagtgagaattaaagagagaacagatatttaaacaggtgctgtattagtaacagccagtgccctttcagcccttgcatctattaaaaggagattcaggattttattggcacaggcccttcttagtaggaagaaagggtgcttagctttggacctgaccgggtgtgtgtaaaaccatggactgagtcacagcagacactcgatggtggtaaatgtgatgggtgcttacacactgtaccttttcctttcatactgatgctgcagttcagggctggagttgttaaggcattgacctccacccacctgccccatgtccactgggctgcccaagctgcatgtcacctgagggctggcaggaaggggcgagaaatcccagggcattgtaccaaggacctagttccttctagggatataaatttccaggaatgtgtatttttaatgtggtgagatgcactcttttgttgtaccaaatagggctccccaccccacccctgcgacaagtgctcttctagaacaggttcctaccagcagcactggtgtgaatgaaagagagacccagccgcgtctcacacaggtggaattgcacttcttaacaaaaaggaactttataaaagtttgggattttttttcctaatcataaaaatagccccagaaagagcctaagctatgttcagatagaagcctcgaaattcctgtaaattgtttactttatgatgtttacatacacgtttcactttgaaaaaaaatgcaaatcgactttttaacaactgttgagatgtttcatgggacagtagaactctgactcaccaactgggctaaattttaatttaaaaatgtatttatttgagtgtctttccccccctcaccctcaccatctgaggggctccctgagatcttggtagaggaggcccctcctgcccagaccttcgtttgtttccccggtggcccttgcttcttgctttgcagactgcctgcagccatgattttgtcactgacatctgtgagccaaagactgagcctttttggcaggaataataagcaatactacacaacttgctactttcagaaaacttttttttagcttcaccgatgacaacagaggaagaagggaactgggatttgggtaagttctcctccactgtttgaccaaattctcagtgataaatatgtgtgcagatccctagaagagaaaacgctgactttctttttaagtgtggcacataaggatctgcagaattttccgtagacaaagaaaggatcttgtgtatttttgtccatatccaatgttatatgaactaattgtattgttttatactgtgaccacaaatattatgcaatgcaccatttgttttttatttcattaaaggaagtttaatttaaattgaa

SEQ ID NO: 2807 - protein, 560 aa, Homo sapiens [sequence omitted]

SEQ ID NO: 2808 - DNA, 648 bp, Homo sapiens
cccgggtttgcggatgaccccacagagctggcatgccgggtggtggacacgaagagtggggaggcgaatgtccgattcacggtttcgtggtactacaggatgaaccggcgcagcgacaatgtggtgaccagcgagctgcttgcagtcatggacggggactggacgctaaaatatggagagaggagcaagcagcgggcccaggatggagactttattttttctaaggaacatacagacacgttcaatttccggatccaaaggactttctttgctgccggaaatacatttgagatgacttgcaaagtatcttccaagaatattaagtcgccacgctactctgttctcatcatggctgagaagcctgtcggcgacctctccagtcccaatgaaacgaagtacatcatctctctggaccaggattctgtggtgaagctggagaattggacagatgcatcacgggtggatggcgttgttttagaaaaagtgcaggaggatgagttccgctatcgaatgtaccagactcaggtctcagacgcagggctgtaccgctgcatggtgacagcctggtctcctgtcaggggcagcctttggcgagaagcagcaaccagtctctccaatcctattgagatagacttccaaacctcaggt

SEQ ID NO: 2809 - protein, 182 aa, Homo sapiens
MNRRSDNVVTSELLAVMDGDWTLKYGERSKQRAQDGDFIFSKEHTDTFNFRIQRTFFAAGNTFEMTCKVSSKNIKSPRYSVLIMAEKPVGDLSSPNETKYIISLDQDSVVKLENWTDASRVDGVVLEKVQEDEFRYRMYQTQVSDAGLYRCMVTAWSPVRGSLWREAATSLSNPIEIDFQTS

SEQ ID NO: 2810 - DNA, 1773 bp, Homo sapiens
gtgagtcaccaaggaaggcagcggcagctccactcagccagtacccagatacgctgggaaccttccccagccatggcttccctggggcagatcctcttctggagcataattagcatcatcattattctggctggagcaattgcactcatcattggctttggtatttcagggagacactccatcacagtcactactgtcgcctcagctgggaacattggggaggatggaatcctgagctgcacttttgaacctgacatcaaactttctgatatcgtgatacaatggctgaaggaaggtgttttaggcttggtccatgagttcaaagaaggcaaagatgagctgtcggagcaggatgaaatgttcagaggccggacagcagtgtttgctgatcaagtgatagttggcaatgcctctttgcggctgaaaaacgtgcaactcacagatgctggcacctacaaatgttatatcatcacttctaaaggcaaggggaatgctaaccttgagtataaaactggagccttcagcatgccggaagtgaatgtggactataatgccagctcagagaccttgcggtgtgaggctccccgatggttcccccagcccacagtggtctgggcatcccaagttgaccagggagccaacttctcggaagtctccaataccagctttgagctgaactctgagaatgtgaccatgaaggttgtgtctgtgctctacaatgttacgatcaacaacacatactcctgtatgattgaaaatgacattgccaaagcaacaggggatatcaaagtgacagaatcggagatcaaaaggcggagtcacctacagctgctaaactcaaaggcttctctgtgtgtctcttctttctttgccatcagctgggcacttctgcctctcagcccttacctgatgctaaaataatgtgcctcggccacaaaaaagcatgcaaagtcattgttacaacagggatctacagaactatttcaccaccagatatgacctagttttatatttctgggaggaaatgaattcatatctagaagtctggagtgagcaaacaagagcaagaaacaaaaagaagccaaaagcagaaggctccaatatgaacaagataaatctatcttcaaagacatattagaagttgggaaaataattcatgtgaactagagttttgagtagaaaagggcctggaaagaggggagccaacaaatctgtctgcttcctcacattagtcattggcaaataagcattctgtctctttggctgctgcctcagcacagagagccagaactctatcgggcaccaggataacatctctcagtgaacagagttgacaaggcctatgggaaatgcctgatgggattatcttcagcttgttgagcttctaagtttctttcccttcattctaccctgcaagccaagttctgtaagagaaatgcctgagttctagctcaggttttcttactctgaatttagatctccagaccctgcctggccacaattcaaattaaggcaacaaacatataccttccatgaagcacacacagacttttgaaagcaaggacaatgactgcttgaattgaggccttgaggaatgaagctttgaaggaaaagaatactttgtttccagcccccttcccacactcttcatgtgttaaccactgccttcctggaccttggagccacggtgactgtattacatgttgttatagaaaactgattttagagttctgatcgttcaagagaatgattaaatatacatttcctacacca

SEQ ID NO: 2811 - protein, 282 aa, Homo sapiens; identical to SEQ ID NO: 99

SEQ ID NO: 2812 - DNA, 1618 bp, Homo sapiens
gtgagtcaccaaggaaggcagcggcagctccactcagccagtacccagatacgctgggaaccttccccagccatggcttccctggggcagatcctcttctggagcataattagcatcatcattattctggctggagcaattgcactcatcattggctttggtatttcagggagacactccatcacagtcactactgtcgcctcagctgggaacattggggaggatggaatcctgagctgcacttttgaacctgacatcaaactttctgatatcgtgatacaatggctgaaggaaggtgttttaggcttggtccatgagttcaaagaaggcaaagatgagctgtcggagcaggatgaaatgttcagaggccggacagcagtgtttgctgatcaagtgatagttggcaatgcctctttgcggctgaaaaacgtgcaactcacagatgctggcacctacaaatgttatatcatcacttctaaaggcaaggggaatgctaaccttgagtataaaactggagccttcagcatgccggaagtgaatgtggactataatgccagctcagagaccttgcggtgtgaggctccccgatggttcccccagcccacagtggtctgggcatcccaagttgaccagggagccaacttctcggaagtctccaataccagctttgagctgaactctgagaatgtgaccatgaaggttgtgtctgtgctctacaatgttacgatcaacaacacatactcctgtatgattgaaaatgacattgccaaagcaacaggggatatcaaagtgacagaatcggagatcaaaaggcggagtcacctacagctgctaaactcaaaggcttctctgtgtgtctcttctttctttgccatcagctgggcacttctgcctctcagcccttacctgatgctaaaataatgtgcctcggccacaaaaaagcatgcaaagtcattgttacaacagggatctacagaactatttcaccaccagatatgacctagttttatatttctgggaggaaatgaattcatatctagaagtctggagtgagcaaacaagagcaagaaacaaaaagaagccaaaagcagaaggctccaatatgaacaagataaatctatcttcaaagacatattagaagttgggaaaataattcatgtgaactagacaagtgtgttaagagtgataagtaaaatgcacgtggagacaagtgcatccccagatctcagggacctccccctgcctgtcacctggggagtgagaggacaggatagtgcatgttctttgtctctgaatttttagttatatgtgctgtaatgttgctctgaggaagcccctggaaagtctatcccaacatatccacatcttatattccacaaattaagctgtagtatgtaccctaagacgctgctaattgactgccacttcgcaactcaggggcggctgcattttagtaatgggtcaaatgattcactttttatgatgcttccaaaggtgccttggcttctcttcccaactgacaaatgccaaagttgagaaaaatgatcataattttagcataaacagagcagtcggcgacaccgattttataaataaactgagcaccttctttttaaac

SEQ ID NO: 2813 - protein, 282 aa, Homo sapiens; identical to SEQ ID NO: 99

SEQ ID NO: 2814 - DNA, 1155 bp, Homo sapiens
gtgagtcaccaaggaaggcagcggcagctccactcagccagtacccagatacgctgggaaccttccccagccatggcttccctggggcagatcctcttctggagcataattagcatcatcattattctggctggagcaattgcactcatcattggctttggtatttcagaagtctctgtctggctttcagcaatgaagggtttggttgtagaagttccaaggcttcccttagcattgatctttgcttcctgaactgcagggagacactccatcacagtcactactgtcgcctcagctgggaacattggggaggatggaatcctgagctgcacttttgaacctgacatcaaactttctgatatcgtgatacaatggctgaaggaaggtgttttaggcttggtccatgagttcaaagaaggcaaagatgagctgtcggagcaggatgaaatgttcagaggccggacagcagtgtttgctgatcaagtgatagttggcaatgcctctttgcggctgaaaaacgtgcaactcacagatgctggcacctacaaatgttatatcatcacttctaaaggcaaggggaatgctaaccttgagtataaaactggagccttcagcatgccggaagtgaatgtggactataatgccagctcagagaccttgcggtgtgaggctccccgatggttcccccagcccacagtggtctgggcatcccaagttgaccagggagccaacttctcggaagtctccaataccagctttgagctgaactctgagaatgtgaccatgaaggttgtgtctgtgctctacaatgttacgatcaacaacacatactcctgtatgattgaaaatgacattgccaaagcaacaggggatatcaaagtgacagaatcggagatcaaaaggcggagtcacctacagctgctaaactcaaaggcttctctgtgtgtctcttctttctttgccatcagctgggcacttctgcctctcagcccttacctgatgctaaaataatgtgcctcggccacaaaaaagcatgcaaagtcattgttacaacagggatctacagaactatttcaccaccagatatgacctagttttatatttctgggaggaaatgaattcatatctagaagtctggagtgagcaaacaagagc

SEQ ID NO: 2815 - protein, 187 aa, Homo sapiens
MFRGRTAVFADQVIVGNASLRLKNVQLTDAGTYKCYIITSKGKGNANLEYKTGAFSMPEVNVDYNASSETLRCEAPRWFPQPTVVWASQVDQGANFSEVSNTSFELNSENVTMKVVSVLYNVTINNTYSCMIENDIAKATGDIKVTESEIKRRSHLQLLNSKASLCVSSFFAISWALLPLSPYLMLK

SEQ ID NO: 2816 - DNA, 1065 bp, Homo sapiens
gtgagtcaccaaggaaggcagcggcagctccactcagccagtacccagatacgctgggaaccttccccagccatggcttccctggggcagatcctcttctggagcataattagcatcatcattattctggctggagcaattgcactcatcattggctttggtatttcagggagacactccatcacagtcactactgtcgcctcagctgggaacattggggaggatggaatcctgagctgcacttttgaacctgacatcaaactttctgatatcgtgatacaatggctgaaggaaggtgttttaggcttggtccatgagttcaaagaaggcaaagatgagctgtcggagcaggatgaaatgttcagaggccggacagcagtgtttgctgatcaagtgatagttggcaatgcctctttgcggctgaaaaacgtgcaactcacagatgctggcacctacaaatgttatatcatcacttctaaaggcaaggggaatgctaaccttgagtataaaactggagccttcagcatgccggaagtgaatgtggactataatgccagctcagagaccttgcggtgtgaggctccccgatggttcccccagcccacagtggtctgggcatcccaagttgaccagggagccaacttctcggaagtctccaataccagctttgagctgaactctgagaatgtgaccatgaaggttgtgtctgtgctctacaatgttacgatcaacaacacatactcctgtatgattgaaaatgacattgccaaagcaacaggggatatcaaagtgacagaatcggagatcaaaaggcggagtcacctacagctgctaaactcaaaggcttctctgtgtgtctcttctttctttgccatcagctgggcacttctgcctctcagcccttacctgatgctaaaataatgtgcctcggccacaaaaaagcatgcaaagtcattgttacaacagggatctacagaactatttcaccaccagatatgacctagttttatatttctgggaggaaatgaattcatatctagaagtctggagtgagcaaacaagagc

SEQ ID NO: 2817 - protein, 282 aa, Homo sapiens; identical to SEQ ID NO: 99

SEQ ID NO: 2818 - DNA, 490 bp, Homo sapiens
gtgagtcaccaaggaaggcagcggcagctccactcagccagtacccagatacgctgggaaccttccccagccatggcttccctggggcagatcctcttctggagcataattagcatcatcattattctggctggagcaattgcactcatcattggctttggtatttcagggagacactccatcacagtcactactgtcgcctcagctgggaacattggggaggatggaatcctgagctgcacttttgaacctgacatcaaactttctgatatcgtgatacaatggctgaaggaaggtgttttaggcttggtccatgagttcaaagaaggcaaagatgagctgtcggagcaggatgaaatgttcagaggccggacagcagtgtttgctgatcaagtgatagttggcaatgcctctttgcggctgaaaaacccaacttctcggaagtctccaataccagctttgagctgaactctgagaatgtgaccatgaa

SEQ ID NO: 2819 - protein, 131 aa, Homo sapiens
MASLGQILFWSIISIIIILAGAIALIIGFGISGRHSITVTTVASAGNIGEDGILSCTFEPDIKLSDIVIQWLKEGVLGLVHEFKEGKDELSEQDEMFRGRTAVFADQVIVGNASLRLKNPTSRKSPIPALS

SEQ ID NO: 2820 - DNA, 563 bp, Homo sapiens
gcacttgtcaagagtaaacagaaaaggaataaagcttgcctctttttttgaaaaacccagctggacaatgggcatattcaatggccaaggcctcctctaattgctggcttgggaagaactggagataactcagcaatggagagacaaggagggctcctagggaacaacttggagaccgaggaatcttgctgaatgccagcaggttgtagacaccaagtggtggctctttagttgccattaacagccctgaggattgagtgcggatctatttcatcttgagaagttaatattatttaatcacagaaagtaaaggctccatgtaatttcattggagcaatcaatgaaagcatgagaaatgccacgccaggtcataacagtaaatacccccagcaccacattctggctagcagaggtatcaatggaggtctgtgggtagacactctcaaaagaaaatctggaagcagagccagtataattcagcattactgagcccactgagctctccagggaagtataaattgagcacagaagctctgaaatggattgtaaccacaacatcagag

SEQ ID NO: 2821 - protein, 46 aa, Homo sapiens
MRNATPGHNSKYPQHHILASRGINGGLWVDTLKRKSGSRASIIQHY

SEQ ID NO: 2822 - DNA, 511 bp, Homo sapiens
cagaaaaggaataaagcttgcctctttttttgaaaaacccagctggacaatgggcatattcaatggccaaggcctcctctaattgctggcttgggaagaactggagataactcagcaatggagagacaaggagggctcctagggaacaacttggagaccgaggaatcttgctgaatgccagcagaaaatctggaagcagagccagtataattcagcattactgagcccactgagctctccagggaagtataaattgagcacagaagctctgaaatggattgtaaccacaacatcagaggttataagaccctcattccagagtggtactgccctgcgtctgggaagaaggaaggccacacagagagaccaagaagaatcctaacagacagggcttgcttggtttccccctcagtctcttaccgttagatcagacctctttggtcctaccacgtttctacatggctgtccattcttcatcgaatctaagaataaaaatggatagttttccctg

SEQ ID NO: 2823 - protein, 50 aa, Homo sapiens
MDCNHNIRGYKTLIPEWYCPASGKKEGHTERPRRILTDRACLVSPSVSYR

SEQ ID NO: 2824 - DNA, 3658 bp, Homo sapiens
caggacacgccggggcttctcagtggccgccggaggaggaagttccgctccctgacagacccgtgcggtagcaacagcggcggcggccgcggcggctggccggactcaggtgtttcggacgctattgcccttcgcgccagccgtcgagtgggcagcagcgggactcagccgggcgccaggttcctgccaggcagcgccgggaagcgcgggcggccgagaactccttcctgctacttcgcccagcgccgctgcttcggcttcccagcgaagtgggagaccttcctccctgtttgcagacgtccgtgggagacccttattttttccaccgctaaggttaagagattctggaatagaagcgtcgaaggagatcaagtgaaccttctacaactcctcggatgtcgccagtctccctttcggggcggaagactacgtttgagcatctcactgaggtgcaggaatggaagaacccaccttgcagcttttctgcagtgtggcttgcctgatctacccctaggaatgaagaggaggcttgtaataatccgatgaagtacagatgttgaagaggatatcgcaggacctaaacttgtgatcgtttgggggaggtcacacacgtttctgagtgggaatggatgggcgtgaatgacgtgccctcttaaaaagcacaacagtcctttaagaggagcaaaattgagttttcccattttggccaagattttgaagacagttcaatgtattctacatttgacataagatgagaactttctaaagtattctctccaagagcgtaaacgatgactaccccagccctgctgcccctctctggacgtaggataccacctctgaacctggggccgccttccttcccacatcacagggctaccttgagactttctgagaagtttattcttctccttattcttagtgccttcatcactctgtgttttggggcattctttttccttccagactcttcaaaacacaaacgctttgatttgggtttagaagatgtgttaattccacatgtagatgccggtaaaggggctaaaaaccccggagtcttcctgatccatggacccgatgaacatagacacagggaagaggaagaacgtctgagaaataaaattcgagctgatcatgagaaggccttggaagaagcaaaagaaaaattaagaaagtcaagagaggaaattcgagcagaaattcagacagagaaaaataaggtagtccaagaaatgaagataaaagagaacaagccactgccaccagtccctattcccaaccttgtaggaatacgtggtggagacccagaagataatgacataagagagaaaagggaaaaaattaaagagatgatgaaacatgcttgggataactataggacatatgggtggggacataatgaactcagacctattgcaaggaaaggacactcccctaacatatttggaagttcacaaatgggtgctaccatagtagatgctttggataccctttatatcatgggacttcatgatgaattcctagatgggcaaagatggattgaagacaaccttgatttcagtgtgaattcagaggtgtctgtgtttgaagtcaacattcgatttattggaggcctacttgcagcatattacctatcaggagaggagatattcaagattaaagcagtgcaattggctgagaaactccttcctgcctttaacacacctactgggattccttgggcaatggtgaatttgaaaagtggagtagggcgaaactggggctgggcatctgcaggtagcagcattctggctgaatttggtacactacatatggagttcatccacctcagctacttgacaggggacctgacttactacaaaaaggttatgcacattcggaaactacttcagaaaatggatcgtccaaatggtctttatccaaattatttgaaccccagaacagggcgctggggtcagtatcatacatctgtcggtggcctgggagacagtttttatgaatacttactgaaagcatggttgatgtcagataaaacagaccatgaggcaagaaagatgtatgatgatgctattgaggctatagaaaaacatcttattaagaagtctcgtggaggtcttacctttattggagaatggaagaatgggcacttggaaaaaaagatggggcatttggcctgctttgctgggggaatgtttgcactaggagcagatggttccagagcagataaagctggtcattatttagagctaggggcagaaattgcacgtacttgtcatgagtcatatgacagaactgcattaaagctaggtcctgaatcattcaagtttgatggtgcagtggaggctgtggctgtccggcaggctgaaaagtattatatcctccgtccagaagtaattgaaacctattggtacctatggcgattcactcacgatccaagatacaggcagtggggctgggaagcagcactggccattgaaaagtattgccgagttaatggtgggttttctggagtcaaagatgtatattcctctactcctacacatgatgatgtacagcagagcttttttcttgctgaaacattaaaatatttgtatctgctgttctccggtgatgaccttttacctttagaccactgggtgtttaatacagaggctcaccctctgcctgtgttacatttagccaacaccacactttcaggtaatcctgctgttcgatgaaagcagttccagaaggaccattctcacctgtgttttgtttacatggaccactacagaaattagtttgaaggggcggcttttgaaaacctggacctctatgtcaacatgacagggtgaaactattccccctaagactgttcaacttgtagatacatcaactttgaaattattccattttatacctgaccaaaacatgttctgatatgtgtaggacagagacctggatgtgctttgatcgttaatgaggtggtcacatgagaaatgatacctgttactactgtattgtttttagagtcctgaagtctggaggctagacttcctgaaagcaagtcaagaatatagagcaccttgcaggagttcaagatggcctttggaaccaattatgtatttgtttcctcctacagtggagcagcattcaaatcaaatatttacatattgcttatcactttttctccattttaataatggaatgaactaaaataaacaagaacaaaagaatagtataattatatcagtaacaagaagactcaaaaaagaaacaggagtacctatccctatctgaattttcaagttccccattggatgaccagactggcaaccatttcaaatcccagtctatttcattgaaatttcttggttaagtttaattttctctgggggcatgatctcacaaagaatactcaagtctttttcttcttatggaatcatcgaaactgctatttatcataatcaccacttatgagcctgggtttgggattttgtgcatgtagttcagtctagtgttggtagcatgacagaaagtggggaaaatgccgcagtttgttgccttgaaacctaagagcaatccttggttttgttgctacattatttttccagaccaacacatctaccaagtaaattttattcactttaatttcataataaagttagtagagtcactc

SEQ ID NO: 2825 - protein, 641 aa, Homo sapiens; identical to SEQ ID NO: 101

SEQ ID NO: 2826 - DNA, 5111 bp, Homo sapiens
caggacacgccggggcttctcagtggccgccggaggaggaagttccgctccctgacagacccgtgcggtagcaacagcggcggcggccgcggcggctggccggactcaggtgtttcggacgctattgcccttcgcgccagccgtcgagtgggcagcagcgggactcagccgggcgccaggttcctgccaggcagcgccgggaagcgcgggcggccgagaactccttcctgctacttcgcccagcgccgctgcttcggcttcccagcgaagtgggagaccttcctccctgtttgcagacgtccgtgggagacccttattttttccaccgctaaggttaagagattctggaatagaagcgtcgaaggagatcaagtgaaccttctacaactcctcggatgtcgccagtctccctttcggggcggaagactacgtttgagcatctcactgaggtgcaggaatggaagaacccaccttgcagcttttctgcagtgtggcttgcctgatctacccctaggaatgaagaggaggcttgtaataatccgatgaagtacagatgttgaagaggatatcgcaggacctaaacttgtgatcgtttgggggaggtcacacacgtttctgagtgggaatggatgggcgtgaatgacgtgccctcttaaaaagcacaacagtcctttaagaggagcaaaattgagttttcccattttggccaagattttgaagacagttcaatgtattctacatttgacataagatgagaactttctaaagtattctctccaagagcgtaaacgatgactaccccagccctgctgcccctctctggacgtaggataccacctctgaacctggggccgccttccttcccacatcacagggctaccttgagactttctgagaagtttattcttctccttattcttagtgccttcatcactctgtgttttggggcattctttttccttccagactcttcaaaacacaaacgctttgatttgggtttagaagatgtgttaattccacatgtagatgccggtaaaggggctaaaaaccccggagtcttcctgatccatggacccgatgaacatagacacagggaagaggaagaacgtctgagaaataaaattcgagctgatcatgagaaggccttggaagaagcaaaagaaaaattaagaaagtcaagagaggaaattcgagcagaaattcagacagagaaaaataaggtagtccaagaaatgaagataaaagagaacaagccactgccaccagtccctattcccaaccttgtaggaatacgtggtggagacccagaagataatgacataagagagaaaagggaaaaaattaaagagatgatgaaacatgcttgggataactataggacatatgggtggggacataatgaactcagacctattgcaaggaaaggacactcccctaacatatttggaagttcacaaatgggtgctaccatagtagatgctttggataccctttatatcatgggacttcatgatgaattcctagatgggcaaagatggattgaagacaaccttgatttcagtgtgaattcagaggtgtctgtgtttgaagtcaacattcgatttattggaggcctacttgcagcatattacctatcaggagaggagatattcaagattaaagcagtgcaattggctgagaaactccttcctgcctttaacacacctactgggattccttgggcaatggtgaatttgaaaagtggagtagggcgaaactggggctgggcatctgcaggtagcagcattctggctgaatttggtacactacatatggagttcatccacctcagctacttgacaggggacctgacttactacaaaaaggttatgcacattcggaaactacttcagaaaatggatcgtccaaatggtctttatccaaattatttgaaccccagaacagggcgctggggtcagtatcatacatctgtcggtggcctgggagacagtttttatgaatacttactgaaagcatggttgatgtcagataaaacagaccatgaggcaagaaagatgtatgatgatgctattgaggctatagaaaaacatcttattaagaagtctcgtggaggtcttacctttattggagaatggaagaatgggcacttggaaaaaaagatggggcatttggcctgctttgctgggggaatgtttgcactaggagcagatggttccagagcagataaagctggtcattatttagagctaggggcagaaattgcacgtacttgtcatgagtcatatgacagaactgcattaaagctaggtcctgaatcattcaagtttgatggtgcagtggaggctgtggctgtccggcaggctgaaaagtattatatcctccgtccagaagtaattgaaacctattggtacctatggcgattcactcacgatccaagatacaggcagtggggctgggaagcagcactggccattgaaaagtattgccgagttaatggtgggttttctggagtcaaagatgtatattcctctactcctacacatgatgatgtacagcagagcttttttcttgctgaaacattaaaatatttgtatctgctgttctccggtgatgaccttttacctttagaccactgggtgtttaatacagaggctcaccctctgcctgtgttacatttagccaacaccacactttcaggtaatcctgctgttcgatgaaagcagttccagaaggaccattctcacctgtgttttgtttacatggaccactacagaaattagtttgaaggggcggcttttgaaaacctggacctctatgtcaacatgacagggtgaaactattccccctaagactgttcaacttgtagatacatcaactttgaaattattccattttatacctgaccaaaacatgttctgatatgtgtaggacagagacctggatgtgctttgatcgttaatgaggtggtcacatgagaaatgatacctgttactactgtattgtttttagagtcctgaagtctggaggctagacttcctgaaagcaagtcaagaatatagagcaccttgcaggagttcaagatggcctttggaaccaattatgtatttgtttcctcctacagtggagcagcattcaaatcaaatatttacatattgcttatcactttttctccattttaataatggaatgaactaaaataaacaagaacaaaagaatagtataattatatcagtaacaagaagactcaaaaaagaaacaggagtacctatccctatctgaattttcaagttccccattggatgaccagactggcaaccatttcaaatcccagtctatttcattgaaatttcttggttaagtttaattttctctgggggcatgatctcacaaagaatactcaagtctttttcttcttatggaatcatcgaaactgctatttatcataatcaccacttatgagcctgggtttgggattttgtgcatgtagttcagtctagtgttggtagcatgacagaaagtggggaaaatgccgcagtttgttgccttgaaacctaagagcaatccttggttttgttgctacattatttttccagaccaacacatctaccaagtaaattttattcactttaatttcataataaagttagtagagtcactcaacttacaactttatttatgtggcttggcaaaaatcactataaggcagctctaaatttgccttgataagctaaataaattacttttataacttactaaagcagaacaaacagtgaaactttctaaaatattctatctggaatagggacaggggatcttttatttataatctcatcagatgagtgagttgttcacagatattttatgtttttttaattttctccaagaatatttatagaattccaaagaatcagaatagtttcaaaataattttcagtgataaaagagtgttgtaattaatcatattacactaaaattgggatacatctaaggaactttatcttactatcagtaggttttgcattgatatttctttttaaataaactactagttctttatattttgacaaaaagaacttaaattttatcaggaactgtaagataaatatctagtgcttataaattttctgtccttaaatttatgtgacagtgcaagatacttttgctcttttcatttaatataggcatcttccattgacattaataaaacttagaaacagtataattagtataacatttactctgaatttgaagatttcctgaaacaaagtttgtacaagaagcccaccttggaattctgaaggcttattttcttgtttgataagcttttcttttaaacttaggttttaagttggggaaagacttaattaactaatatagtattttctaaggttgatcatcttataccacgaatcgttaattttgacagttctactgatccgtaaatgataaccactgcaaattttttcagtataaaatttttcactgcaaaaaaatttcagtagaaaataaggatgcagggccagttacaatagtccttaagagagttaaattatagcacatgttttgacattgtaatatcttttactacttgaacatttaaatttctaaatgagaaaggtatatatattactgtaactgtagaagggaaaagggaaagtatttggttctaaaaaatgttagccttcctcgtaaaagtagcacaagcccacttatgaatcactgagaaaaagtgaaaaacttgagttggcaaagatgcagagcagcagtgcagatggcaatgaactctctgaattctcttttaccttatttagaagaatgcagagtaaagggaccttcttggttctgcaggaacttctcaagggatgaggagacagaacccctacttccaagtgctctatttgtattacccagatgactgaagcttaagagaaggcagggaagtatacaagcagagccagttctggtacaaacaaagaatttgacagggacaatggaagggtcttcttcaccactccttaccttctatgtgatggaaagactagagcttataaaagtacttccatttttttattctcctgaataccaaaggcaattaaagtcagctacaaatg

SEQ ID NO: 2827 - protein, 641 aa, Homo sapiens; identical to SEQ ID NO: 101

SEQ ID NO: 2828 - DNA, 6330 bp, Homo sapiens
caggacacgccggggcttctcagtggccgccggaggaggaagttccgctccctgacagacccgtgcggtagcaacagcggcggcggccgcggcggctggccggactcaggtgtttcggacgctattgcccttcgcgccagccgtcgagtgggcagcagcgggactcagccgggcgccaggttcctgccaggcagcgccgggaagcgcgggcggccgagaactccttcctgctacttcgcccagcgccgctgcttcggcttcccagcgaagtgggagaccttcctccctgtttgcagacgtccgtgggagacccttattttttccaccgctaaggttaagagattctggaatagaagcgtcgaaggagatcaagtgaaccttctacaactcctcggatgtcgccagtctccctttcggggcggaagactacgtttgagcatctcactgaggtgcaggaatggaagaacccaccttgcagcttttctgcagtgtggcttgcctgatctacccctaggaatgaagaggaggcttgtaataatccgatgaagtacagatgttgaagaggatatcgcaggacctaaacttgtgatcgtttgggggaggtcacacacgtttctgagtgggaatggatgggcgtgaatgacgtgccctcttaaaaagcacaacagtcctttaagaggagcaaaattgagttttcccattttggccaagattttgaagacagttcaatgtattctacatttgacataagatgagaactttctaaagtattctctccaagagcgtaaacgatgactaccccagccctgctgcccctctctggacgtaggataccacctctgaacctggggccgccttccttcccacatcacagggctaccttgagactttctgagaagtttattcttctccttattcttagtgccttcatcactctgtgttttggggcattctttttccttccagactcttcaaaacacaaacgctttgatttgggtttagaagatgtgttaattccacatgtagatgccggtaaaggggctaaaaaccccggagtcttcctgatccatggacccgatgaacatagacacagggaagaggaagaacgtctgagaaataaaattcgagctgatcatgagaaggccttggaagaagcaaaagaaaaattaagaaagtcaagagaggaaattcgagcagaaattcagacagagaaaaataaggtagtccaagaaatgaagataaaagagaacaagccactgccaccagtccctattcccaaccttgtaggaatacgtggtggagacccagaagataatgacataagagagaaaagggaaaaaattaaagagatgatgaaacatgcttgggataactataggacatatgggtggggacataatgaactcagacctattgcaaggaaaggacactcccctaacatatttggaagttcacaaatgggtgctaccatagtagatgctttggataccctttatatcatgggacttcatgatgaattcctagatgggcaaagatggattgaagacaaccttgatttcagtgtgaattcagaggtgtctgtgtttgaagtcaacattcgatttattggaggcctacttgcagcatattacctatcaggagaggagatattcaagattaaagcagtgcaattggctgagaaactccttcctgcctttaacacacctactgggattccttgggcaatggtgaatttgaaaagtggagtagggcgaaactggggctgggcatctgcaggtagcagcattctggctgaatttggtacactacatatggagttcatccacctcagctacttgacaggggacctgacttactacaaaaaggttatgcacattcggaaactacttcagaaaatggatcgtccaaatggtctttatccaaattatttgaaccccagaacagggcgctggggtcagtatcatacatctgtcggtggcctgggagacagtttttatgaatacttactgaaagcatggttgatgtcagataaaacagaccatgaggcaagaaagatgtatgatgatgctattgaggctatagaaaaacatcttattaagaagtctcgtggaggtcttacctttattggagaatggaagaatgggcacttggaaaaaaagatggggcatttggcctgctttgctgggggaatgtttgcactaggagcagatggttccagagcagataaagctggtcattatttagagctaggggcagaaattgcacgtacttgtcatgagtcatatgacagaactgcattaaagctaggtcctgaatcattcaagtttgatggtgcagtggaggctgtggctgtccggcaggctgaaaagtattatatcctccgtccagaagtaattgaaacctattggtacctatggcgattcactcacgatccaagatacaggcagtggggctgggaagcagcactggccattgaaaagtattgccgagttaatggtgggttttctggagtcaaagatgtatattcctctactcctacacatgatgatgtacagcagagcttttttcttgctgaaacattaaaatatttgtatctgctgttctccggtgatgaccttttacctttagaccactgggtgtttaatacagaggctcaccctctgcctgtgttacatttagccaacaccacactttcaggtaatcctgctgttcgatgaaagcagttccagaaggaccattctcacctgtgttttgtttacatggaccactacagaaattagtttgaaggggcggcttttgaaaacctggacctctatgtcaacatgacagggtgaaactattccccctaagactgttcaacttgtagatacatcaactttgaaattattccattttatacctgaccaaaacatgttctgatatgtgtaggacagagacctggatgtgctttgatcgttaatgaggtggtcacatgagaaatgatacctgttactactgtattgtttttagagtcctgaagtctggaggctagacttcctgaaagcaagtcaagaatatagagcaccttgcaggagttcaagatggcctttggaaccaattatgtatttgtttcctcctacagtggagcagcattcaaatcaaatatttacatattgcttatcactttttctccattttaataatggaatgaactaaaataaacaagaacaaaagaatagtataattatatcagtaacaagaagactcaaaaaagaaacaggagtacctatccctatctgaattttcaagttccccattggatgaccagactggcaaccatttcaaatcccagtctatttcattgaaatttcttggttaagtttaattttctctgggggcatgatctcacaaagaatactcaagtctttttcttcttatggaatcatcgaaactgctatttatcataatcaccacttatgagcctgggtttgggattttgtgcatgtagttcagtctagtgttggtagcatgacagaaagtggggaaaatgccgcagtttgttgccttgaaacctaagagcaatccttggttttgttgctacattatttttccagaccaacacatctaccaagtaaattttattcactttaatttcataataaagttagtagagtcactcaacttacaactttatttatgtggcttggcaaaaatcactataaggcagctctaaatttgccttgataagctaaataaattacttttataacttactaaagcagaacaaacagtgaaactttctaaaatattctatctggaatagggacaggggatcttttatttataatctcatcagatgagtgagttgttcacagatattttatgtttttttaattttctccaagaatatttatagaattccaaagaatcagaatagtttcaaaataattttcagtgataaaagagtgttgtaattaatcatattacactaaaattgggatacatctaaggaactttatcttactatcagtaggttttgcattgatatttctttttaaataaactactagttctttatattttgacaaaaagaacttaaattttatcaggaactgtaagataaatatctagtgcttataaattttctgtccttaaatttatgtgacagtgcaagatacttttgctcttttcatttaatataggcatcttccattgacattaataaaacttagaaacagtataattagtataacatttactctgaatttgaagatttcctgaaacaaagtttgtacaagaagcccaccttggaattctgaaggcttattttcttgtttgataagcttttcttttaaacttaggttttaagttggggaaagacttaattaactaatatagtattttctaaggttgatcatcttataccacgaatcgttaattttgacagttctactgatccgtaaatgataaccactgcaaattttttcagtataaaatttttcactgcaaaaaaatttcagtagaaaataaggatgcagggccagttacaatagtccttaagagagttaaattatagcacatgttttgacattgtaatatcttttactacttgaacatttaaatttctaaatgagaaaggtatatatattactgtaactgtagaagggaaaagggaaagtatttggttctaaaaaatgttagccttcctcgtaaaagtagcacaagcccacttatgaatcactgagaaaaagtgaaaaacttgagttggcaaagatgcagagcagcagtgcagatggcaatgaactctctgaattctcttttaccttatttagaagaatgcagagtaaagggaccttcttggttctgcaggaacttctcaagggatgaggagacagaacccctacttccaagtgctctatttgtattacccagatgactgaagcttaagagaaggcagggaagtatacaagcagagccagttctggtacaaacaaagaatttgacagggacaatggaagggtcttcttcaccactccttaccttctatgtgatggaaagactagagcttataaaagtacttccatttttttattctcctgaataccaaaggcaattaaagtcagctacaaatgacttgccagtgtcatgttttatttttgttatagatttttaaattatttccttcaagatcaattcttatcccatataatgcttagcttccaagaatattctttactttcttctgtcttttacagctctttgcattttgtagaccttaatactcaggttaaatattcattgcatttataagatcttctgcaaaaagcccagaaatggtccttttcaggtgcctcttcaaagagctgacaccttaccttgtgcctttggcacaaatgtgcagaatagatacatcagttggtgcataatcgaaaaaaataggaattttgaacactgttcttccttctacatttatttctcttcattttagaatcacactttttatgttaaaccagattattattattattattattcaaccagtattaagttgttaaaaccaagggaatggggccctaaccaaaaagaagtctcaactcagaaaaataagtccccagtcaggtggttcttactttcttgtgggttgcacattttgtatctctctaacatcagcgtattcctgactttaagcaggtgtttatatgtaaaataaaacctgggtatcgaagggaaatgcattctttttatggagtattgaccctgatcctctatgatgtcatatagagcaactcagggctatacttgctagattttaaccaagcagtttgaaatattaatcatcatcctctcatcttctccactctccattgccaaagtctttgtcaaaactccaaatttgttgataaaagattgtgtttgccattctcatttataatgcagtttctccttaagcctggagttttttgaatgagtgcatgagtaaatgagagaatgtgtgaacgaacatttatgaagtatctaacatgtgccaagcattgtgcctggcactttcaatcattagaatgttttatgtgattccacagcattttctgtatgagagtagctcacaacattttaaatgtttccaatatgaatcgtgttacaaaattcttaattttatatttcatataaattaaagaggaaaaagaaaaggtttataatatattttaaaacaatgtgttactgtataatacaactataattgtagttaataactaaaacctcttgaaaatgtcaaagaaatacttgatttctgatgcaactttgactaaaatatttactttagaaataaaaacgttcttattttgctatatc

SEQ ID NO: 2829 - protein, 641 aa, Homo sapiens; identical to SEQ ID NO: 101

SEQ ID NO: 2830 - DNA, 8631 bp, Homo sapiens
caggacacgccggggcttctcagtggccgccggaggaggaagttccgctccctgacagacccgtgcggtagcaacagcggcggcggccgcggcggctggccggactcaggtgtttcggacgctattgcccttcgcgccagccgtcgagtgggcagcagcgggactcagccgggcgccaggttcctgccaggcagcgccgggaagcgcgggcggccgagaactccttcctgctacttcgcccagcgccgctgcttcggcttcccagcgaagtgggagaccttcctccctgtttgcagacgtccgtgggagacccttattttttccaccgctaaggttaagagattctggaatagaagcgtcgaaggagatcaagtgaaccttctacaactcctcggatgtcgccagtctccctttcggggcggaagactacgtttgagcatctcactgaggtgcaggaatggaagaacccaccttgcagcttttctgcagtgtggcttgcctgatctacccctaggaatgaagaggaggcttgtaataatccgatgaagtacagatgttgaagaggatatcgcaggacctaaacttgtgatcgtttgggggaggtcacacacgtttctgagtgggaatggatgggcgtgaatgacgtgccctcttaaaaagcacaacagtcctttaagaggagcaaaattgagttttcccattttggccaagattttgaagacagttcaatgtattctacatttgacataagatgagaactttctaaagtattctctccaagagcgtaaacgatgactaccccagccctgctgcccctctctggacgtaggataccacctctgaacctggggccgccttccttcccacatcacagggctaccttgagactttctgagaagtttattcttctccttattcttagtgccttcatcactctgtgttttggggcattctttttccttccagactcttcaaaacacaaacgctttgatttgggtttagaagatgtgttaattccacatgtagatgccggtaaaggggctaaaaaccccggagtcttcctgatccatggacccgatgaacatagacacagggaagaggaagaacgtctgagaaataaaattcgagctgatcatgagaaggccttggaagaagcaaaagaaaaattaagaaagtcaagagaggaaattcgagcagaaattcagacagagaaaaataaggtagtccaagaaatgaagataaaagagaacaagccactgccaccagtccctattcccaaccttgtaggaatacgtggtggagacccagaagataatgacataagagagaaaagggaaaaaattaaagagatgatgaaacatgcttgggataactataggacatatgggtggggacataatgaactcagacctattgcaaggaaaggacactcccctaacatatttggaagttcacaaatgggtgctaccatagtagatgctttggataccctttatatcatgggacttcatgatgaattcctagatgggcaaagatggattgaagacaaccttgatttcagtgtgaattcagaggtgtctgtgtttgaagtcaacattcgatttattggaggcctacttgcagcatattacctatcaggagaggagatattcaagattaaagcagtgcaattggctgagaaactccttcctgcctttaacacacctactgggattccttgggcaatggtgaatttgaaaagtggagtagggcgaaactggggctgggcatctgcaggtagcagcattctggctgaatttggtacactacatatggagttcatccacctcagctacttgacaggggacctgacttactacaaaaaggttatgcacattcggaaactacttcagaaaatggatcgtccaaatggtctttatccaaattatttgaaccccagaacagggcgctggggtcagtatcatacatctgtcggtggcctgggagacagtttttatgaatacttactgaaagcatggttgatgtcagataaaacagaccatgaggcaagaaagatgtatgatgatgctattgaggctatagaaaaacatcttattaagaagtctcgtggaggtcttacctttattggagaatggaagaatgggcacttggaaaaaaagatggggcatttggcctgctttgctgggggaatgtttgcactaggagcagatggttccagagcagataaagctggtcattatttagagctaggggcagaaattgcacgtacttgtcatgagtcatatgacagaactgcattaaagctaggtcctgaatcattcaagtttgatggtgcagtggaggctgtggctgtccggcaggctgaaaagtattatatcctccgtccagaagtaattgaaacctattggtacctatggcgattcactcacgatccaagatacaggcagtggggctgggaagcagcactggccattgaaaagtattgccgagttaatggtgggttttctggagtcaaagatgtatattcctctactcctacacatgatgatgtacagcagagcttttttcttgctgaaacattaaaatatttgtatctgctgttctccggtgatgaccttttacctttagaccactgggtgtttaatacagaggctcaccctctgcctgtgttacatttagccaacaccacactttcaggtaatcctgctgttcgatgaaagcagttccagaaggaccattctcacctgtgttttgtttacatggaccactacagaaattagtttgaaggggcggcttttgaaaacctggacctctatgtcaacatgacagggtgaaactattccccctaagactgttcaacttgtagatacatcaactttgaaattattccattttatacctgaccaaaacatgttctgatatgtgtaggacagagacctggatgtgctttgatcgttaatgaggtggtcacatgagaaatgatacctgttactactgtattgtttttagagtcctgaagtctggaggctagacttcctgaaagcaagtcaagaatatagagcaccttgcaggagttcaagatggcctttggaaccaattatgtatttgtttcctcctacagtggagcagcattcaaatcaaatatttacatattgcttatcactttttctccattttaataatggaatgaactaaaataaacaagaacaaaagaatagtataattatatcagtaacaagaagactcaaaaaagaaacaggagtacctatccctatctgaattttcaagttccccattggatgaccagactggcaaccatttcaaatcccagtctatttcattgaaatttcttggttaagtttaattttctctgggggcatgatctcacaaagaatactcaagtctttttcttcttatggaatcatcgaaactgctatttatcataatcaccacttatgagcctgggtttgggattttgtgcatgtagttcagtctagtgttggtagcatgacagaaagtggggaaaatgccgcagtttgttgccttgaaacctaagagcaatccttggttttgttgctacattatttttccagaccaacacatctaccaagtaaattttattcactttaatttcataataaagttagtagagtcactcaacttacaactttatttatgtggcttggcaaaaatcactataaggcagctctaaatttgccttgataagctaaataaattacttttataacttactaaagcagaacaaacagtgaaactttctaaaatattctatctggaatagggacaggggatcttttatttataatctcatcagatgagtgagttgttcacagatattttatgtttttttaattttctccaagaatatttatagaattccaaagaatcagaatagtttcaaaataattttcagtgataaaagagtgttgtaattaatcatattacactaaaattgggatacatctaaggaactttatcttactatcagtaggttttgcattgatatttctttttaaataaactactagttctttatattttgacaaaaagaacttaaattttatcaggaactgtaagataaatatctagtgcttataaattttctgtccttaaatttatgtgacagtgcaagatacttttgctcttttcatttaatataggcatcttccattgacattaataaaacttagaaacagtataattagtataacatttactctgaatttgaagatttcctgaaacaaagtttgtacaagaagcccaccttggaattctgaaggcttattttcttgtttgataagcttttcttttaaacttaggttttaagttggggaaagacttaattaactaatatagtattttctaaggttgatcatcttataccacgaatcgttaattttgacagttctactgatccgtaaatgataaccactgcaaattttttcagtataaaatttttcactgcaaaaaaatttcagtagaaaataaggatgcagggccagttacaatagtccttaagagagttaaattatagcacatgttttgacattgtaatatcttttactacttgaacatttaaatttctaaatgagaaaggtatatatattactgtaactgtagaagggaaaagggaaagtatttggttctaaaaaatgttagccttcctcgtaaaagtagcacaagcccacttatgaatcactgagaaaaagtgaaaaacttgagttggcaaagatgcagagcagcagtgcagatggcaatgaactctctgaattctcttttaccttatttagaagaatgcagagtaaagggaccttcttggttctgcaggaacttctcaagggatgaggagacagaacccctacttccaagtgctctatttgtattacccagatgactgaagcttaagagaaggcagggaagtatacaagcagagccagttctggtacaaacaaagaatttgacagggacaatggaagggtcttcttcaccactccttaccttctatgtgatggaaagactagagcttataaaagtacttccatttttttattctcctgaataccaaaggcaattaaagtcagctacaaatgacttgccagtgtcatgttttatttttgttatagatttttaaattatttccttcaagatcaattcttatcccatataatgcttagcttccaagaatattctttactttcttctgtcttttacagctctttgcattttgtagaccttaatactcaggttaaatattcattgcatttataagatcttctgcaaaaagcccagaaatggtccttttcaggtgcctcttcaaagagctgacaccttaccttgtgcctttggcacaaatgtgcagaatagatacatcagttggtgcataatcgaaaaaaataggaattttgaacactgttcttccttctacatttatttctcttcattttagaatcacactttttatgttaaaccagattattattattattattattcaaccagtattaagttgttaaaaccaagggaatggggccctaaccaaaaagaagtctcaactcagaaaaataagtccccagtcaggtggttcttactttcttgtgggttgcacattttgtatctctctaacatcagcgtattcctgactttaagcaggtgtttatatgtaaaataaaacctgggtatcgaagggaaatgcattctttttatggagtattgaccctgatcctctatgatgtcatatagagcaactcagggctatacttgctagattttaaccaagcagtttgaaatattaatcatcatcctctcatcttctccactctccattgccaaagtctttgtcaaaactccaaatttgttgataaaagattgtgtttgccattctcatttataatgcagtttctccttaagcctggagttttttgaatgagtgcatgagtaaatgagagaatgtgtgaacgaacatttatgaagtatctaacatgtgccaagcattgtgcctggcactttcaatcattagaatgttttatgtgattccacagcattttctgtatgagagtagctcacaacattttaaatgtttccaatatgaatcgtgttacaaaattcttaattttatatttcatataaattaaagaggaaaaagaaaaggtttataatatattttaaaacaatgtgttactgtataatacaactataattgtagttaataactaaaacctcttgaaaatgtcaaagaaatacttgatttctgatgcaactttgactaaaatatttactttagaaataaaaacgttcttattttgctatatcactttaattgcataattaaaaagcagtgttttatagaaatgctggttattttatattcaaaaagattttgtcacataattcatgggtaaaacttgcagttgtaaattgtgtctgctctggtatgggccctattaatagtcccatgctgttaaatataaagaaaaatatactaaaatattcaaagttccaaataacagttcctagtaatagtattttgagttatttttctttaggtttccttatactcaaattggctaggtcctatcttttcctctctctctctctctctctctctctctctctctctctctatatatatatatatatatatatatatatgagagatatatgagatatatgagagatcaagatctatatatgtatataaatacaattatacacagataatttttaatactctttgttaacaaacacagttgaaaactggtttcggctgcacaaataagcagaatatttgagtaactatatatgatatggagatattttaatccatttatcctggctcaagaacactgataaagatgattttctgttactttagctcattcagatcaggatggacatgctctttttgatctataactgttcagccagcttccagataatattttaggctatgagagctatacagtctctcttattactcatttctgctgttgaagtatcgaaaacagatagagatactatgtaaagaatgggcgtagctatgttccaggaaaactttatttacaaaagcagatggagggctggatttggtccatgggtcatagttagtgaccctgatcccaagtttattttgtgttagaccctctaacctttgatctgcgtcttttctgttttgatttacataattcatttttaaatcaaaaagatgtgcgtatatatggttgtgtgtatctgtataacctaaagctataatattttgttgtcttgaaagcagatacactcttcctggagtctgttcaggtttcaggacgattgactataatgaaagagacagaatagggtaagggaagatgggtatgctatcagccattttctttgccttgtcatttaatgccataatttcagattctctatgtaaaaagaaggtctgtgtattgtcaaaataatatactctccaagttctcctgctcattgacccttgaaccaggattctggattgctagagctgcagaaattcacccacttgggtactcttagagctctacagcaagaatatgatagaatgtctgatctttgtgctgcagaaagcaaacttttgaagaattctaagcaacagaaaatgggttatgtgactcatctgctatttggcagccactattccttttttagactgcagaacggtactgcccctgttacctctagaatagcctgagtctgaggagtgcagagaaaagatatatccaaaaggagaatccctttctcttgcataactctcaatcctttacaagtaagtagcattatttcagaatgtctatatgcatcattttcaactaaagcatacctcatccttaaacttccactatttaacagctaatccatttcaaacttggtttgagcctagcaattgcagaactcataaaattgcttgtgaaattacacaccatattactagcatatacattgcagtgctccaatcatgctaacagataatagatttttctttaagaattttatcaaatatttcactatttggggaaattttagaggaggggaagcctgtattcaggatgatagagggagcagagacttactgtctctcttccacattataaatgaactgcctttccaggtccaacatgctgtcaggttgcttcagctcggtgtgaatgtaagtgtggggatcaaacacacacacctatacacatacatattaatatgcagaggattttaaataattgcaaatgtcttgtggctgttttatttctacaaaattctgtaagatgtataccagaaaacataataaagataagctcagttcttcattgggaaaaaatatttttaaagaaaatttagaagtttttgctgaattaaagtatcttcaattttaattactggatttggaagttgaaatgccatccttcaatatcactggtctcaaattcattgatagaattttttcttaaactaataagtggggtaagtataatctcctaaattggtacccactggctgctcctaaactggtttccagtcatgtcctccagtatgtgatttttataaattaaaggtaatattgtatattaaagttcaaataaagatgttctttaagtgaaa

SEQ ID NO: 2831 - protein, 641 aa, Homo sapiens; identical to SEQ ID NO: 101

SEQ ID NO: 2832 - DNA, 3730 bp, Homo sapiens
gaatgcagagtaaagggaccttcttggttctgcaggaacttctcaagggatgaggagacagaacccctacttccaagtgctctatttgtattacccagatgactgaagcttaagagaaggcagggaagtatacaagcagagccagttctggtacaaacaaagaatttgacagggacaatggaagggtcttcttcaccactccttaccttctatgtgatggaaagactagagcttataaaagtacttccatttttttattctcctgaataccaaaggcaattaaagtcagctacaaatgacttgccagtgtcatgttttatttttgttatagatttttaaattatttccttcaagatcaattcttatcccatataatgcttagcttccaagaatattctttactttcttctgtcttttacagctctttgcattttgtagaccttaatactcaggttaaatattcattgcatttataagatcttctgcaaaaagcccagaaatggtccttttcaggtgcctcttcaaagagctgacaccttaccttgtgcctttggcacaaatgtgcagaatagatacatcagttggtgcataatcgaaaaaaataggaattttgaacactgttcttccttctacatttatttctcttcattttagaatcacactttttatgttaaaccagattattattattattattattcaaccagtattaagttgttaaaaccaagggaatggggccctaaccaaaaagaagtctcaactcagaaaaataagtccccagtcaggtggttcttactttcttgtgggttgcacattttgtatctctctaacatcagcgtattcctgactttaagcaggtgtttatatgtaaaataaaacctgggtatcgaagggaaatgcattctttttatggagtattgaccctgatcctctatgatgtcatatagagcaactcagggctatacttgctagattttaaccaagcagtttgaaatattaatcatcatcctctcatcttctccactctccattgccaaagtctttgtcaaaactccaaatttgttgataaaagattgtgtttgccattctcatttataatgcagtttctccttaagcctggagttttttgaatgagtgcatgagtaaatgagagaatgtgtttttctgtatgagagtagctcacaacattttaaatgtttccaatatgaatcgtgttacaaaattcttaattttatatttcatataaattaaagaggaaaaagaaaaggtttataatatattttaaaacaatgtgttactgtataatacaactataattgtagttaataactaaaacctcttgaaaatgtcaaagaaatacttgatttctgatgcaactttgactaaaatatttactttagaaataaaaacgttcttattttgctatatcactttaattgcataattaaaaagcagtgttttatagaaatgctggttattttatattcaaaaagattttgtcacataattcatgggtaaaacttgcagttgtaaattgtgtctgctctggtatgggccctattaatagtcccatgctgttaaatataaagaaaaatatactaaaatattcaaagttccaaataacagttcctagtaatagtattttgagttatttttctttaggtttccttatactcaaattggctaggtcctatcttttcctctctctctctctctctctctctctctctctctctctctatatatatatatatatatatatatatatgagagatatatgagatatatgagagatcaagatctatatatgtatataaatacaattatacacagataatttttaatactctttgttaacaaacacagttgaaaactggtttcggctgcacaaataagcagaatatttgagtaactatatatgatatggagatattttaatccatttatcctggctcaagaacactgataaagatgattttctgttactttagctcattcagatcaggatggacatgctctttttgatctataactgttcagccagcttccagataatattttaggctatgagagctatacagtctctcttattactcatttctgctgttgaagtatcgaaaacagatagagatactatgtaaagaatgggcgtagctatgttccaggaaaactttatttacaaaagcagatggagggctggatttggtccatgggtcatagttagtgaccctgatcccaagtttattttgtgttagaccctctaacctttgatctgcgtcttttctgttttgatttacataattcatttttaaatcaaaaagatgtgcgtatatatggttgtgtgtatctgtataacctaaagctataatattttgttgtcttgaaagcagatacactcttcctggagtctgttcaggtttcaggacgattgactataatgaaagagacagaatagggtaagggaagatgggtatgctatcagccattttctttgccttgtcatttaatgccataatttcagattctctatgtaaaaagaaggtctgtgtattgtcaaaataatatactctccaagttctcctgctcattgacccttgaaccaggattctggattgctagagctgcagaaattcacccacttgggtactcttagagctctacagcaagaatatgatagaatgtctgatctttgtgctgcagaaagcaaacttttgaagaattctaagcaacagaaaatgggttatgtgactcatctgctatttggcagccactattccttttttagactgcagaacggtactgcccctgttacctctagaatagcctgagtctgaggagtgcagagaaaagatatatccaaaaggagaatccctttctcttgcataactctcaatcctttacaagtaagtagcattatttcagaatgtctatatgcatcattttcaactaaagcatacctcatccttaaacttccactatttaacagctaatccatttcaaacttggtttgagcctagcaattgcagaactcataaaattgcttgtgaaattacacaccatattactagcatatacattgcagtgctccaatcatgctaacagataatagatttttctttaagaattttatcaaatatttcactatttggggaaattttagaggaggggaagcctgtattcaggatgatagagggagcagagacttactgtctctcttccacattataaatgaactgcctttccaggtccaacatgctgtcaggttgcttcagctcggtgtgaatgtaagtgtggggatcaaacacacacacctatacacatacatattaatatgcagaggattttaaataattgcaaatgtcttgtggctgttttatttctacaaaattctgtaagatgtataccagaaaacataataaagataagctcagttcttcattgggaaaaaatatttttaaagaaaatttagaagtttttgctgaattaaagtatcttcaattttaattactggatttggaagttgaaatgccatccttcaatatcactggtctcaaattcattgatagaattttttcttaaactaataagtggggtaagtataatctcctaaattggtacccactggctgctcctaaactggtttccagtcatgtcctccagtatgtgatttttataaattaaaggtaatattgtatattaaagttcaaataaagatgttctttaagtgaaa

SEQ ID NO: 2833 - protein, 34 aa, Homo sapiens [sequence omitted]

SEQ ID NO: 2834 - DNA, 4135 bp, Homo sapiens
gttcaaggtaataagggctgagacacaagccacagagcataaagctccagtccttcctccagggatgaggcagtaaggacttggactcctctgtccagcttttaacaatctaagttacgccctcttctgggtcacgctagaatcagatctgctctccagcatcttctgtttcctggcaagtgtttcctgctactttggattggccacgatgggctggagctgccttgtgacaggagcaggagggcttctgggtcagaggatcgtccgcctgttggtggaagagaaggaactgaaggagatcagggccttggacaaggccttcagaccagaattgagagaggaattttctaagctccagaacaggaccaagctgactgtacttgaaggagacattctggatgagccattcctgaaaagagcctgccaggacgtctcggtcgtcatccacaccgcctgtatcattgatgtctttggtgtcactcacagagagtccatcatgaatgtcaatgtgaaagaactccagaacaagatcaagctgacagtgctggaaggagacattctggatgagccattcctgaagagagcctgccaggacgtgtcggtcgtcatccacaccgcctgtatcattgatgtcttcggagtcactcacagacagtctatcatgaatgtcaatgtgaaaggtagggtagcctggggaggagataaagcaaggtggggaaatgaggatcagaaagaaggacaggaaggaaagagaagtctatccattgaacacctgctgtgctctgggccaagtgactttgctgatcactaccaactgggggaactcaaggctgctattttcagttttatagatgagaaaactaggactgagcaatgacaagcaacttgtccaaagtcccacagttgagtgagtaagtaagtaggagagtgcgactttaaactcactcctgtgtgactccaaaggctgtggaagctctttctaatgtggccccagtcaaaagtcaactaatctccgacttcagactcttgaaatccagctacccgttggctccccggaccagaatctgaccttccgggtgccaccatagtcatcattttgaaccttatgtgtaggctgatgagaacattcagagtcttcctgcccacctcaaagaagaaatcctctcaagagaactagcaaatctggttcacagaggtctgtcaggacagaattatccagcacatgccttcccactatatgttcttaacaataagagtttcccagtgtccagaatacagtctcttcagctcaccacagggtctgctaattacatagctgtttccagccaggtgcccaaagtgcaccctcattcagtcctcatcccttaaatgcttggtggtctttctgaatcctggctttccaacctactttaaattcagacacattttcttaaggaatcttctaatgcactctcactctctgatctccagaacccagtcttcagcaccacagcattccaacccctggcctggccctccacattcagtctactcaaactccttttcttttttttctttcttttttttttttttttttttgacagagtttcactcttgtcacccaggctggagtgcaatggcacgatctcagctcactgcaacctccacctcctgggttcaggcgattctcctgcctcagcctcccagtgtatctgagattacaggtgcctaacaccatgccaagctaatttttttttttttttttttgtatttttagtagagaggggtttcaccatgttggccaggcaggtcttaaattcctgacctcaggtgatccacccacctctgcctcccaaagtgctgggattataggcttgagccattgtacccggcctcaaactccttttctaaagcaactaattgcttttgagtcttcagcaccatctaaaaaaaaaaaaccttttccagttgctacttacccatacctctaagtacccctacaatgcaaggaggatgctaagagtaaccagttttttattttaattcctgttctccacagctccatacaacaggggatatgaaatgacaaggaaagtgttagagacatctgtttcctaaaaccattatcactcccaggcttagaaaatacttcacaatgttgatcaattcccccttgaaggtaaactaactccagatttgctccctcgttagattaatttttgaaagcctaagactgtctctccagaaattcaaattgcacagagactttaaatagggagcctctttcccagggaacacgccatcaggaaaagagtgggtctccagcatgttcccacaacccattgtttactcagtgactccagagatggtccttgtgacaaagttttattagtcctcaacaaaatgaggaaaatgtcaacaatttcatgtatattgaagagtgtatattgcctgcatactgtgtatttgtgtgtgtgtcatgtgaattcttccactgcccttttctgcctaaggattgggactatccatatactcagagtatttttaaattttaaacgatctgtctttaatggtattgatgaaaaatcataatttttcaatgtctttagttggcaaaacaaagagtgataaccctaggtcattttccaaaattaaggtacacacacacacacacacacacacacgcacgtccttgaaacccaaaagtctaaaaattcttgctctccagaacccacttgtcagtttcttttcatttttgtgattttcctatggctgtagtgtggcccagtgtcagtcagagccacagaagaatgtatcctgagtctgttacaaccactgcacttgggagtggggagtggggcacatggatctgttcatgtgtttggccctcccttagggatacttcctgacactgaaagcatgctctttctgggcgggtacccagctcctgttggaggcctgtgtccaagctactgtgccagtcttcatctacaccagtaccctccagttagccgggcccaactcctacaaggaaatcattgagaatgcccatgaagaagactttctggaaaacacatggtctgctccatatccatacagcaaaaagcttgctgagaaggctgtgctggcagctaatgggtggactctgaaaaatggtgataccttgtacacttgtgccttaagacccatgtatatctatggggaaggaagcccatttcttactgccaatataaatgaggccctgaacaacaatgggatcctgtcgagtgtcagcaagttctccacagccaacccagtctatgttggcaacgtggcctgggcccacattctggccttgagggccttgcgggaccccaagaaggccccaagtgtcctaggacagttctactatatctcagatgacacgcctcaccaaagttatgataaccttaattacatcctgagcaaagagttcggcccctgccttgattccagatgaagccttcttttattcctgatgtactggattggcttcctgctgggaatagtgagcctcctgctcaggccagtttgcacctatcaaccgcccttcgactgccacacagtgacattgtcaaatagcatgttcaccttctcttacaagaaggctcagcgagatctggcatataagccactttacagctgggaggaagccaagcagaaaaccatggagtgagttggttcccttgtggaccggcacaaggagaacctgaagtccaagactcagtgctttaaggatgacagagatgtgcatgtgggtattgttaggagatgtcatcaagctccatcctcctggcttcatacagaatgtgacaagggcataagcccaggtcctgctgcctccctttcacacaatgcccaacttattgtcttcctcgtgtcatcaaaacctgcccattccctgacccaaccagaagctttctgtcctaatcatataccagaggacagacaatgtgatttgctttttccaaatctcagtggctgattctgaacaactgtggtctcttttatcttaagggtctcttttaactgctagagctctccatttctcctcctaaaagagaaggatttcttttcttttaagtctcctatttcttcacacagttcaaggaaatgagcaataaatgttttaatgctt

SEQ ID NO: 2835 - protein, 222 aa, Homo sapiens
MGWSCLVTGAGGLLGQRIVRLLVEEKELKEIRALDKAFRPELREEFSKLQNRTKLTVLEGDILDEPFLKRACQDVSVVIHTACIIDVFGVTHRESIMNVNVKELQNKIKLTVLEGDILDEPFLKRACQDVSVVIHTACIIDVFGVTHRQSIMNVNVKGRVAWGGDKARWGNEDQKEGQEGKRSLSIEHLLCSGPSDFADHYQLGELKAAIFSFIDEKTRTEQ

SEQ ID NO: 2836 - DNA, 409 bp, Homo sapiens
acctatgtaacatcacctttatcagaaaacttctcagctagatacagaaatcattccaatgacctaacctctgctcacacagaactccagaacaagatcaagctgacagtgctggaaggagacattctggatgagccattcctgaagagagcctgccaggacgtgtcggtcgtcatccacaccgcctgtatcattgatgtcttcggagtcactcacagacagtctatcatgaatgtcaatgtgaaagctcctgttggaggcctgtgtccaagctactgtgccagtcttcatctacaccagtaccctccagttagccgggcccaactcctacaaggaaatcattgagaatgcccatgaagaagactttctggaaaacacatggtctgctccatatccatacagcaaaaag

SEQ ID NO: 2837 - protein, 38 aa, Homo sapiens
MNVNVKAPVGGLCPSYCASLHLHQYPPVSRAQLLQGNH

SEQ ID NO: 2838 - DNA, 1473 bp, Homo sapiens
acctatgtaacatcacctttatcagaaaacttctcagctagatacagaaatcattccaatgacctaacctctgctcacacagaactccagaacaagatcaagctgacagtgctggaaggagacattctggatgagccattcctgaagagagcctgccaggacgtgtcggtcgtcatccacaccgcctgtatcattgatgtcttcggagtcactcacagacagtctatcatgaatgtcaatgtgaaaggtacccagctcctgttagaggcctgtgtccaagctagtgtgccagtcttcatctacaccagtagcatagaggtagccgggcccaactcctacaaggaaatcatccagaatggccatgaagaagagcctctggaaaacacatggcccgctccatacccacacagcaaaaagcttgctgagaaggctgtactggcggctaacgggtggaatctgaaaaacggcggcaccctgtacacttgtgccttacgacccatgtatatctatggggaaggaagccgattcctttctgctagtataaacgaggccctgaacaacaatgggatcctgtcaagtgttggaaagttctccactgttaacccagtctatgttggcaatgtggcctgggcccacattctggccttgagggccctgcaggaccccaagaaggccccaagcatccgaggacagttctactatatctcagatgacacgcctcaccaaagctatgataaccttaattacaccctgagcaaagagttcggcctccgccttgattccagatggagctttcctttatccctgatgtattggattggcttcctgctggaaatagtgagcttcctactcaggccaatttacacctatcgaccgcccttcaaccgccacatagtcacattgtcaaatagcgtattcaccttctcttataagaaggctcagcgagatctggcgtataagccactctacagctgggaggaagccaagcagaaaacggtggagtgggttggttcccttgtggaccggcacaaggagaccctgaagtccaagactcagtgatttaaggatgacagagatgtgcatgtgggtattgttaggagatgtcatcaagctccaccctcctggcctcatacagaaagtgacaagggcacaagctcaggtcctgctgcctccctttcatacaatggccaacttattgtattcctcatgtcatcaaaacctgcgcagtcattggcccaacaagaaggtttctgtcctaatcatataccagaggaaagaccatgtggtttgctgttaccaaatctcagtagctgattctgaacaatttagggactcttttaacttgagggtcgttttgactactagagctccatttctactcttaaatgagaaaggatttcctttctttttaatcttccattccttcacatagtttgataaaaagatcaataaatgtttgaatgtttaatgtgg

SEQ ID NO: 2839 - protein, 276 aa, Homo sapiens
MNVNVKGTQLLLEACVQASVPVFIYTSSIEVAGPNSYKEIIQNGHEEEPLENTWPAPYPHSKKLAEKAVLAANGWNLKNGGTLYTCALRPMYIYGEGSRFLSASINEALNNNGILSSVGKFSTVNPVYVGNVAWAHILALRALQDPKKAPSIRGQFYYISDDTPHQSYDNLNYTLSKEFGLRLDSRWSFPLSLMYWIGFLLEIVSFLLRPIYTYRPPFNRHIVTLSNSVFTFSYKKAQRDLAYKPLYSWEEAKQKTVEWVGSLVDRHKETLKSKTQ

SEQ ID NO: 2840 - DNA, 1343 bp, Homo sapiens
agacttgccacaggaaatgagccctctccagggtcaccctagaatcagatctgctccccagcatcttctgtttcctggtgagtgattcctgctactttggatggccatgacgggctggagctgccttgtgacaggagcaggagggtttctgggacagaggatcatccgcctcttggtgaaggagaaggagctgaaggagatcagggtcttggacaaggccttcggaccagaattgagagaggaattttctaaactccagaacaagaccaagctgacagtgctggaaggagacattctggatgagccattcctgaagagagcctgccaggacgtctcggtcatcatccacaccgcctgtatcattgatgtcttcggtgtcactcacagagagtctatcatgaatgtcaatgtgaaaggtatggtaggctggggaggagatgcagcaaggtggggaattaaggatcacaaagaagggcaggaagggaagagaagtccctccactgaacacctgctgtgctctgggccaagtgcctttgctgatcactacgaataggagagttcaagactgctaactttagttttttagatgataaaactaggactgagagagggcaagtaacttgtccaaggtcccccaggtaagtaagcaggtaggagagttagactttaaactcatccctgtgtgactccaaaggctctttctactgtgactccaaaagctctttctactgtggttccaatcaaaagtcaactaatttctgacttcagactcttgatacccagacaccccttgcctcccaggccagaagcagaccttgcaggtgccactgtagtcaccattttgaaccttgtgtgtaggctgatgaaaacattcagagccctcctgcccacctcaaacaaaaagtcctctcgagagaactagcaaagctggttcacaaggtctgtcaggacagaattatccagcacatgccttcccacaatatttttttaacagtgagatttttccagtatcaagaatacagtctcttcagctcaccacagggcctactattccagagccgttttcagccaggtgcccaaagtgcaccctcatttaatcttcatcccttaaatgcttggcgtttcctttcaaagtatggctttccaactaccttaaattcagacacatttccttaaggaatcttctcagaaatctcaccctctgatctccagagtccagtctcttcagcaccatagcaccccaaaccccggcctggccctccgcatttagtctactctgactctttttccaaagcaaccaattgcttttgagtctccagcaccataaaagaaaaaaaaaaaca

SEQ ID NO: 2841 - protein, 150 aa, Homo sapiens
MAMTGWSCLVTGAGGFLGQRIIRLLVKEKELKEIRVLDKAFGPELREEFSKLQNKTKLTVLEGDILDEPFLKRACQDVSVIIHTACIIDVFGVTHRESIMNVNVKGMVGWGGDAARWGIKDHKEGQEGKRSPSTEHLLCSGPSAFADHYE

SEQ ID NO: 2842 - DNA, 1719 bp, Homo sapiens
gccacaggaaatgaggtgagaagtacgtccactcttctgtccagcttttaacaatctaactaatgccctctccagggtcaccctagaatcagatctgctccccagcatcttctgtttcctggtgagtgattcctgctactttggatggccatgacgggctggagctgccttgtgacaggagcaggagggtttctgggacagaggatcatccgcctcttggtgaaggagaaggagctgaaggagatcagggtcttggacaaggccttcggaccagaattgagagaggaattttctagtaagtaaacttgggtcatgggtgtgtggttccatcttaaacactgcatgtatgtggggggagatggaccttgtctagcaagttattgaaatttgtagccaaatctaagccaatctcacatccaaagtcatcaagaaataaatattaaatagtataaaatggcatagtatgaaagatactgggtgggatttccagagactagattctggccctgacccagaacttgagaagcagccacctcagcctccaggcctcttttcttctcatctagaaaatcccacatcagttctttgtcttgtctgcaactcttttatgttctgaagcttttgtcttggcaattgctgtacaacattcataaaggacactattaccctggagacctcaccaatgggtcattgtctctctagaacgtgccaggctgtgttttgttttgcagcttccttagtatcctttgtgagggcaaaataaaaggaagttaaggtaaagatgagtgtataagtgggtgtgtgtgacagagagagaggaaaacaataagggggagagagagtcggggagagagagtcggggagagagactcagagagagagacaatgagaaagacagagaaataatgaaaaatatatagtgagagagagagcatcagtgagagaatgtgtgtgcacagtgcacagcacagagcagagacagagtaagaggcagtataaggccagacatgcctcatttagattttgcatatatggcttttttttaaaaaaaaaaaaacaaaacatttacctctgttgctcatcatcaaaaagaaattgactgcagaattttctgtggcaactccttgtacaaatggccccaagaggcaggtagaaaaggcatcacatccaacaggacaatgaacgcatcaaggtccggaatcacaaagcaacatgctaaggccatctgattgatgcgtagcagagctcagaccagagctttatccataggctatttcacctggccccagagctgatgcttggcaaagtggatcttcagtctctccctttgctccttggtgtgccccaaaacaattccctgtcctcctccccaacccaggggatttgggggactgtgtgtctacatgtgggctctggctgcccagagggtcctgccctgcccacagagaatcccccacttgacagcactcagggaccacacccaacactctacttttgctcttctctgacctcttgaaatgttcgatttcttccaccctctgttttaatgttgtctttgataaacaaatatgaaatgcttataatccttgcctgtgtctcagcaatatttgcaatttaacatctgaagccagaaaaaagcaatgctcagcctagaggtattgttcccctatggtaaaaatgcagatcatataatagacaggcagggatctgtatgaagat

SEQ ID NO: 2843 - protein, 73 aa, Homo sapiens
MLGKVDLQSLPLLLGVPQNNSLSSSPTQGIWGTVCLHVGSGCPEGPALPTENPPLDSTQGPHPTLYFCSSLTS

SEQ ID NO: 2844 - DNA, 1681 bp, Homo sapiens
aggaaatgaggtgagaagtacgtccactcttctgtccagcttttaacaatctaactaatgccctctccagggtcaccctagaatcagatctgctccccagcatcttctgtttcctggtgagtgattcctgctactttggatggccatgacgggctggagctgccttgtgacaggagcaggagggtttctgggacagaggatcatccgcctcttggtgaaggagaaggagctgaaggagatcagggtcttggacaaggccttcggaccagaattgagagaggaattttctaaactccagaacaagaccaagctgacagtgctggaaggagacattctggatgagccattcctgaagagagcctgccaggacgtctcggtcatcatccacaccgcctgtatcattgatgtcttcggtgtcactcacagagagtctatcatgaatgtcaatgtgaaaggtacccagctcctgttagaggcctgtgtccaagctagtgtgccagtcttcatctacaccagtagcatagaggtagccgggcccaactcctacaaggaaatcatccagaatggccatgaagaagagcctctggaaaacacatggcccgctccatacccacacagcaaaaagcttgctgagaaggctgtactggcggctaacgggtggaatctgaaaaacggcggcaccctgtacacttgtgccttacgacccatgtatatctatggggaaggaagccgattcctttctgctagtataaacgaggccctgaacaacaatgggatcctgtcaagtgttggaaagttctccactgttaacccagtctatgttggcaatgtggcctgggcccacattctggccttgagggccctgcaggaccccaagaaggccccaagcatccgaggacagttctactatatctcagatgacacgcctcaccaaagctatgataaccttaattacaccctgagcaaagagttcggcctccgccttgattccagatggagctttcctttatccctgatgtattggattggcttcctgctggaaatagtgagcttcctactcaggccaatttacacctatcgaccgcccttcaaccgccacatagtcacattgtcaaatagcgtattcaccttctcttataagaaggctcagcgagatctggcgtataagccactctacagctgggaggaagccaagcagaaaacggtggagtgggttggttcccttgtggaccggcacaaggagaccctgaagtccaagactcagtgatttaaggatgacagagatgtgcatgtgggtattgttaggagatgtcatcaagctccaccctcctggcctcatacagaaagtgacaagggcacaagctcaggtcctgctgcctccctttcatacaatggccaacttattgtattcctcatgtcatcaaaacctgcgcagtcattggcccaacaagaaggtttctgtcctaatcatataccagaggaaagaccatgtggtttgctgttaccaaatctcagtagctgattctgaacaatttagggactcttttaacttgagggtcgttttgactactagagctccatttctactcttaaatgagaaaggatttcctttctttttaatcttccattccttcacatagtttgataaaaagatcaataaatgtttgaatgtttaatgtgg

SEQ ID NO: 2845 - protein, 375 aa, Homo sapiens
MAMTGWSCLVTGAGGFLGQRIIRLLVKEKELKEIRVLDKAFGPELREEFSKLQNKTKLTVLEGDILDEPFLKRACQDVSVIIHTACIIDVFGVTHRESIMNVNVKGTQLLLEACVQASVPVFIYTSSIEVAGPNSYKEIIQNGHEEEPLENTWPAPYPHSKKLAEKAVLAANGWNLKNGGTLYTCALRPMYIYGEGSRFLSASINEALNNNGILSSVGKFSTVNPVYVGNVAWAHILALRALQDPKKAPSIRGQFYYISDDTPHQSYDNLNYTLSKEFGLRLDSRWSFPLSLMYWIGFLLEIVSFLLRPIYTYRPPFNRHIVTLSNSVFTFSYKKAQRDLAYKPLYSWEEAKQKTVEWVGSLVDRHKETLKSKTQ

SEQ ID NO: 2846 - DNA, 885 bp, Homo sapiens
gaggtgagaagtacgtccactcttctgtccagcttttaacaatctaactaatgccctctccagggtcaccctagaatcagatctgctccccacatccgaggacagttctactatatctcagatgacacgcctcaccaaagctatgataaccttaattacaccctgagcaaagagttcggcctccgccttgattccagatggagctttcctttatccctgatgtattggattggcttcctgctggaaatagtgagcttcctactcaggccaatttacacctatcgaccgcccttcaaccgccacatagtcacattgtcaaatagcgtattcaccttctcttataagaaggctcagcgagatctggcgtataagccactctacagctgggaggaagccaagcagaaaacggtggagtgggttggttcccttgtggaccggcacaaggagaccctgaagtccaagactcagtgatttaaggatgacagagatgtgcatgtgggtattgttaggagatgtcatcaagctccaccctcctggcctcatacagaaagtgacaagggcacaagctcaggtcctgctgcctccctttcatacaatggccaacttattgtattcctcatgtcatcaaaacctgcgcagtcattggcccaacaagaaggtttctgtcctaatcatataccagaggaaagaccatgtggtttgctgttaccaaatctcagtagctgattctgaacaatttagggactcttttaacttgagggtcgttttgactactagagctccatttctactcttaaatgagaaaggatttcctttctttttaatcttccattccttcacatagtttgataaaaagatcaataaatgtttgaatgtttaatgtgg

SEQ ID NO: 2847 - protein, 121 aa, Homo sapiens [sequence omitted]

SEQ ID NO: 2848 - DNA, 740 bp, Homo sapiens
gaggtgagaagtacgtccactcttctgtccagcttttaacaatctaactaatgccctctccagggtcaccctagaatcagatctgctccccagcatcttctgtttcctggtgagtgattcctgctactttggatggccatgacgggctggagctgccttgtgacaggagcaggagggtttctgggacagaggatcatccgcctcttggtgaaggagaaggagctgaaggagatcagggtcttggacaaggccttcggaccagaattgagagaggaattttctagtaagaccggcacaaggagaccctgaagtccaagactcagtgatttaaggatgacagagatgtgcatgtgggtattgttaggagatgtcatcaagctccaccctcctggcctcatacagaaagtgacaagggcacaagctcaggtcctgctgcctccctttcatacaatggccaacttattgtattcctcatgtcatcaaaacctgcgcagtcattggcccaacaagaaggtttctgtcctaatcatataccagaggaaagaccatgtggtttgctgttaccaaatctcagtagctgattctgaacaatttagggactcttttaacttgagggtcgttttgactactagagctccatttctactcttaaatgagaaaggatttcctttctttttaatcttccattccttcacatagtttgataaaaagatcaataaatgtttgaatgtttaatgtgg

SEQ ID NO: 2849 - protein, 58 aa, Homo sapiens
MAMTGWSCLVTGAGGFLGQRIIRLLVKEKELKEIRVLDKAFGPELREEFSSKTGTRRP

SEQ ID NO: 2850 - DNA, 1627 bp, Homo sapiens
ggtgagaagtacgtccactcttctgtccagcttttaacaatctaactaatgccctctccagggtcaccctagaatcagatctgctccccagcatcttctgtttcctggtgagtgattcctgctactttggatggccatgacgggctggagctgccttgtgacaggagcaggagggtttctgggacagaggatcatccgcctcttggtgaaggagaaggagctgaaggagatcagggtcttggacaaggccttcggaccagaattgagagaggaattttctacaagttattgaaatttgtagccaaatctaagccaatctcacatccaaagtcatcaagaaataaatattaaatagtataaaatggcatagtatgaaagatactgggtgggatttccagagactagattctggccctgacccagaacttgagaagcagccacctcagcctccaggcctcttttcttctcatctagaaaatcccacatcagttctttgtcttgtctgcaactcttttatgttctgaagcttttgtcttggcaattgctgtacaacattcataaaggacactattaccctggagacctcaccaatgggtcattgtctctctagaacgtgccaggctgtgttttgttttgcagcttccttagtatcctttgtgagggcaaaataaaaggaagttaaggtaaagatgagtgtataagtgggtgtgtgtgacagagagagaggaaaacaataagggggagagagagtcggggagagagagtcggggagagagactcagagagagagacaatgagaaagacagagaaataatgaaaaatatatagtgagagagagagcatcagtgagagaatgtgtgtgcacagtgcacagcacagagcagagacagagtaagaggcagtataaggccagacatgcctcatttagattttgcatatatggcttttttttaaaaaaaaaaaaacaaaacatttacctctgttgctcatcatcaaaaagaaattgactgcagaattttctgtggcaactccttgtacaaatggccccaagaggcaggtagaaaaggcatcacatccaacaggacaatgaacgcatcaaggtccggaatcacaaagcaacatgctaaggccatctgattgatgcgtagcagagctcagaccagagctttatccataggctatttcacctggccccagagctgatgcttggcaaagtggatcttcagtctctccctttgctccttggtgtgccccaaaacaattccctgtcctcctccccaacccaggggatttgggggactgtgtgtctacatgtgggctctggctgcccagagggtcctgccctgcccacagagaatcccccacttgacagcactcagggaccacacccaacactctacttttgctcttctctgacctcttgaaatgttcgatttcttccaccctctgttttaatgttgtctttgataaacaaatatgaaatgcttataatccttgcctgtgtctcagcaatatttgcaatttaacatctgaagccagaaaaaagcaatgctcagcctagaggtattgttcccctatggtaaaaatgcagatcatataatagacaggcagggatctgtatgaagat

SEQ ID NO: 2851 - protein, 53 aa, Homo sapiens
MAMTGWSCLVTGAGGFLGQRIIRLLVKEKELKEIRVLDKAFGPELREEFSTSY

SEQ ID NO: 2852 - DNA, 1372 bp, Homo sapiens
gtgagaagtacgtccactcttctgtccagcttttaacaatctaactaatgccctctccagggtcaccctagaatcagatctgctccccagcatcttctgtttcctggtgagtgattcctgctactttggatggccatgacgggctggagctgccttgtgacaggagcaggagggtttctgggacagaggatcatccgcctcttggtgaaggagaaggagctgaaggagatcagggtcttggacaaggccttcggaccagaattgagagaggaattttctaaactccagaacaagaccaagctgacagtgctggaaggagacattctggatgagccattcctgaagagagcctgccaggacgtctcggtcatcatccacaccgcctgtatcattgatgtcttcggtgtcactcacagagagtctatcatgaatgtcaatgtgaaaggtatggtaggctggggaggagatgcagcaaggtggggaattaaggatcacaaagaagggcaggaagggaagagaagtccctccactgaacacctgctgtgctctgggccaagtgcctttgctgatcactacgaataggagagttcaagactgctaactttagttttttagatgataaaactaggactgagagagggcaagtaacttgtccaaggtcccccaggtaagtaagcaggtaggagagttagactttaaactcatccctgtgtgactccaaaggctctttctactgtgactccaaaagctctttctactgtggttccaatcaaaagtcaactaatttctgacttcagactcttgatacccagacaccccttgcctcccaggccagaagcagaccttgcaggtgccactgtagtcaccattttgaaccttgtgtgtaggctgatgaaaacattcagagccctcctgcccacctcaaacaaaaagtcctctcgagagaactagcaaagctggttcacaaggtctgtcaggacagaattatccagcacatgccttcccacaatatttttttaacagtgagatttttccagtatcaagaatacagtctcttcagctcaccacagggcctactattccagagccgttttcagccaggtgcccaaagtgcaccctcatttaatcttcatcccttaaatgcttggcgtttcctttcaaagtatggctttccaactaccttaaattcagacacatttccttaaggaatcttctcagaaatctcaccctctgatctccagagtccagtctcttcagcaccatagcaccccaaaccccggcctggccctccgcatttagtctactctgactctttttccaaagcaaccaattgcttttgagtctccagcaccataaaagaaaaaaaaaaaca

SEQ ID NO: 2853 - protein, 150 aa, Homo sapiens; identical to SEQ ID NO: 2841

SEQ ID NO: 2854 - DNA, 1695 bp, Homo sapiens
gtttgcaaaaaaaatggggtggaggaaaatgaggcatctgtgtgagtatataaccatttgacatctctttttagccctctccagggtcaccctagaatcagatctgctccccagcatcttctgtttcctggtgagtgattcctgctactttggatggccatgacgggctggagctgccttgtgacaggagcaggagggtttctgggacagaggatcatccgcctcttggtgaaggagaaggagctgaaggagatcagggtcttggacaaggccttcggaccagaattgagagaggaattttctaaactccagaacaagaccaagctgacagtgctggaaggagacattctggatgagccattcctgaagagagcctgccaggacgtctcggtcatcatccacaccgcctgtatcattgatgtcttcggtgtcactcacagagagtctatcatgaatgtcaatgtgaaaggtacccagctcctgttagaggcctgtgtccaagctagtgtgccagtcttcatctacaccagtagcatagaggtagccgggcccaactcctacaaggaaatcatccagaatggccatgaagaagagcctctggaaaacacatggcccgctccatacccacacagcaaaaagcttgctgagaaggctgtactggcggctaacgggtggaatctgaaaaacggcggcaccctgtacacttgtgccttacgacccatgtatatctatggggaaggaagccgattcctttctgctagtataaacgaggccctgaacaacaatgggatcctgtcaagtgttggaaagttctccactgttaacccagtctatgttggcaatgtggcctgggcccacattctggccttgagggccctgcaggaccccaagaaggccccaagcatccgaggacagttctactatatctcagatgacacgcctcaccaaagctatgataaccttaattacaccctgagcaaagagttcggcctccgccttgattccagatggagctttcctttatccctgatgtattggattggcttcctgctggaaatagtgagcttcctactcaggccaatttacacctatcgaccgcccttcaaccgccacatagtcacattgtcaaatagcgtattcaccttctcttataagaaggctcagcgagatctggcgtataagccactctacagctgggaggaagccaagcagaaaacggtggagtgggttggttcccttgtggaccggcacaaggagaccctgaagtccaagactcagtgatttaaggatgacagagatgtgcatgtgggtattgttaggagatgtcatcaagctccaccctcctggcctcatacagaaagtgacaagggcacaagctcaggtcctgctgcctccctttcatacaatggccaacttattgtattcctcatgtcatcaaaacctgcgcagtcattggcccaacaagaaggtttctgtcctaatcatataccagaggaaagaccatgtggtttgctgttaccaaatctcagtagctgattctgaacaatttagggactcttttaacttgagggtcgttttgactactagagctccatttctactcttaaatgagaaaggatttcctttctttttaatcttccattccttcacatagtttgataaaaagatcaataaatgtttgaatgtttaatgtgg

SEQ ID NO: 2855 - protein, 375 aa, Homo sapiens; identical to SEQ ID NO: 2845

SEQ ID NO: 2856 - DNA, 1530 bp, Homo sapiens
atgacaggctggagctgccttgtgacaggagcaggagggtttctgggttagaggatcatccgcctcttggtggaggagaaggagctgaaggagatcagggccttggacaaggccttcagaccaaagctgagggaggaattttctgagctccagaacaagaccaagctgacagtgctggaaggagacattctggatgagccattcctgaagagagcctgccaggacatgtcggtcatcatccacactgcctctatcatatatgtcatcggtgtcactcacagagtccatcatgaatgtcaatgtgaaaggtacccagcttctgttggaggcctgtgtccaagctacagtgccaatcttcatctacaccagtaccctagaggtagccaggcccaattcctacaaggaaatcattcagaacggtcatgaagaagagcctctggaaaacacatggtacgctccatacccacacagcaaaaagcttgctgagaaggctgtgctggcggctaatgggctgactctgaaaaacggtggcaccttgtacacttgtgccgtaagaccaatgtttatctatggggaaggaagcccaatcctttctgccggtataaatgaggccctaaacaaccatggaatcctgtcaagtttcagcaagttctccagagtcaacccagtctatgttggcaacatagcctgggcccacattctggccttgagggccctgcgggagcccaagaaggccccaagtgtccgaggacagttctactatatctcagatgacacgcctcaccaaagctatgataaccttagttacaccttgagcaaagagttcggcctctgccttgattccagttggagcctgcctttatccctgacgtactggattggcttcctgctggaaatagtgagcttcctgccgaggccagtttacacctgtcgaccgcccttcaaccaccacagagtgacattgtcaaatagcgtgttcaccttctcttacaagaaggctcagcaagatctggcatataagtcactttacagctgggaggaagccaagcagaaaaccatggagtgggttggttcccttgtggactggcacaaggagaccctgaagtccaagactcagtgatcgaaggatgacagagatgtgcatgtgggtattgttaggagatgtcgtcaagctccatcctcctggcttcatacaggtgacaagggcaaaagtccaggtcctgctgcctccctttcacataatagccaacttattgtcttcctcatgtcatcaaaacctgcccagtccctggcccaaccagaagctttttgtcctaatcatataccagaggaaagacaatgtgatttgctttttccatatctcagtggctgattccgaacaattgtagtctcttctaacttgaggtcatttttaactactagagctccatttctactcttaaatgagaaaggatttcttttcttttaaatctcctatttcttcacgcagtccaatgtaaagagcaataaatgttttaatccttaacctgg

SEQ ID NO: 2857 - protein, 286 aa, Homo sapiens
MSSVSLTESIMNVNVKGTQLLLEACVQATVPIFIYTSTLEVARPNSYKEIIQNGHEEEPLENTWYAPYPHSKKLAEKAVLAANGLTLKNGGTLYTCAVRPMFIYGEGSPILSAGINEALNNHGILSSFSKFSRVNPVYVGNIAWAHILALRALREPKKAPSVRGQFYYISDDTPHQSYDNLSYTLSKEFGLCLDSSWSLPLSLTYWIGFLLEIVSFLPRPVYTCRPPFNHHRVTLSNSVFTFSYKKAQQDLAYKSLYSWEEAKQKTMEWVGSLVDWHKETLKSKTQ

SEQ ID NO: 2858 - DNA, 3459 bp, Homo sapiens
ctcaatcagctttatgcagagaagaagcttactgagctcactgctggtgctggtgtaggcaagtgctgctttggcaatctgggctgacctggcttgtctcctcagaactccttctccaatcctggagcaggcttccatgctgctgtgggcgtccttgctggcctttgctccagtctgtggacaatctgcagctgcacacaaacctgtgatttccgtccatcctccatggaccacattcttcaaaggagagagagtgactctgacttgcaatggatttcagttctatgcaacagagaaaacaacatggtatcatcggcactactggggagaaaagttgaccctgaccccaggaaacaccctcgaggttcgggaatctggactgtacagatgccaggcccggggctccccacgaagtaaccctgtgcgcttgctcttttcttcagactccttaatcctgcaggcaccatattctgtgtttgaaggtgacacattggttctgagatgccacagaagaaggaaagagaaattgactgctgtgaaatatacttggaatggaaacattctttccatttctaataaaagctgggatcttcttatcccacaagcaagttcaaataacaatggcaattatcgatgcattggatatggagacgagaatgatgtatttagatcaaatttcaaaataattaaaattcaagaactatttccacatccagagctgaaagctacagactctcagcctacagaggggaattctgtaaacctgagctgtgaaacacagcttcctccagagcggtcagacaccccacttcacttcaacttcttcagagatggcgaggtcatcctgtcagactggagcacgtacccggaactccagctcccaaccgtctggagagaaaactcaggatcctattggtgtggtgctgaaacagtgaggggtaacatccacaagcacagtccctcgctacagatccatgtgcagcggatccctgtgtctggggtgctcctggagacccagccctcagggggccaggctgttgaaggggagatgctggtccttgtctgctccgtggctgaaggcacaggggataccacattctcctggcaccgagaggacatgcaggagagtctggggaggaaaactcagcgttccctgagagcagagctggagctccctgccatcagacagagccatgcagggggatactactgtacagcagacaacagctacggccctgtccagagcatggtgctgaatgtcactgtgagagagaccccaggcaacagagatggccttgtcgccgcgggagccactggagggctgctcagtgctcttctcctggctgtggccctgctgtttcactgctggcgtcggaggaagtcaggagttggtttcttgggagacgaaaccaggctccctcccgctccaggcccaggagagtcctcccattccatctgccctgcccaggtggagcttcagtcgttgtatgttgatgtacaccccaaaaagggagatttggtatactctgagatccagactactcagctgggagaagaagaggaagctaatacctccaggacacttctagaggataaggatgtctcagttgtctactctgaggtaaagacacaacacccagataactcagctggaaagatcagctctaaggatgaagaaagttaagagaatgaaaagttacgagaacgtcctactcatgtgatttctcccttgtccaaagtcccaggcccagtgcagtccttgcggcccctggaatgatcaactcattccagctttctaattcttctcatgcatatgcattcactcccaggaatactcattcgtctactctgatgttgggatggaatggcctctgaaagacttcactaaaatgaccaggatccacagttaagagaagaccctgtagtatttgctgtgggcctgacctaatgtattccctagggtctgctttagagaagggggataaagagagagaaggactgttatgaaaaacagaagcacaaattttggtgaattgggatttgcagagatgaaaaagactgggtgacctggatctctgcttaatacatctacaaccattgtctcactggagactcacttgcatcagtttgtttaactgtgagtggctgcacaggcactgtgcaaacaatgaaaagccccttcacttctgcctgcacagcttacactgtcaggattcagttgcagattaaagaacccatctggaatggtttacagagagaggaatttaaaagaggacatcagaagagctggagatgcaagctctaggctgcgcttccaaaagcaaatgataattatgttaatgtcattagtgacaaagatttgcaacattagagaaaagagacacaaatataaaattaaaaacttaagtaccaactctccaaaactaaatttgaacttaaaatattagtataaactcataataaactctgcctttaaaaaaagataaatatttcctacgtctgttcactgaaataattaccaaccccttagcaataagcactccttgcagagaggttttattctctaaataccattcccttctcaaaggaaataaggttgcttttcttgtaggaactgtgtctttgagttactaattagtttatatgagaataattcttgcaataaatgaagaaggaataaaagaaataggaagccacaaatttgtatggatatttcatgatacacctactggttaaataattgacaaaaaccagcagccaaatattagaggtctcctgatggaagtgtacaataccacctacaaattatccatgccccaagtgttaaaactgaatccattcaagtctttctaactgaatacttgttttatagaaaatgcatggagaaaaggaatttgtttaaataacattatgggattgcaaccagcaaaacataaactgagaaaaagttctatagggcaaatcacctggcttctataacaaataaatgggaaaaaaatgaaataaaaagaagagagggaggaagaaagggagagagaagaaaagaaaaatgaagaaaagtaattagaatattttcaacataaagaaaagacgaatatttaaggtgacagatatcccaactacgctgatttgatctttacaaattatatgagtgtatgaatttgtcacatgtatcacccccaaaaaaagagaaaaagaaaaatagaagacatataaattaaatgagacgagacatgtcgaccaaaaggaatgtgtgggtcttgtttggatcctgactcaaattaagaaaaaataaaactacctacgaaatactaagaaaaatttgtatactaatattaagaaattgttgtgtgttttggatataagtgatagtttattgtagtgatgtttttataaaagcaaaaggatattcactttcagcgcttatactgaagtattagattaaagcttattaacgta

SEQ ID NO: 2859 - protein, 515 aa, Homo sapiens; identical to SEQ ID NO: 115

SEQ ID NO: 2860 - DNA, 2529 bp, Homo sapiens
cccggggctccccacgaagtaaccctgtgcgcttgctcttttcttcagactccttaatcctgcaggcaccatattctgtgtttgaaggtgacacattggttctgagatgccacagaagaaggaaagagaaattgactgctgtgaaatatacttggaatggaaacattctttccatttctaataaaagctgggatcttcttatcccacaagcaagttcaaataacaatggcaattatcgatgcattggatatggagacgagaatgatgtatttagatcaaatttcaaaataattaaaattcaagaactatttccacatccagagctgaaagctacagactctcagcctacagaggggaattctgtaaacctgagctgtgaaacacagcttcctccagagcggtcagacaccccacttcacttcaacttcttcagagatggcgaggtcatcctgtcagactggagcacgtacccggaactccagctcccaaccgtctggagagaaaactcaggatcctattggtgtggtgctgaaacagtgaggggtaacatccacaagcacagtccctcgctacagatccatgtgcagcggatccctgtgtctggggtgctcctggagacccagccctcagggggccaggctgttgaaggggagatgctggtccttgtctgctccgtggctgaaggcacaggggataccacattctcctggcaccgagaggacatgcaggagagtctggggaggaaaactcagcgttccctgagagcagagctggagctccctgccatcagacagagccatgcagggggatactactgtacagcagacaacagctacggccctgtccagagcatggtgctgaatgtcactgtgagagagaccccaggcaacagagatggccttgtcgccgcgggagccactggagggctgctcagtgctcttctcctggctgtggccctgctgtttcactgctggcgtcggaggaagtcaggagttggtttcttgggagacgaaaccaggctccctcccgctccaggcccaggagagtcctcccattccatctgccctgcccaggtggagcttcagtcgttgtatgttgatggtgaggattcccttctaggaagctgttcctggcctcagccatggaaagataatgcgctttcagccctgggaaatgcccctggactccctaaagtgtcccaaatccagatattcccagataattgttccattatgtgtccaagaagagtggagatgatgcttaggaagaggcatctgtagcactttaatactaacaggaacagccttgaaaatgtcttttctttccagtacaccccaaaaagggagatttggtatactctgagatccagactactcagctgggagaagaagaggaagctaatacctccaggacacttctagaggataaggatgtctcagttgtctactctgaggtaaagacacaacacccagataactcagctggaaagatcagctctaaggatgaagaaagttaagagaatgaaaagttacgagaacgtcctactcatgtgatttctcccttgtccaaagtcccaggcccagtgcagtccttgcggcccctggaatgatcaactcattccagctttctaattcttctcatgcatatgcattcactcccaggaatactcattcgtctactctgatgttgggatggaatggcctctgaaagacttcactaaaatgaccaggatccacagttaagagaagaccctgtagtatttgctgtgggcctgacctaatgtattccctagggtctgctttagagaagggggataaagagagagaaggactgttatgaaaaacagaagcacaaattttggtgaattgggatttgcagagatgaaaaagactgggtgacctggatctctgcttaatacatctacaaccattgtctcactggagactcacttgcatcagtttgtttaactgtgagtggctgcacaggcactgtgcaaacaatgaaaagccccttcacttctgcctgcacagcttacactgtcaggattcagttgcagattaaagaacccatctggaatggtttacagagagaggaatttaaaagaggacatcagaagagctggagatgcaagctctaggctgcgcttccaaaagcaaatgataattatgttaatgtcattagtgacaaagatttgcaacattagagaaaagagacacaaatataaaattaaaaacttaagtaccaactctccaaaactaaatttgaacttaaaatattagtataaactcataataaactctgcctttaaaaaaagataaatatttcctacgtctgttcactgaaataattaccaaccccttagcaataagcactccttgcagagaggttttattctctaaataccattcccttctcaaaggaaataaggttgcttttcttgtaggaactgtgtctttgagttactaattagtttatatgagaataattcttgcaataaatgaagaaggaataaaagaaataggaagccac

SEQ ID NO: 2861 - protein, 208 aa, Homo sapiens
MLVLVCSVAEGTGDTTFSWHREDMQESLGRKTQRSLRAELELPAIRQSHAGGYYCTADNSYGPVQSMVLNVTVRETPGNRDGLVAAGATGGLLSALLLAVALLFHCWRRRKSGVGFLGDETRLPPAPGPGESSHSICPAQVELQSLYVDGEDSLLGSCSWPQPWKDNALSALGNAPGLPKVSQIQIFPDNCSIMCPRRVEMMLRKRHL

SEQ ID NO: 2862 - DNA, 414 bp, Homo sapiens
ccatgtctttgtaacacttagccctgtgcaaatcagagtatgtgagtggaagaagggctccacatggctgggaaggcctcaggaaacttacagtcatggaagaagatgtaagaaaagcaaagaccttcacacggcagcaggaaacagcgagttagcaagagctgggaagactgccttacaaaaccatcaaatcttgtgagaactcactcactatcacgagaacagcatgggagaaactgcccgcataatccaatcacctcccaacaggtccctcccttgacacatgggaattatggggattacaattcaagatgagacttgagtttgagagcaaaactatatcaatggctttgcatcacataatttattacaggtgtgttctggaatagtttctataaattgatccattcttgt

SEQ ID NO: 2863 - protein, 65 aa, Homo sapiens
HVFVTLSPVQIRVCEWKKGSTWLGRPQETYSHGRRCKKSKDLHTAAGNSELARAGKTALQNHQIL

SEQ ID NO: 2864 - DNA, 3006 bp, Homo sapiens
tggaagatgagccccaacttctaaaaatgtatcactaccgggattgagatacaaacagcatttaggaaggtctcatctgagtagcagcttcctgccctccttcttggagataagtcgggcttttggtgagacagactttcccaaccctctgcccggccggtgcccatgcttctgtggctgctgctgctgatcctgactcctggaagagaacaatcaggggtggccccaaaagctgtacttctcctcaatcctccatggtccacagccttcaaaggagaaaaagtggctctcatatgcagcagcatatcacattccctagcccagggagacacatattggtatcacgatgagaagttgttgaaaataaaacatgacaagatccaaattacagagcctggaaattaccaatgtaagacccgaggatcctccctcagtgatgccgtgcatgtggaattttcacctgactggctgatcctgcaggctttacatcctgtctttgaaggagacaatgtcattctgagatgtcaggggaaagacaacaaaaacactcatcaaaaggtttactacaaggatggaaaacagcttcctaatagttataatttagagaagatcacagtgaattcagtctccagggataatagcaaatatcattgtactgcttataggaagttttacatacttgacattgaagtaacttcaaaacccctaaatatccaagttcaaggtaatggctagattcctgtggattactgggtttgttagggaaactggggataaagggaagatgtttatcagtgggaatttcataaagagtctcctatggctcagccatgggagggagatggttccttctgcatgcttctctatctcctgatggctggtgctgagatgacaaatgcatctctctaggaactctgagcctcaccaccctggagactatgttgtttcttttcattagagctgtttctacatcctgtgctgagagccagctcttccacgcccatagaggggagtcccatgaccctgacctgtgagacccagctctctccacagaggccagatgtccagctgcaattctccctcttcagagatagccagaccctcggattgggctggagcaggtcccccagactccagatccctgccatgtggactgaagactcagggtcttactggtgtgaggtggagacagtgactcacagcatcaaaaaaaggagcctgagatctcagatacgtgtacagagagtccctgtgtctaatgtgaatctagagatccggcccaccggagggcagctgattgaaggagaaaatatggtccttatttgctcagtagcccagggttcagggactgtcacattctcctggcacaaagaaggaagagtaagaagcctgggtagaaagacccagcgttccctgttggcagagctgcatgttctcaccgtgaaggagagtgatgcagggagatactactgtgcagctgataacgttcacagccccatcctcagcacgtggattcgagtcaccgtgagaattccggtatctcaccctgtcctcaccttcagggctcccagggcccacactgtggtgggggacctgctggagcttcactgtgagtccctgagaggctctcccccgatcctgtaccgattttatcatgaggatgtcaccctggggaacagctcagccccctctggaggaggagcctccttcaacctctctctgactgcagaacattctggaaactactcctgtgatgcagacaatggcctgggggcccagcacagtcatggagtgagtctcagggtcacagttccggtgtctcgccccgtcctcaccctcagggctcccggggcccaggctgtggtgggggacctgctggagcttcactgtgagtccctgagaggctccttcccgatcctgtactggttttatcacgaggatgacaccttggggaacatctcggcccactctggaggaggggcatccttcaacctctctctgactacagaacattctggaaactactcatgtgaggctgacaatggcctgggggcccagcacagtaaagtggtgacactcaatgttacaggaacttccaggaacagaacaggccttaccgctgcgggaatcacggggctggtgctcagcatcctcgtccttgctgctgctgctgctctgctgcattacgccagggcccgaaggaaaccaggaggactttctgccactggaacatctagtcacagtcctagtgagtgtcaggagccttcctcgtccaggccttccaggatagaccctcaagagcccactcactctaaaccactagccccaatggagctggagccaatgtacagcaatgtaaatcctggagatagcaacccgatttattcccagatctggagcatccagcatacaaaagaaaactcagctaattgtccaatgatgcatcaagagcatgaggaacttacagtcctctattcagaactgaagaagacacacccagacgactctgcaggggaggctagcagcagaggcagggcccatgaagaagatgatgaagaaaactatgagaatgtaccacgtgtattactggcctcagaccactagccccttacccagagtggcccacaggaaacagcctgcaccatttttttttctgttctctccaaccacacatcatccatctctccagactctgcctcctacgaggctgggctgcaggattctgaacccaagaaagaacaaagttcaagattttccatgtctttgtaacacttagccctgtgcaaatcagagtatgtgagtggaagaaggggtgagtcctaactgtacatctcggatataacaaatgtgcaaattctgattgattgccctgtaaaatgaattattctcatgcagtgctctacttgacttttatctttgaattcacaactaaaaacccatagcccagaaatctaaaaaaagtaattttagtggagcctttgaaaataaaagaccattggaaaaagt

SEQ ID NO: 2865 - protein, 528 aa, Homo sapiens
MTLTCETQLSPQRPDVQLQFSLFRDSQTLGLGWSRSPRLQIPAMWTEDSGSYWCEVETVTHSIKKRSLRSQIRVQRVPVSNVNLEIRPTGGQLIEGENMVLICSVAQGSGTVTFSWHKEGRVRSLGRKTQRSLLAELHVLTVKESDAGRYYCAADNVHSPILSTWIRVTVRIPVSHPVLTFRAPRAHTVVGDLLELHCESLRGSPPILYRFYHEDVTLGNSSAPSGGGASFNLSLTAEHSGNYSCDADNGLGAQHSHGVSLRVTVPVSRPVLTLRAPGAQAVVGDLLELHCESLRGSFPILYWFYHEDDTLGNISAHSGGGASFNLSLTTEHSGNYSCEADNGLGAQHSKVVTLNVTGTSRNRTGLTAAGITGLVLSILVLAAAAALLHYARARRKPGGLSATGTSSHSPSECQEPSSSRPSRIDPQEPTHSKPLAPMELEPMYSNVNPGDSNPIYSQIWSIQHTKENSANCPMMHQEHEELTVLYSELKKTHPDDSAGEASSRGRAHEEDDEENYENVPRVLLASDH

SEQ ID NO: 2866 - DNA, 2487 bp, Homo sapiens
tggaagatgagccccaacttctaaaaatgtatcactaccgggattgagatacaaacagcatttaggaaggtctcatctgagtagcagcttcctgccctccttcttggagataagtcgggcttttggtgagacagactttcccaaccctctgcccggccggtgcccatgcttctgtggctgctgctgctgatcctgactcctggaagagaacaatcaggggtggccccaaaagctgtacttctcctcaatcctccatggtccacagccttcaaaggagaaaaagtggctctcatatgcagcagcatatcacattccctagcccagggagacacatattggtatcacgatgagaagttgttgaaaataaaacatgacaagatccaaattacagagcctggaaattaccaatgtaagacccgaggatcctccctcagtgatgccgtgcatgtggaattttcacctgactggctgatcctgcaggctttacatcctgtctttgaaggagacaatgtcattctgagatgtcaggggaaagacaacaaaaacactcatcaaaaggtttactacaaggatggaaaacagcttcctaatagttataatttagagaagatcacagtgaattcagtctccagggataatagcaaatatcattgtactgcttataggaagttttacatacttgacattgaagtaacttcaaaacccctaaatatccaagttcaaggagtccctgtgtctaatgtgaatctagagatccggcccaccggagggcagctgattgaaggagaaaatatggtccttatttgctcagtagcccagggttcagggactgtcacattctcctggcacaaagaaggaagagtaagaagcctgggtagaaagacccagcgttccctgttggcagagctgcatgttctcaccgtgaaggagagtgatgcagggagatactactgtgcagctgataacgttcacagccccatcctcagcacgtggattcgagtcaccgtgagaattccggtatctcaccctgtcctcaccttcagggctcccagggcccacactgtggtgggggacctgctggagcttcactgtgagtccctgagaggctctcccccgatcctgtaccgattttatcatgaggatgtcaccctggggaacagctcagccccctctggaggaggagcctccttcaacctctctctgactgcagaacattctggaaactactcctgtgatgcagacaatggcctgggggcccagcacagtcatggagtgagtctcagggtcacagttccggtgtctcgccccgtcctcaccctcagggctcccggggcccaggctgtggtgggggacctgctggagcttcactgtgagtccctgagaggctccttcccgatcctgtactggttttatcacgaggatgacaccttggggaacatctcggcccactctggaggaggggcatccttcaacctctctctgactacagaacattctggaaactactcatgtgaggctgacaatggcctgggggcccagcacagtaaagtggtgacactcaatgttacaggaacttccaggaacagaacaggccttaccgctgcgggaatcacggggctggtgctcagcatcctcgtccttgctgctgctgctgctctgctgcattacgccagggcccgaaggaaaccaggaggactttctgccactggaacatctagtcacagtcctagtgagtgtcaggagccttcctcgtccaggccttccaggatagaccctcaagagcccactcactctaaaccactagccccaatggagctggagccaatgtacagcaatgtaaatcctggagatagcaacccgatttattcccagatctggagcatccagcatacaaaagaaaactcagctaattgtccaatgatgcatcaagagcatgaggaacttacagtcctctattcagaactgaagaagacacacccagacgactctgcaggggaggctagcagcagaggcagggcccatgaagaagatgatgaagaaaactatgagaatgtaccacgtgtattactggcctcagaccactagccccttacccagagtggcccacaggaaacagcctgcaccatttttttttctgttctctccaaccacacatcatccatctctccagactctgcctcctacgaggctgggctgcaggattctgaacccaagaaagaacaaagttcaagattttccatgtctttgtaacacttagccctgtgcaaatcagagtatgtgagtggaagaaggggtgagtcctaactgtacatctcggatataacaaatgtgcaaattctgattgattgccctgtaaaatgaattattctcatgcagtgctctacttgacttttatctttgaattcacaactaaaaacccatagcccagaaatctaaaaaaagtaattttagtggagcctttgaaaataaaagaccattggaaaaagt

SEQ ID NO: 2867 - protein, 639 aa, Homo sapiens
MLLWLLLLILTPGREQSGVAPKAVLLLNPPWSTAFKGEKVALICSSISHSLAQGDTYWYHDEKLLKIKHDKIQITEPGNYQCKTRGSSLSDAVHVEFSPDWLILQALHPVFEGDNVILRCQGKDNKNTHQKVYYKDGKQLPNSYNLEKITVNSVSRDNSKYHCTAYRKFYILDIEVTSKPLNIQVQGVPVSNVNLEIRPTGGQLIEGENMVLICSVAQGSGTVTFSWHKEGRVRSLGRKTQRSLLAELHVLTVKESDAGRYYCAADNVHSPILSTWIRVTVRIPVSHPVLTFRAPRAHTVVGDLLELHCESLRGSPPILYRFYHEDVTLGNSSAPSGGGASFNLSLTAEHSGNYSCDADNGLGAQHSHGVSLRVTVPVSRPVLTLRAPGAQAVVGDLLELHCESLRGSFPILYWFYHEDDTLGNISAHSGGGASFNLSLTTEHSGNYSCEADNGLGAQHSKVVTLNVTGTSRNRTGLTAAGITGLVLSILVLAAAAALLHYARARRKPGGLSATGTSSHSPSECQEPSSSRPSRIDPQEPTHSKPLAPMELEPMYSNVNPGDSNPIYSQIWSIQHTKENSANCPMMHQEHEELTVLYSELKKTHPDDSAGEASSRGRAHEEDDEENYENVPRVLLASDH

SEQ ID NO: 2868 - DNA, 2677 bp, Homo sapiens
tggaagatgagccccaacttctaaaaatgtatcactaccgggattgagatacaaacagcatttaggaaggtctcatctgagtagcagcttcctgccctccttcttggagataagtcgggcttttggtgagacagactttcccaaccctctgcccggccggtgcccatgcttctgtggctgctgctgctgatcctgactcctggaagagaacaatcaggggtggccccaaaagctgtacttctcctcaatcctccatggtccacagccttcaaaggagaaaaagtggctctcatatgcagcagcatatcacattccctagcccagggagacacatattggtatcacgatgagaagttgttgaaaataaaacatgacaagatccaaattacagagcctggaaattaccaatgtaagacccgaggatcctccctcagtgatgccgtgcatgtggaattttcacctgactggctgatcctgcaggctttacatcctgtctttgaaggagacaatgtcattctgagatgtcaggggaaagacaacaaaaacactcatcaaaaggtttactacaaggatggaaaacagcttcctaatagttataatttagagaagatcacagtgaattcagtctccagggataatagcaaatatcattgtactgcttataggaagttttacatacttgacattgaagtaacttcaaaacccctaaatatccaagttcaagaggccagatgtccagctgcaattctccctcttcagagatagccagaccctcggattgggctggagcaggtcccccagactccagatccctgccatgtggactgaagactcagggtcttactggtgtgaggtggagacagtgactcacagcatcaaaaaaaggagcctgagatctcagatacgtgtacagagagtccctgtgtctaatgtgaatctagagatccggcccaccggagggcagctgattgaaggagaaaatatggtccttatttgctcagtagcccagggttcagggactgtcacattctcctggcacaaagaaggaagagtaagaagcctgggtagaaagacccagcgttccctgttggcagagctgcatgttctcaccgtgaaggagagtgatgcagggagatactactgtgcagctgataacgttcacagccccatcctcagcacgtggattcgagtcaccgtgagaattccggtatctcaccctgtcctcaccttcagggctcccagggcccacactgtggtgggggacctgctggagcttcactgtgagtccctgagaggctctcccccgatcctgtaccgattttatcatgaggatgtcaccctggggaacagctcagccccctctggaggaggagcctccttcaacctctctctgactgcagaacattctggaaactactcctgtgatgcagacaatggcctgggggcccagcacagtcatggagtgagtctcagggtcacagttccggtgtctcgccccgtcctcaccctcagggctcccggggcccaggctgtggtgggggacctgctggagcttcactgtgagtccctgagaggctccttcccgatcctgtactggttttatcacgaggatgacaccttggggaacatctcggcccactctggaggaggggcatccttcaacctctctctgactacagaacattctggaaactactcatgtgaggctgacaatggcctgggggcccagcacagtaaagtggtgacactcaatgttacaggaacttccaggaacagaacaggccttaccgctgcgggaatcacggggctggtgctcagcatcctcgtccttgctgctgctgctgctctgctgcattacgccagggcccgaaggaaaccaggaggactttctgccactggaacatctagtcacagtcctagtgagtgtcaggagccttcctcgtccaggccttccaggatagaccctcaagagcccactcactctaaaccactagccccaatggagctggagccaatgtacagcaatgtaaatcctggagatagcaacccgatttattcccagatctggagcatccagcatacaaaagaaaactcagctaattgtccaatgatgcatcaagagcatgaggaacttacagtcctctattcagaactgaagaagacacacccagacgactctgcaggggaggctagcagcagaggcagggcccatgaagaagatgatgaagaaaactatgagaatgtaccacgtgtattactggcctcagaccactagccccttacccagagtggcccacaggaaacagcctgcaccatttttttttctgttctctccaaccacacatcatccatctctccagactctgcctcctacgaggctgggctgcaggattctgaacccaagaaagaacaaagttcaagattttccatgtctttgtaacacttagccctgtgcaaatcagagtatgtgagtggaagaaggggtgagtcctaactgtacatctcggatataacaaatgtgcaaattctgattgattgccctgtaaaatgaattattctcatgcagtgctctacttgacttttatctttgaattcacaactaaaaacccatagcccagaaatctaaaaaaagtaattttagtggagcctttgaaaataaaagaccattggaaaaagt

SEQ ID NO: 2869 - protein, 485 aa, Homo sapiens
MWTEDSGSYWCEVETVTHSIKKRSLRSQIRVQRVPVSNVNLEIRPTGGQLIEGENMVLICSVAQGSGTVTFSWHKEGRVRSLGRKTQRSLLAELHVLTVKESDAGRYYCAADNVHSPILSTWIRVTVRIPVSHPVLTFRAPRAHTVVGDLLELHCESLRGSPPILYRFYHEDVTLGNSSAPSGGGASFNLSLTAEHSGNYSCDADNGLGAQHSHGVSLRVTVPVSRPVLTLRAPGAQAVVGDLLELHCESLRGSFPILYWFYHEDDTLGNISAHSGGGASFNLSLTTEHSGNYSCEADNGLGAQHSKVVTLNVTGTSRNRTGLTAAGITGLVLSILVLAAAAALLHYARARRKPGGLSATGTSSHSPSECQEPSSSRPSRIDPQEPTHSKPLAPMELEPMYSNVNPGDSNPIYSQIWSIQHTKENSANCPMMHQEHEELTVLYSELKKTHPDDSAGEASSRGRAHEEDDEENYENVPRVLLASDH

SEQ ID NO: 2870 - DNA, 2636 bp, Homo sapiens
gactgcagctgatggaagatgagccccaacttctaaaaatgtatcactaccgggattgagatacaaacagcatttaggaaggtctcatctgagtagcagcttcctgccctccttcttggagataagtcgggcttttggtgagacagactttcccaaccctctgcccggccggtgcccatgcttctgtggctgctgctgctgatcctgactcctggaagagaacaatcaggggtggccccaaaagctgtacttctcctcaatcctccatggtccacagccttcaaaggagaaaaagtggctctcatatgcagcagcatatcacattccctagcccagggagacacatattggtatcacgatgagaagttgttgaaaataaaacatgacaagatccaaattacagagcctggaaattaccaatgtaagacccgaggatcctccctcagtgatgccgtgcatgtggaattttcacctgactggctgatcctgcaggctttacatcctgtctttgaaggagacaatgtcattctgagatgtcaggggaaagacaacaaaaacactcatcaaaaggtttactacaaggatggaaaacagcttcctaatagttataatttagagaagatcacagtgaattcagtctccagggataatagcaaatatcattgtactgcttataggaagttttacatacttgacattgaagtaacttcaaaacccctaaatatccaagttcaagagctgtttctacatcctgtgctgagagccagctcttccacgcccatagaggggagtcccatgaccctgacctgtgagacccagctctctccacagaggccagatgtccagctgcaattctccctcttcagagatagccagaccctcggattgggctggagcaggtcccccagactccagatccctgccatgtggactgaagactcagggtcttactggtgtgaggtggagacagtgactcacagcatcaaaaaaaggagcctgagatctcagatacgtgtacagagagtccctgtgtctaatgtgaatctagagatccggcccaccggagggcagctgattgaaggagaaaatatggtccttatttgctcagtagcccagggttcagggactgtcacattctcctggcacaaagaaggaagagtaagaagcctgggtagaaagacccagcgttccctgttggcagagctgcatgttctcaccgtgaaggagagtgatgcagggagatactactgtgcagctgataacgttcacagccccatcctcagcacgtggattcgagtcaccgtgagaattccggtatctcaccctgtcctcaccttcagggctcccagggcccacactgtggtgggggacctgctggagcttcactgtgagtccctgagaggctctcccccgatcctgtaccgattttatcatgaggatgtcaccctggggaacagctcagccccctctggaggaggagcctccttcaacctctctctgactgcagaacattctggaaactactcctgtgatgcagacaatggcctgggggcccagcacagtcatggagtgagtctcagggtcacagttccggtgtctcgccccgtcctcaccctcagggctcccggggcccaggctgtggtgggggacctgctggagcttcactgtgagtccctgagaggctccttcccgatcctgtactggttttatcacgaggatgacaccttggggaacatctcggcccactctggaggaggggcatccttcaacctctctctgactacagaacattctggaaactactcatgtgaggctgacaatggcctgggggcccagcacagtaaagtggtgacactcaatgttacaggaacttccaggaacagaacaggccttaccgctgcgggaatcacggggctggtgctcagcatcctcgtccttgctgctgctgctgctctgctgcattacgccagggcccgaaggaaaccaggaggactttctgccactggaacatctagtcacagtcctagtgagtgtcaggagccttcctcgtccaggccttccaggatagaccctcaagagcccactcactctaaaccactagccccaatggagctggagccaatgtacagcaatgtaaatcctggagatagcaacccgatttattcccagatctggagcatccagcatacaaaagaaaactcagctaattgtccaatgatgcatcaagagcatgaggaacttacagtcctctattcagaactgaagaagacacacccagacgactctgcaggggaggctagcagcagaggcagggcccatgaagaagatgatgaagaaaactatgagaatattctgaacccaagaaagaacaaagttcaagattttccatgtctttgtaacacttagccctgtgcaaatcagagtatgtgagtggaagaaggggtgagtcctaactgtacatctcggatataacaaatgtgcaaattctgattgattgccctgtaaaatgaattattctcatgcagtgctctacttgacttttatctttgaattcacaactaaaaacccatagcccagaaatctaaaaaaagtaattttagtggagcctttgaaaataaaagaccattggaaaaagt

SEQ ID NO: 2871 - protein, 742 aa, Homo sapiens
MLLWLLLLILTPGREQSGVAPKAVLLLNPPWSTAFKGEKVALICSSISHSLAQGDTYWYHDEKLLKIKHDKIQITEPGNYQCKTRGSSLSDAVHVEFSPDWLILQALHPVFEGDNVILRCQGKDNKNTHQKVYYKDGKQLPNSYNLEKITVNSVSRDNSKYHCTAYRKFYILDIEVTSKPLNIQVQELFLHPVLRASSSTPIEGSPMTLTCETQLSPQRPDVQLQFSLFRDSQTLGLGWSRSPRLQIPAMWTEDSGSYWCEVETVTHSIKKRSLRSQIRVQRVPVSNVNLEIRPTGGQLIEGENMVLICSVAQGSGTVTFSWHKEGRVRSLGRKTQRSLLAELHVLTVKESDAGRYYCAADNVHSPILSTWIRVTVRIPVSHPVLTFRAPRAHTVVGDLLELHCESLRGSPPILYRFYHEDVTLGNSSAPSGGGASFNLSLTAEHSGNYSCDADNGLGAQHSHGVSLRVTVPVSRPVLTLRAPGAQAVVGDLLELHCESLRGSFPILYWFYHEDDTLGNISAHSGGGASFNLSLTTEHSGNYSCEADNGLGAQHSKVVTLNVTGTSRNRTGLTAAGITGLVLSILVLAAAAALLHYARARRKPGGLSATGTSSHSPSECQEPSSSRPSRIDPQEPTHSKPLAPMELEPMYSNVNPGDSNPIYSQIWSIQHTKENSANCPMMHQEHEELTVLYSELKKTHPDDSAGEASSRGRAHEEDDEENYENILNPRKNKVQDFPCLCNT

SEQ ID NO: 2872 - DNA, 2899 bp, Homo sapiens
agtgaaggggtttcccatatgaaaaatacagaaagaattatttgaatactagcaaatacacaacttgatatttctagagaacccaggcacagtcttggagacattactcctgagagactgcagctgatggaagatgagccccaacttctaaaaatgtatcactaccgggattgagatacaaacagcatttaggaaggtctcatctgagtagcagcttcctgccctccttcttggagataagtcgggcttttggtgagacagactttcccaaccctctgcccggccggtgcccatgcttctgtggctgctgctgctgatcctgactcctggaagagaacaatcaggggtggccccaaaagctgtacttctcctcaatcctccatggtccacagccttcaaaggagaaaaagtggctctcatatgcagcagcatatcacattccctagcccagggagacacatattggtatcacgatgagaagttgttgaaaataaaacatgacaagatccaaattacagagcctggaaattaccaatgtaagacccgaggatcctccctcagtgatgccgtgcatgtggaattttcacctgactggctgatcctgcaggctttacatcctgtctttgaaggagacaatgtcattctgagatgtcaggggaaagacaacaaaaacactcatcaaaaggtttactacaaggatggaaaacagcttcctaatagttataatttagagaagatcacagtgaattcagtctccagggataatagcaaatatcattgtactgcttataggaagttttacatacttgacattgaagtaacttcaaaacccctaaatatccaagttcaagagctgtttctacatcctgtgctgagagccagctcttccacgcccatagaggggagtcccatgaccctgacctgtgagacccagctctctccacagaggccagatgtccagctgcaattctccctcttcagagatagccagaccctcggattgggctggagcaggtcccccagactccagatccctgccatgtggactgaagactcagggtcttactggtgtgaggtggagacagtgactcacagcatcaaaaaaaggagcctgagatctcagatacgtgtacagagagtccctgtgtctaatgtgaatctagagatccggcccaccggagggcagctgattgaaggagaaaatatggtccttatttgctcagtagcccagggttcagggactgtcacattctcctggcacaaagaaggaagagtaagaagcctgggtagaaagacccagcgttccctgttggcagagctgcatgttctcaccgtgaaggagagtgatgcagggagatactactgtgcagctgataacgttcacagccccatcctcagcacgtggattcgagtcaccgtgagaattccggtatctcaccctgtcctcaccttcagggctcccagggcccacactgtggtgggggacctgctggagcttcactgtgagtccctgagaggctctcccccgatcctgtaccgattttatcatgaggatgtcaccctggggaacagctcagccccctctggaggaggagcctccttcaacctctctctgactgcagaacattctggaaactactcctgtgatgcagacaatggcctgggggcccagcacagtcatggagtgagtctcagggtcacagttccggtgtctcgccccgtcctcaccctcagggctcccggggcccaggctgtggtgggggacctgctggagcttcactgtgagtccctgagaggctccttcccgatcctgtactggttttatcacgaggatgacaccttggggaacatctcggcccactctggaggaggggcatccttcaacctctctctgactacagaacattctggaaactactcatgtgaggctgacaatggcctgggggcccagcacagtaaagtggtgacactcaatgttacaggaacttccaggaacagaacaggccttaccgctgcgggaatcacggggctggtgctcagcatcctcgtccttgctgctgctgctgctctgctgcattacgccagggcccgaaggaaaccaggaggactttctgccactggaacatctagtcacagtcctagtgagtgtcaggagccttcctcgtccaggccttccaggatagaccctcaagagcccactcactctaaaccactagccccaatggagctggagccaatgtacagcaatgtaaatcctggagatagcaacccgatttattcccagatctggagcatccagcatacaaaagaaaactcagctaattgtccaatgatgcatcaagagcatgaggaacttacagtcctctattcagaactgaagaagacacacccagacgactctgcaggggaggctagcagcagaggcagggcccatgaagaagatgatgaagaaaactatgagaatgtaccacgtgtattactggcctcagaccactagccccttacccagagtggcccacaggaaacagcctgcaccatttttttttctgttctctccaaccacacatcatccatctctccagactctgcctcctacgaggctgggctgcaggattctgaacccaagaaagaacaaagttcaagattttccatgtctttgtaacacttagccctgtgcaaatcagagtatgtgagtggaagaaggggtgagtcctaactgtacatctcggatataacaaatgtgcaaattctgattgattgccctgtaaaatgaattattctcatgcagtgctctacttgacttttatctttgaattcacaactaaaaacccatagcccagaaatctaaaaaaagtaattttagtggagcctttgaaaataaaagaccattggaaaaagt

SEQ ID NO: 2873 - protein, 734 aa, Homo sapiens; identical to SEQ ID NO: 117

SEQ ID NO: 2874 - DNA, 4725 bp, Homo sapiens
agtgaaggggtttcccatatgaaaaatacagaaagaattatttgaatactagcaaatacacaacttgatatttctagagaacccaggcacagtcttggagacattactcctgagagactgcagctgatggaagatgagccccaacttctaaaaatgtatcactaccgggattgagatacaaacagcatttaggaaggtctcatctgagtagcagcttcctgccctccttcttggagataagtcgggcttttggtgagacagactttcccaaccctctgcccggccggtgcccatgcttctgtggctgctgctgctgatcctgactcctggaagagaacaatcaggggtggccccaaaagctgtacttctcctcaatcctccatggtccacagccttcaaaggagaaaaagtggctctcatatgcagcagcatatcacattccctagcccagggagacacatattggtatcacgatgagaagttgttgaaaataaaacatgacaagatccaaattacagagcctggaaattaccaatgtaagacccgaggatcctccctcagtgatgccgtgcatgtggaattttcacctgactggctgatcctgcaggctttacatcctgtctttgaaggagacaatgtcattctgagatgtcaggggaaagacaacaaaaacactcatcaaaaggtttactacaaggatggaaaacagcttcctaatagttataatttagagaagatcacagtgaattcagtctccagggataatagcaaatatcattgtactgcttataggaagttttacatacttgacattgaagtaacttcaaaacccctaaatatccaagttcaagagctgtttctacatcctgtgctgagagccagctcttccacgcccatagaggggagtcccatgaccctgacctgtgagacccagctctctccacagaggccagatgtccagctgcaattctccctcttcagagatagccagaccctcggattgggctggagcaggtcccccagactccagatccctgccatgtggactgaagactcagggtcttactggtgtgaggtggagacagtgactcacagcatcaaaaaaaggagcctgagatctcagatacgtgtacagagagtccctgtgtctaatgtgaatctagagatccggcccaccggagggcagctgattgaaggagaaaatatggtccttatttgctcagtagcccagggttcagggactgtcacattctcctggcacaaagaaggaagagtaagaagcctgggtagaaagacccagcgttccctgttggcagagctgcatgttctcaccgtgaaggagagtgatgcagggagatactactgtgcagctgataacgttcacagccccatcctcagcacgtggattcgagtcaccgtgagaattccggtatctcaccctgtcctcaccttcagggctcccagggcccacactgtggtgggggacctgctggagcttcactgtgagtccctgagaggctctcccccgatcctgtaccgattttatcatgaggatgtcaccctggggaacagctcagccccctctggaggaggagcctccttcaacctctctctgactgcagaacattctggaaactactcctgtgatgcagacaatggcctgggggcccagcacagtcatggagtgagtctcagggtcacagttccggtgtctcgccccgtcctcaccctcagggctcccggggcccaggctgtggtgggggacctgctggagcttcactgtgagtccctgagaggctccttcccgatcctgtactggttttatcacgaggatgacaccttggggaacatctcggcccactctggaggaggggcatccttcaacctctctctgactacagaacattctggaaactactcatgtgaggctgacaatggcctgggggcccagcacagtaaagtggtgacactcaatgttacaggaacttccaggaacagaacaggccttaccgctgcgggaatcacggggctggtgctcagcatcctcgtccttgctgctgctgctgctctgctgcattacgccagggcccgaaggaaaccaggaggactttctgccactggaacatctagtcacagtcctagtgagtgtcaggagccttcctcgtccaggccttccaggatagaccctcaagagcccactcactctaaaccactagccccaatggagctggagccaatgtacagcaatgtaaatcctggagatagcaacccgatttattcccagatctggagcatccagcatacaaaagaaaactcagctaattgtccaatgatgcatcaagagcatgaggaacttacagtcctctattcagaactgaagaagacacacccagacgactctgcaggggaggctagcagcagaggcagggcccatgaagaagatgatgaagaaaactatgagaatgtaccacgtgtattactggcctcagaccactagccccttacccagagtggcccacaggaaacagcctgcaccatttttttttctgttctctccaaccacacatcatccatctctccagactctgcctcctacgaggctgggctgcagggtatgtgaggctgagcaaaaggtctgcaaatctcccctgtgcctgatctgtgtgttccccaggaagagagcaggcagcctctgagcaagcactgtgttattttcacagtggagacacgtggcaaggcaggagggccctcagctcctagggctgtcgaatagaggaggagagagaaatggtctagccagggttacaagggcacaatcatgaccatttgatccaagtgtgatcgaaagctgttaatgtgctctctgtataaacaatttgctccaaatattttgtttcccttttttgtgtggctggtagtggcattgctgatgttttggtgtatatgctgtatccttgctaccatattgggaacagccaaaagaagttatagaacaagaatttaaggtgactctatctgaagtgtatttttgtacttacagggtgacattcccaaccaaattaccctagttatgatgaaaaataacttcagcatttcattaaagactctgctagtttaatatgtgacttgtatccccactgcaaagaccttatgtgtgaagaatcacattaattgtaatttttgcttcatgacatagtctcatcatttgccatacatgatagatttctagtcagtcagttttattcttataagcacccattaaccccgagacaataacctactatatctatgtggcttctcccattctcttcctctacctcactccatctgataaaaaaccattctaaatctcatgttcattattcccatgctctcctatttctatcatattaatgtatctacatgttttccttaaatatgtttttatattagttttaactataagttaaagaccatattgttgtagataattttttttagtactttctcttcatgttgtatttctaagattcatccatattgttgcgtgttgctatagttcatttgtttttattgctgtttagtatttacttgtgtaaaatatctggcttaatgttttcctagctatcaccatcaaaaactctttccacagtgtgttgaatttttaatatgacaaaaatgaaaatgtaccaacaattttcagtgacttcacctccattctgaaatcctgatgtttccaaatatctctgaacacctcaagtcctagggacaactgagattatattaacattaatctctgaatgttgccaattctaggccttcacttggttcatgtaggaacaccaagtccctttcaaagcaccacatcttcctctaatcaatatttcttggagtccctagggaatgtcttacatgcattcaaacaatcaccatttctggagatacactacagggtcaccataaactctgctacccttaggttccatcactatggaagctgagtttcaccagaaggcacttttgtcctccattacgaccagcaaagccagctaagccacagctgctggcctcaaaaaatgtgatgatcaatccacactgctcccactggcctctgttacccttatcctggcctttgagtgcagggcatgatgtcctgcccgtactgagatgctgatctctgccagttcatgttcatattggcattaaaattttaaggtcccttgaagagggaggaggcaaatgtctctgtcttctatgtgatacattctgctgtttttttctctatggtgaaaatatgtaaaccggttttgggtaccaaccaccaggctgtatatggaggctctcctcctttctaaccctgctgctgatttggaattaccttgccaagcccctttgtgccttatagtgaactttctctaagggacctgtcatctcttatcattgtttatccattttctagattctgaacccaagaaagaacaaagttcaagattttccatgtctttgtaacacttagccctgtgcaaatcagagtatgtgagtggaagaaggggtgagtcctaactgtacatctcggatataacaaatgtgcaaattctgattgattgccctgtaaaatgaattattctcatgcagtgctctacttgacttttatctttgaattcacaactaaaaacccatagcccagaaatctaaaaaaagtaattttagtggagcctttgaaaataaaagaccattggaaaaagt

SEQ ID NO: 2875 - protein, 734 aa, Homo sapiens; identical to SEQ ID NO: 117

SEQ ID NO: 2876 - DNA, 886 bp, Homo sapiens
aggaaacagcctgcaccatttttttttctgttctctccaaccacacatcatccatctctccagactctgcctcctacgaggctgggctgcagggtatgtgaggctgagcaaaaggtctgcaaatctcccctgtgcctgatctgtgtgttccccaggaagagagcaggcagcctctgagcaagcactgtgttattttcacagtggagacacgtggcaaggcaggagggccctcagctcctagggctgtcgaatagaggaggagagagaaatggtctagccagggttacaagggcacaatcatgaccatttgatccaagtgtgatcgaaagctgttaatgtgctctctgtataaacaatttgctccaaatattttgtttcccttttttgtgtggctggtagtggcattgctgatgttttggtgtatatgctgtatccttgctaccatattgggaacagccaaaagaagttatagaacaagaatttaaggtgactctatctgaagtgtatttttgtacttacagggtgacattcccaaccaaattaccctagttatgatgaaaaataacttcagcatttcattaaagactctgctagtttaatatgtgacttgtatccccactgcaaagaccttatgtgtgaagaatcacattaattgtaatttttgcttcatgacatagtctcatcatttgccatacatgatagatttctagtcagtcagttttattataacaaatgtgcaaattctgattgattgccctgtaaaatgaattattctcatgcagtgctctacttgacttttatctttgaattcacaactaaaaacccatagcccagaaatctaaaaaaagtaattttagtggagcctttgaaaataaaagaccattgg

SEQ ID NO: 2877 - protein, 49 aa, Homo sapiens
MCSLYKQFAPNILFPFFVWLVVALLMFWCICCILATILGTAKRSYRTRI

SEQ ID NO: 2878 - DNA, 2576 bp, Homo sapiens
ataacaacttatgtgaaagtcaaaaaggcatatgcttgacaccttgactgtgtgattcacaccacgctcattaagcttgcctacattaggagctgcatgcagaaccaaaggctgtgtgaagacaaggtctcatctgagtagcagcttcctgccctccttcttggagataagtcgggcttttggtgagacagactttcccaaccctctgcccggccggtgcccatgcttctgtggctgctgctgctgatcctgactcctggaagagaacaatcaggggtggccccaaaagctgtacttctcctcaatcctccatggtccacagccttcaaaggagaaaaagtggctctcatatgcagcagcatatcacattccctagcccagggagacacatattggtatcacgatgagaagttgttgaaaataaaacatgacaagatccaaattacagagcctggaaattaccaatgtaagacccgaggatcctccctcagtgatgccgtgcatgtggaattttcacctgactggctgatcctgcaggctttacatcctgtctttgaaggagacaatgtcattctgagatgtcaggggaaagacaacaaaaacactcatcaaaaggtttactacaaggatggaaaacagcttcctaatagttataatttagagaagatcacagtgaattcagtctccagggataatagcaaatatcattgtactgcttataggaagttttacatacttgacattgaagtaacttcaaaacccctaaatatccaagttcaagagctgtttctacatcctgtgctgagagccagctcttccacgcccatagaggggagtcccatgaccctgacctgtgagacccagctctctccacagaggccagatgtccagctgcaattctccctcttcagagatagccagaccctcggattgggctggagcaggtcccccagactccagatccctgccatgtggactgaagactcagggtcttactggtgtgaggtggagacagtgactcacagcatcaaaaaaaggagcctgagatctcagatacgtgtacagagagtccctgtgtctaatgtgaatctagagatccggcccaccggagggcagctgattgaaggagaaaatatggtccttatttgctcagtagcccagggttcagggactgtcacattctcctggcacaaagaaggaagagtaagaagcctgggtagaaagacccagcgttccctgttggcagagctgcatgttctcaccgtgaaggagagtgatgcagggagatactactgtgcagctgataacgttcacagccccatcctcagcacgtggattcgagtcaccgtgagaattccggtatctcaccctgtcctcaccttcagggctcccagggcccacactgtggtgggggacctgctggagcttcactgtgagtccctgagaggctctcccccgatcctgtaccgattttatcatgaggatgtcaccctggggaacagctcagccccctctggaggaggagcctccttcaacctctctctgactgcagaacattctggaaactactcctgtgatgcagacaatggcctgggggcccagcacagtcatggagtgagtctcagggtcacagttccggtgtctcgccccgtcctcaccctcagggctcccggggcccaggctgtggtgggggacctgctggagcttcactgtgagtccctgagaggctccttcccgatcctgtactggttttatcacgaggatgacaccttggggaacatctcggcccactctggaggaggggcatccttcaacctctctctgactacagaacattctggaaactactcatgtgaggctgacaatggcctgggggcccagcacagtaaagtggtgacactcaatgttacaggaacttccaggaacagaacaggccttaccgctgcgggaatcacggggctggtgctcagcatcctcgtccttgctgctgctgctgctctgctgcattacgccagggcccgaaggaaaccaggaggactttctgccactggaacatctagtcacagtcctagtgagtgtcaggagccttcctcgtccaggccttccaggatagaccctcaagagcccactcactctaaaccactagccccaatggagctggagccaatgtacagcaatgtaaatcctggagatagcaacccgatttattcccagatctggagcatccagcatacaaaagaaaactcagctaattgtccaatgatgcatcaagagcatgaggaacttacagtcctctattcagaactgaagaaagaacaaagttcaagattttccatgtctttgtaacacttagccctgtgcaaatcagagtatgtgagtggaagaaggggtgagtcctaactgtacatctcggatataacaaatgtgcaaattctgattgattgccctgtaaaatgaattattctcatgcagtgctctacttgacttttatctttgaattcacaactaaaaacccatagcccagaaatctaaaaaaagtaattttagtggagcctttgaaaataaaagaccattgg

SEQ ID NO: 2879 - protein, 707 aa, Homo sapiens
MLLWLLLLILTPGREQSGVAPKAVLLLNPPWSTAFKGEKVALICSSISHSLAQGDTYWYHDEKLLKIKHDKIQITEPGNYQCKTRGSSLSDAVHVEFSPDWLILQALHPVFEGDNVILRCQGKDNKNTHQKVYYKDGKQLPNSYNLEKITVNSVSRDNSKYHCTAYRKFYILDIEVTSKPLNIQVQELFLHPVLRASSSTPIEGSPMTLTCETQLSPQRPDVQLQFSLFRDSQTLGLGWSRSPRLQIPAMWTEDSGSYWCEVETVTHSIKKRSLRSQIRVQRVPVSNVNLEIRPTGGQLIEGENMVLICSVAQGSGTVTFSWHKEGRVRSLGRKTQRSLLAELHVLTVKESDAGRYYCAADNVHSPILSTWIRVTVRIPVSHPVLTFRAPRAHTVVGDLLELHCESLRGSPPILYRFYHEDVTLGNSSAPSGGGASFNLSLTAEHSGNYSCDADNGLGAQHSHGVSLRVTVPVSRPVLTLRAPGAQAVVGDLLELHCESLRGSFPILYWFYHEDDTLGNISAHSGGGASFNLSLTTEHSGNYSCEADNGLGAQHSKVVTLNVTGTSRNRTGLTAAGITGLVLSILVLAAAAALLHYARARRKPGGLSATGTSSHSPSECQEPSSSRPSRIDPQEPTHSKPLAPMELEPMYSNVNPGDSNPIYSQIWSIQHTKENSANCPMMHQEHEELTVLYSELKKEQSSRFSMSL

SEQ ID NO: 2880 - DNA, 3433 bp, Homo sapiens
gtatagaactgtggctcttgcctcatgggtggaaatgaaagtgaaggcagaaacagcaggggataacctgagtgtgctcctgtgctctttgcagactggctgatcctgcaggctttacatcctgtctttgaaggagacaatgtcattctgagatgtcaggggaaagacaacaaaaacactcatcaaaaggtttactacaaggatggaaaacagcttcctaatagttataatttagagaagatcacagtgaattcagtctccagggataatagcaaatatcattgtactgcttataggaagttttacatacttgacattgaagtaacttcaaaacccctaaatatccaagttcaaggtaatggctagattcctgtggattactgggtttgttagggaaactggggataaagggaagatgtttatcagtgggaatttcataaagagtctcctatggctcagccatgggagggagatggttccttctgcatgcttctctatctcctgatggctggtgctgagatgacaaatgcatctctctaggaactctgagcctcaccaccctggagactatgttgtttcttttcattagagctgtttctacatcctgtgctgagagccagctcttccacgcccatagaggggagtcccatgaccctgacctgtgagacccagctctctccacagaggccagatgtccagctgcaattctccctcttcagagatagccagaccctcggattgggctggagcaggtcccccagactccagatccctgccatgtggactgaagactcagggtcttactggtgtgaggtggagacagtgactcacagcatcaaaaaaaggagcctgagatctcagatacgtgtacagagtgagtgtctaaggggctgctcttccagagtcagagctggggagaggaaggccagtgatatctcctgcacccctaggatggtggacataacagagaggagtgtccagctattctggtaatcttctctctttaagctcaacgttggtctaacagccctagaacattttcttccacttgagtcaggtaatagtaattattgatcagttactgattgcccaaccctatggggttacagagatgtacaagatcggttctctcatgaatcaagagacaactagaagcacaactgaacacatgcagttttaagaggcccctgtggtgcttccatttggtaacctgaactcacaacaaaatagtccgaaaaggggaagatgaatatgaactgtaatagtcagagaaagacatggagacatggatgtaaatctggagaagtcttgaagaataggagaagggtttggattctattttgatcttcaaaacagaggatctccagtgttctcttttattttgtggtttattgatgcatcaaagattccttagagataaatgcatataaaatgtgaccagaaaacattggatttatggagattatggacttggtgcccacatttctcaaggatgggaatgttgtgggagtgagagggatgttgcttcctttataatcgtatacacaattaatttcttatttcctactttgggcttctgcctgctgcacctgctgctattggcctattcatggtagctccagccttccccttgaccttgatgtccctgccatcaggaccttcacatgccatcttgtgttcccccaggagtccctgtgtctaatgtgaatctagagatccggcccaccggagggcagctgattgaaggagaaaatatggtccttatttgctcagtagcccagggttcagggactgtcacattctcctggcacaaagaaggaagagtaagaagcctgggtagaaagacccagcgttccctgttggcagagctgcatgttctcaccgtgaaggagagtgatgcagggagatactactgtgcagctgataacgttcacagccccatcctcagcacgtggattcgagtcaccgtgagaattccggtatctcaccctgtcctcaccttcagggctcccagggcccacactgtggtgggggacctgctggagcttcactgtgagtccctgagaggctctcccccgatcctgtaccgattttatcatgaggatgtcaccctggggaacagctcagccccctctggaggaggagcctccttcaacctctctctgactgcagaacattctggaaactactcctgtgatgcagacaatggcctgggggcccagcacagtcatggagtgagtctcagggtcacagttccggtgtctcgccccgtcctcaccctcagggctcccggggcccaggctgtggtgggggacctgctggagcttcactgtgagtccctgagaggctccttcccgatcctgtactggttttatcacgaggatgacaccttggggaacatctcggcccactctggaggaggggcatccttcaacctctctctgactacagaacattctggaaactactcatgtgaggctgacaatggcctgggggcccagcacagtaaagtggtgacactcaatgttacaggaacttccaggaacagaacaggccttaccgctgcgggaatcacggggctggtgctcagcatcctcgtccttgctgctgctgctgctctgctgcattacgccagggcccgaaggaaaccaggaggactttctgccactggaacatctagtcacagtcctagtgagtgtcaggagccttcctcgtccaggccttccaggatagaccctcaagagcccactcactctaaaccactagccccaatggagctggagccaatgtacagcaatgtaaatcctggagatagcaacccgatttattcccagatctggagcatccagcatacaaaagaaaactcagctaattgtccaatgatgcatcaagagcatgaggaacttacagtcctctattcagaactgaagaagacacacccagacgactctgcaggggaggctagcagcagaggcagggcccatgaagaagatgatgaagaaaactatgagaatgtaccacgtgtattactggcctcagaccactagccccttacccagagtggcccacaggaaacagcctgcaccatttttttttctgttctctccaaccacacatcatccatctctccagactctgcctcctacgaggctgggctgcagggtatgtgaggctgagcaaaaggtctgcaaatctcccctgtgcctgatctgtgtgttccccaggaagagagcaggcagcctctgagcaagcactgtgttattttcacagtggagacacgtggcaaggcaggagggccctcagctcctagggctgtcgaatagaggaggagagagaaatggtctagccagggttacaagggcacaatcatgaccatttgatccaagtgtgatcgaaagctgttaatgtgctctctgtataaacaatttgctcc

SEQ ID NO: 2881 - protein, 460 aa, Homo sapiens
MPSCVPPGVPVSNVNLEIRPTGGQLIEGENMVLICSVAQGSGTVTFSWHKEGRVRSLGRKTQRSLLAELHVLTVKESDAGRYYCAADNVHSPILSTWIRVTVRIPVSHPVLTFRAPRAHTVVGDLLELHCESLRGSPPILYRFYHEDVTLGNSSAPSGGGASFNLSLTAEHSGNYSCDADNGLGAQHSHGVSLRVTVPVSRPVLTLRAPGAQAVVGDLLELHCESLRGSFPILYWFYHEDDTLGNISAHSGGGASFNLSLTTEHSGNYSCEADNGLGAQHSKVVTLNVTGTSRNRTGLTAAGITGLVLSILVLAAAAALLHYARARRKPGGLSATGTSSHSPSECQEPSSSRPSRIDPQEPTHSKPLAPMELEPMYSNVNPGDSNPIYSQIWSIQHTKENSANCPMMHQEHEELTVLYSELKKTHPDDSAGEASSRGRAHEEDDEENYENVPRVLLASDH

SEQ ID NO: 2882 - DNA, 804 bp, Homo sapiens
ccgctgcgggaatcacggggctggtgctcagcatcctcgtccttgctgctgctgctgctctgctgcattacgccagggcccgaaggaaaccaggaggactttctgccactggaacatctagtcacagtcctagtgagtgtcaggagccttcctcgtccaggccttccaggatagaccctcaagagcccactcactctaaaccactagccccaatggagctggagccaatgtacagcaatgtaaatcctggagatagcaacccgatttattcccagatctggagcatccagcatacaaaagaaaactcagaatccaacagaggaaacagtcaagagatcaagcaaatcaagaagattggcttggagtactttttctatgtgggtttggaagaatccagcagaggaaacagcaagagatcaagcaaatcaagaagattggtttggaatgcagtgtgcgtacgttgtaagttggaatatattgcccacagtttaatacttttctttgctactcctacccaacagctaattgtccaatgatgcatcaagagcatgaggtgagtcacatttcttggctttctttcctctctggccttcctctcctgtatttaggtacttaccttttgtgtttttttctaccaggaacttacagtcctctattcagaactgaagaagacacacccagacgactctgcaggggaggctagcagcagaggcagggcccatgaagaagatgatgaagaaaactatgagaatgtaccacgtgtattactggcctcagaccactagccccttacccagagtggcc

SEQ ID NO: 2883 - protein, 107 aa, Homo sapiens
MELEPMYSNVNPGDSNPIYSQIWSIQHTKENSESNRGNSQEIKQIKKIGLEYFFYVGLEESSRGNSKRSSKSRRLVWNAVCVRCKLEYIAHSLILFFATPTQQLIVQ

SEQ ID NO: 2884 - DNA, 932 bp, Homo sapiens
gagatttccaacctcttgcatcccctcctctagggctcatgggacctctggttctgaatgcatattcccctaaaatcaaagaacttgaagactgaaaaagaccatggttattgtcaacttaagtggtctccaagatgggctataagacaccagattgaagtgtaagaagaaaatatgagaacatttaagagtatttctttttgagcttgaaatttaaaaagatattcagctttactaatattcatggtggtgctcttgctcaggagaccttagtggctgacagagaacctaaaccctggcttgcaactcgaggctgtgtgaaaggaatcggaacttacttctcacggtgactcgaatccacgtgctgaggatggggctgtgaacgttatcagctgcacagtagtatctccctgcatcactctccttcacggtgagaacatgcagctctgccaacagggaacgctgggtctttctacccaggcttcttactcttccttctttgtgccaggagaatgtgacagtccctgaaccctgggctactgagcaaataaggaccatattttctccttcaatcagctgccctccggtgggccggatctctagattcacattagacacagggactcctgggggaacacaagatggcatgtgaaggtcctgatggcagggacatcaaggtcaaggggaaggctggagctaccatgaataggccaatagcagcaggtgcagcaggcagaagcccaaagtaggaaataagaaattaattgtgtatacgattataaaggaagcaacatccctctcactcccacaacattcccatccttgagaaatgtgggcaccaagtccataatctccataaatccaatgttttctggtcacattttatatgcatttatctctaaggaatctttgatgcatcaataaaccacaaa

SEQ ID NO: 2885 - protein, 35 aa, Homo sapiens
MHIPLKSKNLKTEKDHGYCQLKWSPRWAIRHQIEV

SEQ ID NO: 2886 - DNA, 3081 bp, Homo sapiens
cagacatggaggagctgcagccagtgtatgtcaatggtgagtgtctccactgggaagggctctgaggctgagtcagaaaagaaagaggagacaggagcggagaccattaggtgggtggtgtagacaccccaacaccagaggcccagccattcccaataaataacagactctctcagaatcatgttggggttgagaggaaggatataatcattaagccagggcctgggaagctgtgtatgaagtgtgaaccctgggccaccaacatctgtgaactcttgtcttctccctgcagtgggctctgtagatgtggatgtggtttattctcaggtctggagcatgcagcagccagaaagctcaggtgagaaactgcaaagtagttcttgtcagatgcatattcacaggaaagtgatgcattgtttgcaatagaggctttatttatttatttatttatttatttatttatttatttgtctatctatctatctacttttgaggagccttgctctgttgcccaggctggagtgcagtggtgcaatgtcagctcactgcaatctctgcctgtgagctgatacaggaaaattgcttgattttcctctctcagactcctgagtagctgggatgagaggcatgcgccaccacgcccagctaatttttgtatttttagtagagacagggtttcaccatggctggattcaaactcttgacctcaagtgatccacccgcctcagcctcccaaagtgctgggattacaggtgtgagccactgcacccagccagcaatagaggctttaatacatcacttgcccttgataggaaatctgttgatccaggagggagcaagagacacctggaggtaggctcttgtgaagagagcaaacttaaaaaaaaaaatagggtgatggtctaatgagtcttcatttgaatcgggttagatagtcagggagaatctaagattcaaggcaaaagaaggaaatcaggcaagagtgagcatgtctaaagtccaagaggaattctctcaggtgaacagggtcattaaagtgtctcttttgaaggatctgtagtcttcatatgggatgggaggaataactgaataaatcaacatgacctagagaattttcactttgacacgtagctttgcaggaactgctgagttctgcagcagtgcagaggagtgtcctttaagcttctgctccagtgcccttaaaactacaatgcttatatcaacaaccctaaaagctgtcctttgttctgtactcctggttgcctctgatggagccagtggctgttgacagcttggctgatttcctggtcagtggtcatctagctactctcctctgagcctctgaaggtgggtcctctgtctgccttgcttagatttgccacttcaacttcctatagggagttgattaccctatcattctctttctctatctgaccagcctagcagaatcaaaaagtgcagtcactttccaagccctctagctgtaaatcttcaagggaaggaaagggatgtcatcccactatgcctacctggaaaaaggggaaaagaagcagacatcactaagcagctcctgcaaccagactcaaaatactatgtgattcagagtctgtcttctgttatctatgcttctattccaatttccttctatgtagtgaggtgaaccacacatgattggttatctcaggaacatagagaaagaacaggaaacagccctgacagaatgctgcaacagagaagtcaagaggaaaaaattataaagacaatgacctatgggaagttgcattagagaaaggaagcgctttgttagtaagtgctggtggagggcttggaagatggatagagtcttagaaggacttcagtattaacaactttaagaaaggattttacagaacaggagaaaatgggattccacatactaagcatagtagttctatgccctggggcataaagtctgggagtgaggcctaattaagaatgcaagagctcagaactattactttttccttaacagcaaacatcaggacacttctggagaacaaggactcccaagtcatctactcttctgtgaagaaatcataacacttggaggaatcagaagggaagatcaacagcaaggatggggcatcattaagacttgctataaaaccttatgaaaatgcttgaggcttatcacctgccacagccagaacgtgcctcaggaggcacctcctgtcatttttgtcctgatgatgtttcttctccaatatcttcttttacctatcaatattcattgaactgctgctacatccagacactgtgcaaataaattatttctgctaccttctcttaagcaatcagtgtgtaaagatttgagggaagaatgaataagagatacaaggtctcaccttcatctactgtgaagtgatgagaacaggacttgatagtggtgtattaacttatttatgtgctgctggatacagtttgctaatattttgttgagaatttttgcaaatatgttcattgggaatattggcctgaaattttcttttccactgtgtctctgccagaatgtttgtatcaggctgatgctggcttcatagaatgagttaggcaggagcccttcctccttgattttttggcatagtttcagcaggattggtaccagttattctttctgcatcttgtagaattcagctatgaatccatctggtctagggcttttgtgttggttggtaagttttttattactaattcaacttcagcgcttgatattggtctaggaggggtttctgtctcttcctggttcaatcttgggagattgtgtgtttccaggaatttagccgtttcctccagattttcttctttatgtgcatcgacttgagtgtaaacataacttatatgcactgggaaaccaaaaaatctgtgtgacttgctttattgcagcatttgttttattttggtagtctggaactgaacctgcaatatcaccaaagtatgcatatagttgcaaaaatgtgatttttgacatagtaaatatgagtatttgcaataaactatgatattacttttgtaagtatatagaataaaatgtaaataatctat

SEQ ID NO: 2887 - protein, 34 aa, Homo sapiens
MQELRTITFSLTANIRTLLENKDSQVIYSSVKKS

SEQ ID NO: 2888 - DNA, 4447 bp, Homo sapiens
agacgggagtgcttgtggtttgatcatcaaaggagccatgatgggtgagaggtgtctagctctgaatgtcctgtttgctggggttgcttcttgccagaggcttttcagcaggaatcttagctgtcactgctttggggactattgtgatccttctctctagagctctttcaacgtcctgtgctgactgccagctccttccagcccatcgaagggggtccagtgagcctgaaatgtgagacccggctctctccacagaggttggatgttcaactccagttctgcttcttcagagaaaaccaggtcctggggtcaggctggagcagctctccggagctccagatttctgccgtgtggagtgaagacacagggtcttactggtgcaaggcagaaacggtgactcacaggatcagaaaacagagcctccaatcccagattcacgtgcagagcaagtatcagtgaggctgagcctggagaaaaaaagataggagtgttatagcttcagcttggactactagtctgtttctttgttcaactcctgtccttgaggaaagtgaaaattaagctagaaaaaccctccaggttgcggccgggcgcggtggctcacgcctgtaatcccagcactttgggaggctgagacgggcagatcatgaggtcaggagatagagaccatcctggctaacacggtgaaaccccgtctctactaaaaatacaaaaaattagctgggcttggtggggggcgcctgtagtcccagctactagggaggctgaggcaggagaaaggcgtgaacctgggaggtggagcttgcagtgagccgagatcacgccactgcactccagcctgggcgacagggcgagactccgtctcaaaaaaacaacaaaacataacaaaaacccctccagattgctcctggcttcctacttcataagaatcagaaatgcactaagccccttataatctttctttttttgttgttagttaagtaatattcattgatcaagactccattgatcactgactgtatgccttggcatttagtagtgggtgggacacttcaaaaggcaaaccacctgctgtctaatggctctccaaatgtctccacatgatgagattgcaacacaaattgacttattagaaggcaatgtagcatcaggaaaagtagatgtgaatgaacagagtggtcagaggagaagttgtatttggttgaaccttgaaattaaaaatgatagaggaattattattgggaccgttgttaggaataatgacttttccactgcaagactgaagatatcagtgcccctctatattctgtgcaaaaggtgtctttgactcatccaaaaaattgaacagtttcctgtctcatggagatctatcacaaagtctttaaatattactacccatgaaattggccagggttaggacattcaaatgtctttatccacattcctgaaggataattgttatagattccctacctccataggaatgcttataatggattatctatacaatctccacattcccacattttgcattagagaatggaatcagtcaaaccctgttcccagagtttcccttagagttctcacctgttgtcttatatccatctaggaatccccatctctaatgtaagcttggagatccgggcccccgggggacaggtgactgaaggacaaaaactgatcctgctctgctcagtggctgggggtacaggaaatgtcacattctcctggtacagagaggccacaggaaccagtatgggaaagaaaacccagcgttccctgtcagcagagctggagatcccagctgtgaaagagagtgatgccggcaaatattactgtagagctgacaacggccatgtgcctatccagagcaaggtggtgaatatccctgtgagaagtgagtgacactctcattcatatcttccagaaattcccagaccaaggtcatgatacacatgtgtcctgaggaaatttcaggaggccccagggattagtgctgtggagaaccaaaagcaatttgaaaatgggttacgcttgcaggttagactgctgacctgtttctttttgtggaaggaaatataaagagggctgtaatcgattatgaagcataagcattcttgcaatcctacgataggatgataaaacatctattacatgaaacctttgggctctgggccagggagtgtcatggatctaaaaggttcatagtggtaacagcctgcttcattttatgtcatctccttcaaagtgattagagtgtttctagcttgccgaaactgcacccaaagggagacatttggagccatgttattggtgatttactggtgtggaaaattacctggtgttgtagccaagtagccatttccattctaacccagtcctatagtcctgaactgggctgaataaacatacctaaatatatgtttagaaatgctcctatgtatcagttttcccaggaacaactataatattatagaaatcttaaaattatttcctaataaaaaattataggatacaaaagaaaaaaaagaaatatgaagagggctggatgggcacaggaaaacaatcagatgagaacaacagatgaccgtgtctgcaggcagcacccagaactgatattcccctcaaacgtctaaatatattgttgagaaaattatctctaactgttctagtgggaatgtgggaatggaaaatatgcaacagccatggggccaggccctttgctgagcctgcaggttgggagtttgtgaatctattgaggcatcacaaatcttttctgatagcccctctgtgtctgtcagttccagtgtctcgccctgtcctcaccctcaggtctcctggggcccaggctgcagtgggggacctgctggagcttcactgtgaggccctgagaggctctcccccaatcttgtaccaattttatcatgaggatgtcacccttgggaacagctcggccccctctggaggaggggcctccttcaacctctctttgactgcagaacattctggaaactactcctgtgaggccaacaacggcctgggggcccagtgcagtgaggcagtgccagtctccatctcaggacctgatggctatagaagagacctcatgacagctggagttctctggggactgtttggtgtccttggtttcactggtgttgctttgctgttgtatgccttgttccacaagatatcaggagaaagttctgccactaatgaacccagaggggcttccaggccaaatcctcaagagttcacctattcaagcccaaccccagacatggaggagctgcagccagtgtatgtcaatgtgggctctgtagatgtggatgtggtttattctcaggtctggagcatgcagcagccagaaagctcagcaaacatcaggacacttctggagaacaaggactcccaagtcatctactcttctgtgaagaaatcataacacttggaggaatcagaagggaagatcaacagcaaggatggggcatcattaagacttgctataaaaccttatgaaaatgcttgaggcttatcacctgccacagccagaacgtgcctcaggaggcacctcctgtcatttttgtcctgatgatgtttcttctccaatatcttcttttacctatcaatattcattgaactgctgctacatccagacactgtgcaaataaattatttctgctaccttctcttaagcaatcagtgtgtaaagatttgagggaagaatgaataagagatacaaggtctcaccttcatctactgtgaagtgatgagaacaggacttgatagtggtgtattaacttatttatgtgctgctggatacagtttgctaatattttgttgagaatttttgcaaatatgttcattgggaatattggcctgaaattttcttttccactgtgtctctgccagaatgtttgtatcaggctgatgctggcttcatagaatgagttaggcaggagcccttcctccttgattttttggcatagtttcagcaggattggtaccagttattctttctgcatcttgtagaattcagctatgaatccatctggtctagggcttttgtgttggttggtaagttttttattactaattcaacttcagcgcttgatattggtctaggaggggtttctgtctcttcctggttcaatcttgggagattgtgtgtttccaggaatttagccgtttcctccagattttcttctttatgtgcatcgacttgagtgtaaacataacttatatgcactgggaaaccaaaaaatctgtgtgacttgctttattgcagcatttgttttattttggtagtctggaactgaacctgcaatatcaccaaagtatgcatatagttgcaaaaatgtgatttttgacatagtaaatatgagtatttgcaataaactatgatattacttttgtaagtatatagaataaaatgtaaataatctat

SEQ ID NO: 2889 - protein, 255 aa, Homo sapiens; identical to SEQ ID NO: 122

SEQ ID NO: 2890 - DNA, 2578 bp, Homo sapiens
gttggtgaccaagagtacatctcttttcaaatagctggattaggtcctcatgctgctgtggtcattgctggtcatctttgatgcagtcactgaacaggcagattcgctgacccttgtggcgccctcttctgtcttcgaaggagacagcatcgttctgaaatgccagggagaacagaactggaaaattcagaagatggcttaccataaggataacaaagagttatctgttttcaaaaaattctcagatttccttatccaaagtgcagttttaagtgacagtggtaactatttctgtagtaccaaaggacaactctttctctgggataaaacttcaaatatagtaaagataaaagtccaagagctctttcaacgtcctgtgctgactgccagctccttccagcccatcgaagggggtccagtgagcctgaaatgtgagacccggctctctccacagaggttggatgttcaactccagttctgcttcttcagagaaaaccaggtcctggggtcaggctggagcagctctccggagctccagatttctgccgtgtggagtgaagacacagggtcttactggtgcaaggcagaaacggtgactcacaggatcagaaaacagagcctccaatcccagattcacgtgcagagaatccccatctctaatgtaagcttggagatccgggcccccgggggacaggtgactgaaggacaaaaactgatcctgctctgctcagtggctgggggtacaggaaatgtcacattctcctggtacagagaggccacaggaaccagtatgggaaagaaaacccagcgttccctgtcagcagagctggagatcccagctgtgaaagagagtgatgccggcaaatattactgtagagctgacaacggccatgtgcctatccagagcaaggtggtgaatatccctgtgagaattccagtgtctcgccctgtcctcaccctcaggtctcctggggcccaggctgcagtgggggacctgctggagcttcactgtgaggccctgagaggctctcccccaatcttgtaccaattttatcatgaggatgtcacccttgggaacagctcggccccctctggaggaggggcctccttcaacctctctttgactgcagaacattctggaaactactcctgtgaggccaacaacggcctgggggcccagtgcagtgaggcagtgccagtctccatctcaggacctgatggctatagaagagacctcatgacagctggagttctctggggactgtttggtgtccttggtttcactggtgttgctttgctgttgtatgccttgttccacaagatatcaggagaaagttctgccactaatgaacccagaggggcttccaggccaaatcctcaagagttcacctattcaagcccaaccccagacatggaggagctgcagccagtgtatgtcaatgtgggctctgtagatgtggatgtggtttattctcaggtctggagcatgcagcagccagaaagctcagcaaacatcaggacacttctggagaacaaggactcccaagtcatctactcttctgtgaagaaatcataacacttggaggaatcagaagggaagatcaacagcaaggatggggcatcattaagacttgctataaaaccttatgaaaatgcttgaggcttatcacctgccacagccagaacgtgcctcaggaggcacctcctgtcatttttgtcctgatgatgtttcttctccaatatcttcttttacctatcaatattcattgaactgctgctacatccagacactgtgcaaataaattatttctgctaccttctcttaagcaatcagtgtgtaaagatttgagggaagaatgaataagagatacaaggtctcaccttcatctactgtgaagtgatgagaacaggacttgatagtggtgtattaacttatttatgtgctgctggatacagtttgctaatattttgttgagaatttttgcaaatatgttcattgggaatattggcctgaaattttcttttccactgtgtctctgccagaatgtttgtatcaggctgatgctggcttcatagaatgagttaggcaggagcccttcctccttgattttttggcatagtttcagcaggattggtaccagttattctttctgcatcttgtagaattcagctatgaatccatctggtctagggcttttgtgttggttggtaagttttttattactaattcaacttcagcgcttgatattggtctaggaggggtttctgtctcttcctggttcaatcttgggagattgtgtgtttccaggaatttagccgtttcctccagattttcttctttatgtgcatcgacttgagtgtaaacataacttatatgcactgggaaaccaaaaaatctgtgtgacttgctttattgcagcatttgttttattttggtagtctggaactgaacctgcaatatcaccaaagtatgcatatagttgcaaaaatgtgatttttgacatagtaaatatgagtatttgcaataaactatgatattacttttgtaagtatatagaataaaatgtaaataatctat

SEQ ID NO: 2891 - protein, 508 aa, Homo sapiens; identical to SEQ ID NO: 120

SEQ ID NO: 2892 - DNA, 1669 bp, Homo sapiens
agagtctccagttggtgaccaagagtacatctcttttcaaatagctggattaggtcctcatgctgctgtggtcattgctggtcatctttgatgcagtcactgaacaggcagattcgctgacccttgtggcgccctcttctgtcttcgaaggagacagcatcgttctgaaatgccagggagaacagaactggaaaattcagaagatggcttaccataaggataacaaagagttatctgttttcaaaaaattctcagatttccttatccaaagtgcagttttaagtgacagtggtaactatttctgtagtaccaaaggacaactctttctctgggataaaacttcaaatatagtaaagataaaagtccaaggacctgatggctatagaagagacctcatgacagctggagttctctggggactgtttggtgtccttggtttcactggtgttgctttgctgttgtatgccttgttccacaagatatcaggagaaagttctgccactaatgaacccagaggggcttccaggccaaatcctcaagagttcacctattcaagcccaaccccagacatggaggagctgcagccagtgtatgtcaatgcaaacatcaggacacttctggagaacaaggactcccaagtcatctactcttctgtgaagaaatcataacacttggaggaatcagaagggaagatcaacagcaaggatggggcatcattaagacttgctataaaaccttatgaaaatgcttgaggcttatcacctgccacagccagaacgtgcctcaggaggcacctcctgtcatttttgtcctgatgatgtttcttctccaatatcttcttttacctatcaatattcattgaactgctgctacatccagacactgtgcaaataaattatttctgctaccttctcttaagcaatcagtgtgtaaagatttgagggaagaatgaataagagatacaaggtctcaccttcatctactgtgaagtgatgagaacaggacttgatagtggtgtattaacttatttatgtgctgctggatacagtttgctaatattttgttgagaatttttgcaaatatgttcattgggaatattggcctgaaattttcttttccactgtgtctctgccagaatgtttgtatcaggctgatgctggcttcatagaatgagttaggcaggagcccttcctccttgattttttggcatagtttcagcaggattggtaccagttattctttctgcatcttgtagaattcagctatgaatccatctggtctagggcttttgtgttggttggtaagttttttattactaattcaacttcagcgcttgatattggtctaggaggggtttctgtctcttcctggttcaatcttgggagattgtgtgtttccaggaatttagccgtttcctccagattttcttctttatgtgcatcgacttgagtgtaaacataacttatatgcactgggaaaccaaaaaatctgtgtgacttgctttattgcagcatttgttttattttggtagtctggaactgaacctgcaatatcaccaaagtatgcatatagttgcaaaaatgtgatttttgacatagtaaatatgagtatttgcaataaactatgatattacttttgtaagtatatagaataaaatgtaaataatcta

SEQ ID NO: 2893 - protein, 202 aa, Homo sapiens
MLLWSLLVIFDAVTEQADSLTLVAPSSVFEGDSIVLKCQGEQNWKIQKMAYHKDNKELSVFKKFSDFLIQSAVLSDSGNYFCSTKGQLFLWDKTSNIVKIKVQGPDGYRRDLMTAGVLWGLFGVLGFTGVALLLYALFHKISGESSATNEPRGASRPNPQEFTYSSPTPDMEELQPVYVNANIRTLLENKDSQVIYSSVKKS

SEQ ID NO: 2894 - DNA, 1726 bp, Homo sapiens
tttcaggaggccccagggattagtgctgtggagaaccaaaagcaatttgaaaatgggttacgcttgcaggttagactgctgacctgtttctttttgtggaaggaaatataaagagggctgtaatcgattatgaagcataagcattcttgcaatcctacgataggatgataaaacatctattacatgaaacctttgggctctgggccagggagtgtcatggatctaaaaggttcatagtggtaacagcctgcttcattttatgtcatctccttcaaagtgattagagtgtttctagcttgccgaaactgcacccaaagggagacatttggagccatgttattggtgatttactggtgtggaaaattacctggtgttgtagccaagtagccatttccattctaacccagtcctatagtcctgaactgggctgaataaacatacctaaatatatgtttagaaatgctcctatgtatcagttttcccaggaacaactataatattatagaaatcttaaaattatttcctaataaaaaattataggatacaaaagaaaaaaaagaaatatgaagagggctggatgggcacaggaaaacaatcagatgagaacaacagatgaccgtgtctgcaggcagcacccagaactgatattcccctcaaacgtctaaatatattgttgagaaaattatctctaactgttctagtgggaatgtgggaatggaaaatatgcaacagccatggggccaggccctttgctgagcctgcaggttgggagtttgtgaatctattgaggcatcacaaatcttttctgatagcccctctgtgtctgtcagttccagtgtctcgccctgtcctcaccctcaggtctcctggggcccaggctgcagtgggggacctgctggagcttcactgtgaggccctgagaggctctcccccaatcttgtaccaattttatcatgaggatgtcacccttgggaacagctcggccccctctggaggaggggcctccttcaacctctctttgactgcagaacattctggaaactactcctgtgaggccaacaacggcctgggggcccagtgcagtgaggcagtgccagtctccatctcaggacctgatggctatagaagagacctcatgacagctggagttctctggggactgtttggtgtccttggtttcactggtgttgctttgctgttgtatgccttgttccacaagatatcaggagaaagttctgccactaatgaacccagaggggcttccaggccaaatcctcaagagttcacctattcaagcccaaccccagacatggaggagctgcagccagtgtatgtcaatgtgggctctgtagatgtggatgtggtttattctcaggtctggagcatgcagcagccagaaagctcagcaaacatcaggacacttctggagaacaaggactcccaagtcatctactcttctgtgaagaaatcataacacttggaggaatcagaagggaagatcaacagcaaggatggggcatcattaagacttgctataaaaccttatgaaaatgcttgaggcttatcacctgccacagccagaacgtgcctcaggaggcacctcctgtcatttttgtcctgatgatgtttcttctccaatatcttcttttacctatcaatattcattgaactgctgctacatccagacactgtgcaaataaattatttctgctaccttctcttaagc

SEQ ID NO: 2895 - protein, 255 aa, Homo sapiens; identical to SEQ ID NO: 122

SEQ ID NO: 2896 - DNA, 1828 bp, Homo sapiens
gttggtgaccaagagtacatctcttttcaaatagctggattaggtcctcatgctgctgtggtcattgctggtcatctttgatgcagtcactgaacaggcagattcgctgacccttgtggcgccctcttctgtcttcgaaggagacagcatcgttctgaaatgccagggagaacagaactggaaaattcagaagatggcttaccataaggataacaaagagttatctgttttcaaaaaattctcagatttccttatccaaagtgcagttttaagtgacagtggtaactatttctgtagtaccaaaggacaactctttctctgggataaaacttcaaatatagtaaagataaaagtccaagagctctttcaacgtcctgtgctgactgccagctccttccagcccatcgaagggggtccagtgagcctgaaatgtgagacccggctctctccacagaggttggatgttcaactccagttctgcttcttcagagaaaaccaggtcctggggtcaggctggagcagctctccggagctccagatttctgccgtgtggagtgaagacacagggtcttactggtgcaaggcagaaacggtgactcacaggatcagaaaacagagcctccaatcccagattcacgtgcagagaatccccatctctaatgtaagcttggagatccgggcccccgggggacaggtgactgaaggacaaaaactgatcctgctctgctcagtggctgggggtacaggaaatgtcacattctcctggtacagagaggccacaggaaccagtatgggaaagaaaacccagcgttccctgtcagcagagctggagatcccagctgtgaaagagagtgatgccggcaaatattactgtagagctgacaacggccatgtgcctatccagagcaaggtggtgaatatccctgtgagaattccagtgtctcgccctgtcctcaccctcaggtctcctggggcccaggctgcagtgggggacctgctggagcttcactgtgaggccctgagaggctctcccccaatcttgtaccaattttatcatgaggatgtcacccttgggaacagctcggccccctctggaggaggggcctccttcaacctctctttgactgcagaacattctggaaactactcctgtgaggccaacaacggcctgggggcccagtgcagtgaggcagtgccagtctccatctcaggacctgatggctatagaagagacctcatgacagctggagttctctggggactgtttggtgtccttggtttcactggtgttgctttgctgttgtatgccttgttccacaagatatcaggagaaagttctgccactaatgaacccagaggggcttccaggccaaatcctcaagagttcacctattcaagcccaaccccagacatggaggagctgcagccagtgtatgtcaatgtgggctctgtagatgtggatgtggtttattctcaggtctggagcatgcagcagccagaaagctcagcaaacatcaggacacttctggagaacaaggactcccaagtcatctactcttctgtgaagaaatcataacacttggaggaatcagaagggaagatcaacagcaaggatggggcatcattaagacttgctataaaaccttatgaaaatgcttgaggcttatcacctgccacagccagaacgtgcctcaggaggcacctcctgtcatttttgtcctgatgatgtttcttctccaatatcttcttttacctatcaatattcattgaactgctgctacatccagacactgtgcaaataaattatttctgctaccttctcttaagc

SEQ ID NO: 2897 - protein, 508 aa, Homo sapiens; identical to SEQ ID NO: 120

SEQ ID NO: 2898 - DNA, 920 bp, Homo sapiens
agagtctccagttggtgaccaagagtacatctcttttcaaatagctggattaggtcctcatgctgctgtggtcattgctggtcatctttgatgcagtcactgaacaggcagattcgctgacccttgtggcgccctcttctgtcttcgaaggagacagcatcgttctgaaatgccagggagaacagaactggaaaattcagaagatggcttaccataaggataacaaagagttatctgttttcaaaaaattctcagatttccttatccaaagtgcagttttaagtgacagtggtaactatttctgtagtaccaaaggacaactctttctctgggataaaacttcaaatatagtaaagataaaagtccaaggacctgatggctatagaagagacctcatgacagctggagttctctggggactgtttggtgtccttggtttcactggtgttgctttgctgttgtatgccttgttccacaagatatcaggagaaagttctgccactaatgaacccagaggggcttccaggccaaatcctcaagagttcacctattcaagcccaaccccagacatggaggagctgcagccagtgtatgtcaatgcaaacatcaggacacttctggagaacaaggactcccaagtcatctactcttctgtgaagaaatcataacacttggaggaatcagaagggaagatcaacagcaaggatggggcatcattaagacttgctataaaaccttatgaaaatgcttgaggcttatcacctgccacagccagaacgtgcctcaggaggcacctcctgtcatttttgtcctgatgatgtttcttctccaatatcttcttttacctatcaatattcattgaactgctgctacatccagacactgtgcaaataaattatttctgctaccttctcttaagc

SEQ ID NO: 2899 - protein, 202 aa, Homo sapiens; identical to SEQ ID NO: 2893

SEQ ID NO: 2900 - DNA, 902 bp, Homo sapiens
gaagagggctggatgggcacaggaaaacaatcagatgagaacaacagatgaccgtgtctgcaggcagcacccagaactgatattcccctcaaacgtctaaatatattgttgagaaaattatctctaactgttctagtgggaatgtgggaatggaaaatatgcaacagccatggggccaggccctttgctgagcctgcaggttgggagtttgtgaatctattgaggcatcacaaatcttttctgatagcccctctgtgtctgtcagttccagtgtctcgccctgtcctcaccctcaggtctcctggggcccaggctgcagtgggggacctgctggagcttcactgtgaggccctgagaggctctcccccaatcttgtaccaattttatcatgaggatgtcacccttgggaacagctcggccccctctggaggaggggcctccttcaacctctctttgactgcagaacattctggaaactactcctgtgaggccaacaacggcctgggggcccagtgcagtgaggcagtgccagtctccatctcaggacctgatggctatagaagagacctcatgacagctggagttctctggggactgtttggtgtccttggtttcactggtgttgctttgctgttgtatgccttgttccacaagatatcaggttgtatctaccatttggattctccatattttgctatgacctttccactactgatatagattgaaattacaaaaaaagaagagagaaaagaaaactctccaaaagccaataatttctttttatgcttcataattctgcaaggctctgtgcaatgctcaatgtggtcatactgctaattatacaatatgtcactgttccctgtgcatagtcactggagattaaattatttacacattctttc

SEQ ID NO: 2901 - protein, 192 aa, Homo sapiens
MWEWKICNSHGARPFAEPAGWEFVNLLRHHKSFLIAPLCLSVPVSRPVLTLRSPGAQAAVGDLLELHCEALRGSPPILYQFYHEDVTLGNSSAPSGGGASFNLSLTAEHSGNYSCEANNGLGAQCSEAVPVSISGPDGYRRDLMTAGVLWGLFGVLGFTGVALLLYALFHKISGCIYHLDSPYFAMTFPLLI

SEQ ID NO: 2902 - DNA, 576 bp, Homo sapiens
agagtctccagttggtgaccaagagtacatctcttttcaaatagctggattaggtcctcatgctgctgtggtcattgctggtcatctttgatgcagtcactgaacaggcagattcgctgacccttgtggcgccctcttctgtcttcgaaggagacagcatcgttctgaaatgccagggagaacagaactggaaaattcagaagatggcttaccataaggataacaaagagttatctgttttcaaaaaattctcagatttccttatccaaagtgcagttttaagtgacagtggtaactatttctgtagtaccaaaggacaactctttctctgggataaaacttcaaatatagtaaagataaaagtccaaggtctcctggggcccaggctgcagtgggggacctgctggagcttcactgtgaggccctgagaggctctcccccaatcttgtaccaattttatcatgaggatgtcacccttgggaacagctcggccccctctggaggaggggcctccttcaacctctctttgactgcagaacattctggaaactactcctgtgaggccaacaacggcct

SEQ ID NO: 2903 - protein, 122 aa, Homo sapiens
MLLWSLLVIFDAVTEQADSLTLVAPSSVFEGDSIVLKCQGEQNWKIQKMAYHKDNKELSVFKKFSDFLIQSAVLSDSGNYFCSTKGQLFLWDKTSNIVKIKVQGLLGPRLQWGTCWSFTVRP

SEQ ID NO: 2904 - DNA, 3470 bp, Homo sapiens
attctttttttgatgagaggcatctctaggtaccatccctgacctggtcctcatgctgccgaggctgttgctgttgatctgtgctccactctgtgaacctgccgagctgtttttgatagccagcccctcccatcccacagaggggagcccagtgaccctgacgtgtaagatgccctttctacagagttcagatgcccagttccagttctgctttttcagagacacccgggccttgggcccaggctggagcagctcccccaagctccagatcgctgccatgtggaaagaagacacagggtcatactggtgcgaggcacagacaatggcgtccaaagtcttgaggagcaggagatcccagataaatgtgcacagggtccctgtcgctgatgtgagcttggagactcagcccccaggaggacaggtgatggagggagacaggctggtcctcatctgctcagttgctatgggcacaggagacatcaccttcctttggtacaaaggggctgtaggtttaaaccttcagtcaaagacccagcgttcactgacagcagagtatgagattccttcagtgagggagagtgatgctgagcaatattactgtgtagctgaaaatggctatggtcccagccccagtgggctggtgagcatcactgtcagaatcccggtgtctcgcccaatcctcatgctcagggctcccagggcccaggctgcagtggaggatgtgctggagcttcactgtgaggccctgagaggctctcctccgatcctgtactggttttatcacgaggatatcaccctggggagcaggtcggccccctctggaggaggagcctccttcaacctttccctgactgaagaacattctggaaactactcctgtgaggccaacaatggcctgggggcccagcgcagtgaggcggtgacactcaacttcacaggaagacgttcagccagggatccactcaggagccttcccagccctctaccccaagagttcacctacctcaactcacctaccccagggcagctacagcctatatatgaaaatgaaccaagagaacaatcagtggctgtgcatggcagacaacagcattcctcagagcagaaggctcagaaaccctggggacacatatggaggacaaggtttccttagacatctattccaggctgaggaaagcaaacattacagatgtggactatgaagatgctatgtaaggttatggaagattctgctctttgaaaaccatccatgaccccaagcctcaggcctgatatgttcttcagagatcctggggcattagctttccagtatacctcttctggatgccattctccatggcactattccttcatctactgtgaagtgaagttggcgcagccctgaagaaactacctaggagaactaatagacacaggagtgacagggactttgttatcagaaccagattcctgccggctcctttgaaaacaggtcatattgtgctcttctgtttacaagaggaaacaagatggaataaaagaaattgggatcttgggttggagggacagtgaagcttagagcacatgaactcaaggttagtgactctgcaggacttcacagagagagctgtgcccatcattcagtccaagtgctttctctgcccagacagcacagaactccagccccgctacttacatggatcatcgagtttccacctaaaatatgattctatttattttgagtcactgttaccaaattagaactaaaacaaagttacataaaaagttattgtgactccacttaattttagtgacgtatttttgtatatataggccaacctataccacatccaaaattatgtatctattacagcccctagaagctttataaatacagtgtgtcttcttttattcacaaaatttttgaaatcgtggtaatatggtttgaaacctgtatcttaattattttttttttaaattgagacagggtctcactctgtcactcaatctggaatgcagtggcacaatcttgcctcactgcaacgcctgcctctcaggctcaagcaaacctctcacctcagcctgctgagtagctgggactacaggcacatgccaccaaacttggccattttttgtcttacgtagagacaagatttcaccgttttgcccaggctggtctcaaactcctgggctcaagcaatgtattgaattttaaaataaccaggcactcactcttatgaattaataaacatttggaggtatataaagtaaaaagttaaagtctttcctgtaagttaacacaaatgttaactattgttaaaaactttacaggtagctctctagatatttttctatttttgtatgtatacttatgcatacatgtaagtatataaacatttagaagtgtacctatctaacaaactattatgaaatactttcaaatctgtaaatagatctattatactattttaaaagtctctatagtagtgtgttatatagataaatcataacttttttctttttttattgtagtaaatatgcacaacataaaattgatcattttaaccatttttaagtgtacaattcagtggcattaagtactatcataatatattttaatccttctcatcactggtggacattaaggagactctcaaaaaattcatattataaaaacaaagttcaaacaaatgtctttgtactagcatattatggcactcctgctggattatctgaaggataaatttgtaaatctagtattgctagattatgcatattaaatattcttgttaaatagtcttcaatgtctctcaggtaaggctgtatcaatttatatcttcaccaacaacgtctgggaaatcagtttgtggggtgtattacttagttttcacattgctaataaagacatatccaagactgggtaatttataaaggaaagaggtttaattgactcacagttccaaatggctagagaggcctccggacacttacaatcatggcagaaggggaagcaaacatgtccttcttcacatggcagcaggagagagaaactgtcctctgttcagcctttgcccatcttctatgtcatttgtgtttttcttacagtttttataggaatgatttattaaggcttaatttataacagtgaaatgcatagattttatgtgcatagttccatcaatttgacaaatgcatgcatttgagtaatccaaacccttatcatgagataaactattttcatcactccagaaagttccctcatactcatgtccagtctatttatgccactctagaaacaactactgaacattatgcttttgaccatttctccattgtatgcgatgacaatgtttttgtgcaatctttcacttcactttttgtttacagtgaattctaaaatactgaaggttagtttttgcacagctaaactcaagtttttcaaatcttggtttctaactttcctatatttctgtcatcttctatcagaccat

SEQ ID NO: 2905 - protein, 366 aa, Homo sapiens
MLPRLLLLICAPLCEPAELFLIASPSHPTEGSPVTLTCKMPFLQSSDAQFQFCFFRDTRALGPGWSSSPKLQIAAMWKEDTGSYWCEAQTMASKVLRSRRSQINVHRVPVADVSLETQPPGGQVMEGDRLVLICSVAMGTGDITFLWYKGAVGLNLQSKTQRSLTAEYEIPSVRESDAEQYYCVAENGYGPSPSGLVSITVRIPVSRPILMLRAPRAQAAVEDVLELHCEALRGSPPILYWFYHEDITLGSRSAPSGGGASFNLSLTEEHSGNYSCEANNGLGAQRSEAVTLNFTGRRSARDPLRSLPSPLPQEFTYLNSPTPGQLQPIYENEPREQSVAVHGRQQHSSEQKAQKPWGHIWRTRFP

SEQ ID NO: 2906 - DNA, 3613 bp, Homo sapiens
ctcgactctgaggtgcattctttttttgatgagaggcatctctaggtaccatccctgacctggtcctcatgctgccgaggctgttgctgttgatctgtgctccactctgtgaacctgccgagctgtttttgatagccagcccctcccatcccacagaggggagcccagtgaccctgacgtgtaagatgccctttctacagagttcagatgcccagttccagttctgctttttcagagacacccgggccttgggcccaggctggagcagctcccccaagctccagatcgctgccatgtggaaagaagacacagggtcatactggtgcgaggcacagacaatggcgtccaaagtcttgaggagcaggagatcccagataaatgtgcacagggtccctgtcgctgatgtgagcttggagactcagcccccaggaggacaggtgatggagggagacaggctggtcctcatctgctcagttgctatgggcacaggagacatcaccttcctttggtacaaaggggctgtaggtttaaaccttcagtcaaagacccagcgttcactgacagcagagtatgagattccttcagtgagggagagtgatgctgagcaatattactgtgtagctgaaaatggctatggtcccagccccagtgggctggtgagcatcactgtcagaatcccggtgtctcgcccaatcctcatgctcagggctcccagggcccaggctgcagtggaggatgtgctggagcttcactgtgaggccctgagaggctctcctccgatcctgtactggttttatcacgaggatatcaccctggggagcaggtcggccccctctggaggaggagcctccttcaacctttccctgactgaagaacattctggaaactactcctgtgaggccaacaatggcctgggggcccagcgcagtgaggcggtgacactcaacttcacagtgcctactggggccagaagcaatcatcttacctcaggagtcattgaggggctgctcagcacccttggtccagccaccgtggccttattattttgctacggcctcaaaagaaaaataggaagacgttcagccagggatccactcaggagccttcccagccctctaccccaagagttcacctacctcaactcacctaccccagggcagctacagcctatatatgaaaatgtgaatgttgtaagtggggatgaggtttattcactggcgtactataaccagccggagcaggaatcagtagcagcagaaaccctggggacacatatggaggacaaggtttccttagacatctattccaggctgaggaaagcaaacattacagatgtggactatgaagatgctatgtaaggttatggaagattctgctctttgaaaaccatccatgaccccaagcctcaggcctgatatgttcttcagagatcctggggcattagctttccagtatacctcttctggatgccattctccatggcactattccttcatctactgtgaagtgaagttggcgcagccctgaagaaactacctaggagaactaatagacacaggagtgacagggactttgttatcagaaccagattcctgccggctcctttgaaaacaggtcatattgtgctcttctgtttacaagaggaaacaagatggaataaaagaaattgggatcttgggttggagggacagtgaagcttagagcacatgaactcaaggttagtgactctgcaggacttcacagagagagctgtgcccatcattcagtccaagtgctttctctgcccagacagcacagaactccagccccgctacttacatggatcatcgagtttccacctaaaatatgattctatttattttgagtcactgttaccaaattagaactaaaacaaagttacataaaaagttattgtgactccacttaattttagtgacgtatttttgtatatataggccaacctataccacatccaaaattatgtatctattacagcccctagaagctttataaatacagtgtgtcttcttttattcacaaaatttttgaaatcgtggtaatatggtttgaaacctgtatcttaattattttttttttaaattgagacagggtctcactctgtcactcaatctggaatgcagtggcacaatcttgcctcactgcaacgcctgcctctcaggctcaagcaaacctctcacctcagcctgctgagtagctgggactacaggcacatgccaccaaacttggccattttttgtcttacgtagagacaagatttcaccgttttgcccaggctggtctcaaactcctgggctcaagcaatgtattgaattttaaaataaccaggcactcactcttatgaattaataaacatttggaggtatataaagtaaaaagttaaagtctttcctgtaagttaacacaaatgttaactattgttaaaaactttacaggtagctctctagatatttttctatttttgtatgtatacttatgcatacatgtaagtatataaacatttagaagtgtacctatctaacaaactattatgaaatactttcaaatctgtaaatagatctattatactattttaaaagtctctatagtagtgtgttatatagataaatcataacttttttctttttttattgtagtaaatatgcacaacataaaattgatcattttaaccatttttaagtgtacaattcagtggcattaagtactatcataatatattttaatccttctcatcactggtggacattaaggagactctcaaaaaattcatattataaaaacaaagttcaaacaaatgtctttgtactagcatattatggcactcctgctggattatctgaaggataaatttgtaaatctagtattgctagattatgcatattaaatattcttgttaaatagtcttcaatgtctctcaggtaaggctgtatcaatttatatcttcaccaacaacgtctgggaaatcagtttgtggggtgtattacttagttttcacattgctaataaagacatatccaagactgggtaatttataaaggaaagaggtttaattgactcacagttccaaatggctagagaggcctccggacacttacaatcatggcagaaggggaagcaaacatgtccttcttcacatggcagcaggagagagaaactgtcctctgttcagcctttgcccatcttctatgtcatttgtgtttttcttacagtttttataggaatgatttattaaggcttaatttataacagtgaaatgcatagattttatgtgcatagttccatcaatttgacaaatgcatgcatttgagtaatccaaacccttatcatgagataaactattttcatcactccagaaagttccctcatactcatgtccagtctatttatgccactctagaaacaactactgaacattatgcttttgaccatttctccattgtatgcgatgacaatgtttttgtgcaatctttcacttcactttttgtttacagtgaattctaaaatactgaaggttagtttttgcacagctaaactcaagtttttcaaatcttggtttctaactttcctatatttctgtcatcttctatcagaccat

SEQ ID NO: 2907 - protein, 429 aa, Homo sapiens; identical to SEQ ID NO: 124

SEQ ID NO: 2908 - DNA, 2957 bp, Homo sapiens
gagtcttgttggcaagtgctgagacacaaactgcctcttaccagaaattccgaaccgcattaatcatttgtgtttaattcctctctctagagctgtttttgatagccagcccctcccatcccacagaggggagcccagtgaccctgacgtgtaagatgccctttctacagagttcagatgcccagttccagttctgctttttcagagacacccgggccttgggcccaggctggagcagctcccccaagctccagatcgctgccatgtggaaagaagacacagggtcatactggtgcgaggcacagacaatggcgtccaaagtcttgaggagcaggagatcccagataaatgtgcacagggtccctgtcgctgatgtgagcttggagactcagcccccaggaggacaggtgatggagggagacaggctggtcctcatctgctcagttgctatgggcacaggagacatcaccttcctttggtacaaaggggctgtaggtttaaaccttcagtcaaagacccagcgttcactgacagcagagtatgagattccttcagtgagggagagtgatgctgagcaatattactgtgtagctgaaaatggctatggtcccagccccagtgggctggtgagcatcactgtcagaagtaagttccactacccttcgttcagccagccagtcacaaactgggctccacatttccctggggcacacaaagtttccctggggcatgctgaggaagttcaatggggctgagcatcggtgggcagggattatgagtttgctgcattgtcagagactgtctcttacagtctactgtctccctcagtcccggtgtctcgcccaatcctcatgctcagggctcccagggcccaggctgcagtggaggatgtgctggagcttcactgtgaggccctgagaggctctcctccgatcctgtactggttttatcacgaggatatcaccctggggagcaggtcggccccctctggaggaggagcctccttcaacctttccctgactgaagaacattctggaaactactcctgtgaggccaacaatggcctgggggcccagcgcagtgaggcggtgacactcaacttcacaggaagacgttcagccagggatccactcaggagccttcccagccctctaccccaagagttcacctacctcaactcacctaccccagggcagctacagcctatatatgaaaatgtgaatgttgtaagtggggatgaggtttattcactggcgtactataaccagccggagcaggaatcagtagcagcagaaaccctggggacacatatggaggacaaggtttccttagacatctattccaggctgaggaaagcaaacattacagatgtggactatgaagatgctatgtaaggttatggaagattctgctctttgaaaaccatccatgaccccaagcctcaggcctgatatgttcttcagagatcctggggcattagctttccagtatacctcttctggatgccattctccatggcactattccttcatctactgtgaagtgaagttggcgcagccctgaagaaactacctaggagaactaatagacacaggagtgacagggactttgttatcagaaccagattcctgccggctcctttgaaaacaggtcatattgtgctcttctgtttacaagaggaaacaagatggaataaaagaaattgggatcttgggttggagggacagtgaagcttagagcacatgaactcaaggttagtgactctgcaggacttcacagagagagctgtgcccatcattcagtccaagtgctttctctgcccagacagcacagaactccagccccgctacttacatggatcatcgagtttccacctaaaatatgattctatttattttgagtcactgttaccaaattagaactaaaacaaagttacataaaaagttattgtgactccacttaattttagtgacgtatttttgtatatataggccaacctataccacatccaaaattatgtatctattacagcccctagaagctttataaatacagtgtgtcttcttttattcacaaaatttttgaaatcgtggtaatatggtttgaaacctgtatcttaattattttttttttaaattgagacagggtctcactctgtcactcaatctggaatgcagtggcacaatcttgcctcactgcaacgcctgcctctcaggctcaagcaaacctctcacctcagcctgctgagtagctgggactacaggcacatgccaccaaacttggccattttttgtcttacgtagagacaagatttcaccgttttgcccaggctggtctcaaactcctgggctcaagcaatgtattgaattttaaaataaccaggcactcactcttatgaattaataaacatttggaggtatataaagtaaaaagttaaagtctttcctgtaagttaacacaaatgttaactattgttaaaaactttacaggtagctctctagatatttttctatttttgtatgtatacttatgcatacatgtaagtatataaacatttagaagtgtacctatctaacaaactattatgaaatactttcaaatctgtaaatagatctattatactattttaaaagtctctatagtagtgtgttatatagataaatcataacttttttctttttttattgtagtaaatatgcacaacataaaattgatcattttaaccatttttaagtgtacaattcagtggcattaagtactatcataatatattttaatccttctcatcactggtggacattaaggagactctcaaaaaattcatattataaaaacaaagttcaaacaaatgtctttgtactagcatattatggcactcctgctggattatctgaaggataaatttgtaaatctagtattgctagattatgcatattaaatattcttgttaaatagtc

SEQ ID NO: 2909 - protein, 199 aa, Homo sapiens
MPFLQSSDAQFQFCFFRDTRALGPGWSSSPKLQIAAMWKEDTGSYWCEAQTMASKVLRSRRSQINVHRVPVADVSLETQPPGGQVMEGDRLVLICSVAMGTGDITFLWYKGAVGLNLQSKTQRSLTAEYEIPSVRESDAEQYYCVAENGYGPSPSGLVSITVRSKFHYPSFSQPVTNWAPHFPGAHKVSLGHAEEVQWG

SEQ ID NO: 2910 - DNA, 2778 bp, Homo sapiens
attctttttttgatgagaggcatctctaggtaccatccctgacctggtcctcatgctgccgaggctgttgctgttgatctgtgctccactctgtgaacctgccgagctgtttttgatagccagcccctcccatcccacagaggggagcccagtgaccctgacgtgtaagatgccctttctacagagttcagatgcccagttccagttctgctttttcagagacacccgggccttgggcccaggctggagcagctcccccaagctccagatcgctgccatgtggaaagaagacacagggtcatactggtgcgaggcacagacaatggcgtccaaagtcttgaggagcaggagatcccagataaatgtgcacagggtccctgtcgctgatgtgagcttggagactcagcccccaggaggacaggtgatggagggagacaggctggtcctcatctgctcagttgctatgggcacaggagacatcaccttcctttggtacaaaggggctgtaggtttaaaccttcagtcaaagacccagcgttcactgacagcagagtatgagattccttcagtgagggagagtgatgctgagcaatattactgtgtagctgaaaatggctatggtcccagccccagtgggctggtgagcatcactgtcagaatcccggtgtctcgcccaatcctcatgctcagggctcccagggcccaggctgcagtggaggatgtgctggagcttcactgtgaggccctgagaggctctcctccgatcctgtactggttttatcacgaggatatcaccctggggagcaggtcggccccctctggaggaggagcctccttcaacctttccctgactgaagaacattctggaaactactcctgtgaggccaacaatggcctgggggcccagcgcagtgaggcggtgacactcaacttcacaggaagacgttcagccagggatccactcaggagccttcccagccctctaccccaagagttcacctacctcaactcacctaccccagggcagctacagcctatatatgaaaatgaaccaagagaacaatcagtggctgtgcatggcagacaacagcattcctcagagcagaaggctcagaaaccctggggacacatatggaggacaaggtttccttagacatctattccaggctgaggaaagcaaacattacagatgtggactatgaagatgctatgtaaggttatggaagattctgctctttgaaaaccatccatgaccccaagcctcaggcctgatatgttcttcagagatcctggggcattagctttccagtatacctcttctggatgccattctccatggcactattccttcatctactgtgaagtgaagttggcgcagccctgaagaaactacctaggagaactaatagacacaggagtgacagggactttgttatcagaaccagattcctgccggctcctttgaaaacaggtcatattgtgctcttctgtttacaagaggaaacaagatggaataaaagaaattgggatcttgggttggagggacagtgaagcttagagcacatgaactcaaggttagtgactctgcaggacttcacagagagagctgtgcccatcattcagtccaagtgctttctctgcccagacagcacagaactccagccccgctacttacatggatcatcgagtttccacctaaaatatgattctatttattttgagtcactgttaccaaattagaactaaaacaaagttacataaaaagttattgtgactccacttaattttagtgacgtatttttgtatatataggccaacctataccacatccaaaattatgtatctattacagcccctagaagctttataaatacagtgtgtcttcttttattcacaaaatttttgaaatcgtggtaatatggtttgaaacctgtatcttaattattttttttttaaattgagacagggtctcactctgtcactcaatctggaatgcagtggcacaatcttgcctcactgcaacgcctgcctctcaggctcaagcaaacctctcacctcagcctgctgagtagctgggactacaggcacatgccaccaaacttggccattttttgtcttacgtagagacaagatttcaccgttttgcccaggctggtctcaaactcctgggctcaagcaatgtattgaattttaaaataaccaggcactcactcttatgaattaataaacatttggaggtatataaagtaaaaagttaaagtctttcctgtaagttaacacaaatgttaactattgttaaaaactttacaggtagctctctagatatttttctatttttgtatgtatacttatgcatacatgtaagtatataaacatttagaagtgtacctatctaacaaactattatgaaatactttcaaatctgtaaatagatctattatactattttaaaagtctctatagtagtgtgttatatagataaatcataacttttttctttttttattgtagtaaatatgcacaacataaaattgatcattttaaccatttttaagtgtacaattcagtggcattaagtactatcataatatattttaatccttctcatcactggtggacattaaggagactctcaaaaaattcatattataaaaacaaagttcaaacaaatgtctttgtactagcatattatggcactcctgctggattatctgaaggataaatttgtaaatctagtattgctagattatgcatattaaatattcttgttaaatagtc

SEQ ID NO: 2911 - protein, 366 aa, Homo sapiens; identical to SEQ ID NO: 2905

SEQ ID NO: 2912 - DNA, 2921 bp, Homo sapiens
ctcgactctgaggtgcattctttttttgatgagaggcatctctaggtaccatccctgacctggtcctcatgctgccgaggctgttgctgttgatctgtgctccactctgtgaacctgccgagctgtttttgatagccagcccctcccatcccacagaggggagcccagtgaccctgacgtgtaagatgccctttctacagagttcagatgcccagttccagttctgctttttcagagacacccgggccttgggcccaggctggagcagctcccccaagctccagatcgctgccatgtggaaagaagacacagggtcatactggtgcgaggcacagacaatggcgtccaaagtcttgaggagcaggagatcccagataaatgtgcacagggtccctgtcgctgatgtgagcttggagactcagcccccaggaggacaggtgatggagggagacaggctggtcctcatctgctcagttgctatgggcacaggagacatcaccttcctttggtacaaaggggctgtaggtttaaaccttcagtcaaagacccagcgttcactgacagcagagtatgagattccttcagtgagggagagtgatgctgagcaatattactgtgtagctgaaaatggctatggtcccagccccagtgggctggtgagcatcactgtcagaatcccggtgtctcgcccaatcctcatgctcagggctcccagggcccaggctgcagtggaggatgtgctggagcttcactgtgaggccctgagaggctctcctccgatcctgtactggttttatcacgaggatatcaccctggggagcaggtcggccccctctggaggaggagcctccttcaacctttccctgactgaagaacattctggaaactactcctgtgaggccaacaatggcctgggggcccagcgcagtgaggcggtgacactcaacttcacagtgcctactggggccagaagcaatcatcttacctcaggagtcattgaggggctgctcagcacccttggtccagccaccgtggccttattattttgctacggcctcaaaagaaaaataggaagacgttcagccagggatccactcaggagccttcccagccctctaccccaagagttcacctacctcaactcacctaccccagggcagctacagcctatatatgaaaatgtgaatgttgtaagtggggatgaggtttattcactggcgtactataaccagccggagcaggaatcagtagcagcagaaaccctggggacacatatggaggacaaggtttccttagacatctattccaggctgaggaaagcaaacattacagatgtggactatgaagatgctatgtaaggttatggaagattctgctctttgaaaaccatccatgaccccaagcctcaggcctgatatgttcttcagagatcctggggcattagctttccagtatacctcttctggatgccattctccatggcactattccttcatctactgtgaagtgaagttggcgcagccctgaagaaactacctaggagaactaatagacacaggagtgacagggactttgttatcagaaccagattcctgccggctcctttgaaaacaggtcatattgtgctcttctgtttacaagaggaaacaagatggaataaaagaaattgggatcttgggttggagggacagtgaagcttagagcacatgaactcaaggttagtgactctgcaggacttcacagagagagctgtgcccatcattcagtccaagtgctttctctgcccagacagcacagaactccagccccgctacttacatggatcatcgagtttccacctaaaatatgattctatttattttgagtcactgttaccaaattagaactaaaacaaagttacataaaaagttattgtgactccacttaattttagtgacgtatttttgtatatataggccaacctataccacatccaaaattatgtatctattacagcccctagaagctttataaatacagtgtgtcttcttttattcacaaaatttttgaaatcgtggtaatatggtttgaaacctgtatcttaattattttttttttaaattgagacagggtctcactctgtcactcaatctggaatgcagtggcacaatcttgcctcactgcaacgcctgcctctcaggctcaagcaaacctctcacctcagcctgctgagtagctgggactacaggcacatgccaccaaacttggccattttttgtcttacgtagagacaagatttcaccgttttgcccaggctggtctcaaactcctgggctcaagcaatgtattgaattttaaaataaccaggcactcactcttatgaattaataaacatttggaggtatataaagtaaaaagttaaagtctttcctgtaagttaacacaaatgttaactattgttaaaaactttacaggtagctctctagatatttttctatttttgtatgtatacttatgcatacatgtaagtatataaacatttagaagtgtacctatctaacaaactattatgaaatactttcaaatctgtaaatagatctattatactattttaaaagtctctatagtagtgtgttatatagataaatcataacttttttctttttttattgtagtaaatatgcacaacataaaattgatcattttaaccatttttaagtgtacaattcagtggcattaagtactatcataatatattttaatccttctcatcactggtggacattaaggagactctcaaaaaattcatattataaaaacaaagttcaaacaaatgtctttgtactagcatattatggcactcctgctggattatctgaaggataaatttgtaaatctagtattgctagattatgcatattaaatattcttgttaaatagtc

SEQ ID NO: 2913 - protein, 429 aa, Homo sapiens; identical to SEQ ID NO: 124

SEQ ID NO: 2914 - DNA, 2406 bp, Homo sapiens
ttctttttttgatgagaggcatctctaggtaccatccctgacctggtcctcatgctgccgaggctgttgctgttgatctgtgctccactctgtgaacctgccgagctgtttttgatagccagcccctcccatcccacagaggggagcccagtgaccctgacgtgtaagatgccctttctacagagttcagatgcccagttccagttctgctttttcagagacacccgggccttgggcccaggctggagcagctcccccaagctccagatcgctgccatgtggaaagaagacacagggtcatactggtgcgaggcacagacaatggcgtccaaagtcttgaggagcaggagatcccagataaatgtgcacagggtccctgtcgctgatgtgagcttggagactcagcccccaggaggacagggctcccagggcccaggctgcagtggaggatgtgctggagcttcactgtgaggccctgagaggctctcctccgatcctgtactggttttatcacgaggatatcaccctggggagcaggtcggccccctctggaggaggagcctccttcaacctttccctgactgaagaacattctggaaactactcctgtgaggccaacaatggcctgggggcccagcgcagtgaggcggtgacactcaacttcacagtgcctactggggccagaagcaatcatcttacctcaggagtcattgaggggctgctcagcacccttggtccagccaccgtggccttattattttgctacggcctcaaaagaaaaataggaagacgttcagccagggatccactcaggagccttcccagccctctaccccaagagttcacctacctcaactcacctaccccagggcagctacagcctatatatgaaaatgtgaatgttgtaagtggggatgaggtttattcactggcgtactataaccagccggagcaggaatcagtagcagcagaaaccctggggacacatatggaggacaaggtttccttagacatctattccaggctgaggaaagcaaacattacagatgtggactatgaagatgctatgtaaggttatggaagattctgctctttgaaaaccatccatgaccccaagcctcaggcctgatatgttcttcagagatcctggggcattagctttccagtatacctcttctggatgccattctccatggcactattccttcatctactgtgaagtgaagttggcgcagccctgaagaaactacctaggagaactaatagacacaggagtgacagggactttgttatcagaaccagattcctgccggctcctttgaaaacaggtcatattgtgctcttctgtttacaagaggaaacaagatggaataaaagaaattgggatcttgggttggagggacagtgaagcttagagcacatgaactcaaggttagtgactctgcaggacttcacagagagagctgtgcccatcattcagtccaagtgctttctctgcccagacagcacagaactccagccccgctacttacatggatcatcgagtttccacctaaaatatgattctatttattttgagtcactgttaccaaattagaactaaaacaaagttacataaaaagttattgtgactccacttaattttagtgacgtatttttgtatatataggccaacctataccacatccaaaattatgtatctattacagcccctagaagctttataaatacagtgtgtcttcttttattcacaaaatttttgaaatcgtggtaatatggtttgaaacctgtatcttaattattttttttttaaattgagacagggtctcactctgtcactcaatctggaatgcagtggcacaatcttgcctcactgcaacgcctgcctctcaggctcaagcaaacctctcacctcagcctgctgagtagctgggactacaggcacatgccaccaaacttggccattttttgtcttacgtagagacaagatttcaccgttttgcccaggctggtctcaaactcctgggctcaagcaatgtattgaattttaaaataaccaggcactcactcttatgaattaataaacatttggaggtatataaagtaaaaagttaaagtctttcctgtaagttaacacaaatgttaactattgttaaaaactttacaggtagctctctagatatttttctatttttgtatgtatacttatgcatacatgtaagtatataaacatttagaagtgtacctatctaacaaactattatgaaatactttcaaatctgtaaatagatctattatactattttaaaagtctctatagtagtgtgttatatagataaatcataacttttttctttttttattgtagtaaatatgcacaacataaaattgatcattttaaccatt

SEQ ID NO: 2915 - protein, 139 aa, Homo sapiens
MLPRLLLLICAPLCEPAELFLIASPSHPTEGSPVTLTCKMPFLQSSDAQFQFCFFRDTRALGPGWSSSPKLQIAAMWKEDTGSYWCEAQTMASKVLRSRRSQINVHRVPVADVSLETQPPGGQGSQGPGCSGGCAGASL

SEQ ID NO: 2916 - DNA, 2592 bp, Homo sapiens
ctcgactctgaggtgcattctttttttgatgagaggcatctctaggtaccatccctgacctggtcctcatgctgccgaggctgttgctgttgatctgtgctccactctgtgaacctgccgagctgtttttgatagccagcccctcccatcccacagaggggagcccagtgaccctgacgtgtaagatgccctttctacagagttcagatgcccagttccagttctgctttttcagagacacccgggccttgggcccaggctggagcagctcccccaagctccagatcgctgccatgtggaaagaagacacagggtcatactggtgcgaggcacagacaatggcgtccaaagtcttgaggagcaggagatcccagataaatgtgcacagggtccctgtcgctgatgtgagcttggagactcagcccccaggaggacaggtgatggagggagacaggctggtcctcatctgctcagttgctatgggcacaggagacatcaccttcctttggtacaaaggggctgtaggtttaaaccttcagtcaaagacccagcgttcactgacagcagagtatgagattccttcagtgagggagagtgatgctgagcaatattactgtgtagctgaaaatggctatggtcccagccccagtgggctggtgagcatcactgtcagaatcccggtgtctcgcccaatcctcatgctcagggctcccagggcccaggctgcagtggaggatgtgctggagcttcactgtgaggccctgagaggctctcctccgatcctgtactggttttatcacgaggatatcaccctggggagcaggtcggccccctctggaggaggagcctccttcaacctttccctgactgaagaacattctggaaactactcctgtgaggccaacaatggcctgggggcccagcgcagtgaggcggtgacactcaacttcacagtgcctactggggccagaagcaatcatcttacctcaggagtcattgaggggctgctcagcacccttggtccagccaccgtggccttattattttgctacggcctcaaaagaaaaataggaagacgttcagccagggatccactcaggagccttcccagccctctaccccaagagttcacctacctcaactcacctaccccagggcagctacagcctatatatgaaaatgtgaatgttgtaagtggggatgaggtttattcactggcgtactataaccagccggagcaggaatcagtagcagcagaaaccctggggacacatatggaggacaaggtttccttagacatctattccaggctgaggaaagcaaacattacagatgtggactatgaagatgctatgtaaggttatggaagattctgctctttgaaaaccatccatgaccccaagcctcaggcctgatatgttcttcagagatcctggggcattagctttccagtatacctcttctggatgccattctccatggcactattccttcatctactgtgaagtgaagttggcgcagccctgaagaaactacctaggagaactaatagacacaggagtgacagggactttgttatcagaaccagattcctgccggctcctttgaaaacaggtcatattgtgctcttctgtttacaagaggaaacaagatggaataaaagaaattgggatcttgggttggagggacagtgaagcttagagcacatgaactcaaggttagtgactctgcaggacttcacagagagagctgtgcccatcattcagtccaagtgctttctctgcccagacagcacagaactccagccccgctacttacatggatcatcgagtttccacctaaaatatgattctatttattttgagtcactgttaccaaattagaactaaaacaaagttacataaaaagttattgtgactccacttaattttagtgacgtatttttgtatatataggccaacctataccacatccaaaattatgtatctattacagcccctagaagctttataaatacagtgtgtcttcttttattcacaaaatttttgaaatcgtggtaatatggtttgaaacctgtatcttaattattttttttttaaattgagacagggtctcactctgtcactcaatctggaatgcagtggcacaatcttgcctcactgcaacgcctgcctctcaggctcaagcaaacctctcacctcagcctgctgagtagctgggactacaggcacatgccaccaaacttggccattttttgtcttacgtagagacaagatttcaccgttttgcccaggctggtctcaaactcctgggctcaagcaatgtattgaattttaaaataaccaggcactcactcttatgaattaataaacatttggaggtatataaagtaaaaagttaaagtctttcctgtaagttaacacaaatgttaactattgttaaaaactttacaggtagctctctagatatttttctatttttgtatgtatacttatgcatacatgtaagtatataaacatttagaagtgtacctatctaacaaactattatgaaatactttcaaatctgtaaatagatctattatactatttt

SEQ ID NO: 2917 - protein, 429 aa, Homo sapiens; identical to SEQ ID NO: 124

SEQ ID NO: 2918 - DNA, 1134 bp, Homo sapiens
gaaccaagagaacaatcagtggctgtgcatggcagacaacagcattcctcagagcagaaggctgtgagcatcactgtgtgtacttaatggctgtccttgggtctggagctaccttgagtagagcccagagctaatgctaagcagaaaccctggggacacatatggaggacaaggtttccttagacatctattccaggctgaggaaagcaaacattacagatgtggactatgaagatgctatgtaaggttatggaagattctgctctttgaaaaccatccatgaccccaagcctcaggcctgatatgttcttcagagatcctggggcattagctttccagtatacctcttctggatgccattctccatggcactattccttcatctactgtgaagtgaagttggcgcagccctgaagaaactacctaggagaactaatagacacaggagtgacagggactttgttatcagaaccagattcctgccggctcctttgaaaacaggtcatattgtgctcttctgtttacaagaggaaacaagatggaataaaagaaattgggatcttgggttggagggacagtgaagcttagagcacatgaactcaaggttagtgactctgcaggacttcacagagagagctgtgcccatcattcagtccaagtgctttctctgcccagacagcacagaactccagccccgctacttacatggatcatcgagtttccacctaaaatatgattctatttattttgagtcactgttaccaaattagaactaaaacaaagttacataaaaagttattgtgactccacttaattttagtgacgtatttttgtatatataggccaacctataccacatccaaaattatgtatctattacagcccctagaagctttataaatacagtgtgtcttcttttattcacaaaatttttgaaatcgtggtaatatggtttgaaacctgtatcttaattattttttttttaaattgagacagggtctcactctgtcactcaatctggaatgcagtggcacaatcttgcctcactgcaacgcctgcctctcaggctcaagcaaacctctcacctcagcctgctgagtagctgggactacaggcacatgccaccaaacttgg

SEQ ID NO: 2919 - protein, 32 aa, Homo sapiens
MLSRNPGDTYGGQGFLRHLFQAEESKHYRCGL

SEQ ID NO: 2920 - DNA, 751 bp, Homo sapiens
ctctaggtaccatccctgacctggtcctcatgctgccgaggctgttgctgttgatctgtgctccactctgtgaacctgccggggtccctgtcgctgatgtgagcttggagactcagcccccaggaggacaggtgatggagggagacaggctggtcctcatctgctcagttgctatgggcacaggagacatcaccttcctttggtacaaaggggctgtaggtttaaaccttcagtcaaagacccagcgttcactgacagcagagtatgagattccttcagtgagggagagtgatgctgagcaatattactgtgtagctgaaaatggctatggtcccagccccagtgggctggtgagcatcactgtcagaatcccggtgtctcgcccaatcctcatgctcagggctcccagggcccaggctgcagtggaggatgtgctggagcttcactgtgaggccctgagaggctctcctccgatcctgtactggttttatcacgaggatatcaccctggggagcaggtcggccccctctggaggaggagcctccttcaacctttccctgactgaagaacattctggaaactactcctgtgaggccaacaatggcctgggggcccagcgcagtgaggcggtgacactcaacttcacagtgcctactggggccagaagcaatcatcttacctcaggagtcattgaggggctgctcagcacccttggtccagccaccgtggccttattattttgctacggcct

SEQ ID NO: 2921 - protein, 239 aa, Homo sapiens
MLPRLLLLICAPLCEPAGVPVADVSLETQPPGGQVMEGDRLVLICSVAMGTGDITFLWYKGAVGLNLQSKTQRSLTAEYEIPSVRESDAEQYYCVAENGYGPSPSGLVSITVRIPVSRPILMLRAPRAQAAVEDVLELHCEALRGSPPILYWFYHEDITLGSRSAPSGGGASFNLSLTEEHSGNYSCEANNGLGAQRSEAVTLNFTVPTGARSNHLTSGVIEGLLSTLGPATVALLFCY

SEQ ID NO: 2922 - DNA, 581 bp, Homo sapiens
tgatgagctgctgctgctcgactctgaggtgcattctttttttgatgagaggcatctctaggtaccatccctgacctggtcctcatgctgccgaggctgttgctgttgatctgtgctccactctgtgaacctgccgagctgtttttgatagccagcccctcccatcccacagaggggagcccagtgaccctgacgtgtaagatgccctttctacagagttcagatgcccagttccagttctgctttttcagagacacccgggccttgggcccaggctggagcagctcccccaagctccagatcgctgccatgtggaaagaagacacagggtcatactggtgcgaggcacagacaatggcgtccaaagtcttgaggagcaggagatcccagataaatgtgcacagtgagtgtcagtggggtcagtctgccaggataggctgagaagggcagtggcaagaggctaatcctcactgttatgggttctatctctgcaagagtaggagctgtttgaaagatattcctgagtttctctcattattaggatccttaagggatcttcccttattcactctgtttccatt

SEQ ID NO: 2923 - protein, 118 aa, Homo sapiens
MLPRLLLLICAPLCEPAELFLIASPSHPTEGSPVTLTCKMPFLQSSDAQFQFCFFRDTRALGPGWSSSPKLQIAAMWKEDTGSYWCEAQTMASKVLRSRRSQINVHSECQWGQSARIG

SEQ ID NO: 2924 - DNA, 968 bp, Homo sapiens
agacttcatagaaaaggaaatggagactggtcactagagggttcttcttccttctacttctgctgaagggtaacttccgatatcaacttcctcaaacctctgatgagctgctgctgctcgactctgaggtgcattctttttttgatgagaggcatctctaggtaccatccctgacctggtcctcatgctgccgaggctgttgctgttgatctgtgctccactctgtgaacctgccggtgagttgcacttccttttcttcttcaaggtctgtgggtattttgttacttaggtcagcacaggaggcctgcagattgctgtcttagcagccccttcctgcccaaaacatatcagggtgacagctgctgaggtgtacaaacatcagtggctcccttgggcctgggctgctctgtcttcacatcagtctctgcacctgacacgtgtctgctcagtggggtgaacaggtcttgctctgaccttctcaagaacacagtcttacttccgggaagtcccagcacagggagggagacactgtttgcacaaggaaggcaaagggtgctgaagattcatgctagaagcatctctgtcctcccagcctcaggagctccaattcccagttgtgcttctcagctgggtgtgtcaccatgggtgatgaaggaaatgccaaaatcacacatccacggagaacattagagagaatcctccagacatgtgtggaatgaagtagtactgctgcctccttcctatttttagctctcctctgcagccacacctgttaccccagctcattttctctttcggactctggtttatgcaaacttacttcattgcactggtcctgattcaaagtcttacctttaccaaagaaggagagtaagcaatccctttccccacgaaggactcttcactagatcaagctcaatgataaaatgtaaaaattgctatcttgtgcagaaaatactagccacaga

SEQ ID NO: 2925 - protein, 34 aa, Homo sapiens
MLPRLLLLICAPLCEPAGELHFLFFFKVCGYFVT

SEQ ID NO: 2926 - DNA, 1732 bp, Homo sapiens
atctgataatgctttgcctgcactcaggacctgtctttgtccctcctcttaacatacttgcagctaaaactaaatattgctgcttggggacctccttctagccttaaatttcagctcatcaccttcacctgccttggtcatggctctgctattctccttgatccttgccatttgcaccagacctggattcctagcgtctccatctggagtgcggctggtggggggcctccaccgctgtgaagggcgggtggaggtggaacagaaaggccagtggggcaccgtgtgtgatgacggctgggacattaaggacgtggctgtgttgtgccgggagctgggctgtggagctgccagcggaacccctagtggtattttgtatgagccaccagcagaaaaagagcaaaaggtcctcatccaatcagtcagttgcacaggaacagaagatacattggctcagtgtgagcaagaagaagtttatgattgttcacatgatgaagatgctggggcatcgtgtgagaacccagagagctctttctccccagtcccagagggtgtcaggctggctgacggccctgggcattgcaagggacgcgtggaagtgaagcaccagaaccagtggtataccgtgtgccagacaggctggagcctccgggccgcaaaggtggtgtgccggcagctgggatgtgggagggctgtactgactcaaaaacgctgcaacaagcatgcctatggccgaaaacccatctggctgagccagatgtcatgctcaggacgagaagcaacccttcaggattgcccttctgggccttgggggaagaacacctgcaaccatgatgaagacacgtgggtcgaatgtgaagatccctttgacttgagactagtaggaggagacaacctctgctctgggcgactggaggtgctgcacaagggcgtatggggctctgtctgtgatgacaactggggagaaaaggaggaccaggtggtatgcaagcaactgggctgtgggaagtccctctctccctccttcagagaccggaaatgctatggccctggggttggccgcatctggctggataatgttcgttgctcaggggaggagcagtccctggagcagtgccagcacagattttgggggtttcacgactgcacccaccaggaagatgtggctgtcatctgctcagtgtaggtgggcatcatctaatctgttgagtgcctgaatagaagaaaaacacagaagaagggagcatttactgtctacatgactgcatgggatgaacactgatcttcttctgcccttggactgggacttatacttggtgcccctgattctcaggccttcagagttggatcagaacttacaacatcaggtctagttctcaggccatcagacatagtttggaactacatcaccacctttcctatgtctccacattgcacacagcagattcccagcctccataattgtgtgtatcaactacttaaatacattataacacacacacacacacacacacacacacacacacacacacacacatacaccatttgtcctgtttctctgaagaactctgacaaaatacagattttggtactgaaagagattctagaggaacggaattttaaggataaattttctgaattggttatggggtttctgaaattggctctataatctaattagatataaaattctggtaactttatttacaataataaagatagcactatgtgttca

SEQ ID NO: 2927 - protein, 347 aa, Homo sapiens
MALLFSLILAICTRPGFLASPSGVRLVGGLHRCEGRVEVEQKGQWGTVCDDGWDIKDVAVLCRELGCGAASGTPSGILYEPPAEKEQKVLIQSVSCTGTEDTLAQCEQEEVYDCSHDEDAGASCENPESSFSPVPEGVRLADGPGHCKGRVEVKHQNQWYTVCQTGWSLRAAKVVCRQLGCGRAVLTQKRCNKHAYGRKPIWLSQMSCSGREATLQDCPSGPWGKNTCNHDEDTWVECEDPFDLRLVGGDNLCSGRLEVLHKGVWGSVCDDNWGEKEDQVVCKQLGCGKSLSPSFRDRKCYGPGVGRIWLDNVRCSGEEQSLEQCQHRFWGFHDCTHQEDVAVICSV

SEQ ID NO: 2928 - DNA, 2231 bp, Homo sapiens
atctgataatgctttgcctgcactcaggacctgtctttgtccctcctcttaacatacttgcagctaaaactaaatattgctgcttggggacctccttctagccttaaatttcagctcatcaccttcacctgccttggtcatggctctgctattctccttgatccttgccatttgcaccagacctggattcctagcgtctccatctggagtgcggctggtggggggcctccaccgctgtgaagggcgggtggaggtggaacagaaaggccagtggggcaccgtgtgtgatgacggctgggacattaaggacgtggctgtgttgtgccgggagctgggctgtggagctgccagcggaacccctagtggtattttgtatgagccaccagcagaaaaagagcaaaaggtcctcatccaatcagtcagttgcacaggaacagaagatacattggctcagtgtgagcaagaagaagtttatgattgttcacatgatgaagatgctggggcatcgtgtgagaacccagagagctctttctccccagtcccagagggtgtcaggctggctgacggccctgggcattgcaagggacgcgtggaagtgaagcaccagaaccagtggtataccgtgtgccagacaggctggagcctccgggccgcaaaggtggtgtgccggcagctgggatgtgggagggctgtactgactcaaaaacgctgcaacaagcatgcctatggccgaaaacccatctggctgagccagatgtcatgctcaggacgagaagcaacccttcaggattgcccttctgggccttgggggaagaacacctgcaaccatgatgaagacacgtgggtcgaatgtgaagatccctttgacttgagactagtaggaggagacaacctctgctctgggcgactggaggtgctgcacaagggcgtatggggctctgtctgtgatgacaactggggagaaaaggaggaccaggtggtatgcaagcaactgggctgtgggaagtccctctctccctccttcagagaccggaaatgctatggccctggggttggccgcatctggctggataatgttcgttgctcaggggaggagcagtccctggagcagtgccagcacagattttgggggtttcacgactgcacccaccaggaagatgtggctgtcatctgctcaggatagtatcctggtgttgcttgacctggcccccctggccccgcctgccctctgcttgttctcctgagccctgattatcctcatactcattctggggctcaggcttgagccactactccctcatcccctcaggagtctgaacactgggcttatgccttactctcagggacaagcagcccccattgctgcctgtagatgtgagctgttgagttccctcttgctggggaagatgagcttccatgtatcctgtgctcaaccctgaccctttgacactggttctggcctttcctgccttttctcaagctgcctggaatcctcaaacctgtcactttggtcagatgtgcagaccattactaaggtctatgtctgcaaacattactaatctaggtcctattactaatctatgtctgcaaacattaaaggaatgaaacaatgaaaggaacatttgaaagaaaatgtgggtagacaatttcttgcaacttgggggaaagtttagaattcttttgattggactactttttttttttttcctcaagcttcaggtgaccacaatagcaacacctccctattctgttatttcttagtgtaggtagacaattctttcaggagcagagcagcgtcctataatcctagaccttttcatgacgtgtaaaaaatgatgtttcatcctctgattgccccaataaaaatctttgttgtccatccctatacaacctgccaacatggttgacatttaatgagaggaatgtcaaaaatacattttactttattcaaagaaaaatatattggttactgggaaaaggtcaagaaagaggcagaaagagatcagggagggctaaagttgtgtcttatgccaagcgaaagtgaaaaatatcattttcactttatcaactgagactttggggcctgtaagcttgaggcaagacagaaataagagaatcaagacttgattgtaaaaattgacaactttagattctgaggctaggctgagtacttattatacggctacatttacacatttacacttatctaataaatcagatttcacagtctc

SEQ ID NO: 2929 - protein, 347 aa, Homo sapiens; identical to SEQ ID NO: 126

SEQ ID NO: 2930 - DNA, 1888 bp, Homo sapiens
atctgataatgctttgcctgcactcaggacctgtctttgtccctcctcttaacatacttgcagctaaaactaaatattgctgcttggggacctccttctagccttaaatttcagctcatcaccttcacctgccttggtcatggctctgctattctccttgatccttgccatttgcaccagacctggattcctagcgtctccatctggagtgcggctggtggggggcctccaccgctgtgaagggcgggtggaggtggaacagaaaggccagtggggcaccgtgtgtgatgacggctgggacattaaggacgtggctgtgttgtgccgggagctgggctgtggagctgccagcggaacccctagtggtattttgtatgagccaccagcagaaaaagagcaaaaggtcctcatccaatcagtcagttgcacaggaacagaagatacattggctcagtgtgagcaagaagaagtttatgattgttcacatgatgaagatgctggggcatcgtgtgagaacccagagagctctttctccccagtcccagagggtgtcaggctggctgacggccctgggcattgcaagggacgcgtggaagtgaagcaccagaaccagtggtataccgtgtgccagacaggctggagcctccgggccgcaaaggtggtgtgccggcagctgggatgtgggagggctgtactgactcaaaaacgctgcaacaagcatgcctatggccgaaaacccatctggctgagccagatgtcatgctcaggacgagaagcaacccttcaggattgcccttctgggccttgggggaagaacacctgcaaccatgatgaagacacgtgggtcgaatgtgaagatccctttgacttgagactagtaggaggagacaacctctgctctgggcgactggaggtgctgcacaagggcgtatggggctctgtctgtgatgacaactggggagaaaaggaggaccaggtggtatgcaagcaactgggctgtgggaagtccctctctccctccttcagagaccggaaatgctatggccctggggttggccgcatctggctggataatgttcgttgctcaggggaggagcagtccctggagcagtgccagcacagattttgggggtttcacgactgcacccaccaggaagatgtggctgtcatctgctcaggatagtatcctggtgttgcttgacctggcccccctggccccgcctgccctctgcttgttctcctgagccctgattatcctcatactcattctggggctcaggcttgagccactactccctcatcccctcaggagtctgaacactgggcttatgccttactctcagggacaagcagcccccattgctgcctgtagatgtgagctgttgagttccctcttgctggggaagatgagcttccatgtatcctgtgctcaaccctgaccctttgacactggttctggcctttcctgccttttctcaagctgcctggaatcctcaaacctgtcactttggtcagatgtgcagaccattactaaggtctatgtctgcaaacattactaatctaggtcctattactaatctatgtctgcaaacattaaaggaatgaaacaatgaaaggaacatttgaaagaaaatgtgggtagacaatttcttgcaacttgggggaaagtttagaattcttttgattggactactttttttttttttcctcaagcttcaggtgaccacaatagcaacacctccctattctgttatttcttagtgtaggtagacaattctttcaggagcagagcagcgtcctataatcctagaccttttcatgacgtgtaaaaaatgatgtttcatcctctgattgccccaataaaaatctttgttgtccatccctatac

SEQ ID NO: 2931 - protein, 347 aa, Homo sapiens; identical to SEQ ID NO: 126

SEQ ID NO: 2932 - DNA, 1133 bp, Homo sapiens
aaactaaatattgctgcttggggacctccttctagccttaaatttcagctcatcaccttcacctgccttggtcatggctctgctattctccttgatccttgccatttgcaccagacctggattcctagcgtctccatctggagtgcggctggtggggggcctccaccgctgtgaagggcgggtggaggtggaacagaaaggccagtggggcaccgtgtgtgatgacggctgggacattaaggacgtggctgtgttgtgccgggagctgggctgtggagctgccagcggaacccctagtggtattttgtatgagccaccagcagaaaaagagcaaaaggtcctcatccaatcagtcagttgcacaggaacagaagatacattggctcagtgtgagcaagaagaagtttatgattgttcacatgatgaagatgctggggcatcgtgtgagacaggcatctatgaggcagtgttaagcactttagcatgccttgtactgaacaccaagaactgtgagatgtgtccattgggccgcctttactgagaagaccatgttctggcagagaacagacacgctctctttctttcccctcagacccagagagctctttctccccagtcccagagggtgtcaggctggctgacggccctgggcattgcaagggacgcgtggaagtgaagcaccagaaccagtggtataccgtgtgccagacaggctggagcctccgggccgcaaaggtggtgtgccggcagctgggatgtgggagggctgtactgactcaaaaacgctgcaacaagcatgcctatggccgaaaacccatctggctgagccagatgtcatgctcaggacgagaagcaacccttcaggattgcccttctgggccttgggggaagaacacctgcaaccatgatgaagacacgtgggtcgaatgtgaaggtaatgcctgtgcgtccaaagactaggtttattcatggatttaattatgtggaatctcattcaaacagtatttacaaagagctactaacgcaccaaaggaccattgcaaacttatttaactgggcagataattaattcctttgtttttcaaatggagataataatacccaactttgtatctgaaaatgcttttaatatt

SEQ ID NO: 2933 - protein, 155 aa, Homo sapiens
MALLFSLILAICTRPGFLASPSGVRLVGGLHRCEGRVEVEQKGQWGTVCDDGWDIKDVAVLCRELGCGAASGTPSGILYEPPAEKEQKVLIQSVSCTGTEDTLAQCEQEEVYDCSHDEDAGASCETGIYEAVLSTLACLVLNTKNCEMCPLGRLY

SEQ ID NO: 2934 - DNA, 645 bp, Homo sapiens
gatcatctgataatgctttgcctgcactcaggacctgtctttgtccctcctcttaacatacttgcagctaaaactaaatattgctgcttggggacctccttctagccttaaatttcagctcatcaccttcacctgccttggtcatggctctgctattctccttgatccttgccatttgcaccagacctggattcctagcgtctccatctggagtgcggctggtggggggcctccaccgctgtgaagggcgggtggaggtggaacagaaaggccagtggggcaccgtgtgtgatgacggctgggacattaaggacgtggctgtgttgtgccgggagctgggctgtggagctgccagcggaacccctagtggtattttgtatgagccaccagcagaaaaagagcaaaaggtcctcatccaatcagtcagttgcacaggaacagaagatacattggctcagtgtgagcaagaagaagtttatgattgttcacatgatgaagatgctggggcatcgtgtgagagtgagtatggcaggggtcccggaccacttgccagctgccatacccctcacggccactcttgttggtcttcattccctaccatagacgttcacacaatggctaattggcccctcaccccccacatct

SEQ ID NO: 2935 - protein, 166 aa, Homo sapiens
MALLFSLILAICTRPGFLASPSGVRLVGGLHRCEGRVEVEQKGQWGTVCDDGWDIKDVAVLCRELGCGAASGTPSGILYEPPAEKEQKVLIQSVSCTGTEDTLAQCEQEEVYDCSHDEDAGASCESEYGRGPGPLASCHTPHGHSCWSSFPTIDVHTMANWPLTPH

SEQ ID NO: 2936 - DNA, 1624 bp, Homo sapiens
aaactccagcgggtcctgggccagcgtgatgaatgcacgtgtcacaggcgggaggaaaaaggacaactgggctcagaaaaaggggctgccacgccccggcccctgcaagggctcagccccaggaggcagggcagcattgttagttgccaaggagcggagtagggctgtccctcgggtcgccgcgcgccctggcaccccggctcccctgcgcgccctcgcggagcagtaacgcgctttgctttctgtgttgcagttcagcaggagcgcagacgcccccgcgtaccagcagggccagaaccagctctataacgagctcaatctaggacgaagagaggagtacgatgttttggacaagagacgtggccgggaccctgagatggggggaaagccgagaaggaagaaccctcaggaaggcctgtacaatgaactgcagaaagataagatggcggaggcctacagtgagattgggatgaaaggcgagcgccggaggggcaaggggcacgatggcctttaccagggtctcagtacagccaccaaggacacctacgacgcccttcacatgcaggccctgccccctcgctaacagccaggggatttcaccactcaaaggccagacctgcagacgcccagattatgagacacaggatgaagcatttacaacccggttcactcttctcagccactgaagtattcccctttatgtacaggatgctttggttatatttagctccaaaccttcacacacagactgttgtccctgcactctttaagggagtgtactcccagggcttacggccctggccttgggccctctggtttgccggtggtgcaggtagacctgtctcctggcggttcctcgttctccctgggaggcgggcgcactgcctctcacagctgagttgttgagtctgttttgtaaagtccccagagaaagcgcagatgctagcacatgccctaatgtctgtatcactctgtgtctgagtggcttcactcctgctgtaaatttggcttctgttgtcaccttcacctcctttcaaggtaactgtactgggccatgttgtgcctccctggtgagagggccgggcagaggggcagatggaaaggagcctaggccaggtgcaaccagggagctgcaggggcatgggaaggtgggcgggcaggggagggtcagccagggcctgcgagggcagcgggagcctccctgcctcaggcctctgtgccgcaccattgaactgtaccatgtgctacaggggccagaagatgaacagactgaccttgatgagctgtgcacaaagtggcataaaaaacatgtggttacacagtgtgaataaagtgctgcggagcaagaggaggccgttgattcacttcacgctttcagcgaatgacaaaatcatctttgtgaaggcctcgcaggaagacccaacacatgggacctataactgcccagcggacagtggcaggacaggaaaaacccgtcaatgtactaggatactgctgcgtcattacagggcacaggccatggatggaaaacgctctctactctgctttttttctactgttttaatttatactggcatgctaaagccttcctattttgcataataaatgcttcagtgaaaatgca

SEQ ID NO: 2937 - protein, 68 aa, Homo sapiens
MGGKPRRKNPQEGLYNELQKDKMAEAYSEIGMKGERRRGKGHDGLYQGLSTATKDTYDALHMQALPPR

SEQ ID NO: 2938 - DNA, 2976 bp, Homo sapiens
ctccacttcctggggaggtagctgcagaataaaaccagcagagactccttttctcctaaccgtcccggccaccgctgcctcagcctctgcctcccagcctctttctgagggaaaggacaagatgaagtggaaggcgcttttcaccgcggccatcctgcaggcacagttgccgattacagaggcacagagctttggcctgctggatcccaaactctgctacctgctggatggaatcctcttcatctatggtgtcattctcactgccttgttcctgagagtgaagttcagcaggagcgcagacgcccccgcgtaccagcagggccagaaccagctctataacgagctcaatctaggacgaagagaggagtacgatgttttggacaagagacgtggccgggaccctgagatggggggaaagccgagaaggaagaaccctcaggaaggcctgtacaatgtgagtagaggagacctcacatttgaccttggaaagttggaggaagggctggaggagggctccagaggaagggctggaggaagggctggaggagggctccagaggaagggctggaggaagggctggaggagggctccggaggaagggctggaggaagggctggaggagggctccggaggaagggctggaggaagggctggaggagggctccggaggaagggctggaggaagggctggaggagggctccggaggaagggctggaggaagggctggaggagggctccggaggaagggctggaggtagggctggaggagggctccggaggaagggctggaggaagggctggaggagggctccggaggaagggctggaggaagggctggaggagggctccggaggaagggctggaggaagggctggaggagggctccggaggaagggctggaggagggctccggaggaagggctggaggaagggctggaggagggctccagaggaaggcggttgctcctcactctgtggtctttgtctgtccagaccttcccttcttggatcgagtaatgtctcacctgcttgcggcctgcagcagcacctgcttctagaaagtctccttagctgaaaagtgccgagtaatctcccttccctccccaaaccctgctgctggagttcccaggttgatcagcctggggtgtagggggacacagcaaggtcaagctaggcaaggacgaggtggctggccccttcgaggggctcctgtcctgggtgctgaagtcttctgagtgtacccccctataggaaggtcaacctcaccctcctgggtgtgaccctgaaccctgattgtcgatctgggttgccatgcaggagacccttgcaggtggcagccttctgtgaaggagatgcctccccgcccctcctgtggggagggagggttgatctacagcccgtttggctgtgtaaagagacaacttgctcagataaatgattctggggctccaggtgagcccttgttttgcccagtctccgtgtctttgtctagaactccacctcctatctttttgagcctaacttgagcccctcagctcagtgcaaagagctggcagctcggaggagactccaaagggctgaggatgaggggggtgggctggagctggttgtgggcagagaagtttgtgtgcataaggtttggagccttgattgtgggagccctccctgtctgccactgctgccaacttggggatcaagaagcttcctgttgtaggggaacctgctgctttctgcattagttggtaaaaatcagtgttccacgccctcttctgcaggaactgcagaaagataagatggcggaggcctacagtgagattgggatgaaaggcgagcgccggaggggcaaggggcacgatggcctttaccagggtctcagtacagccaccaaggacacctacgacgcccttcacatgcaggccctgccccctcgctaacagccaggggatttcaccactcaaaggccagacctgcagacgcccagattatgagacacaggatgaagcatttacaacccggttcactcttctcagccactgaagtattcccctttatgtacaggatgctttggttatatttagctccaaaccttcacacacagactgttgtccctgcactctttaagggagtgtactcccagggcttacggccctggccttgggccctctggtttgccggtggtgcaggtagacctgtctcctggcggttcctcgttctccctgggaggcgggcgcactgcctctcacagctgagttgttgagtctgttttgtaaagtccccagagaaagcgcagatgctagcacatgccctaatgtctgtatcactctgtgtctgagtggcttcactcctgctgtaaatttggcttctgttgtcaccttcacctcctttcaaggtaactgtactgggccatgttgtgcctccctggtgagagggccgggcagaggggcagatggaaaggagcctaggccaggtgcaaccagggagctgcaggggcatgggaaggtgggcgggcaggggagggtcagccagggcctgcgagggcagcgggagcctccctgcctcaggcctctgtgccgcaccattgaactgtaccatgtgctacaggggccagaagatgaacagactgaccttgatgagctgtgcacaaagtggcataaaaaacatgtggttacacagtgtgaataaagtgctgcggagcaagaggaggccgttgattcacttcacgctttcagcgaatgacaaaatcatctttgtgaaggcctcgcaggaagacccaacacatgggacctataactgcccagcggacagtggcaggacaggaaaaacccgtcaatgtactaggatactgctgcgtcattacagggcacaggccatggatggaaaacgctctctactctgctttttttctactgttttaatttatactggcatgctaaagccttcctattttgcataataaatgcttcagtgaaaatgca

SEQ ID NO: 2939 - protein, 298 aa, Homo sapiens
MKWKALFTAAILQAQLPITEAQSFGLLDPKLCYLLDGILFIYGVILTALFLRVKFSRSADAPAYQQGQNQLYNELNLGRREEYDVLDKRRGRDPEMGGKPRRKNPQEGLYNVSRGDLTFDLGKLEEGLEEGSRGRAGGRAGGGLQRKGWRKGWRRAPEEGLEEGLEEGSGGRAGGRAGGGLRRKGWRKGWRRAPEEGLEEGLEEGSGGRAGGRAGGGLRRKGWRKGWRRAPEEGLEEGLEEGSGGRAGGRAGGGLRRKGWRRAPEEGLEEGLEEGSRGRRLLLTLWSLSVQTFPSWIE

SEQ ID NO: 2940 - DNA, 1708 bp, Homo sapiens
gagtgcgaatttcttggccctgtcggcaggtgctttctcaaaggccccacagtcctccacttcctggggaggtagctgcagaataaaaccagcagagactccttttctcctaaccgtcccggccaccgctgcctcagcctctgcctcccagcctctttctgagggaaaggacaagatgaagtggaaggcgcttttcaccgcggccatcctgcaggcacagttgccgattacagaggcacagagctttggcctgctggatcccaaactctgctacctgctggatggaatcctcttcatctatggtgtcattctcactgccttgttcctgagagtgaagttcagcaggagcgcagacgcccccgcgtaccagcagggccagaaccagctctataacgagctcaatctaggacgaagagaggagtacgatgttttggacaagagacgtggccgggaccctgagatggggggaaagccgagaaggaagaaccctcaggaaggcctgtacaatgaactgcagaaagataagatggcggaggcctacagtgagattgggatgaaaggcgagcgccggaggggcaaggggcacgatggcctttaccagggtctcagtacagccaccaaggacacctacgacgcccttcacatgcaggccctgccccctcgctaacagccaggggatttcaccactcaaaggccagacctgcagacgcccagattatgagacacaggatgaagcatttacaacccggttcactcttctcagccactgaagtattcccctttatgtacaggatgctttggttatatttagctccaaaccttcacacacagactgttgtccctgcactctttaagggagtgtactcccagggcttacggccctggccttgggccctctggtttgccggtggtgcaggtagacctgtctcctggcggttcctcgttctccctgggaggcgggcgcactgcctctcacagctgagttgttgagtctgttttgtaaagtccccagagaaagcgcagatgctagcacatgccctaatgtctgtatcactctgtgtctgagtggcttcactcctgctgtaaatttggcttctgttgtcaccttcacctcctttcaaggtaactgtactgggccatgttgtgcctccctggtgagagggccgggcagaggggcagatggaaaggagcctaggccaggtgcaaccagggagctgcaggggcatgggaaggtgggcgggcaggggagggtcagccagggcctgcgagggcagcgggagcctccctgcctcaggcctctgtgccgcaccattgaactgtaccatgtgctacaggggccagaagatgaacagactgaccttgatgagctgtgcacaaagtggcataaaaaacatgtggttacacagtgtgaataaagtgctgcggagcaagaggaggccgttgattcacttcacgctttcagcgaatgacaaaatcatctttgtgaaggcctcgcaggaagacccaacacatgggacctataactgcccagcggacagtggcaggacaggaaaaacccgtcaatgtactaggatactgctgcgtcattacagggcacaggccatggatggaaaacgctctctactctgctttttttctactgttttaatttatactggcatgctaaagccttcctattttgcataataaatgcttcagtgaaaatgca

SEQ ID NO: 2941 - protein, 163 aa, Homo sapiens; identical to SEQ ID NO: 130

SEQ ID NO: 2942 - DNA, 2371 bp, Homo sapiens
ctccacttcctggggaggtagctgcagaataaaaccagcagagactccttttctcctaaccgtcccggccaccgctgcctcagcctctgcctcccagcctctttctgagggaaaggacaagatgaagtggaaggcgcttttcaccgcggccatcctgcaggcacagttgccgattacagaggcacagagctttggcctgctggatcccaaactctgctacctgctggatggaatcctcttcatctatggtgtcattctcactgccttgttcctgagagtgaagttcagcaggagcgcagacgcccccgcgtaccagcagggccagaaccagctctataacgagctcaatctaggacgaagagaggagtacgatgttttggacaagagacgtggccgggaccctgagatggggggaaagccgagaaggaagaaccctcaggaaggcctgtacaatgaactgcagaaagataagatggcggaggcctacagtgagattgggatgaaaggcgaggtgagtgttgctgtttcttaatttccgagggagttcctcttggtcctccagacacgcctgctgcaggcctcctttcccatccacttctcatcccagctgcaaatgcccatgtggtggccatcagaggtgaaggcgaacctggctgtcacccagccgggcagaacataagaaactaaggaagggctgatgctctttcagtacagaaaaccacatctagattctatgacagcctaagctttgcaaaagcaggtccgttttaataacaggaagcatcgagtgcttaatatgtgctgccgtgttcagtgctcaggaccacaggtcccaggacaacatgaaaacaattcatcaacaattaagaattgttcatcaacaattaattgttcatcaacaattaagaatttcaaaatggtgagagtgaagcattgaccccttccaagcaggggttctctgtagttttatttaattcccacaacaacccaatgagaaacatgtgccctgcaaggcacaaggaggttgagtgacttacccaaggtcttctagctggtaaacgggcacgtgattgaactgactatgccagagctcgtaactgctcaaaacagctggttgtcagtgagcaaaaatgactagccaagaactttaagagctgaagggaagcccatttatctaagcagtaggcaatataggtcctgcgggccctagaccttaggaatctgatgtctgtgaggatctgagtggggtggagcaaacccaagccccatcatggccaggcctcaccttactctgcagagatgaaggtctgaccaggggcctgaggatccttctctcccaggggcaggggtgctgctgggagacagttacctctgacttcctgggtaccttgggaggggcccttgagcagaaatgccactactgactgcctgactttctaatccttttctcatttcactcccaaacaaccagcgccggaggggcaaggggcacgatggcctttaccaggtaggagctgccggcgtcccttcagtggaaggggcaccacctgacaaggggcaagatcaaggcccccacattttgcctgctggtggcaccagctcttgccaacagctgggcagggcaagcccaaggcacccatttaggccagtggcaacgccactgccaataagtccctggagcacagctgggacttggccattcaagcgaattacttggctccaaccatgccttgcttggccatggcagacagagcagcagctgtccagagggtacgcagcctccccgccgatgcagatggaggcaaaggaccacacaagtgattatcctgcctctttgggttcttgtagaaccctcactctgcatcatttccttaggcctagtaagatgagaggttggctgggaagactgaaggaaaaaaagctaagaaaaatggcagcttcagaaagaaaatgttatgtagttaggtgcctggtttttgcaaatcagtgcaggcaattatgcaaactaagcacggtcaaactacttctctaaaacatgatccccagcgggttgtcatttccctccttctggctcccatgggctgttcatagctcgttcttctgactctagtgtcaggatgcccagcttgcctgagttgagtgatatcaaaagggccccagaaacttacctgtgtgtggctgctgttgatccttctccttcctggcccctggaccagggggacaggcattccagcaggtttggggccagccttgtgggcctgttcgtgaccaagaaaacactagaatcaccgggcctgggaagggaaggaggctcacagagggctgaggccaaggagcccctcttctccctgtgacaagtccaggcttcctt

SEQ ID NO: 2943 - protein, 136 aa, Homo sapiens
MKWKALFTAAILQAQLPITEAQSFGLLDPKLCYLLDGILFIYGVILTALFLRVKFSRSADAPAYQQGQNQLYNELNLGRREEYDVLDKRRGRDPEMGGKPRRKNPQEGLYNELQKDKMAEAYSEIGMKGEVSVAVS

SEQ ID NO: 2944 - DNA, 1465 bp, Homo sapiens
gagtgcgaatttcttggccctgtcggcaggtgctttctcaaaggccccacagtcctccacttcctggggaggtagctgcagaataaaaccagcagagactccttttctcctaaccgtcccggccaccgctgcctcagcctctgcctcccagcctctttctgagggaaaggacaagatgaagtggaaggcgcttttcaccgcggccatcctgcaggcacagttgccgattacagaggcacagagctttggcctgctggatcccaaactctgctacctgctggatggaatcctcttcatctatggtgtcattctcactgccttgttcctgagagtgaagttcagcaggagcgcagacgcccccgcgtaccagcagggccagaaccagctctataacgagctcaatctaggacgaagagaggagtacgatgttttggacaagagacgtggccgggaccctgagatggggggaaagccgagaaggaagaaccctcaggaaggcctgtacaatgaactgcagaaagataagatggcggaggcctacagtgagattgggatgaaaggcgagcgccggaggggcaaggggcacgatggcctttaccaggtaggagctgccggcgtcccttcagtggaaggggcaccacctgacaaggggcaagatcaaggcccccacattttgcctgctggtggcaccagctcttgccaacagctgggcagggcaagcccaaggcacccatttaggccagtggcaacgccactgccaataagtccctggagcacagctgggacttggccattcaagcgaattacttggctccaaccatgccttgcttggccatggcagacagagcagcagctgtccagagggtacgcagcctccccgccgatgcagatggaggcaaaggaccacacaagtgattatcctgcctctttgggttcttgtagaaccctcactctgcatcatttccttaggcctagtaagatgagaggttggctgggaagactgaaggaaaaaaagctaagaaaaatggcagcttcagaaagaaaatgttatgtagttaggtgcctggtttttgcaaatcagtgcaggcaattatgcaaactaagcacggtcaaactacttctctaaaacatgatccccagcgggttgtcatttccctccttctggctcccatgggctgttcatagctcgttcttctgactctagtgtcaggatgcccagcttgcctgagttgagtgatatcaaaagggccccagaaacttacctgtgtgtggctgctgttgatccttctccttcctggcccctggaccagggggacaggcattccagcaggtttggggccagccttgtgggcctgttcgtgaccaagaaaacactagaatcaccgggcctgggaagggaaggaggctcacagagggctgaggccaaggagcccctcttctccctgtgacaagtccaggcttcctt

SEQ ID NO: 2945 - protein, 316 aa, Homo sapiens
MKWKALFTAAILQAQLPITEAQSFGLLDPKLCYLLDGILFIYGVILTALFLRVKFSRSADAPAYQQGQNQLYNELNLGRREEYDVLDKRRGRDPEMGGKPRRKNPQEGLYNELQKDKMAEAYSEIGMKGERRRGKGHDGLYQVGAAGVPSVEGAPPDKGQDQGPHILPAGGTSSCQQLGRASPRHPFRPVATPLPISPWSTAGTWPFKRITWLQPCLAWPWQTEQQLSRGYAASPPMQMEAKDHTSDYPASLGSCRTLTLHHFLRPSKMRGWLGRLKEKKLRKMAASERKCYVVRCLVFANQCRQLCKLSTVKLLL

SEQ ID NO: 2946 - DNA, 543 bp, Homo sapiens
aaccgtcccggccaccgctgcctcagcctctgcctcccagcctctttctgagggaaaggacaagatgaagtggaaggcgcttttcaccgcggccatcctgcaggcacagttgccgattacaggccggcctctcagccctcaatgaaagaaagctaattgtagagtcaagaatatgacctgctataatggttcgatcctgggagaagggactccacagcctggtgaggacccctctcaccacctctgaggatcagcaagtctttgaagaggcacagagctttggcctgctggatcccaaactctgctacctgctggatggaatcctcttcatctatggtgtcattctcactgccttgttcctgagagtgaagttcagcaggagcgcagacgcccccgcgtaccagcagggccagaaccagctctataacgagctcaatctaggacgaagagaggagtacgatgttttggacaagagacgtggccgggaccctgagatggggggaaagccgagaaggaagaaccctcaggaaggcctgtacaatg

SEQ ID NO: 2947 - protein, 118 aa, Homo sapiens
MVRSWEKGLHSLVRTPLTTSEDQQVFEEAQSFGLLDPKLCYLLDGILFIYGVILTALFLRVKFSRSADAPAYQQGQNQLYNELNLGRREEYDVLDKRRGRDPEMGGKPRRKNPQEGLY

SEQ ID NO: 2948 - DNA, 544 bp, Homo sapiens
acagtcctccacttcctggggaggtagctgcagaataaaaccagcagagactccttttctcctaaccgtcccggccaccgctgcctcagcctctgcctcccagcctctttctgagggaaaggacaagatgaagtggaaggcgcttttcaccgcggccatcctgcaggcacagttgccgattacagaggcacagagctttggcctgctggatcccaaactctgctacctgctggatggaatcctcttcatctatggtgtcattctcactgccttgttcctgagagtgaagttcagcaggagcgcagacgcccccgcgtaccagcagggccagaaccagctctataacgagctcaatctaggacgaagagaggagtacgatgttttggacaagagacgtggccgggaccctgagatggggggaaagccggtaggggttcctctaccttcctgtgtgttcctgcatgtgtggtggggctcagcccaggctgtgggggagggctcctcagctcactctgcaaccagactcgaccctcacatgtgtggg

SEQ ID NO: 2949 - protein, 138 aa, Homo sapiens
MKWKALFTAAILQAQLPITEAQSFGLLDPKLCYLLDGILFIYGVILTALFLRVKFSRSADAPAYQQGQNQLYNELNLGRREEYDVLDKRRGRDPEMGGKPVGVPLPSCVFLHVWWGSAQAVGEGSSAHSATRLDPHMC

SEQ ID NO: 2950 - DNA, 618 bp, Homo sapiens
ctccacttcctggggaggtagctgcagaataaaaccagcagagactccttttctcctaaccgtcccggccaccgctgcctcagcctctgcctcccagcctctttctgagggaaaggacaagatgaagtggaaggcgcttttcaccgcggccatcctgcaggcacagttgccgattacagaggcacagagctttggcctgctggatcccaaactctgctacctgctggatggaatcctcttcatctatggtgtcattctcactgccttgttcctgagagtgaagttcagcaggagcgcagacgcccccgcgtaccagcagggccagaaccagctctataacgtaagtcagcctcgccgtagaccctccggaaaggaagggcagcctcctcctcggacctagggaacgcgcccgccagagtcttgggtttaggtttggtccctagctatcacctctgcgacccggctgcaacttgtttaacctcagttttctaacccacaaaacaggtgtagtaattgtacctgtctcaaagggcgccataaagattacatgctttaatgtcttgatgcatggaacgagcttagtctagtgcctgccactagtgagcccccaagccatca

SEQ ID NO: 2951 - protein, 92 aa, Homo sapiens
MKWKALFTAAILQAQLPITEAQSFGLLDPKLCYLLDGILFIYGVILTALFLRVKFSRSADAPAYQQGQNQLYNVSQPRRRPSGKEGQPPPRT

SEQ ID NO: 2952 - DNA, 866 bp, Homo sapiens
ctcctaaccgtcccggccaccgctgcctcagcctctgcctcccagcctctttctgagggaaaggacaagatgaagtggaaggcgcttttcaccgcggccatcctgcaggcacagttgccgattacagaggcacagagctttggcctgctggatcccaaactctgctacctgctggatggaatcctcttcatctatggtgtcattctcactgccttgttcctgagagtgaaggtgggtaccactgggctttgggaggagggcacggggtcccccacttgatggatgttcagaggggccttggtcttggaaggtctcaagctcgggtggtgcctggggcttggtatccaggagcaaagcaaggaccagccaagtgtgtgccttgagtgggctgaggaggaggtggcagtgtctggctgagatggacagggtaggagggagagcctggtgctaggcacctccatgacaagccgtacaaatgtgtgcacatcagagtgtcccagggaaggcgatgctactggtgacaaaggggcttacactcaggcagaggtccttctttccaagtgtgaatgaaggccatgttagcctttctcttgaaaaggccctttcctcatctgtaactggggagctgaccagagcgtgggtttttcacttggtgccttgcagaccctggatttcttcgtggggctggtcatggtgtgggcagagattggaagaatttaggagtaaaggggagaatccagtcccagtcatcacttcagtgcttctcaacccatttcttgtttgaattttggactttggcataatattttatttgaaaaaccaaatcttactgagtttcttgttttaagtttgaaaatgctgcccta

SEQ ID NO: 2953 - protein, 69 aa, Homo sapiens
MKWKALFTAAILQAQLPITEAQSFGLLDPKLCYLLDGILFIYGVILTALFLRVKVGTTGLWEEGTGSPT

SEQ ID NO: 2954 - DNA, 195 bp, Homo sapiens
caaaggagaaaagaacaaggacacattgcagccaaaatggagctagaatcttgcctctgtccatccttcactggagttatcctggatggagaaggaaccatatcacctgcaaagcctggaaggggctgccaggtttctgcgggggccagccaacggctcacaatgaccctgtgttcgactcatcttacgatgaaa

SEQ ID NO: 2955 - protein, 52 aa, Homo sapiens
MELESCLCPSFTGVILDGEGTISPAKPGRGCQVSAGASQRLTMTLCSTHLTM

SEQ ID NO: 2956 - DNA, 2126 bp, Homo sapiens
gatgcttctgaaagcattagagccctctttggaacagatggcataagaaatgcagcgcatggccctgattcttttgcttctgcggccagagaaatggagttgttttttccttcaagtggaggttgtgggccggcaaacactgctaaatttactaattgtacctgttgcattgttaaaccccatgctgtcagtgaaggactgttgggaaagatcctgatggctatccgagatgcaggttttgaaatctcagctatgcagatgttcaatatggatcgggttaatgttgaggaattctatgaagtttataaaggagtagtgaccgaatatcatgacatggtgacagaaatgtattctggcccttgtgtagcaatggagattcaacagaataatgctacaaagacatttcgagaattttgtggacctgctgatcctgaaattgcccggcatttacgccctggaactctcagagcaatctttggtaaaactaagatccagaatgctgttcactgtactgatctgccagaggatggcctattagaggttcaatacttcttcaagatcttggataattagtggtgtggaaagtaaagaagtcacaggttgggacatttagacaagagtgaatcacacacgaggaatgtgttcattcttttattgtccgttgttttaacctgactgaatacaagatcaacaagagcactgtactcctggcaattattacatatgttagaacatggattttgcactgtagacaacatttaacaccagtctatggggtactgcattgctttttataaagttcaaaataaagatttattttcaaacaagtgactttggtttatttcatacattacactttttcttgcagaaaaaaataaaattgtacaactgcataaatataaaattcttccaccatgaaaatggttaaaacattcataaagacacagcaccagcatgtgatgcctccagaaaggaaaaaaggaaagtaaaagaaaatgtataaagcaaattaattagccctgtcactagccaaagtgatgggcagatccagatctcagacacagctttagaacataccggaggacaaggcaagagatgtcaagacagcattcaatacaagcataacacaacccatcacctttttgtgtttttctgtagtgtcacttaaaatttaaagggcagttcccccatgacaaacccccaccccagcccccaggaaaaaaataaaaataaagacctaacaccacaggaaaagactatggagtatgttaaaaatgctcatcgatgggccattacctttgaaagagccaaaaaacaaaaaaaaaaaaaaaaaaaaaattaccatgccagttttattcccgttgaatatttacaccttggacagcaaaccttgctcacataaagtagaaaacagatacaataaaacatggcttgaaaaatgaccagagtatgcacctgtagtactgtacactaaataaaatacacaaggcagcaatacttaggggccagaaacactgcttactacaagtcagttacggaatcataatttacagtaaaaatgggcacgtcccaaggctcaatttttctttttcttttgtcatttacagtagaataaatattttgttgctattgctacactttaatttacattctaacctattaaatgcagaaagctagtgtaaagcatatagattaagtgtaggtcccatacgtatgacagtttgttcaagactagtaggtttttgtttttgtatctttttttaacttattaaatggctagtgggaaagatttgtgcttgtgatcagctcttaacttcaatttttacatcaaaacgtccctgaaaacggtctttctcactgtacccaatgttctcaccgtacgccttacactctatgcgaatttcagtgtccatggtaagattggtgaactgtacggccagcaggggctgcaggtatttgggctgcaggagtttgccatagtacggataatactgcagaggaaaaccaggggagttgcccagtccaaaatactccacatttccaactttatccttatcttcatctcgctgaaatccagaatgaaatgaaattttaatggctcacatcatgcatcactatgtgtactc

SEQ ID NO: 2957 - protein, 159 aa, Homo sapiens [sequence omitted]

SEQ ID NO: 2958 - DNA, 2937 bp, Homo sapiens
gtaaaactgccggaaacagaataatggcgtctcgtagccccaggcgacagcgtggaggggcgggtctgtcgattggatgaacgcagctgagattactcccagccactaaggacgaagaggtggggcggtggcgtcccacgcctcgtgcgacagtgggcggggctttgttgcctgagtaaccgtatgatggtggtggtggtggtgtcttcctgtctcaacgatacctattttctagtgctgagatcctgagacaatgaatcatagtgaaagattcgttttcattgcagagtggtatgatccaaatgcttcacttcttcgacgttatgagcttttattttacccaggggatggatctgttgaaatgcatgatgtaaagaatcatcgcacctttttaaagcggaccaaatatgataacctgcacttggaagatttatttataggcaacaaagtgaatgtcttttctcgacaactggtattaattgactatggggatcaatatacagctcgccagctgggcagtaggaaagaaaaaacgctagccctaattaaaccagatgcaatatcaaaggctggagaaataattgaaataataaacaaagctggatttactataaccaaactcaaaatgatgatgctttcaaggaaagaagcattggattttcatgtagatcaccagtcaagaccctttttcaatgagctgatccagtttattacaactggtcctattattgccatggagattttaagagatgatgctatatgtgaatggaaaagactgctgggacctgcaaactctggagtggcacgcacagatgcttctgaaagcattagagccctctttggaacagatggcataagaaatgcagcgcatggccctgattcttttgcttctgcggccagagaaatggagttgttttttccttcaagtggaggttgtgggccggcaaacactgctaaatttactaattgtacctgttgcattgttaaaccccatgctgtcagtgaaggactgttgggaaagatcctgatggctatccgagatgcaggttttgaaatctcagctatgcagatgttcaatatggatcgggttaatgttgaggaattctatgaagtttataaaggagtagtgaccgaatatcatgacatggtgacagaaatgtattctggcccttgtgtagcaatggagattcaacagaataatgctacaaagacatttcgagaattttgtggacctgctgatcctgaaattgcccggcatttacgccctggaactctcagagcaatctttggtaaaactaagatccagaatgctgttcactgtactgatctgccagaggatggcctattagaggttcaatacttcttcaagatcttggataattagtggtgtggaaagtaaagaagtcacaggttgggacatttagacaagagtgaatcacacacgaggaatgtgttcattcttttattgtccgttgttttaacctgactgaatacaagatcaacaagagcactgtactcctggcaattattacatatgttagaacatggattttgcactgtagacaacatttaacaccagtctatggggtactgcattgctttttataaagttcaaaataaagatttattttcaaacaagtgactttggtttatttcatacattacactttttcttgcagaaaaaaataaaattgtacaactgcataaatataaaattcttccaccatgaaaatggttaaaacattcataaagacacagcaccagcatgtgatgcctccagaaaggaaaaaaggaaagtaaaagaaaatgtataaagcaaattaattagccctgtcactagccaaagtgatgggcagatccagatctcagacacagctttagaacataccggaggacaaggcaagagatgtcaagacagcattcaatacaagcataacacaacccatcacctttttgtgtttttctgtagtgtcacttaaaatttaaagggcagttcccccatgacaaacccccaccccagcccccaggaaaaaaataaaaataaagacctaacaccacaggaaaagactatggagtatgttaaaaatgctcatcgatgggccattacctttgaaagagccaaaaaacaaaaaaaaaaaaaaaaaaaaaattaccatgccagttttattcccgttgaatatttacaccttggacagcaaaccttgctcacataaagtagaaaacagatacaataaaacatggcttgaaaaatgaccagagtatgcacctgtagtactgtacactaaataaaatacacaaggcagcaatacttaggggccagaaacactgcttactacaagtcagttacggaatcataatttacagtaaaaatgggcacgtcccaaggctcaatttttctttttcttttgtcatttacagtagaataaatattttgttgctattgctacactttaatttacattctaacctattaaatgcagaaagctagtgtaaagcatatagattaagtgtaggtcccatacgtatgacagtttgttcaagactagtaggtttttgtttttgtatctttttttaacttattaaatggctagtgggaaagatttgtgcttgtgatcagctcttaacttcaatttttacatcaaaacgtccctgaaaacggtctttctcactgtacccaatgttctcaccgtacgccttacactctatgcgaatttcagtgtccatggtaagattggtgaactgtacggccagcaggggctgcaggtatttgggctgcaggagtttgccatagtacggataatactgcagaggaaaaccaggggagttgcccagtccaaaatactccacatttccaactttatccttatcttcatctcgctgaaatccagaatgaaatgaaattttaatggctcacatcatgcatcactatgtgtactc

SEQ ID NO: 2959 - protein, 376 aa, Homo sapiens; identical to SEQ ID NO: 134

SEQ ID NO: 2960 - DNA, 457 bp, Homo sapiens
ccccaaatctccaatttctcacaagtgaatttaggcaaactaaagaagacatctctgttccgaaattgcccggcatttacgccctggaactctcagagcaatctttggtaaaactaagatccagaatgctgttcactgtactgatctgccagaggatggcctattagaggttcaatacttcttcaagatcttggataattagtggtgtggaaagtaaagaagtcacaggttgggacatttagacaagagtgaatcacacacgaggaatgtgttcattcttttattgtccgttgttttaacctgactgaatacaagatcaacaagagcactgtactcctggcaattattacatatgttagaacatggattttgcactgtagacaacatttaacaccagtctatggggtactgcattgctttttataaagttcaaaataaagatttattttcaaacaag

SEQ ID NO: 2961 - protein, 52 aa, Homo sapiens
RRHLCSEIARHLRPGTLRAIFGKTKIQNAVHCTDLPEDGLLEVQYFFKILDN

SEQ ID NO: 2962 - DNA, 828 bp, Homo sapiens
gatgcttctgaaagcattagagccctctttggaacagatggcataagaaatgcagcgcatggccctgattcttttgcttctgcggccagagaaatggagttgttttttccttcaagtggaggttgtgggccggcaaacactgctaaatttactaattgtacctgttgcattgttaaaccccatgctgtcagtgaaggactgttgggaaagatcctgatggctatccgagatgcaggttttgaaatctcagctatgcagatgttcaatatggatcgggttaatgttgaggaattctatgaagtttataaaggagtagtgaccgaatatcatgacatggtgacagaaatgtattctggcccttgtgtagcaatggagattcaacagaataatgctacaaagacatttcgagaattttgtggacctgctgatcctgaaattgcccggcatttacgccctggaactctcagagcaatctttggtaaaactaagatccagaatgctgttcactgtactgatctgccagaggatggcctattagaggttcaatacttcttcaagatcttggataattagtggtgtggaaagtaaagaagtcacaggttgggacatttagacaagagtgaatcacacacgaggaatgtgttcattcttttattgtccgttgttttaacctgactgaatacaagatcaacaagagcactgtactcctggcaattattacatatgttagaacatggattttgcactgtagacaacatttaacaccagtctatggggtactgcattgctttttataaagttcaaaataaagatttattttcaaacaag

SEQ ID NO: 2963 - protein, 159 aa, Homo sapiens [sequence omitted]

SEQ ID NO: 2964 - DNA, 1639 bp, Homo sapiens
gtaaaactgccggaaacagaataatggcgtctcgtagccccaggcgacagcgtggaggggcgggtctgtcgattggatgaacgcagctgagattactcccagccactaaggacgaagaggtggggcggtggcgtcccacgcctcgtgcgacagtgggcggggctttgttgcctgagtaaccgtatgatggtggtggtggtggtgtcttcctgtctcaacgatacctattttctagtgctgagatcctgagacaatgaatcatagtgaaagattcgttttcattgcagagtggtatgatccaaatgcttcacttcttcgacgttatgagcttttattttacccaggggatggatctgttgaaatgcatgatgtaaagaatcatcgcacctttttaaagcggaccaaatatgataacctgcacttggaagatttatttataggcaacaaagtgaatgtcttttctcgacaactggtattaattgactatggggatcaatatacagctcgccagctgggcagtaggaaagaaaaaacgctagccctaattaaaccagatgcaatatcaaaggctggagaaataattgaaataataaacaaagctggatttactataaccaaactcaaaatgatgatgctttcaaggaaagaagcattggattttcatgtagatcaccagtcaagaccctttttcaatgagctgatccagtttattacaactggtcctattattgccatggagattttaagagatgatgctatatgtgaatggaaaagactgctgggacctgcaaactctggagtggcacgcacagatgcttctgaaagcattagagccctctttggaacagatggcataagaaatgcagcgcatggccctgattcttttgcttctgcggccagagaaatggagttgttttttccttcaagtggaggttgtgggccggcaaacactgctaaatttactaattgtacctgttgcattgttaaaccccatgctgtcagtgaaggactgttgggaaagatcctgatggctatccgagatgcaggttttgaaatctcagctatgcagatgttcaatatggatcgggttaatgttgaggaattctatgaagtttataaaggagtagtgaccgaatatcatgacatggtgacagaaatgtattctggcccttgtgtagcaatggagattcaacagaataatgctacaaagacatttcgagaattttgtggacctgctgatcctgaaattgcccggcatttacgccctggaactctcagagcaatctttggtaaaactaagatccagaatgctgttcactgtactgatctgccagaggatggcctattagaggttcaatacttcttcaagatcttggataattagtggtgtggaaagtaaagaagtcacaggttgggacatttagacaagagtgaatcacacacgaggaatgtgttcattcttttattgtccgttgttttaacctgactgaatacaagatcaacaagagcactgtactcctggcaattattacatatgttagaacatggattttgcactgtagacaacatttaacaccagtctatggggtactgcattgctttttataaagttcaaaataaagatttattttcaaacaag

SEQ ID NO: 2965 - protein, 376 aa, Homo sapiens; identical to SEQ ID NO: 134

SEQ ID NO: 2966 - DNA, 343 bp, Homo sapiens
aatctccaatttctcacaagtgaatttaggcaaactaaagaagacatctctgttccgttcaatacttcttcaagatcttggataattagtggtgtggaaagtaaagaagtcacaggttgggacatttagacaagagtgaatcacacacgaggaatgtgttcattcttttattgtccgttgttttaacctgactgaatacaagatcaacaagagcactgtactcctggcaattattacatatgttagaacatggattttgcactgtagacaacatttaacaccagtctatggggtactgcattgctttttataaagttcaaaataaagatttattttcaaacaa

SEQ ID NO: 2967 - protein, 42 aa, Homo sapiens
NLQFLTSEFRQTKEDISVPFNTSSRSWIISGVESKEVTGWDI

SEQ ID NO: 2968 - DNA, 2807 bp, Homo sapiens
acgctgtcgcctggggctacgagacgccattattctgtttccggcagttttacttccgtttgtttaacagctggcccggaagtttaagtgaatatgcggcttgggctccaaaagttgctgtacggtattttattttaaagtagaaatctgtccgcttttcacttacggaggccttacagtgtgtgttctgtgttacttgagtttatacgcactgcagaatttgtttaccctgctcttttggaaacgtattccggaagcgaaaccctgagtaatcggaagtggttaggagtgagagagctgctggatatgcggagggactgggcgggtcggcttccgaatggaagaggtctgtgagaagttaacctggtgataccgatccgaagagcctatcaagtgaagccccctgaaatacggagaataagaatcttagaggttgttcagcagaagtcttggagtgcattttcagtggttaaggtgaaaaaatgactactaaaaatttagaaaccaaagtcaccgttacttcatccccaatccgaggagcaggagatggaatggaaactgaggaaccacctaaatctgttgaagttacctccggagtccaatctagaaagcatcatagtcttcagagtccatggaagaaagcagttccatcagagagcccaggagttcttcagctagggaaaatgctcactgaaaaagcaatggaagttaaagctgtaagaatattagttcccaaagctgctataactcatgatatccccaacaaaaatacaaaggttaagtctctgggacatcataaaggagaattccttggtcagtcagagggagttatagaacctaataaggaactctcagaggtaaagaatgtattggaaaagctcaagaattctgaaagaaggttactacaggacaaagaaggtctttcaaaccagctccgtgtacagacagaggtaaatcgtgagttaaaaaagttactggtggcttctgttggggatgatcttcagtatcactttgaacgtctagcccgtgagaaaaatcagcttattttagaaaatgaagccctaggtcgaaacacagctcagctttctgaacagttagaacgtatgtcaatacagtgtgatgtatggcgaagtaaattccttgcaagcagggtaatggcagatgagttaaccaactcaagagcagctttacagcgtcaaaaccgtgatgcacacggggctatacaagatctcctaagtgaacgggaacagtttcgtcaagaaatgatagctacccagaaattattggaggagctcttagtttccttgcaatggggaagagagcaaacttactcccctagtgtacaaccccacagcacagcagagctagcattaacaaatcacaagttggcaaaagcagtaaattctcatcttctgggaaatgttggcattaacaatcaaaaaaagattccatcaacagttgaattctgcagcaccccagctgagaaaatggctgaaacggttctaagaattttagatccagttacctgcaaagagagttcacctgataatccattttttgagtcttcaccaaccaccttacttgctacaaagaaaaatattggacgatttcatccctatactagatatgaaaatataactttcaattgctgcaatcactgccggggagaactgattgccctttaacagtcaatatgttggaggcatgctaaggtacttccttattacccaagagtcattattatttgggagctggggttcttacaatgctagaaataatatcacttcctatttacataatgtatacacccaaagatattttatgtactagactccagattaccctttcttaataaatatctcagggtaaggaaagaaagaaactgtatagatatatttaaaatagagaatactttccaagcaatacatgatacttttcctaaaagactctaaaagaaaaagattctgtaactctcttttagcaccaaattattgtttatcttgctggatattttatatgaacagtgttaatttagatgcactaaagcaaaggtaggcaaactacaaccatgagtcaaacatggccacacccattcatgtgctattgtctaagctggttttgcactacaactgcagagttgaatagatgcagcagatcctttacagaaaaagttttctgacctcaattctaaagtaattgtagtagggagctggaggactttctttccctttatggtaattttttgagctacaaaagagccttgcagaaatgggtgaagggattaatcttttaaaaataaatgctatatattaggaaaataaaaaatattttagagccaagttaacaagtacttcagcaaaacatgctagttttatgcaggggattctgtattccaaatggatacaatccgacatatataaaagaaacagattcttaactattgactcttatttagcaaatgcaacagacaagaatatccaacttgatatttataaaaggtagactttttccaaaagtgtataagctcaaagaaaaaatgcaacctgtcaattaatatatactatgtaatatatattattgtgtatttatgattagccatcataaatgcccattgcttggcctttaagaataatcacaaaatatttatattaaattatacaaatttgttgcagaagtgcctgtgagagaaatcttcaaaagacaaacctggtcaaataataataattttaatgtcaatgattttttttgtctgactcatctgagttatatttagttttcaagtggcaataaatttatctaccttcttt

SEQ ID NO: 2969 - protein, 400 aa, Homo sapiens; identical to SEQ ID NO: 138

SEQ ID NO: 2970 - DNA, 2897 bp, Homo sapiens
acgctgtcgcctggggctacgagacgccattattctgtttccggcagttttacttccgtttgtttaacagctggcccggaagtttaagtgaatatgcggcttgggctccaaaagttgctgtacggtattttattttaaagtagaaatctgtccgcttttcacttacggaggccttacagtgtgtgttctgtgttacttgagtttatacgcactgcagaatttgtttaccctgctcttttggaaacgtattccggaagcgaaaccctgagtaatcggaagtggttaggagtgagagagctgctggatatgcggagggactgggcgggtcggcttccgaatggaagaggtctgtgagaagttaacctggtgataccgatccgaagagcctatcaagtgaagccccctgaaatacggagaataagaatcttagaggttgttcagcagaagtcttggagtgcattttcagtggttaaggtgaaaaaatgactactaaaaatttagaaaccaaagtcaccgttacttcatccccaatccgaggagcaggagatggaatggaaactgaggaaccacctaaatctgttgaagttacctccggagtccaatctagaaagcatcatagtcttcagagtccatggaagaaagcagttccatcagagagcccaggagttcttcagctagggaaaatgctcactgaaaaagcaatggaagttaaagctgtaagaatattagttcccaaagctgctataactcatgatatccccaacaaaaatacaaaggttaagtctctgggacatcataaaggagaattccttggtcagtcagagggagttatagaacctaataaggaactctcagaggtaaagaatgtattggaaaagctcaagaattctgaaagaaggttactacaggacaaagaaggtctttcaaaccagctccgtgtacagacagaggtaaatcgtgagttaaaaaagttactggtggcttctgttggggatgatcttcagtatcactttgaacgtctagcccgtgagaaaaatcagcttattttagaaaatgaagccctaggtcgaaacacagctcagctttctgaacagttagaacgtatgtcaatacagtgtgatgtatggcgaagtaaattccttgcaagcagggtaatggcagatgagttaaccaactcaagagcagctttacagcgtcaaaaccgtgatgcacacggggctatacaagatctcctaagtgaacgggaacagtttcgtcaagaaatgatagctacccagaaattattggaggagctcttagtttccttgcaatggggaagagagcaaacttactcccctagtgtacaaccccacagcacagcagagctagcattaacaaatcacaagttggcaaaagcagtaaattctcatcttctgggaaatgttggcattaacaatcaaaaaaagattccatcaacagttgaattctgcagcaccccagctgagaaaatggctgaaacggttctaagaattttagatccagttacctgcaaagagagttcacctgataatccattttttgagtcttcaccaaccaccttacttgctacaaagaaaaatattggacgatttcatccctatactagatatgaaaatataactttcaattgctgcaatcactgccggggagaactgattgccctttaacagtcaatatgttggaggcatgctaaggtacttccttattacccaagagtcattattatttgggagctggggttcttacaatgctagaaataatatcacttcctatttacataatgtatacacccaaagatattttatgtactagactccagattaccctttcttaataaatatctcagggtaaggaaagaaagaaactgtatagatatatttaaaatagagaatactttccaagcaatacatgatacttttcctaaaagactctaaaagaaaaagattctgtaactctcttttagcaccaaattattgtttatcttgctggatattttatatgaacagtgttaatttagatgcactaaagcaaaggtaggcaaactacaaccatgagtcaaacatggccacacccattcatgtgctattgtctaagctggttttgcactacaactgcagagttgaatagatgcagcagatcctttacagaaaaagttttctgacctcaattctaaagtaattgtagtagggagctggaggactttctttccctttatggtaattttttgagctacaaaagagccttgcagaaatgggtgaagggattaatcttttaaaaataaatgctatatattaggaaaataaaaaatattttagagccaagttaacaagtacttcagcaaaacatgctagttttatgcaggggattctgtattccaaatggatacaatccgacatatataaaagaaacagattcttaactattgactcttatttagcaaatgcaacagacaagaatatccaacttgatatttataaaaggtagactttttccaaaagtgtataagctcaaagaaaaaatgcaacctgtcaattaatatatactatgtaatatatattattgtgtatttatgattagccatcataaatgcccattgcttggcctttaagaataatcacaaaatatttatattaaattatacaaatttgttgcagaagtgcctgtgagagaaatcttcaaaagacaaacctggtcaaataataataattttaatgtcaatgattttttttgtctgactcatctgagttatatttagttttcaagtggcaataaatttatctaccttctttattgcgactattccttttttcccccagaattagtgctttggtttaggtctttgtctagcttaactacttccaattgattcttcagccttt

SEQ ID NO: 2971 - protein, 400 aa, Homo sapiens; identical to SEQ ID NO: 138

SEQ ID NO: 2972 - DNA, 2806 bp, Homo sapiens
acgctgtcgcctggggctacgagacgccattattctgtttccggcagttttacttccgtttgtttaacagctggcccggaagtttaagtgaatatgcggcttgggctccaaaagttgctgtacggtattttattttaaagtagaaatctgtccgcttttcacttacggaggccttacagtgtgtgttctgtgttacttgagtttatacgcactgcagaatttgtttaccctgctcttttggaaacgtattccggaagcgaaaccctgagtaatcggaagtggttaggagtgagagagctgctggatatgcggagggactgggcgggtcggcttccgaatggaagaggtctgtgagaagttaacctggtgataccgatccgaagagcctatcaagtgaagccccctgaaatacggagaataagaatcttagaggttgttcagcagaagtcttggagtgcattttcagtggttaaggtgaaaaaatgactactaaaaatttagaaaccaaagtcaccgttacttcatccccaatccgaggagcaggagatggaatggaaactgaggaaccacctaaatctgttgaagttacctccggagtccaatctagaaagcatcatagtcttcagagtccatggaagaaagcagttccatcagagagcccaggagttcttcagctagggaaaatgctcactgaaaaagcaatggaagttaaagctgtaagaatattagttcccaaagctgctataactcatgatatccccaacaaaaatacaaaggttaagtctctgggacatcataaaggagaattccttggtcagtcagagggagttatagaacctaataaggaactctcagaggtaaagaatgtattggaaaagctcaagaattctgaaagaaggttactacaggacaaagaaggtctttcaaaccagctccgtgtacagacagaggtaaatcgtgagttaaaaaagttactggtggcttctgttggggatgatcttcagtatcactttgaacgtctagcccgtgagaaaaatcagcttattttagaaaatgaagccctaggtcgaaacacagctcagctttctgaacagttagaacgtatgtcaatacagtgtgatgtatggcgaagtaaattccttgcaagcagggtaatggcagatgagttaaccaactcaagagcagctttacagcgtcaaaaccgtgatgcacacggggctatacaagatctcctaagtgaacgggaacagtttcgtcaagaaatgatagctacccagaaattattggaggagctcttagtttccttgcaatggggaagagagcaaacttactcccctagtgtacaaccccacagcacagcagagctagcattaacaaatcacaagttggcaaaagcagtaaattctcatcttctgggaaatgttggcattaacaatcaaaaaaagattccatcaacagttgaattctgcagcaccccagctgagaaaatggctgaaacggttctaagaattttagatccagttacctgcaaagagagttcacctgataatccattttttgagtcttcaccaaccaccttacttgctacaaagaaaaatattggacgatttcatccctatactagatatgaaaatataactttcaattgctgcaatcactgccggggagaactgattgccctttaacagtcaatatgttggaggcatgctaagaataaacaactaaataactgtattagaaaaaaaagaaacttactaaatatcataatctgatgatatgtggtcctgaattggctactagtttaagcaaataaactgtaagtcatttatgggttagttggggaataaatggatatgggctggatattcggtaatatcattaatgaaaagcagattgcagaaatacagtatgatctcagtattttgaaattgtaaatacatgtacagacaaatacttagacagtatgcatactggtgttaacagtcacaatttctgggtgatgaaaatgtaacttgaaaccgctccatttctacaatgcacatttactgtttctgttataataaaagggtatgttagaaaaacaaaaaggaggctgggcatggtggctcatgcctctaatctcagcactttgggaggccaaggtgggcggatcacttgaggtctggagtttgagaccagcctgagcaacatggtgagaccccatctctacaaaaaaaatataaaaattagccaggtgtggtggtgcacacctgtggtcccagctacttgggaggctgaggtgggaaaatcacttgaacctgggagggtgaggttgcagtgagctgagatcatgccactgcactccagcctgggtgacaggaaaagaaaaaggaaggaagagaaaaaagaaggaaagagcaaaagagacgaaagaatgaaatgaacttcaaacaattggactcaatattcacatttggtcccccaactctccccacacttgctagcaaaaatatgaagccacatctgtattgtcagaattaggcaatgcagtgtcttacccaaataactaaaaaatatcaggtttgccttaaattaccaaaatatgtacccaaatctcctttggtctatacagattttcctccttagtccacctgcctttcttttactggtaaatgcaacttttattggttgcatttatttgtaaattcagtttttctgagggctatgtaggagaagctgtaaccaatcttcaacccatttctcacagaaataagtaaacaataaatgataaggtatcaaaggctatcacactggtgccataagaaat

SEQ ID NO: 2973 - protein, 400 aa, Homo sapiens; identical to SEQ ID NO: 138

SEQ ID NO: 2974 - DNA, 1916 bp, Homo sapiens
cgctctcgtagttagagaggcccggatggaggacgcagaggcacgctgttgccatggcagtgtggtcctggctgccgcggaggcaggtgccggggtctcctttgcctcaatgtgaagagcttagaaagaggaggagaggagaactcccccggccatctctgtgatcccagccgccgcattttacacagcatatttccttcacaaacagaaaatgaatgaaaataaagatactgattcaaagaaaagtgaagaatacgaagatgactttgaaaaggacctggagtggttaattaatgaaaatgaaaaaagtgatgccagcataatagagatggcttgtgagaaggaagagaatattaaccaagacttaaaagagaatgagacagtaatggagcacaccaaacggcattctgatcctgacaaatctttgcaggatgaggtctcaccaagaagaaatgacatcatttctgtaccaggtattcaacctttggatcccatatcagattcagatagtgaaaactctttccaggaatccaaactagaaagccagaaagacttggaggaggaagaggatgaggaagtaaggagatatattatggagaaaattgtacaagctaacaagcttctacagaatcaagaaccggtgaatgataaaagggagcgaaaacttaagttcaaggaccagttagttgatttggaagttcctccactagaagacactactacttttaaaaattattttgaaaacgaaaggaatatgtttgggaaactgtcacaattatgtatttccaatgattttggacaagaagatgtgctcctgtcacttactaatggaagctgtgaagaaaacaaggataggacaatactggtagagagagatggaaaatttgaacttctgaatttacaagacattgccagtcaggggtttttgcctcccattaataatgcaaatagtacagaaaatgaccctcagcagttgttacccagatcttccaactcctctgtcagtggcaccaagaaagaagattctacagcaaagattcatgctgtcactcactcatcaacaggagagccgctggcttatatcgctcagccaccactcaaccgcaagacttgtccaagctctgctgtcaactcagatcgaagtaaagggaatgggaaatctaatcacaggacacagtctgcacatatctcaccagtgacttcaacatactgtctttcccctcgacagaaagaactacaaaaacaactagaagaaaagagagaaaaactgaaaagagaggaagagcgacgaaaaatagaagaagagaaagaaaaaaagagagagaatgacatagtatttaaagcgtggttgcaaaagaaaagagagcaggtcttagaaatgaggagaattcagcgagcaaaggaaattgaagacatgaacagtagacaggaaaacagagatccacaacaagcttttcgattatggcttaaaaaaaagcacgaagagcagatgaaagaaagacagacagaagaactaagaaagcaagaggaatgtttattcttccttaaaggaacagaaggccgggaaagggcctttaaacaatggttaagaaggaaacggatggaaaaaatggcagagcaacaagctgtcagagagagaactagacagctccgactagaagctaagcgttctaaacagttacagcaccacctatatatgtcagaagccaaaccttttcgttttactgatcattataactgaaagtttctattaaatatttcagtgggcagctgctatcaaaattttggatatgatttcttagggtctgtgtactttggttgtattctaaattatggaaatggtatttatcttttattgacagtgaatttgtttttttaatactagaacaaaataaatttttttctcacagtgttgt

SEQ ID NO: 2975 - protein, 509 aa, Homo sapiens
MNENKDTDSKKSEEYEDDFEKDLEWLINENEKSDASIIEMACEKEENINQDLKENETVMEHTKRHSDPDKSLQDEVSPRRNDIISVPGIQPLDPISDSDSENSFQESKLESQKDLEEEEDEEVRRYIMEKIVQANKLLQNQEPVNDKRERKLKFKDQLVDLEVPPLEDTTTFKNYFENERNMFGKLSQLCISNDFGQEDVLLSLTNGSCEENKDRTILVERDGKFELLNLQDIASQGFLPPINNANSTENDPQQLLPRSSNSSVSGTKKEDSTAKIHAVTHSSTGEPLAYIAQPPLNRKTCPSSAVNSDRSKGNGKSNHRTQSAHISPVTSTYCLSPRQKELQKQLEEKREKLKREEERRKIEEEKEKKRENDIVFKAWLQKKREQVLEMRRIQRAKEIEDMNSRQENRDPQQAFRLWLKKKHEEQMKERQTEELRKQEECLFFLKGTEGRERAFKQWLRRKRMEKMAEQQAVRERTRQLRLEAKRSKQLQHHLYMSEAKPFRFTDHYN

SEQ ID NO: 2976 - DNA, 1775 bp, Homo sapiens
cgctctcgtagttagagaggcccggatggaggacgcagaggcacgctgttgccatggcagtgtggtcctggctgccgcggaggcaggtgccggggtctcctttgcctcaatgtgaagagcttagaaagaggaggagaggagaactcccccggccatctctgtgatcccagccgccgcattttacacagcatatttccttcacaaacagaaaatgaatgaaaataaagatactgattcaaagaaaagtgaagaatacgaagatgactttgaaaaggacctggagtggttaattaatgaaaatgaaaaaagtgatgccagcataatagagatggcttgtgagaaggaagagaatattaaccaagacttaaaagagaatgagacagtaatggagcacaccaaacggcattctgatcctgacaaatctttgcaggatgaggtctcaccaagaagaaatgacatcatttctgtaccaggtattcaacctttggatcccatatcagattcagatagtgaaaactctttccaggaatccaaactagaaagccagaaagacttggaggaggaagaggatgaggaagtaaggagatatattatggagaaaattgtacaagctaacaagcttctacagaatcaagaaccggtgaatgataaaagggagcgaaaacttaagttcaaggaccagttagttgatttggaagttcctccactagaagacactactacttttaaaaattattttgaaaacgaaaggaatatgtttgggaaactgtcacaattatgtatttccaatgattttggacaagaagatgtgctcctgtcacttactaatggaagctgtgaagaaaacaaggataggacaatactggtagagagagatggaaaatttgaacttctgaatttacaagacattgccagtcaggggtttttgcctcccattaataatgcaaatagtacagaaaatgaccctcagcagttgttacccagatcttccaactcctctgtcagtggcaccaagaaagaagattctacagcaaagattcatgctgtcactcactcatcaacaggagagccgctggcttatatcgctcagccaccactcaaccgcaagacttgtccaagctctgctgtcaactcagatcgaagtaaagggaatgggaaatctaatcacaggacacagtctgcacatatctcaccagtgacttcaacatactgtctttcccctcgacagaaagaactacaaaaacaactagaagaaaagagagaaaaactgaaaagagaggaagagcgacgaaaaatagaagaagagaaagaaaaaaagagagagaatgacatagtatttaaagcgtggttgcaaaagaaaagagagcaggtcttagaaatgaggagaattcagcgagcaaaggaaattgaagacatgaacagtagacaggaaaacagagatccacaacaagcttttcgattatggcttaaaaaaaagcacgaagagcagatgaaagaaagacagacagaagaactaagaaagcaagaggaatgtttattcttccttaaaggaacagaaggccgggaaagggcctttaaacaatggttaagaaggaaacggatggaaaaaatggcagagcaacaagctgtcagagagagaactagacagctccgactagaagctaagcgttctaaacagttacagcaccacctatatatgtcagaagccaaaccttttcgttttactgatcattataactgaaagtttctattaaatatttcagtgggcagctgct

SEQ ID NO: 2977 - protein, 509 aa, Homo sapiens; identical to SEQ ID NO: 2975

SEQ ID NO: 2978 - DNA, 1649 bp, Homo sapiens
cgctctcgtagttagagaggcccggatggaggacgcagaggcacgctgttgccatggcagtgtggtcctggctgccgcggaggcaggtgccggggtctcctttgcctcaatgtgaagagcttagaaagaggaggagaggagaactcccccggccatctctgtgatcccagccgccgcattttacacagcatatttccttcacaaacagaaaatgaatgaaaataaagatactgattcaaagaaaagtgaagaatacgaagatgactttgaaaaggacctggagtggttaattaatgaaaatgaaaaaagtgatgccagcataatagagatggcttgtgagaaggaagagaatattaaccaagacttaaaagagaatgagacagtaatggagcacaccaaacggcattctgatcctgacaaatctttgcaggatgaggtctcaccaagaagaaatgacatcatttctgtaccaggtattcaacctttggatcccatatcagattcagatagtgaaaactctttccaggaatccaaactagaaagccagaaagacttggaggaggaagaggatgaggaagtaaggagatatattatggagaaaattgtacaagctaacaagcttctacagaatcaagaaccggtgaatgataaaagggagcgaaaacttaagttcaaggaccagttagttgatttggaagttcctccactagaagacactactacttttaaaaattattttgaaaacgaaaggaatatgtttgggaaactgtcacaattatgtatttccaatgattttggacaagaagatgtgctcctgtcacttactaatggaagctgtgaagaaaacaaggataggacaatactggtagagagagatggaaaatttgaacttctgaatttacaagacattgccagtcaggggtttttgcctcccattaataatgcaaatagtacagaaaatgaccctcagcagttgttacccagatcttccaactcctctgtcagtggcaccaagaaagaagattctacagcaaagattcatgctgtcactcactcatcaacaggagagccgctggcttatatcgctcagccaccactcaaccgcaagacttgtccaagctctgctgtcaactcagatcgaagtaaagggaatgggaaatctaatcacaggacacagtctgcacatatctcaccagtgacttcaacatactgtctttcccctcgacagaaagaactacaaaaacaactagaagaaaagagagaaaaactgaaaagagaggaagagcgacgaaaaatagaagaagagaaagaaaaaaagagagagaatgacatagtatttaaagcgtggttgcaaaagaaaagagagcaggtcttagaaatgaggagaattcagcgagcaaaggaaattgaagacatgaacagtagagtaagtaaaacttctctgaaaaataagttcatacagatatgaaagctgaacttatttatagaagggagtctggatatcagactaacagcctatggaagaagtagaaaagttgttcaagaactacccttgcaaaagatgcaacatgcagataactacaattaggttctaagaggtcttgtgaaaataaaatgattcctattttgttcagactttgatggaacag

SEQ ID NO: 2979 - protein, 418 aa, Homo sapiens
MNENKDTDSKKSEEYEDDFEKDLEWLINENEKSDASIIEMACEKEENINQDLKENETVMEHTKRHSDPDKSLQDEVSPRRNDIISVPGIQPLDPISDSDSENSFQESKLESQKDLEEEEDEEVRRYIMEKIVQANKLLQNQEPVNDKRERKLKFKDQLVDLEVPPLEDTTTFKNYFENERNMFGKLSQLCISNDFGQEDVLLSLTNGSCEENKDRTILVERDGKFELLNLQDIASQGFLPPINNANSTENDPQQLLPRSSNSSVSGTKKEDSTAKIHAVTHSSTGEPLAYIAQPPLNRKTCPSSAVNSDRSKGNGKSNHRTQSAHISPVTSTYCLSPRQKELQKQLEEKREKLKREEERRKIEEEKEKKRENDIVFKAWLQKKREQVLEMRRIQRAKEIEDMNSRVSKTSLKNKFIQI

SEQ ID NO: 2980 - DNA, 1707 bp, Homo sapiens
ggggtccaatttgtgcgcgtggagtgagacagaaaacctggagcccgatctcccggccagcgactccctccttctgggtgtgcggctgaagactggaagcaggttgccttgcctgctgcaagcccgccgtacctaccccttctccgcgtgcgcccctccctgtgcctgcgcattaccggctagccggcggcgggcgctgcagcccctacgtgattctgcggctcactcccctcggatggtctttccacccgagtttttcccgggaagaggctctcaagactagccagtgcaggaggaggagtcgaactctggatagcctgtttataaagccctaactgtgccgatgttgaccgttttctgaaactcctcctccaaaacccacgccaaaccacaagatgaaggaaattcacacatcaggatgccaaaaaccatggaagacttctgatgttctgggagggttgacaaagatggaccttaaattctagaatttaggtattcatggttgagatcctgaagaaaacattttctgctgagcagaagcaatttaataattgcctcccttcatttcagaatccagaagtgtctgcagccaaccaaagagggaatgtttgatggacagaagttggaatggaaggagaaaatggcttattttagttaaaatgttttacttttggaaatttttttaaaaacttattttcacatatcacataaatacattgttaggacccctcccagggccatagaagtggcctgcacagacatctggttttaaagtggcagtacagaagcaagctggtttcactgtccccacagaaaaccaaaaatatacagagctgtgattttccccagcaacagtccagaactcatatatgaggatgagacagatcctagggccataaagaaaaaaacttctttggaaaaaaactccaagcagatgttaaggtcgatcacaagacttctaatcacatactgagaaaacaaaagcatcactgcaggaaatccctttaaacttttgccttatggcaaatggacatatgctcaaaggtgctgaacacatgaaataaggctgtaaaaatctactaaacaaatgaaaataattacattgcaaatgcttttttccttagagcacttgttttaagaaatgtatttctggaatacaagctagaagtggttttgtcctgctgctgagggttaaaggcaaacttaaggtctccagcctttggtgtgacacatgagagcgaataacaaaaagaaggtcttgagttttttgatagttaggcatattttcattataatggtatccagatatgtgatatatctgatatataatacacatatagacacatatatgtctctctatatatttgtatataggtagattttattatatgtgaaatctgcatataactataatgaaagtctcaactgttacctcaataacctttaacctgactacaatatttaaaagttcaatctcactaccagaacacaccctgacacttctgattctattttgctttatgttttgcatattgtttgtcaacttctatcatatgacttagtatgtttattatttattgtcctctctctccattgaagagaatttttgattccttaaagaaaatatttctcacatgatcagttttttaatttacaaaatatctcaatgtcaatgtacccatttcaaatatatgtgtgttaaacatt

SEQ ID NO: 2981 - protein, 37 aa, Homo sapiens
MVEILKKTFSAEQKQFNNCLPSFQNPEVSAANQRGNV

SEQ ID NO: 2982 - DNA, 677 bp, Homo sapiens
ggggtccaatttgtgcgcgtggagtgagacagaaaacctggagcccgatctcccggccagcgactccctccttctgggtgtgcggctgaagactggaagcaggttgccttgcctgctgcaagcccgccgtacctaccccttctccgcgtgcgcccctccctgtgcctgcgcattaccggctagccggcggcgggcgctgcagcccctacgtgattctgcggctcactcccctcggatggtctttccacccgagtttttcccgggaagaggctctcaagactagccagtgcaggaggaggagtcgaactctggatagcctgtttataaagccctaactgtgccgatgttgaccgttttctgaaactcctcctccaaaacccacgccaaaccacaagatgaaggaaattcacacatcaggatgccaaaaaccatggaagacttctgatgttctgggagggttgacaaagatggaccttaaattctagaatttaggtattcatggttgagatcctgaagaaaacattttctgctgagcagaagcaatttaataattgcctcccttcattgtaagttttttatttcttccttatgtctgattaatcccccaatataaacttcaattaattgagcagctctgcaaaatatatgaataaaacaccacatattaagatattata

SEQ ID NO: 2983 - protein, 81 aa, Homo sapiens
RLEAGCLACCKPAVPTPSPRAPLPVPAHYRLAGGGRCSPYVILRLTPLGWSFHPSFSREEALKTSQCRRRSRTLDSLFIKP

SEQ ID NO: 2984 - DNA, 3118 bp, Homo sapiens
acagcaggtcactaatgttggaaaaagtacagagtccagggaaagacttgcttgtaactttatgaattctggatttttttttttcctttgctttttcttaactttcactaagggttactgtagtctgatgtgtccttcccaaggccacgaaatttgacaagctgcacttttcttttgctcaatgatttctgctttaagccaaagaactgcctataatttcactaagaatgtcttctaattcagatactggggatttacaagagtctttaaagcacggacttacacctattgtgtctcaatttaaaatggtgaattactcctatgatgaagatctggaagagctttgtcccgtgtgtggagataaagtgtctgggtaccattatgggctcctcacctgtgaaagctgcaagggattttttaagcgaacagtccaaaataataaaaggtacacatgtatagaaaaccagaactgccaaattgacaaaacacagagaaagcgttgtccttactgtcgttttcaaaaatgtctaagtgttggaatgaagctagaagctgtaagggccgaccgaatgcgtggaggaaggaataagtttgggccaatgtacaagagagacagggccctgaagcaacagaaaaaagccctcatccgagccaatggacttaagctagaagccatgtctcaggtgatccaagctatgccctctgacctgaccatttcctctgcaattcaaaacatccactctgcctccaaaggcctacctctgaaccatgctgccttgcctcctacagactatgacagaagtccctttgtaacatcccccattagcatgacaatgccccctcacggcagcctgcaaggttaccaaacatatggccactttcctagccgggccatcaagtctgagtacccagacccctataccagctcacccgagtccataatgggctattcatatatggatagttaccagacgagctctccagcaagcatcccacatctgatactggaacttttgaagtgtgagccagatgagcctcaagtccaggctaaaatcatggcctatttgcagcaagagcaggctaaccgaagcaagcacgaaaagctgagcacctttgggcttatgtgcaaaatggcagatcaaactctcttctccattgtcgagtgggccaggagtagtatcttcttcagagaacttaaggttgatgaccaaatgaagctgcttcagaactgctggagtgagctcttaatcctcgaccacatttaccgacaagtggtacatggaaaggaaggatccatcttcctggttactgggcaacaagtggactattccataatagcatcacaagccggagccaccctcaacaacctcatgagtcatgcacaggagttagtggcaaaacttcgttctctccagtttgatcaacgagagttcgtatgtctgaaattcttggtgctctttagtttagatgtcaaaaaccttgaaaacttccagctggtagaaggtgtccaggaacaagtcaatgccgccctgctggactacacaatgtgtaactacccgcagcagacagagaaatttggacagctacttcttcgactacccgaaatccgggccatcagtatgcaggctgaagaatacctctactacaagcacctgaacggggatgtgccctataataaccttctcattgaaatgttgcatgccaaaagagcataagttacaacccctaggagctctgctttcaaaacaaaaagagattgggggagtggggagggggaagaagaacaggaagaaaaaaagtactctgaactgctccaagtaacgctaattaaaaacttgctttaaagatattgaatttaaaaaggcataataatcaaatacttaatagcaaataaatgatgtatcagggtatttgtattgcaaactgtgaatcaaaggcttcacagccccagaggattccatataaaagacattgtaatggagtggattgaactcacagatggataccaacacggtcagaagaaaaacggacagaacggttcttgtatatttaaactgatctccactatgaagaaatttaggaactaatcttattaattaggcttatacagcgggggatttgagcttacaggattcctccatggtaaagctgaactgaaacaattctcaagaatgcatcagctgtacctacaatagcccctccctcttcctttgaaggccccagcacctctgccctgtggtcaccgaatctgtactaaggacctgtgttcagccacacccagtggtagctccaccaaatcatgaacagcctaattttgagtgtctgtgtcttagacctgcaaacagctaataggaaattctattaatatgttagcttgccattttaaatatgttctgagggttgttttgtctcgtgttcatgatgttaagaaaatgcaggcagtatccctcatcttatgtaagtgttaattaatattaagggaaatgactacaaactttcaaagcaaatgctccatagctaaagcaacttagaccttatttctgctactgttgctgaaatgtggctttggcattgttggatttcataaaaaatttctggcaggaagtcttgttagtatacatcagtctttttcatcatccaagtttgtagttcatttaaaaatacaacattaaacacattttgctaggatgtcaaatagtcacagttctaagtagttggaaacaaaattgacgcatgttaatctatgcaaagagaaaggaaaggatgaggtgatgtattgactcaaggttcattcttgctgcaattgaacatcctcaagagttgggatggaaatggtgatttttacatgtgtcctggaaagatattaaagtaattcaaatcttccccaaaggggaaaggaagagagtgatactgacctttttaagtcatagaccaaagtctgctgtagaacaaatatgggaggacaaagaatcgcaaattcttcaaatgactattatcagtattattaacatgcgatgccacaggtatgaaagtcttgccttatttcacaattttaaaaggtagctgtgcagatgtggatcaacatttgtttaaaataaagtattaatactttaaagtc

SEQ ID NO: 2985 - protein, 495 aa, Homo sapiens; identical to SEQ ID NO: 142

SEQ ID NO: 2986 - DNA, 4925 bp, Homo sapiens
acagcaggtcactaatgttggaaaaagtacagagtccagggaaagacttgcttgtaactttatgaattctggatttttttttttcctttgctttttcttaactttcactaagggttactgtagtctgatgtgtccttcccaaggccacgaaatttgacaagctgcacttttcttttgctcaatgatttctgctttaagccaaagaactgcctataatttcactaagaatgtcttctaattcagatactggggatttacaagagtctttaaagcacggacttacacctattgtgtctcaatttaaaatggtgaattactcctatgatgaagatctggaagagctttgtcccgtgtgtggagataaagtgtctgggtaccattatgggctcctcacctgtgaaagctgcaagggattttttaagcgaacagtccaaaataataaaaggtacacatgtatagaaaaccagaactgccaaattgacaaaacacagagaaagcgttgtccttactgtcgttttcaaaaatgtctaagtgttggaatgaagctagaagctgtaagggccgaccgaatgcgtggaggaaggaataagtttgggccaatgtacaagagagacagggccctgaagcaacagaaaaaagccctcatccgagccaatggacttaagctagaagccatgtctcaggtgatccaagctatgccctctgacctgaccatttcctctgcaattcaaaacatccactctgcctccaaaggcctacctctgaaccatgctgccttgcctcctacagactatgacagaagtccctttgtaacatcccccattagcatgacaatgccccctcacggcagcctgcaaggttaccaaacatatggccactttcctagccgggccatcaagtctgagtacccagacccctataccagctcacccgagtccataatgggctattcatatatggatagttaccagacgagctctccagcaagcatcccacatctgatactggaacttttgaagtgtgagccagatgagcctcaagtccaggctaaaatcatggcctatttgcagcaagagcaggctaaccgaagcaagcacgaaaagctgagcacctttgggcttatgtgcaaaatggcagatcaaactctcttctccattgtcgagtgggccaggagtagtatcttcttcagagaacttaaggttgatgaccaaatgaagctgcttcagaactgctggagtgagctcttaatcctcgaccacatttaccgacaagtggtacatggaaaggaaggatccatcttcctggttactgggcaacaagtggactattccataatagcatcacaagccggagccaccctcaacaacctcatgagtcatgcacaggagttagtggcaaaacttcgttctctccagtttgatcaacgagagttcgtatgtctgaaattcttggtgctctttagtttagatgtcaaaaaccttgaaaacttccagctggtagaaggtgtccaggaacaagtcaatgccgccctgctggactacacaatgtgtaactacccgcagcagacagagaaatttggacagctacttcttcgactacccgaaatccgggccatcagtatgcaggctgaagaatacctctactacaagcacctgaacggggatgtgccctataataaccttctcattgaaatgttgcatgccaaaagagcataagttacaacccctaggagctctgctttcaaaacaaaaagagattgggggagtggggagggggaagaagaacaggaagaaaaaaagtactctgaactgctccaagtaacgctaattaaaaacttgctttaaagatattgaatttaaaaaggcataataatcaaatacttaatagcaaataaatgatgtatcagggtatttgtattgcaaactgtgaatcaaaggcttcacagccccagaggattccatataaaagacattgtaatggagtggattgaactcacagatggataccaacacggtcagaagaaaaacggacagaacggttcttgtatatttaaactgatctccactatgaagaaatttaggaactaatcttattaattaggcttatacagcgggggatttgagcttacaggattcctccatggtaaagctgaactgaaacaattctcaagaatgcatcagctgtacctacaatagcccctccctcttcctttgaaggccccagcacctctgccctgtggtcaccgaatctgtactaaggacctgtgttcagccacacccagtggtagctccaccaaatcatgaacagcctaattttgagtgtctgtgtcttagacctgcaaacagctaataggaaattctattaatatgttagcttgccattttaaatatgttctgagggttgttttgtctcgtgttcatgatgttaagaaaatgcaggcagtatccctcatcttatgtaagtgttaattaatattaagggaaatgactacaaactttcaaagcaaatgctccatagctaaagcaacttagaccttatttctgctactgttgctgaaatgtggctttggcattgttggatttcataaaaaatttctggcaggaagtcttgttagtatacatcagtctttttcatcatccaagtttgtagttcatttaaaaatacaacattaaacacattttgctaggatgtcaaatagtcacagttctaagtagttggaaacaaaattgacgcatgttaatctatgcaaagagaaaggaaaggatgaggtgatgtattgactcaaggttcattcttgctgcaattgaacatcctcaagagttgggatggaaatggtgatttttacatgtgtcctggaaagatattaaagtaattcaaatcttccccaaaggggaaaggaagagagtgatactgacctttttaagtcatagaccaaagtctgctgtagaacaaatatgggaggacaaagaatcgcaaattcttcaaatgactattatcagtattattaacatgcgatgccacaggtatgaaagtcttgccttatttcacaattttaaaaggtagctgtgcagatgtggatcaacatttgtttaaaataaagtattaatactttaaagtcaaataagatatagtgtttacattctttaggtcctgaggggcagggggatctgtgatataacaaaatagcaaaagcggtaatttccttaatgttatttttctgattggtaattatttttaacagtacttaattattctatgtcgtgagacactaaaatcaaaaacgggaatctcatttagactttaatttttttgagattatcggcggcacaatcactttgtagaaactgtaaaaaataaaagtatctcctagtcccttaattttttcataaatatttctggcttttgagtagtgtatttatattgtatatcatactttcaactgtagacaattatgatgctaatttattgtttcttggtttcacctttgtataagatatagccaagactgaagaaaccaaatatatgtgtttactgtagcatgtcttcaaattagtggaacttagttcagggacatagaagagtcttaatgaattaaaatcattcacttgattaaatgtctgtaaatcttcatcattcctactgtagtttatttaatatctattgtaaattatgtgacttgtagcttcctctggttttcaagtaaactcaacaaggtggagtcttacctggttttcctttccaagcattgtaaattgtataccaaagatattagttattacttctgtgtgtacaaagaggattattttattatgtttattaatcacctctaatactcatccacatgaagggtacacattaggtaagctgggcgttgactcatgcgcagtctcagtcacccgtgttatcttcgtggctcaaaggacaatgcaaaatcgccgatcagagctcatacccaaagcattacagagaacagcagcatcattgccctccccagctgaaaaacaagttggctagaagatacatggagaggaatggtgtggtcaacagttaatgaaacggttctatcatgcatgtgtaatgtggatggagacaattataagatttgactataactatttggagggtctttaacattgccaaaaaaacaaatatgttgatttttattttattttattttttattttaagaggcgggatcttgatctcacatgttgcccaggctggccttgaactcctgggctcaagcattcctcctgcctcagcctcccccatagctgggactaggggtgcatgccagcatacctggctacgttgactcttaaaatctatgttctcttattttaaagatacagtgctccccactgaaaattaaacctaaaaaatgtcacatattggtatgttgttaacctggtagattaaatcatgagaatgattagaaagacgggcaacacagcgggttacatccacactgctgatcacaccaacgacaggagctgataagcaagaaagcgtcacagccagcgtctgttcacccaaggttgacaagtgaagtttctctaatgttgattgttagccgatttgtaacctggcatttacttagcaactgccttatcaattacaggatttgccggtaaaagcagactcaaatataaaggtttttggcttaacttggtttattatagttgctctatgtttgtaaacagacaatctctaatgtctgattatttgtatcacagatctgcagctgccttggacttgaatccatgcaatgtttagagtgtgaagtcagttacttgttgatgttttcttactgtatcaatgaaatacatattgtcatgtcagttcttgccaggaacttctcaacaaaatggaattttttttttcagtatttcaataaatattgatatgcccagcctgataattttt

SEQ ID NO: 2987 - protein, 495 aa, Homo sapiens; identical to SEQ ID NO: 142

SEQ ID NO: 2988 - DNA, 5063 bp, Homo sapiens
acagcaggtcactaatgttggaaaaagtacagagtccagggaaagacttgcttgtaactttatgaattctggatttttttttttcctttgctttttcttaactttcactaagggttactgtagtctgatgtgtccttcccaaggccacgaaatttgacaagctgcacttttcttttgctcaatgatttctgctttaagccaaagaactgcctataatttcactaagaatgtcttctaattcagatactggggatttacaagagtctttaaagcacggacttacacctattggtgctgggcttccggaccgacacggatcccccatccccgcccgcggtcgccttgtcatgctgcccaaagtggagacggaagccctgggactggctcgatcgcatggggaacagggccagatgccggaaaacatgcaagtgtctcaatttaaaatggtgaattactcctatgatgaagatctggaagagctttgtcccgtgtgtggagataaagtgtctgggtaccattatgggctcctcacctgtgaaagctgcaagggattttttaagcgaacagtccaaaataataaaaggtacacatgtatagaaaaccagaactgccaaattgacaaaacacagagaaagcgttgtccttactgtcgttttcaaaaatgtctaagtgttggaatgaagctagaagctgtaagggccgaccgaatgcgtggaggaaggaataagtttgggccaatgtacaagagagacagggccctgaagcaacagaaaaaagccctcatccgagccaatggacttaagctagaagccatgtctcaggtgatccaagctatgccctctgacctgaccatttcctctgcaattcaaaacatccactctgcctccaaaggcctacctctgaaccatgctgccttgcctcctacagactatgacagaagtccctttgtaacatcccccattagcatgacaatgccccctcacggcagcctgcaaggttaccaaacatatggccactttcctagccgggccatcaagtctgagtacccagacccctataccagctcacccgagtccataatgggctattcatatatggatagttaccagacgagctctccagcaagcatcccacatctgatactggaacttttgaagtgtgagccagatgagcctcaagtccaggctaaaatcatggcctatttgcagcaagagcaggctaaccgaagcaagcacgaaaagctgagcacctttgggcttatgtgcaaaatggcagatcaaactctcttctccattgtcgagtgggccaggagtagtatcttcttcagagaacttaaggttgatgaccaaatgaagctgcttcagaactgctggagtgagctcttaatcctcgaccacatttaccgacaagtggtacatggaaaggaaggatccatcttcctggttactgggcaacaagtggactattccataatagcatcacaagccggagccaccctcaacaacctcatgagtcatgcacaggagttagtggcaaaacttcgttctctccagtttgatcaacgagagttcgtatgtctgaaattcttggtgctctttagtttagatgtcaaaaaccttgaaaacttccagctggtagaaggtgtccaggaacaagtcaatgccgccctgctggactacacaatgtgtaactacccgcagcagacagagaaatttggacagctacttcttcgactacccgaaatccgggccatcagtatgcaggctgaagaatacctctactacaagcacctgaacggggatgtgccctataataaccttctcattgaaatgttgcatgccaaaagagcataagttacaacccctaggagctctgctttcaaaacaaaaagagattgggggagtggggagggggaagaagaacaggaagaaaaaaagtactctgaactgctccaagtaacgctaattaaaaacttgctttaaagatattgaatttaaaaaggcataataatcaaatacttaatagcaaataaatgatgtatcagggtatttgtattgcaaactgtgaatcaaaggcttcacagccccagaggattccatataaaagacattgtaatggagtggattgaactcacagatggataccaacacggtcagaagaaaaacggacagaacggttcttgtatatttaaactgatctccactatgaagaaatttaggaactaatcttattaattaggcttatacagcgggggatttgagcttacaggattcctccatggtaaagctgaactgaaacaattctcaagaatgcatcagctgtacctacaatagcccctccctcttcctttgaaggccccagcacctctgccctgtggtcaccgaatctgtactaaggacctgtgttcagccacacccagtggtagctccaccaaatcatgaacagcctaattttgagtgtctgtgtcttagacctgcaaacagctaataggaaattctattaatatgttagcttgccattttaaatatgttctgagggttgttttgtctcgtgttcatgatgttaagaaaatgcaggcagtatccctcatcttatgtaagtgttaattaatattaagggaaatgactacaaactttcaaagcaaatgctccatagctaaagcaacttagaccttatttctgctactgttgctgaaatgtggctttggcattgttggatttcataaaaaatttctggcaggaagtcttgttagtatacatcagtctttttcatcatccaagtttgtagttcatttaaaaatacaacattaaacacattttgctaggatgtcaaatagtcacagttctaagtagttggaaacaaaattgacgcatgttaatctatgcaaagagaaaggaaaggatgaggtgatgtattgactcaaggttcattcttgctgcaattgaacatcctcaagagttgggatggaaatggtgatttttacatgtgtcctggaaagatattaaagtaattcaaatcttccccaaaggggaaaggaagagagtgatactgacctttttaagtcatagaccaaagtctgctgtagaacaaatatgggaggacaaagaatcgcaaattcttcaaatgactattatcagtattattaacatgcgatgccacaggtatgaaagtcttgccttatttcacaattttaaaaggtagctgtgcagatgtggatcaacatttgtttaaaataaagtattaatactttaaagtcaaataagatatagtgtttacattctttaggtcctgaggggcagggggatctgtgatataacaaaatagcaaaagcggtaatttccttaatgttatttttctgattggtaattatttttaacagtacttaattattctatgtcgtgagacactaaaatcaaaaacgggaatctcatttagactttaatttttttgagattatcggcggcacaatcactttgtagaaactgtaaaaaataaaagtatctcctagtcccttaattttttcataaatatttctggcttttgagtagtgtatttatattgtatatcatactttcaactgtagacaattatgatgctaatttattgtttcttggtttcacctttgtataagatatagccaagactgaagaaaccaaatatatgtgtttactgtagcatgtcttcaaattagtggaacttagttcagggacatagaagagtcttaatgaattaaaatcattcacttgattaaatgtctgtaaatcttcatcattcctactgtagtttatttaatatctattgtaaattatgtgacttgtagcttcctctggttttcaagtaaactcaacaaggtggagtcttacctggttttcctttccaagcattgtaaattgtataccaaagatattagttattacttctgtgtgtacaaagaggattattttattatgtttattaatcacctctaatactcatccacatgaagggtacacattaggtaagctgggcgttgactcatgcgcagtctcagtcacccgtgttatcttcgtggctcaaaggacaatgcaaaatcgccgatcagagctcatacccaaagcattacagagaacagcagcatcattgccctccccagctgaaaaacaagttggctagaagatacatggagaggaatggtgtggtcaacagttaatgaaacggttctatcatgcatgtgtaatgtggatggagacaattataagatttgactataactatttggagggtctttaacattgccaaaaaaacaaatatgttgatttttattttattttattttttattttaagaggcgggatcttgatctcacatgttgcccaggctggccttgaactcctgggctcaagcattcctcctgcctcagcctcccccatagctgggactaggggtgcatgccagcatacctggctacgttgactcttaaaatctatgttctcttattttaaagatacagtgctccccactgaaaattaaacctaaaaaatgtcacatattggtatgttgttaacctggtagattaaatcatgagaatgattagaaagacgggcaacacagcgggttacatccacactgctgatcacaccaacgacaggagctgataagcaagaaagcgtcacagccagcgtctgttcacccaaggttgacaagtgaagtttctctaatgttgattgttagccgatttgtaacctggcatttacttagcaactgccttatcaattacaggatttgccggtaaaagcagactcaaatataaaggtttttggcttaacttggtttattatagttgctctatgtttgtaaacagacaatctctaatgtctgattatttgtatcacagatctgcagctgccttggacttgaatccatgcaatgtttagagtgtgaagtcagttacttgttgatgttttcttactgtatcaatgaaatacatattgtcatgtcagttcttgccaggaacttctcaacaaaatggaattttttttttcagtatttcaataaatattgatatgcccagcctgataattttt

SEQ ID NO: 2989 - protein, 541 aa, Homo sapiens; identical to SEQ ID NO: 144

SEQ ID NO: 2990 - DNA, 643 bp, Homo sapiens
gatggagtctcattctgtcacccaggctggagtgcagtgtcgcgatttcggctcactgcaacccctgcctcccaggagaatcgcttgaacctgggaggtggaggttgcagtgagctgagattacaccattgcattccagcctgggcaacaagagcgaaactccatctcaaaataataataataataataataataataataataataataaagtacagtttaaataccatagggtaggtcagatattcttaagattccttctttcattcagtaaatacttatcaagtattagtcgtatgccaggtaacattataggacttagagattcaacatgaagagcatagacaaaaatccctgcttttgaggatcatatttatatctattttagtgactaagagcatttatttaagacaattgcactcatgtaattaaaaagcacttataatctggcaagctagcctaatcttagcaatggaatgtttctgctctctttctgtttaagccttcaggagatcataccagttttcccaactggcatatggtgagttcaagtacatttcccacatatgctcagggattatcttaattgtattcctttctgaagcttggaatcaagggaaaaaaagaacaataatgatttagg

SEQ ID NO: 2991 - protein, 78 aa, Homo sapiens
DGVSFCHPGWSAVSRFRLTATPASQENRLNLGGGGCSELRLHHCIPAWATRAKLHLKIIIIIIIIIIIIIKYSLNTIG

SEQ ID NO: 2992 - DNA, 668 bp, Homo sapiens
tgaaattcagggactctttggtggagcaattaccagtcaacttcagggtattatgataaactctgatctggggaggaaccaggactacatagatcaaggcagttttcttctttgagaaactatcccagatatcatcatagagtcttctgctcttcctcaactaccaaagaaaaacatcagcgaagcagcaggccatgcaccccccaaaaactccatctggggctcttcatagaaaaaggaaaatggcagcctggcccttctccaggctgtggaaagtctctgatccaattctcttccaaatgaccttgatcgctgctctgttgcctgctgttcttggcaattgtggtcctccacccactttatcatttgctgccccgatggatattacgttgactgagacacgcttcaaaactggaactactctgaaatacacctgcctccctggctacgtcagatcccattcaactcagacgcttacctgtaattctgatggcgaatgggtgtataacaccttctgtatcttagatacagggtttcaccatattggctagactggtctcaaactcctgacctcaagtgatctgcctgcctcggcttcccaaagtgctgatattacagacaaacgatgcagacacccaggagagttacgtaatgggcaagtagagatt

SEQ ID NO: 2993 - protein, 118 aa, Homo sapiens
MHPPKTPSGALHRKRKMAAWPFSRLWKVSDPILFQMTLIAALLPAVLGNCGPPPTLSFAAPMDITLTETRFKTGTTLKYTCLPGYVRSHSTQTLTCNSDGEWVYNTFCILDTGFHHIG

SEQ ID NO: 2994 - DNA, 2242 bp, Homo sapiens
tgaaattcagggactctttggtggagcaattaccagtcaacttcagggtattatgataaactctgatctggggaggaaccaggactacatagatcaaggcagttttcttctttgagaaactatcccagatatcatcatagagtcttctgctcttcctcaactaccaaagaaaaacatcagcgaagcagcaggccatgcaccccccaaaaactccatctggggctcttcatagaaaaaggaaaatggcagcctggcccttctccaggctgtggaaagtctctgatccaattctcttccaaatgaccttgatcgctgctctgttgcctgctgttcttggcaattgtggtcctccacccactttatcatttgctgccccgatggatattacgttgactgagacacgcttcaaaactggaactactctgaaatacacctgcctccctggctacgtcagatcccattcaactcagacgcttacctgtaattctgatggcgaatgggtgtataacaccttctgtatctacaaacgatgcagacacccaggagagttacgtaatgggcaagtagagattaagacagatttatcttttggatcacaaatagaattcagctgttcagaaggatttttcttaattggctcaaccactagtcgttgtgaagtccaagatagaggagttggctggagtcatcctctcccacaatgtgaaattgtcaagtgtaagcctcctccagacatcaggaatggaaggcacagcggtgaagaaaatttctacgcatacggcttttctgtcacctacagctgtgacccccgcttctcactcttgggccatgcctccatttcttgcactgtggagaatgaaacaataggtgtttggagaccaagccctcctacctgtgaaaaaatcacctgtcgcaagccagatgtttcacatggggaaatggtctctggatttggacccatctataattacaaagacactattgtgtttaagtgccaaaaaggttttgttctcagaggcagcagtgtaattcattgtgatgctgatagcaaatggaatccttctcctcctgcttgtgagcccaatagttgtattaatttaccagacattccacatgcttcctgggaaacatatcctaggccgacaaaagaggatgtgtatgttgttgggactgtgttaaggtaccgctgtcatcctggctacaaacccactacagatgagcctacgactgtgatttgtcagaaaaatttgagatggaccccataccaaggatgtgaggcgttatgttgccctgaaccaaagctaaataatggtgaaatcactcaacacaggaaaagtcgtcctgccaatcactgtgtttatttctatggagatgagatttcattttcatgtcatgagaccagtaggttttcagctatatgccaaggagatggcacgtggagtccccgaacaccatcatgtggagacatttgcaattttcctcctaaaattgcccatgggcattataaacaatctagttcatacagctttttcaaagaagagattatatatgaatgtgataaaggctacattctggtcggacaggcgaaactctcctgcagttattcacactggtcagctccagcccctcaatgtaaagctctgtgtcggaaaccagaattagtgaatggaaggttgtctgtggataaggatcagtatgttgagcctgaaaatgtcaccatccaatgtgattctggctatggtgtggttggtccccaaagtatcacttgctctgggaacagaacctggtacccagaggtgcccaagtgtgagtgggagacccccgaaggctgtgaacaagtgctcacaggcaaaagactcatgcagtgtctcccaaacccagaggatgtgaaaatggccctggaggtatataagctgtctctggaaattgaacaactggaactacagagagacagcgcaagacaatccactttggataaagaactataatttttctcaaaagaaggaggaaaaggtgtcttgctggcttgcctcttgcaattcaatacagatcagtttagcaaatctactgtcaatttggcagtgatattcatcataataaatatctagaaatgataatttgctaaagtttagtgctttgagattgtgaaattattaatcatcctctgtgtggctcatgtttttgcttttcaacacacaaagcacaaattttttttcgattaaaaatgtatgtataaaaaact

SEQ ID NO: 2995 - protein, 597 aa, Homo sapiens; identical to SEQ ID NO: 146

SEQ ID NO: 2996 - DNA, 646 bp, Homo sapiens
tgaaattcagggactctttggtggagcaattaccagtcaacttcagggtattatgataaactctgatctggggaggaaccaggactacatagatcaaggcagttttcttctttgagaaactatcccagatatcatcatagagtcttctgctcttcctcaactaccaaagaaaaacatcagcgaagcagcaggccatgcaccccccaaaaactccatctggggctcttcatagaaaaaggaaaatggcagcctggcccttctccaggctgtggaaagtctctgatccaattctcttccaaatgaccttgatcgctgctctgttgcctgctgttcttggcaattgtggtcctccacccactttatcatttgctgccccgatggatattacgttgactgagacacgcttcaaaactggaactactctgaaatacacctgcctccctggctacgtcagatcccattcaactcagacgcttacctgtaattctgatggcgaatgggtgtataacaccttctgtatctacaaacgatgcagacacccaggagagttacgtaatgggcaagtagagattaagacagatttatcttttggatcacaaatagaattcagctgttcagaaggatttttcttaattggctcaaccac

SEQ ID NO: 2997 - protein, 149 aa, Homo sapiens
MHPPKTPSGALHRKRKMAAWPFSRLWKVSDPILFQMTLIAALLPAVLGNCGPPPTLSFAAPMDITLTETRFKTGTTLKYTCLPGYVRSHSTQTLTCNSDGEWVYNTFCIYKRCRHPGELRNGQVEIKTDLSFGSQIEFSCSEGFFLIGS

SEQ ID NO: 2998 - DNA, 519 bp, Homo sapiens
taggagggtttgggctccagacacctattgtttcattctccacggtgcaggagatggagacgttgcctatgagtgagaagtaggggttgcagctgtaggtgacagaggaggcatatgtgtagaattcttgatctccaccgctgtgcttcccattcctgatgtctggagggggctcgcacttggcaactgaggctttttccacaaccatcgaaggctactctgatttgcaattagcaggataaactgaagataacaccttgcagaagcagatctcaattaacaactgatggaatcaacagatggaaccatacagaaaaggcagctgtagaagagttcatctgtatcctggccatatggccttgacctactctagagccattctgctggatgtgaagtggtatctgattgttactagaaggctatccttacaagaaatgctaaaggaaattgttcagactgaaagcaattgacaccagacggtaatttgaatccacacagtaaaacaatgagcatcagcag

SEQ ID NO: 2999 - protein, 56 aa, Homo sapiens
MEPYRKGSCRRVHLYPGHMALTYSRAILLDVKWYLIVTRRLSLQEMLKEIVQTESN

SEQ ID NO: 3000 - DNA, 942 bp, Homo sapiens
cggtgtcagccttttctttccttgctttaactcagacctactgaaccacctctctgttgaaataccacgaaggagaagaaataagcatctaaggtgataaacatctgtctcttatcaggataagacactgaaaatgttattattatggaagtatcttcattatgaaagactcttcacatcaacacgatggtgattactcgtttgcagttaccctcccagtattgcccatggacactacaaggaagttattttaataactccttatcctgaggctacatatgaatgtgatgaaggatatgttttggctggatttgctacaatctactgcaagtcttttcactggcaacttgcacctcctcaatgtaaagctctgtgtctgaaaccagaaatagtgaatggaaggctgtctgtggataaggatcagtatgttgagtctgaaaatgttaccattgaatgtgattctggctatggtgtggttggtctcaaaagtatcacttgctcagagaagagaacctggtacccagaagtgcccaggtgtgagtgggaggcacctgaaggttgtgagcaagtgctcacaggcagaaaactcatgcagtgtctcccaagcccagaggatgtgaaagtggccctggaggtgtataagctgtctctggagataaaacaacttgaaaaagagagagacaaattgatgaacacccatcagaaattttctgaaaaagaggaaatgaaggacttatttttcccttcaaatcaacatacagaatcttcactcatccaccctactcttccttgagcaccatcactctcataagggtctgggctaggagaactttcttattactgccagagaaaaatgtgtaattattggtaatctagccttttgtagctcaaatgtccagtttcctggacttgaagtgctggttaattaaataattatttacc

SEQ ID NO: 3001 - protein, 74 aa, Homo sapiens
MEGCLWIRISMLSLKMLPLNVILAMVWLVSKVSLAQRREPGTQKCPGVSGRHLKVVSKCSQAENSCSVSQAQRM

SEQ ID NO: 3002 - DNA, 917 bp, Homo sapiens
ttcttgtgattagcaatcaaggacagtttctcagctaatcagtacaggaagaagagcctatggtaacagacaataaaggaacagcttgcagacggcctatcgtgagactttgccttgtgatcatattacaagactgaataagatagacatgacctccttcctcctggacctgacaattgttccttcaaatcacttccacacatgcattgcctggggactggggactggggtctggatcccatggccagaccaaaccccaaaggaagctattggagaatacacaccttcgaaatgcggagaaatataagaaaaggaagacaagagttcaagaagccaggcatccaacaataataactaaagaggcaaggtaattctcaggatgatgtaacagaaagtccagactggtgaatgacaatgaagaactacaagaggtttgtactctgaaaagaagaaggaaaaaagtggaactcacagtttgtctaaagtttttgaccatgtttcaaggaagtatatggttctgtgcaaagttagcaaaaggtacattaaaaaaatgagaaaacaacaaaatcaggcaattaccaactaaaagtataaagaatttggtacaaaaaaggaaattaataatacactacatgctaacttgttaacaatttttacatagtaccaatacaataaatacaatgttaatttcaaactgcaattaattatgctggaaggatgtgggagtgttaagagagttaaattaaaatcttcataacaggaagtcaacagataatacctactgaatatttctactttttggagggatgttgggttggggaactactgtttcatttccttaaagtactatttggctttttaaattgcctgtacacatgcatatgcatacatagtctaaagttaaatttttaaaacca

SEQ ID NO: 3003 - protein, 52 aa, Homo sapiens
MTSFLLDLTIVPSNHFHTCIAWGLGTGVWIPWPDQTPKEAIGEYTPSKCGEI

SEQ ID NO: 3004 - DNA, 1134 bp, Homo sapiens
actctccccgagtctagggcccccggggcgtatgacgccggagccctctgaccgcacctctgaccacaacaaacccctactccacccgtcttgtttgtcccacccttggtgacgcagagccccagcccagaccccgcccaaagcactcatttaactggtattgcggagccacgaggcttctgcttactgcaactcgctccggccgctgggcgtagctgcgactcggcggagtcccggcggcgcgtccttgttctaacccggcgcgccatgaccgtcgcgcggccgagcgtgcccgcggcgctgcccctcctcggggagctgccccggctgctgctgctggtgctgttgtgcctgccggccgtgtggggtgactgtggccttcccccagatgtacctaatgcccagccagctttggaaggccgtacaagttttcccgaggatactgtaataacgtacaaatgtgaagaaagctttgtgaaaattcctggcgagaaggactcagtgatctgccttaagggcagtcaatggtcagatattgaagagttctgcaatcgtagctgcgaggtgccaacaaggctaaattctgcatccctcaaacagccttatatcactcagaattattttccagtcggtactgttgtggaatatgagtgccgtccaggttacagaagagaaccttctctatcaccaaaactaacttgccttcagaatttaaaatggtccacagcagtcgaattttgtaaaagtggcatattatttggtgcaaccatctccttctcatgtaacacagggtaagtttgggcatactaaaaccctgtatttaggaaatgagaaaacaaattaggacttaaggtgagattgttagtttcatgactggtattcacagctagtagcaattaaaacaatccctctcctcaaagacccttcatcatgagctcatcacagttaaatttagtaaaatgggggcaagaaaggaagatttcttaaaccaccagaattctctaaattctgatttcagtaaatatgtgattcaatataaaattttaaatgtgattaataaaaaaatttgagatgatgatacttgcagaaatcttcaaatgttaaatactaaaccaatctttagttgacctaaat

SEQ ID NO: 3005 - protein, 175 aa, Homo sapiens
MTVARPSVPAALPLLGELPRLLLLVLLCLPAVWGDCGLPPDVPNAQPALEGRTSFPEDTVITYKCEESFVKIPGEKDSVICLKGSQWSDIEEFCNRSCEVPTRLNSASLKQPYITQNYFPVGTVVEYECRPGYRREPSLSPKLTCLQNLKWSTAVEFCKSGILFGATISFSCNTG

SEQ ID NO: 3006 - DNA, 1723 bp, Homo sapiens
actctccccgagtctagggcccccggggcgtatgacgccggagccctctgaccgcacctctgaccacaacaaacccctactccacccgtcttgtttgtcccacccttggtgacgcagagccccagcccagaccccgcccaaagcactcatttaactggtattgcggagccacgaggcttctgcttactgcaactcgctccggccgctgggcgtagctgcgactcggcggagtcccggcggcgcgtccttgttctaacccggcgcgccatgaccgtcgcgcggccgagcgtgcccgcggcgctgcccctcctcggggagctgccccggctgctgctgctggtgctgttgtgcctgccggccgtgtggggtgactgtggccttcccccagatgtacctaatgcccagccagctttggaaggccgtacaagttttcccgaggatactgtaataacgtacaaatgtgaagaaagctttgtgaaaattcctggcgagaaggactcagtgatctgccttaagggcagtcaatggtcagatattgaagagttctgcaatcgtagctgcgaggtgccaacaaggctaaattctgcatccctcaaacagccttatatcactcagaattattttccagtcggtactgttgtggaatatgagtgccgtccaggttacagaagagaaccttctctatcaccaaaactaacttgccttcagaatttaaaatggtccacagcagtcgaattttgtaaaaagaaatcatgccctaatccgggagaaatacgaaatggtcagattgatgtaccaggtggcatattatttggtgcaaccatctccttctcatgtaacacagggtacaaattatttggctcgacttctagtttttgtcttatttcaggcagctctgtccagtggagtgacccgttgccagagtgcagagaaatttattgtccagcaccaccacaaattgacaatggaataattcaaggggaacgtgaccattatggatatagacagtctgtaacgtatgcatgtaataaaggattcaccatgattggagagcactctatttattgtactgtgaataatgatgaaggagagtggagtggcccaccacctgaatgcagaggaaaatctctaacttccaaggtcccaccaacagttcagaaacctaccacagtaaatgttccaactacagaagtctcaccaacttctcagaaaaccaccacaaaaaccaccacaccaaatgctcaagcaacacggagtacacctgtttccaggacaaccaagcattttcatgaaacaaccccaaataaaggaagtggaaccacttcaggtactacccgtcttctatctggttctcgtcctgtcacccaggctggtatgcggtggtgtgatcgtagctcactgcagtctcgaactcctgggttcaagcgatccttccacttcagcctcccaagtagctggtactacaggtgtgtgccacgacacccggctaagtttttgaaatttattttttgtagagacaggattttcctatgttgcccaggctggtttcaaactcctggccgtaagcgatttttccggcctcccaaaacgttgcgattataagtgtgagccactgcacctggccccacattttctttatccatttgtacattgatggacacttaagatgattccatatctttgctattgtgaatagtgcttcaataaatatgtgaatgcacat

SEQ ID NO: 3007 - protein, 444 aa, Homo sapiens
MTVARPSVPAALPLLGELPRLLLLVLLCLPAVWGDCGLPPDVPNAQPALEGRTSFPEDTVITYKCEESFVKIPGEKDSVICLKGSQWSDIEEFCNRSCEVPTRLNSASLKQPYITQNYFPVGTVVEYECRPGYRREPSLSPKLTCLQNLKWSTAVEFCKKKSCPNPGEIRNGQIDVPGGILFGATISFSCNTGYKLFGSTSSFCLISGSSVQWSDPLPECREIYCPAPPQIDNGIIQGERDHYGYRQSVTYACNKGFTMIGEHSIYCTVNNDEGEWSGPPPECRGKSLTSKVPPTVQKPTTVNVPTTEVSPTSQKTTTKTTTPNAQATRSTPVSRTTKHFHETTPNKGSGTTSGTTRLLSGSRPVTQAGMRWCDRSSLQSRTPGFKRSFHFSLPSSWYYRCVPRHPAKFLKFIFCRDRIFLCCPGWFQTPGRKRFFRPPKTLRL

SEQ ID NO: 3008 - DNA, 1515 bp, Homo sapiens
actctccccgagtctagggcccccggggcgtatgacgccggagccctctgaccgcacctctgaccacaacaaacccctactccacccgtcttgtttgtcccacccttggtgacgcagagccccagcccagaccccgcccaaagcactcatttaactggtattgcggagccacgaggcttctgcttactgcaactcgctccggccgctgggcgtagctgcgactcggcggagtcccggcggcgcgtccttgttctaacccggcgcgccatgaccgtcgcgcggccgagcgtgcccgcggcgctgcccctcctcggggagctgccccggctgctgctgctggtgctgttgtgcctgccggccgtgtggggtgactgtggccttcccccagatgtacctaatgcccagccagctttggaaggccgtacaagttttcccgaggatactgtaataacgtacaaatgtgaagaaagctttgtgaaaattcctggcgagaaggactcagtgatctgccttaagggcagtcaatggtcagatattgaagagttctgcaatcgtagctgcgaggtgccaacaaggctaaattctgcatccctcaaacagccttatatcactcagaattattttccagtcggtactgttgtggaatatgagtgccgtccaggttacagaagagaaccttctctatcaccaaaactaacttgccttcagaatttaaaatggtccacagcagtcgaattttgtaaaaagaaatcatgccctaatccgggagaaatacgaaatggtcagattgatgtaccaggtggcatattatttggtgcaaccatctccttctcatgtaacacagggtacaaattatttggctcgacttctagtttttgtcttatttcaggcagctctgtccagtggagtgacccgttgccagagtgcagagaaatttattgtccagcaccaccacaaattgacaatggaataattcaaggggaacgtgaccattatggatatagacagtctgtaacgtatgcatgtaataaaggattcaccatgattggagagcactctatttattgtactgtgaataatgatgaaggagagtggagtggcccaccacctgaatgcagaggaaaatctctaacttccaaggtcccaccaacagttcagaaacctaccacagtaaatgttccaactacagaagtctcaccaacttctcagaaaaccaccacaaaaaccaccacaccaaatgctcaagcaacacggagtacacctgtttccaggacaaccaagcattttcatgaaacaaccccaaataaaggaagtggaaccacttcaggtactacccgtcttctatctgggcacacgtgtttcacgttgacaggtttgcttgggacgctagtaaccatgggcttgctgacttagccaaagaagagttaagaagaaaatacacacaagtatacagactgttcctagtttcttagacttatctgcatattggataaaataaatgcaattgtgctcttc

SEQ ID NO: 3009 - protein, 381 aa, Homo sapiens; identical to SEQ ID NO: 149

SEQ ID NO: 3010 - DNA, 2304 bp, Homo sapiens
actctccccgagtctagggcccccggggcgtatgacgccggagccctctgaccgcacctctgaccacaacaaacccctactccacccgtcttgtttgtcccacccttggtgacgcagagccccagcccagaccccgcccaaagcactcatttaactggtattgcggagccacgaggcttctgcttactgcaactcgctccggccgctgggcgtagctgcgactcggcggagtcccggcggcgcgtccttgttctaacccggcgcgccatgaccgtcgcgcggccgagcgtgcccgcggcgctgcccctcctcggggagctgccccggctgctgctgctggtgctgttgtgcctgccggccgtgtggggtgactgtggccttcccccagatgtacctaatgcccagccagctttggaaggccgtacaagttttcccgaggatactgtaataacgtacaaatgtgaagaaagctttgtgaaaattcctggcgagaaggactcagtgatctgccttaagggcagtcaatggtcagatattgaagagttctgcaatcgtagctgcgaggtgccaacaaggctaaattctgcatccctcaaacagccttatatcactcagaattattttccagtcggtactgttgtggaatatgagtgccgtccaggttacagaagagaaccttctctatcaccaaaactaacttgccttcagaatttaaaatggtccacagcagtcgaattttgtaaaaagaaatcatgccctaatccgggagaaatacgaaatggtcagattgatgtaccaggtggcatattatttggtgcaaccatctccttctcatgtaacacagggtacaaattatttggctcgacttctagtttttgtcttatttcaggcagctctgtccagtggagtgacccgttgccagagtgcagagaaatttattgtccagcaccaccacaaattgacaatggaataattcaaggggaacgtgaccattatggatatagacagtctgtaacgtatgcatgtaataaaggattcaccatgattggagagcactctatttattgtactgtgaataatgatgaaggagagtggagtggcccaccacctgaatgcagaggaaaatctctaacttccaaggtcccaccaacagttcagaaacctaccacagtaaatgttccaactacagaagtctcaccaacttctcagaaaaccaccacaaaaaccaccacaccaaatgctcaagcaacacggagtacacctgtttccaggacaaccaagcattttcatgaaacaaccccaaataaaggaagtggaaccacttcaggtactacccgtcttctatctgggcacacgtgtttcacgttgacaggtttgcttgggacgctagtaaccatgggcttgctgacttagccaaagaagagttaagaagaaaatacacacaagtatacagactgttcctagtttcttagacttatctgcatattggataaaataaatgcaattgtgctcttcatttaggatgctttcattgtctttaagatgtgttaggaatgtcaacagagcaaggagaaaaaaggcagtcctggaatcacattcttagcacacctacacctcttgaaaatagaacaacttgcagaattgagagtgattcctttcctaaaagtgtaagaaagcatagagatttgttcgtatttagaatgggatcacgaggaaaagagaaggaaagtgatttttttccacaagatctgtaatgttatttccacttataaaggaaataaaaaatgaaaaacattatttggatatcaaaagcaaataaaaacccaattcagtctcttctaagcaaaattgctaaagagagatgaaccacattataaagtaatctttggctgtaaggcattttcatctttccttcgggttggcaaaatattttaaaggtaaaacatgctggtgaaccaggggtgttgatggtgataagggaggaatatagaatgaaagactgaatcttcctttgttgcacaaatagagtttggaaaaagcctgtgaaaggtgtcttctttgacttaatgtctttaaaagtatccagagatactacaatattaacataagaaaagattatatattatttctgaatcgagatgtccatagtcaaatttgtaaatcttattcttttgtaatatttatttatatttatttatgacagtgaacattctgattttacatgtaaaacaagaaaagttgaagaagatatgtgaagaaaaatgtatttttcctaaatagaaataaatgatcccattttttggt

SEQ ID NO: 3011 - protein, 381 aa, Homo sapiens; identical to SEQ ID NO: 149

SEQ ID NO: 3012 - DNA, 2547 bp, Homo sapiens
actctccccgagtctagggcccccggggcgtatgacgccggagccctctgaccgcacctctgaccacaacaaacccctactccacccgtcttgtttgtcccacccttggtgacgcagagccccagcccagaccccgcccaaagcactcatttaactggtattgcggagccacgaggcttctgcttactgcaactcgctccggccgctgggcgtagctgcgactcggcggagtcccggcggcgcgtccttgttctaacccggcgcgccatgaccgtcgcgcggccgagcgtgcccgcggcgctgcccctcctcggggagctgccccggctgctgctgctggtgctgttgtgcctgccggccgtgtggggtgactgtggccttcccccagatgtacctaatgcccagccagctttggaaggccgtacaagttttcccgaggatactgtaataacgtacaaatgtgaagaaagctttgtgaaaattcctggcgagaaggactcagtgatctgccttaagggcagtcaatggtcagatattgaagagttctgcaatcgtagctgcgaggtgccaacaaggctaaattctgcatccctcaaacagccttatatcactcagaattattttccagtcggtactgttgtggaatatgagtgccgtccaggttacagaagagaaccttctctatcaccaaaactaacttgccttcagaatttaaaatggtccacagcagtcgaattttgtaaaaagaaatcatgccctaatccgggagaaatacgaaatggtcagattgatgtaccaggtggcatattatttggtgcaaccatctccttctcatgtaacacagggtacaaattatttggctcgacttctagtttttgtcttatttcaggcagctctgtccagtggagtgacccgttgccagagtgcagagaaatttattgtccagcaccaccacaaattgacaatggaataattcaaggggaacgtgaccattatggatatagacagtctgtaacgtatgcatgtaataaaggattcaccatgattggagagcactctatttattgtactgtgaataatgatgaaggagagtggagtggcccaccacctgaatgcagaggaaaatctctaacttccaaggtcccaccaacagttcagaaacctaccacagtaaatgttccaactacagaagtctcaccaacttctcagaaaaccaccacaaaaaccaccacaccaaatgctcaagcaacacggagtacacctgtttccaggacaaccaagcattttcatgaaacaaccccaaataaaggaagtggaaccacttcaggtactacccgtcttctatctggtttctctccatggaagaggagaagaccagaggcatctagtcagacatcttgaagccactccccatgatactgtcttaggaaaacaatcaacatgtagcattcatggataccaaagggaaaatggtagagacggtgtttcaccgtgttatccaggatggtcttgatctcctggcctcgagatctgcctgcctcggcctcccaaagtgctgggattacaggcgtgagccaccgcacctggccagggcacacgtgtttcacgttgacaggtttgcttgggacgctagtaaccatgggcttgctgacttagccaaagaagagttaagaagaaaatacacacaagtatacagactgttcctagtttcttagacttatctgcatattggataaaataaatgcaattgtgctcttcatttaggatgctttcattgtctttaagatgtgttaggaatgtcaacagagcaaggagaaaaaaggcagtcctggaatcacattcttagcacacctacacctcttgaaaatagaacaacttgcagaattgagagtgattcctttcctaaaagtgtaagaaagcatagagatttgttcgtatttagaatgggatcacgaggaaaagagaaggaaagtgatttttttccacaagatctgtaatgttatttccacttataaaggaaataaaaaatgaaaaacattatttggatatcaaaagcaaataaaaacccaattcagtctcttctaagcaaaattgctaaagagagatgaaccacattataaagtaatctttggctgtaaggcattttcatctttccttcgggttggcaaaatattttaaaggtaaaacatgctggtgaaccaggggtgttgatggtgataagggaggaatatagaatgaaagactgaatcttcctttgttgcacaaatagagtttggaaaaagcctgtgaaaggtgtcttctttgacttaatgtctttaaaagtatccagagatactacaatattaacataagaaaagattatatattatttctgaatcgagatgtccatagtcaaatttgtaaatcttattcttttgtaatatttatttatatttatttatgacagtgaacattctgattttacatgtaaaacaagaaaagttgaagaagatatgtgaagaaaaatgtatttttcctaaatagaaataaatgatcccattttttggt

SEQ ID NO: 3013 - protein, 377 aa, Homo sapiens
MTVARPSVPAALPLLGELPRLLLLVLLCLPAVWGDCGLPPDVPNAQPALEGRTSFPEDTVITYKCEESFVKIPGEKDSVICLKGSQWSDIEEFCNRSCEVPTRLNSASLKQPYITQNYFPVGTVVEYECRPGYRREPSLSPKLTCLQNLKWSTAVEFCKKKSCPNPGEIRNGQIDVPGGILFGATISFSCNTGYKLFGSTSSFCLISGSSVQWSDPLPECREIYCPAPPQIDNGIIQGERDHYGYRQSVTYACNKGFTMIGEHSIYCTVNNDEGEWSGPPPECRGKSLTSKVPPTVQKPTTVNVPTTEVSPTSQKTTTKTTTPNAQATRSTPVSRTTKHFHETTPNKGSGTTSGTTRLLSGFSPWKRRRPEASSQTS

SEQ ID NO: 3014 - DNA, 2422 bp, Homo sapiens
actctccccgagtctagggcccccggggcgtatgacgccggagccctctgaccgcacctctgaccacaacaaacccctactccacccgtcttgtttgtcccacccttggtgacgcagagccccagcccagaccccgcccaaagcactcatttaactggtattgcggagccacgaggcttctgcttactgcaactcgctccggccgctgggcgtagctgcgactcggcggagtcccggcggcgcgtccttgttctaacccggcgcgccatgaccgtcgcgcggccgagcgtgcccgcggcgctgcccctcctcggggagctgccccggctgctgctgctggtgctgttgtgcctgccggccgtgtggggtgactgtggccttcccccagatgtacctaatgcccagccagctttggaaggccgtacaagttttcccgaggatactgtaataacgtacaaatgtgaagaaagctttgtgaaaattcctggcgagaaggactcagtgatctgccttaagggcagtcaatggtcagatattgaagagttctgcaatcgtagctgcgaggtgccaacaaggctaaattctgcatccctcaaacagccttatatcactcagaattattttccagtcggtactgttgtggaatatgagtgccgtccaggttacagaagagaaccttctctatcaccaaaactaacttgccttcagaatttaaaatggtccacagcagtcgaattttgtaaaaagaaatcatgccctaatccgggagaaatacgaaatggtcagattgatgtaccaggtggcatattatttggtgcaaccatctccttctcatgtaacacagggtacaaattatttggctcgacttctagtttttgtcttatttcaggcagctctgtccagtggagtgacccgttgccagagtgcagagaaatttattgtccagcaccaccacaaattgacaatggaataattcaaggggaacgtgaccattatggatatagacagtctgtaacgtatgcatgtaataaaggattcaccatgattggagagcactctatttattgtactgtgaataatgatgaaggagagtggagtggcccaccacctgaatgcagaggaaaatctctaacttccaaggtcccaccaacagttcagaaacctaccacagtaaatgttccaactacagaagtctcaccaacttctcagaaaaccaccacaaaaaccaccacaccaaatgctcaagcaacacggagtacacctgtttccaggacaaccaagcattttcatgaaacaaccccaaataaaggaagtggaaccacttcaggtactacccgtcttctatctggttctcgtcctgtcacccaggctggtatgcggtggtgtgatcgtagctcactgcagtctcgaactcctgggttcaagcgatccttccacttcagcctcccaagtagctggtactacagggcacacgtgtttcacgttgacaggtttgcttgggacgctagtaaccatgggcttgctgacttagccaaagaagagttaagaagaaaatacacacaagtatacagactgttcctagtttcttagacttatctgcatattggataaaataaatgcaattgtgctcttcatttaggatgctttcattgtctttaagatgtgttaggaatgtcaacagagcaaggagaaaaaaggcagtcctggaatcacattcttagcacacctacacctcttgaaaatagaacaacttgcagaattgagagtgattcctttcctaaaagtgtaagaaagcatagagatttgttcgtatttagaatgggatcacgaggaaaagagaaggaaagtgatttttttccacaagatctgtaatgttatttccacttataaaggaaataaaaaatgaaaaacattatttggatatcaaaagcaaataaaaacccaattcagtctcttctaagcaaaattgctaaagagagatgaaccacattataaagtaatctttggctgtaaggcattttcatctttccttcgggttggcaaaatattttaaaggtaaaacatgctggtgaaccaggggtgttgatggtgataagggaggaatatagaatgaaagactgaatcttcctttgttgcacaaatagagtttggaaaaagcctgtgaaaggtgtcttctttgacttaatgtctttaaaagtatccagagatactacaatattaacataagaaaagattatatattatttctgaatcgagatgtccatagtcaaatttgtaaatcttattcttttgtaatatttatttatatttatttatgacagtgaacattctgattttacatgtaaaacaagaaaagttgaagaagatatgtgaagaaaaatgtatttttcctaaatagaaataaatgatcccattttttggt

SEQ ID NO: 3015 - protein, 440 aa, Homo sapiens
MTVARPSVPAALPLLGELPRLLLLVLLCLPAVWGDCGLPPDVPNAQPALEGRTSFPEDTVITYKCEESFVKIPGEKDSVICLKGSQWSDIEEFCNRSCEVPTRLNSASLKQPYITQNYFPVGTVVEYECRPGYRREPSLSPKLTCLQNLKWSTAVEFCKKKSCPNPGEIRNGQIDVPGGILFGATISFSCNTGYKLFGSTSSFCLISGSSVQWSDPLPECREIYCPAPPQIDNGIIQGERDHYGYRQSVTYACNKGFTMIGEHSIYCTVNNDEGEWSGPPPECRGKSLTSKVPPTVQKPTTVNVPTTEVSPTSQKTTTKTTTPNAQATRSTPVSRTTKHFHETTPNKGSGTTSGTTRLLSGSRPVTQAGMRWCDRSSLQSRTPGFKRSFHFSLPSSWYYRAHVFHVDRFAWDASNHGLADLAKEELRRKYTQVYRLFLVS

SEQ ID NO: 3016 - DNA, 3144 bp, Homo sapiens
actctccccgagtctagggcccccggggcgtatgacgccggagccctctgaccgcacctctgaccacaacaaacccctactccacccgtcttgtttgtcccacccttggtgacgcagagccccagcccagaccccgcccaaagcactcatttaactggtattgcggagccacgaggcttctgcttactgcaactcgctccggccgctgggcgtagctgcgactcggcggagtcccggcggcgcgtccttgttctaacccggcgcgccatgaccgtcgcgcggccgagcgtgcccgcggcgctgcccctcctcggggagctgccccggctgctgctgctggtgctgttgtgcctgccggccgtgtggggtgactgtggccttcccccagatgtacctaatgcccagccagctttggaaggccgtacaagttttcccgaggatactgtaataacgtacaaatgtgaagaaagctttgtgaaaattcctggcgagaaggactcagtgatctgccttaagggcagtcaatggtcagatattgaagagttctgcaatcgtagctgcgaggtgccaacaaggctaaattctgcatccctcaaacagccttatatcactcagaattattttccagtcggtactgttgtggaatatgagtgccgtccaggttacagaagagaaccttctctatcaccaaaactaacttgccttcagaatttaaaatggtccacagcagtcgaattttgtaaaaagaaatcatgccctaatccgggagaaatacgaaatggtcagattgatgtaccaggtggcatattatttggtgcaaccatctccttctcatgtaacacagggtacaaattatttggctcgacttctagtttttgtcttatttcaggcagctctgtccagtggagtgacccgttgccagagtgcagagaaatttattgtccagcaccaccacaaattgacaatggaataattcaaggggaacgtgaccattatggatatagacagtctgtaacgtatgcatgtaataaaggattcaccatgattggagagcactctatttattgtactgtgaataatgatgaaggagagtggagtggcccaccacctgaatgcagaggaaaatctctaacttccaaggtcccaccaacagttcagaaacctaccacagtaaatgttccaactacagaagtctcaccaacttctcagaaaaccaccacaaaaaccaccacaccaaatgctcaagcaacacggagtacacctgtttccaggacaaccaagcattttcatgaaacaaccccaaataaaggaagtggaaccacttcaggtactacccgtcttctatctggtttctctccatggaagaggagaagaccagaggcatctagtcagacatcttgaagccactccccatgatactgtcttaggaaaacaatcaacatgtagcattcatggataccaaagggaaaatggtagagacggtgtttcaccgtgttatccaggatggtcttgatctcctggcctcgagatctgcctgcctcggcctcccaaagtgctgggattacaggcgtgagccaccgcacctggccagggcacacgtgtttcacgttgacaggtttgcttgggacgctagtaaccatgggcttgctgacttagccaaagaagagttaagaagaaaatacacacaagtatacagactgttcctagtttcttagacttatctgcatattggataaaataaatgcaattgtgctcttcatttaggatgctttcattgtctttaagatgtgttaggaatgtcaacagagcaaggagaaaaaaggcagtcctggaatcacattcttagcacacctacacctcttgaaaatagaacaacttgcagaattgagagtgattcctttcctaaaagtgtaagaaagcatagagatttgttcgtatttagaatgggatcacgaggaaaagagaaggaaagtgatttttttccacaagatctgtaatgttatttccacttataaaggaaataaaaaatgaaaaacattatttggatatcaaaagcaaataaaaacccaattcagtctcttctaagcaaaattgctaaagagagatgaaccacattataaagtaatctttggctgtaaggcattttcatctttccttcgggttggcaaaatattttaaaggtaaaacatgctggtgaaccaggggtgttgatggtgataagggaggaatatagaatgaaagactgaatcttcctttgttgcacaaatagagtttggaaaaagcctgtgaaaggtgtcttctttgacttaatgtctttaaaagtatccagagatactacaatattaacataagaaaagattatatattatttctgaatcgagatgtccatagtcaaatttgtaaatcttattcttttgtaatatttatttatatttatttatgacagtgaacattctgattttacatgtaaaacaagaaaagttgaagaagatatgtgaagaaaaatgtatttttcctaaatagaaataaatgatcccattttttggtatcatgtagtatgtgaaatttattcttaaacgtgactactttatttctaaataagaaattccctacctgcttcctacaagcagttcagaatgccatgccttggttgtcctagtgtgaataattttcagctactttaaaattatattgtactttctcaagcatgtcatatcctttcctattagagtatctatattacttgttactgatttacctgaaggcaatctgattaatttctaggtttttaccatattcttgtcatcttgccaattacattttaagtgttagactagactaagatgtactagttgtatagaatataactagatttattatggcaatgtttattttgtcattttgcttcatctgttttgttgttgaagtactttaaatttcatacgttcatggcatttcactgtaaagactttaatgtgtatttcttaaaataaaactttttttcctccttaaccacagttatcacaactagcagttgtgatagtttctaatttcctaatagtttctaatattaggaaattctttgaactttcctagaagttctaagagtaggcacatatccatccacctattcattcattcatt

SEQ ID NO: 3017 - protein, 377 aa, Homo sapiens; identical to SEQ ID NO: 3013

SEQ ID NO: 3018 - DNA, 3019 bp, Homo sapiens
actctccccgagtctagggcccccggggcgtatgacgccggagccctctgaccgcacctctgaccacaacaaacccctactccacccgtcttgtttgtcccacccttggtgacgcagagccccagcccagaccccgcccaaagcactcatttaactggtattgcggagccacgaggcttctgcttactgcaactcgctccggccgctgggcgtagctgcgactcggcggagtcccggcggcgcgtccttgttctaacccggcgcgccatgaccgtcgcgcggccgagcgtgcccgcggcgctgcccctcctcggggagctgccccggctgctgctgctggtgctgttgtgcctgccggccgtgtggggtgactgtggccttcccccagatgtacctaatgcccagccagctttggaaggccgtacaagttttcccgaggatactgtaataacgtacaaatgtgaagaaagctttgtgaaaattcctggcgagaaggactcagtgatctgccttaagggcagtcaatggtcagatattgaagagttctgcaatcgtagctgcgaggtgccaacaaggctaaattctgcatccctcaaacagccttatatcactcagaattattttccagtcggtactgttgtggaatatgagtgccgtccaggttacagaagagaaccttctctatcaccaaaactaacttgccttcagaatttaaaatggtccacagcagtcgaattttgtaaaaagaaatcatgccctaatccgggagaaatacgaaatggtcagattgatgtaccaggtggcatattatttggtgcaaccatctccttctcatgtaacacagggtacaaattatttggctcgacttctagtttttgtcttatttcaggcagctctgtccagtggagtgacccgttgccagagtgcagagaaatttattgtccagcaccaccacaaattgacaatggaataattcaaggggaacgtgaccattatggatatagacagtctgtaacgtatgcatgtaataaaggattcaccatgattggagagcactctatttattgtactgtgaataatgatgaaggagagtggagtggcccaccacctgaatgcagaggaaaatctctaacttccaaggtcccaccaacagttcagaaacctaccacagtaaatgttccaactacagaagtctcaccaacttctcagaaaaccaccacaaaaaccaccacaccaaatgctcaagcaacacggagtacacctgtttccaggacaaccaagcattttcatgaaacaaccccaaataaaggaagtggaaccacttcaggtactacccgtcttctatctggttctcgtcctgtcacccaggctggtatgcggtggtgtgatcgtagctcactgcagtctcgaactcctgggttcaagcgatccttccacttcagcctcccaagtagctggtactacagggcacacgtgtttcacgttgacaggtttgcttgggacgctagtaaccatgggcttgctgacttagccaaagaagagttaagaagaaaatacacacaagtatacagactgttcctagtttcttagacttatctgcatattggataaaataaatgcaattgtgctcttcatttaggatgctttcattgtctttaagatgtgttaggaatgtcaacagagcaaggagaaaaaaggcagtcctggaatcacattcttagcacacctacacctcttgaaaatagaacaacttgcagaattgagagtgattcctttcctaaaagtgtaagaaagcatagagatttgttcgtatttagaatgggatcacgaggaaaagagaaggaaagtgatttttttccacaagatctgtaatgttatttccacttataaaggaaataaaaaatgaaaaacattatttggatatcaaaagcaaataaaaacccaattcagtctcttctaagcaaaattgctaaagagagatgaaccacattataaagtaatctttggctgtaaggcattttcatctttccttcgggttggcaaaatattttaaaggtaaaacatgctggtgaaccaggggtgttgatggtgataagggaggaatatagaatgaaagactgaatcttcctttgttgcacaaatagagtttggaaaaagcctgtgaaaggtgtcttctttgacttaatgtctttaaaagtatccagagatactacaatattaacataagaaaagattatatattatttctgaatcgagatgtccatagtcaaatttgtaaatcttattcttttgtaatatttatttatatttatttatgacagtgaacattctgattttacatgtaaaacaagaaaagttgaagaagatatgtgaagaaaaatgtatttttcctaaatagaaataaatgatcccattttttggtatcatgtagtatgtgaaatttattcttaaacgtgactactttatttctaaataagaaattccctacctgcttcctacaagcagttcagaatgccatgccttggttgtcctagtgtgaataattttcagctactttaaaattatattgtactttctcaagcatgtcatatcctttcctattagagtatctatattacttgttactgatttacctgaaggcaatctgattaatttctaggtttttaccatattcttgtcatcttgccaattacattttaagtgttagactagactaagatgtactagttgtatagaatataactagatttattatggcaatgtttattttgtcattttgcttcatctgttttgttgttgaagtactttaaatttcatacgttcatggcatttcactgtaaagactttaatgtgtatttcttaaaataaaactttttttcctccttaaccacagttatcacaactagcagttgtgatagtttctaatttcctaatagtttctaatattaggaaattctttgaactttcctagaagttctaagagtaggcacatatccatccacctattcattcattcatt

SEQ ID NO: 3019 - protein, 440 aa, Homo sapiens; identical to SEQ ID NO: 3015

SEQ ID NO: 3020 - DNA, 2901 bp, Homo sapiens
actctccccgagtctagggcccccggggcgtatgacgccggagccctctgaccgcacctctgaccacaacaaacccctactccacccgtcttgtttgtcccacccttggtgacgcagagccccagcccagaccccgcccaaagcactcatttaactggtattgcggagccacgaggcttctgcttactgcaactcgctccggccgctgggcgtagctgcgactcggcggagtcccggcggcgcgtccttgttctaacccggcgcgccatgaccgtcgcgcggccgagcgtgcccgcggcgctgcccctcctcggggagctgccccggctgctgctgctggtgctgttgtgcctgccggccgtgtggggtgactgtggccttcccccagatgtacctaatgcccagccagctttggaaggccgtacaagttttcccgaggatactgtaataacgtacaaatgtgaagaaagctttgtgaaaattcctggcgagaaggactcagtgatctgccttaagggcagtcaatggtcagatattgaagagttctgcaatcgtagctgcgaggtgccaacaaggctaaattctgcatccctcaaacagccttatatcactcagaattattttccagtcggtactgttgtggaatatgagtgccgtccaggttacagaagagaaccttctctatcaccaaaactaacttgccttcagaatttaaaatggtccacagcagtcgaattttgtaaaaagaaatcatgccctaatccgggagaaatacgaaatggtcagattgatgtaccaggtggcatattatttggtgcaaccatctccttctcatgtaacacagggtacaaattatttggctcgacttctagtttttgtcttatttcaggcagctctgtccagtggagtgacccgttgccagagtgcagagaaatttattgtccagcaccaccacaaattgacaatggaataattcaaggggaacgtgaccattatggatatagacagtctgtaacgtatgcatgtaataaaggattcaccatgattggagagcactctatttattgtactgtgaataatgatgaaggagagtggagtggcccaccacctgaatgcagaggaaaatctctaacttccaaggtcccaccaacagttcagaaacctaccacagtaaatgttccaactacagaagtctcaccaacttctcagaaaaccaccacaaaaaccaccacaccaaatgctcaagcaacacggagtacacctgtttccaggacaaccaagcattttcatgaaacaaccccaaataaaggaagtggaaccacttcaggtactacccgtcttctatctgggcacacgtgtttcacgttgacaggtttgcttgggacgctagtaaccatgggcttgctgacttagccaaagaagagttaagaagaaaatacacacaagtatacagactgttcctagtttcttagacttatctgcatattggataaaataaatgcaattgtgctcttcatttaggatgctttcattgtctttaagatgtgttaggaatgtcaacagagcaaggagaaaaaaggcagtcctggaatcacattcttagcacacctacacctcttgaaaatagaacaacttgcagaattgagagtgattcctttcctaaaagtgtaagaaagcatagagatttgttcgtatttagaatgggatcacgaggaaaagagaaggaaagtgatttttttccacaagatctgtaatgttatttccacttataaaggaaataaaaaatgaaaaacattatttggatatcaaaagcaaataaaaacccaattcagtctcttctaagcaaaattgctaaagagagatgaaccacattataaagtaatctttggctgtaaggcattttcatctttccttcgggttggcaaaatattttaaaggtaaaacatgctggtgaaccaggggtgttgatggtgataagggaggaatatagaatgaaagactgaatcttcctttgttgcacaaatagagtttggaaaaagcctgtgaaaggtgtcttctttgacttaatgtctttaaaagtatccagagatactacaatattaacataagaaaagattatatattatttctgaatcgagatgtccatagtcaaatttgtaaatcttattcttttgtaatatttatttatatttatttatgacagtgaacattctgattttacatgtaaaacaagaaaagttgaagaagatatgtgaagaaaaatgtatttttcctaaatagaaataaatgatcccattttttggtatcatgtagtatgtgaaatttattcttaaacgtgactactttatttctaaataagaaattccctacctgcttcctacaagcagttcagaatgccatgccttggttgtcctagtgtgaataattttcagctactttaaaattatattgtactttctcaagcatgtcatatcctttcctattagagtatctatattacttgttactgatttacctgaaggcaatctgattaatttctaggtttttaccatattcttgtcatcttgccaattacattttaagtgttagactagactaagatgtactagttgtatagaatataactagatttattatggcaatgtttattttgtcattttgcttcatctgttttgttgttgaagtactttaaatttcatacgttcatggcatttcactgtaaagactttaatgtgtatttcttaaaataaaactttttttcctccttaaccacagttatcacaactagcagttgtgatagtttctaatttcctaatagtttctaatattaggaaattctttgaactttcctagaagttctaagagtaggcacatatccatccacctattcattcattcatt

SEQ ID NO: 3021 - protein, 381 aa, Homo sapiens; identical to SEQ ID NO: 149

SEQ ID NO: 3022 - DNA, 517 bp, Homo sapiens
atccccagcagcagctcagacatctttcatatcaaaaaccctatctacaaagaccccttctgcagctcagaatcccatgatgacaaatgcttctgctacacaggccacactaacagcccaaaaattcaccacagcaaaagttgcatttacgcagagtccttcagcagcacgtaagtccactaatgtacattccccagtgactaatggtctcaagagtacacaaagattcccttctgctcatattacagcaacacggagtacacctgtttccaggacaaccaagcattttcatgaaacaaccccaaataaaggaagtggaaccacttcaggtactacccgtcttctatctgggcacacgtgtttcacgttgacaggtttgcttgggacgctagtaaccatgggcttgctgacttagccaaagaagagttaagaagaaaatacacacaagtatacagactgttcctagtttcttagacttatctgcatattggataaaataaatgcaattgtgctcttc

SEQ ID NO: 3023 - protein, 112 aa, Homo sapiens
MMTNASATQATLTAQKFTTAKVAFTQSPSAARKSTNVHSPVTNGLKSTQRFPSAHITATRSTPVSRTTKHFHETTPNKGSGTTSGTTRLLSGHTCFTLTGLLGTLVTMGLLT

SEQ ID NO: 3024 - DNA, 355 bp, Homo sapiens
tgctcatattacagcaacacggagtacacctgtttccaggacaaccaagcattttcatgaaacaaccccaaataaaggaagtggaaccacttcaggtactacccgtcttctatctggttctcgtcctgtcacccaggctggtatgcggtggtgtgatcgtagctcactgcagtctcgaactcctgggttcaagcgatccttccacttcagcctcccaagtagctggtactacaggtgtgtgccacgacacccggctaagtttttgaaatttattttttgtagagacaggattttcctatgttgcccaggctggtttcaaactcctggccgtaagcgatttttccggcctcccaaa

SEQ ID NO: 3025 - protein, 69 aa, Homo sapiens
MKQPQIKEVEPLQVLPVFYLVLVLSPRLVCGGVIVAHCSLELLGSSDPSTSASQVAGTTGVCHDTRLSF

SEQ ID NO: 3026 - DNA, 1189 bp, Homo sapiens
gctcatattacagcaacacggagtacacctgtttccaggacaaccaagcattttcatgaaacaaccccaaataaaggaagtggaaccacttcaggtactacccgtcttctatctggttctcgtcctgtcacccaggctggtatgcggtggtgtgatcgtagctcactgcagtctcgaactcctgggttcaagcgatccttccacttcagcctcccaagtagctggtactacagggcacacgtgtttcacgttgacaggtttgcttgggacgctagtaaccatgggcttgctgacttagccaaagaagagttaagaagaaaatacacacaagtatacagactgttcctagtttcttagacttatctgcatattggataaaataaatgcaattgtgctcttcatttaggatgctttcattgtctttaagatgtgttaggaatgtcaacagagcaaggagaaaaaaggcagtcctggaatcacattcttagcacacctacacctcttgaaaatagaacaacttgcagaattgagagtgattcctttcctaaaagtgtaagaaagcatagagatttgttcgtatttagaatgggatcacgaggaaaagagaaggaaagtgatttttttccacaagatctgtaatgttatttccacttataaaggaaataaaaaatgaaaaacattatttggatatcaaaagcaaataaaaacccaattcagtctcttctaagcaaaattgctaaagagagatgaaccacattataaagtaatctttggctgtaaggcattttcatctttccttcgggttggcaaaatattttaaaggtaaaacatgctggtgaaccaggggtgttgatggtgataagggaggaatatagaatgaaagactgaatcttcctttgttgcacaaatagagtttggaaaaagcctgtgaaaggtgtcttctttgacttaatgtctttaaaagtatccagagatactacaatattaacataagaaaagattatatattatttctgaatcgagatgtccatagtcaaatttgtaaatcttattcttttgtaatatttatttatatttatttatgacagtgaacattctgattttacatgtaaaacaagaaaagttgaagaagatatgtgaagaaaaatgtatttttcctaaatagaaataaatgatcccattttttggt

SEQ ID NO: 3027 - protein, 80 aa, Homo sapiens
MKQPQIKEVEPLQVLPVFYLVLVLSPRLVCGGVIVAHCSLELLGSSDPSTSASQVAGTTGHTCFTLTGLLGTLVTMGLLT

SEQ ID NO: 3028 - DNA, 1786 bp, Homo sapiens
gctcatattacagcaacacggagtacacctgtttccaggacaaccaagcattttcatgaaacaaccccaaataaaggaagtggaaccacttcaggtactacccgtcttctatctggttctcgtcctgtcacccaggctggtatgcggtggtgtgatcgtagctcactgcagtctcgaactcctgggttcaagcgatccttccacttcagcctcccaagtagctggtactacagggcacacgtgtttcacgttgacaggtttgcttgggacgctagtaaccatgggcttgctgacttagccaaagaagagttaagaagaaaatacacacaagtatacagactgttcctagtttcttagacttatctgcatattggataaaataaatgcaattgtgctcttcatttaggatgctttcattgtctttaagatgtgttaggaatgtcaacagagcaaggagaaaaaaggcagtcctggaatcacattcttagcacacctacacctcttgaaaatagaacaacttgcagaattgagagtgattcctttcctaaaagtgtaagaaagcatagagatttgttcgtatttagaatgggatcacgaggaaaagagaaggaaagtgatttttttccacaagatctgtaatgttatttccacttataaaggaaataaaaaatgaaaaacattatttggatatcaaaagcaaataaaaacccaattcagtctcttctaagcaaaattgctaaagagagatgaaccacattataaagtaatctttggctgtaaggcattttcatctttccttcgggttggcaaaatattttaaaggtaaaacatgctggtgaaccaggggtgttgatggtgataagggaggaatatagaatgaaagactgaatcttcctttgttgcacaaatagagtttggaaaaagcctgtgaaaggtgtcttctttgacttaatgtctttaaaagtatccagagatactacaatattaacataagaaaagattatatattatttctgaatcgagatgtccatagtcaaatttgtaaatcttattcttttgtaatatttatttatatttatttatgacagtgaacattctgattttacatgtaaaacaagaaaagttgaagaagatatgtgaagaaaaatgtatttttcctaaatagaaataaatgatcccattttttggtatcatgtagtatgtgaaatttattcttaaacgtgactactttatttctaaataagaaattccctacctgcttcctacaagcagttcagaatgccatgccttggttgtcctagtgtgaataattttcagctactttaaaattatattgtactttctcaagcatgtcatatcctttcctattagagtatctatattacttgttactgatttacctgaaggcaatctgattaatttctaggtttttaccatattcttgtcatcttgccaattacattttaagtgttagactagactaagatgtactagttgtatagaatataactagatttattatggcaatgtttattttgtcattttgcttcatctgttttgttgttgaagtactttaaatttcatacgttcatggcatttcactgtaaagactttaatgtgtatttcttaaaataaaactttttttcctccttaaccacagttatcacaactagcagttgtgatagtttctaatttcctaatagtttctaatattaggaaattctttgaactttcctagaagttctaagagtaggcacatatccatccacctattcattcattcatt

SEQ ID NO: 3029 - protein, 80 aa, Homo sapiens; identical to SEQ ID NO: 3027

SEQ ID NO: 3030 - DNA, 4236 bp, Homo sapiens
caccggcgccgcgtcagcccccaggccgcctgcaggtgtgcgctcagaactagcacgtgtgccggacactatttaagggcccgcctctcctggctcacagctgcttgctgctccagccttgccctcccagagctgccggacgctcgcgggtctcggaacgcatcccgccgcgggggcttcggccgtggcatgggcgccgcgggcctgctcggggttttcttggctctcgtcgcaccgggggtcctcgggatttcttgtggctctcctccgcctatcctaaatggccggattagttattattctacccccattgctgttggtaccgtgataaggtacagttgttcaggtaccttccgcctcattggagaaaaaagtctattatgcataactaaagacaaagtggatggaacctgggataaacctgctcctaaatgtgaatatttcaataaatattcttcttgccctgagcccatagtaccaggaggatacaaaattagaggctctacaccctacagacatggtgattctgtgacatttgcctgtaaaaccaacttctccatgaacggaaacaagtctgtttggtgtcaagcaaataatatgtgggggccgacacgactaccaacctgtgtaagtgttttccctctcgagtgtccagcacttcctatgatccacaatggacatcacacaagtgagaatgttggctccattgctccaggattgtctgtgacttacagctgtgaatctggttacttgcttgttggagaaaagatcattaactgtttgtcttcgggaaaatggagtgctgtcccccccacatgtgaagaggcacgctgtaaatctctaggacgatttcccaatgggaaggtaaaggagcctccaattctccgggttggtgtaactgcaaactttttctgtgatgaagggtatcgactgcaaggcccaccttctagtcggtgtgtaattgctggacagggagttgcttggaccaaaatgccagtatgtgaagaaattttttgcccatcacctccccctattctcaatggaagacatataggcaactcactagcaaatgtctcatatggaagcatagtcacttacacttgtgacccggacccagaggaaggagtgaacttcatccttattggagagagcactctccgttgtacagttgatagtcagaagactgggacctggagtggccctgccccacgctgtgaactttctacttctgcggttcagtgtccacatccccagatcctaagaggccgaatggtatctgggcagaaagatcgatatacctataacgacactgtgatatttgcttgcatgtttggcttcaccttgaagggcagcaagcaaatccgatgcaatgcccaaggcacatgggagccatctgcaccagtctgtgaaaaggaatgccaggcccctcctaacatcctcaatgggcaaaaggaagatagacacatggtccgctttgaccctggaacatctataaaatatagctgtaaccctggctatgtgctggtgggagaagaatccatacagtgtacctctgagggggtgtggacaccccctgtaccccaatgcaaagtggcagcgtgtgaagctacaggaaggcaactcttgacaaaaccccagcaccaatttgttagaccagatgtcaactcttcttgtggtgaagggtacaagttaagtgggagtgtttatcaggagtgtcaaggcacaattccttggtttatggagattcgtctttgtaaagaaatcacctgcccaccaccccctgttatctacaatggggcacacaccgggagttccttagaagattttccatatggaaccacggtcacttacacatgtaaccctgggccagaaagaggagtggaattcagcctcattggagagagcaccatccgttgtacaagcaatgatcaagaaagaggcacctggagtggccctgctcccctgtgtaaactttccctccttgctgtccagtgctcacatgtccatattgcaaatggatacaagatatctggcaaggaagccccatatttctacaatgacactgtgacattcaagtgttatagtggatttactttgaagggcagtagtcagattcgttgcaaagctgataacacctgggatcctgaaataccagtttgtgaaaaaggctgccagtcacctcctgggctccaccatggtcgtcatacaggtggaaatacggtcttctttgtctctgggatgactgtagactacacttgtgaccctggctatttgcttgtgggaaacaaatccattcactgtatgccttcaggaaattggagtccttctgccccacggtgtgaagaaacatgccagcatgtgagacagagtcttcaagaacttccagctggttcacgtgtggagctagttaatacgtcctgccaagatgggtaccagttgactggacatgcttatcagatgtgtcaagatgctgaaaatggaatttggttcaaaaagattccactttgtaaagttattcactgtcaccctccaccagtgattgtcaatgggaagcacacaggcatgatggcagaaaactttctatatggaaatgaagtctcttatgaatgtgaccaaggattctatctcctgggagagaaaaaattgcagtgcagaagtgattctaaaggacatggatcttggagcgggccttccccacagtgcttacgatctcctcctgtgactcgctgccctaatccagaagtcaaacatgggtacaagctcaataaaacacattctgcatattcccacaatgacatagtgtatgttgactgcaatcctggcttcatcatgaatggtagtcgcgtgattaggtgtcatactgataacacatgggtgccaggtgtgccaacttgtatcaaaaaagccttcatagggtgtccacctccgcctaagacccctaacgggaaccatactggtggaaacatagctcgattttctcctggaatgtcaatcctgtacagctgtgaccaaggctacctgctggtgggagaggcactccttctttgcacacatgagggaacctggagccaacctgcccctcattgtaaagaggtaaactgtagctcaccagcagatatggatggaatccagaaagggctggaaccaaggaaaatgtatcagtatggagctgttgtaactctggagtgtgaagatgggtatatgctggaaggcagtccccagagccagtgccaatcggatcaccaatggaaccctcccctggcggtttgcagatcccgttcacttgctcctgtcctttgtggtattgctgcaggtttgatacttcttaccttcttgattgtcattaccttatacgtgatatcaaaacacagagcacgcaattattatacagatacaagccagaaagaagcttttcatttagaagcacgagaagtatattctgttgatccatacaacccagccagctgatcagaagacaaactggtgtgtgcctcattgcttggaattcagcggaatattgattagaaagaaactgctctaatatcagcaagtctctttatatggcctcaagatcaatgaaatgatgtcataagcgatcacttcctatatgcacttattctcaagaagaacatctttatggtaaagatgggagcccagtttcactgccatatactcttcaaggactttctgaagcctcacttatgagatgcctgaagccaggccatggctataaacaattacatggctctaaaaagttttgccctttttaaggaaggcactaaaaagagctgtcctggtatctagacccatcttctttttgaaatcagcatactcaatgttactatctgcttttggttataatgtgtttttaattatctaaagtatgaagcattttctggggttatgatggctttacctttattaggaagtatggttttattttgatagtagcttcctcctctggtggtgttaatcatttcatttttacccttacttggtttgagtttctctcacattactgtatatactttgcctttccataatcactcagtgattgcaatttgcacaagtttttttaaattatgggaatcaagatttaatcctagagatttggtgtacaattcaggctttggatgtttctttagcagttttgtgataagttctagttgcttgtaaaatttcacttaataatgtgtacattagtcattcaataaattgtaattgtaaagaaaacat

SEQ ID NO: 3031 - protein, 1092 aa, Homo sapiens; identical to SEQ ID NO: 151

SEQ ID NO: 3032 - DNA, 3873 bp, Homo sapiens
caccggcgccgcgtcagcccccaggccgcctgcaggtgtgcgctcagaactagcacgtgtgccggacactatttaagggcccgcctctcctggctcacagctgcttgctgctccagccttgccctcccagagctgccggacgctcgcgggtctcggaacgcatcccgccgcgggggcttcggccgtggcatgggcgccgcgggcctgctcggggttttcttggctctcgtcgcaccgggggtcctcgggatttcttgtggctctcctccgcctatcctaaatggccggattagttattattctacccccattgctgttggtaccgtgataaggtacagttgttcaggtaccttccgcctcattggagaaaaaagtctattatgcataactaaagacaaagtggatggaacctgggataaacctgctcctaaatgtgaatatttcaataaatattcttcttgccctgagcccatagtaccaggaggatacaaaattagaggctctacaccctacagacatggtgattctgtgacatttgcctgtaaaaccaacttctccatgaacggaaacaagtctgtttggtgtcaagcaaataatatgtgggggccgacacgactaccaacctgtgtaagtgttttccctctcgagtgtccagcacttcctatgatccacaatggacatcacacaagtgagaatgttggctccattgctccaggattgtctgtgacttacagctgtgaatctggttacttgcttgttggagaaaagatcattaactgtttgtcttcgggaaaatggagtgctgtcccccccacatgtgaagaggcacgctgtaaatctctaggacgatttcccaatgggaaggtaaaggagcctccaattctccgggttggtgtaactgcaaactttttctgtgatgaagggtatcgactgcaaggcccaccttctagtcggtgtgtaattgctggacagggagttgcttggaccaaaatgccagtatgtgaagaaattttttgcccatcacctccccctattctcaatggaagacatataggcaactcactagcaaatgtctcatatggaagcatagtcacttacacttgtgacccggacccagaggaaggagtgaacttcatccttattggagagagcactctccgttgtacagttgatagtcagaagactgggacctggagtggccctgccccacgctgtgaactttctacttctgcggttcagtgtccacatccccagatcctaagaggccgaatggtatctgggcagaaagatcgatatacctataacgacactgtgatatttgcttgcatgtttggcttcaccttgaagggcagcaagcaaatccgatgcaatgcccaaggcacatgggagccatctgcaccagtctgtgaaaaggaatgccaggcccctcctaacatcctcaatgggcaaaaggaagatagacacatggtccgctttgaccctggaacatctataaaatatagctgtaaccctggctatgtgctggtgggagaagaatccatacagtgtacctctgagggggtgtggacaccccctgtaccccaatgcaaagtggcagcgtgtgaagctacaggaaggcaactcttgacaaaaccccagcaccaatttgttagaccagatgtcaactcttcttgtggtgaagggtacaagttaagtgggagtgtttatcaggagtgtcaaggcacaattccttggtttatggagattcgtctttgtaaagaaatcacctgcccaccaccccctgttatctacaatggggcacacaccgggagttccttagaagattttccatatggaaccacggtcacttacacatgtaaccctgggccagaaagaggagtggaattcagcctcattggagagagcaccatccgttgtacaagcaatgatcaagaaagaggcacctggagtggccctgctcccctgtgtaaactttccctccttgctgtccagtgctcacatgtccatattgcaaatggatacaagatatctggcaaggaagccccatatttctacaatgacactgtgacattcaagtgttatagtggatttactttgaagggcagtagtcagattcgttgcaaagctgataacacctgggatcctgaaataccagtttgtgaaaaagaaacatgccagcatgtgagacagagtcttcaagaacttccagctggttcacgtgtggagctagttaatacgtcctgccaagatgggtaccagttgactggacatgcttatcagatgtgtcaagatgctgaaaatggaatttggttcaaaaagattccactttgtaaagttattcactgtcaccctccaccagtgattgtcaatgggaagcacacaggcatgatggcagaaaactttctatatggaaatgaagtctcttatgaatgtgaccaaggattctatctcctgggagagaaaaaattgcagtgcagaagtgattctaaaggacatggatcttggagcgggccttccccacagtgcttacgatctcctcctgtgactcgctgccctaatccagaagtcaaacatgggtacaagctcaataaaacacattctgcatattcccacaatgacatagtgtatgttgactgcaatcctggcttcatcatgaatggtagtcgcgtgattaggtgtcatactgataacacatgggtgccaggtgtgccaacttgtatcaaaaaagaggtaaactgtagctcaccagcagatatggatggaatccagaaagggctggaaccaaggaaaatgtatcagtatggagctgttgtaactctggagtgtgaagatgggtatatgctggaaggcagtccccagagccagtgccaatcggatcaccaatggaaccctcccctggcggtttgcagatcccgttcacttgctcctgtcctttgtggtattgctgcaggtttgatacttcttaccttcttgattgtcattaccttatacgtgatatcaaaacacagagcacgcaattattatacagatacaagccagaaagaagcttttcatttagaagcacgagaagtatattctgttgatccatacaacccagccagctgatcagaagacaaactggtgtgtgcctcattgcttggaattcagcggaatattgattagaaagaaactgctctaatatcagcaagtctctttatatggcctcaagatcaatgaaatgatgtcataagcgatcacttcctatatgcacttattctcaagaagaacatctttatggtaaagatgggagcccagtttcactgccatatactcttcaaggactttctgaagcctcacttatgagatgcctgaagccaggccatggctataaacaattacatggctctaaaaagttttgccctttttaaggaaggcactaaaaagagctgtcctggtatctagacccatcttctttttgaaatcagcatactcaatgttactatctgcttttggttataatgtgtttttaattatctaaagtatgaagcattttctggggttatgatggctttacctttattaggaagtatggttttattttgatagtagcttcctcctctggtggtgttaatcatttcatttttacccttacttggtttgagtttctctcacattactgtatatactttgcctttccataatcactcagtgattgcaatttgcacaagtttttttaaattatgggaatcaagatttaatcctagagatttggtgtacaattcaggctttggatgtttctttagcagttttgtgataagttctagttgcttgtaaaatttcacttaataatgtgtacattagtcattcaataaattgtaattgtaaagaaaacat

SEQ ID NO: 3033 - protein, 971 aa, Homo sapiens
MGAAGLLGVFLALVAPGVLGISCGSPPPILNGRISYYSTPIAVGTVIRYSCSGTFRLIGEKSLLCITKDKVDGTWDKPAPKCEYFNKYSSCPEPIVPGGYKIRGSTPYRHGDSVTFACKTNFSMNGNKSVWCQANNMWGPTRLPTCVSVFPLECPALPMIHNGHHTSENVGSIAPGLSVTYSCESGYLLVGEKIINCLSSGKWSAVPPTCEEARCKSLGRFPNGKVKEPPILRVGVTANFFCDEGYRLQGPPSSRCVIAGQGVAWTKMPVCEEIFCPSPPPILNGRHIGNSLANVSYGSIVTYTCDPDPEEGVNFILIGESTLRCTVDSQKTGTWSGPAPRCELSTSAVQCPHPQILRGRMVSGQKDRYTYNDTVIFACMFGFTLKGSKQIRCNAQGTWEPSAPVCEKECQAPPNILNGQKEDRHMVRFDPGTSIKYSCNPGYVLVGEESIQCTSEGVWTPPVPQCKVAACEATGRQLLTKPQHQFVRPDVNSSCGEGYKLSGSVYQECQGTIPWFMEIRLCKEITCPPPPVIYNGAHTGSSLEDFPYGTTVTYTCNPGPERGVEFSLIGESTIRCTSNDQERGTWSGPAPLCKLSLLAVQCSHVHIANGYKISGKEAPYFYNDTVTFKCYSGFTLKGSSQIRCKADNTWDPEIPVCEKETCQHVRQSLQELPAGSRVELVNTSCQDGYQLTGHAYQMCQDAENGIWFKKIPLCKVIHCHPPPVIVNGKHTGMMAENFLYGNEVSYECDQGFYLLGEKKLQCRSDSKGHGSWSGPSPQCLRSPPVTRCPNPEVKHGYKLNKTHSAYSHNDIVYVDCNPGFIMNGSRVIRCHTDNTWVPGVPTCIKKEVNCSSPADMDGIQKGLEPRKMYQYGAVVTLECEDGYMLEGSPQSQCQSDHQWNPPLAVCRSRSLAPVLCGIAAGLILLTFLIVITLYVISKHRARNYYTDTSQKEAFHLEAREVYSVDPYNPAS

SEQ ID NO: 3034 - DNA, 4059 bp, Homo sapiens
caccggcgccgcgtcagcccccaggccgcctgcaggtgtgcgctcagaactagcacgtgtgccggacactatttaagggcccgcctctcctggctcacagctgcttgctgctccagccttgccctcccagagctgccggacgctcgcgggtctcggaacgcatcccgccgcgggggcttcggccgtggcatgggcgccgcgggcctgctcggggttttcttggctctcgtcgcaccgggggtcctcgggatttcttgtggctctcctccgcctatcctaaatggccggattagttattattctacccccattgctgttggtaccgtgataaggtacagttgttcaggtaccttccgcctcattggagaaaaaagtctattatgcataactaaagacaaagtggatggaacctgggataaacctgctcctaaatgtgaatatttcaataaatattcttcttgccctgagcccatagtaccaggaggatacaaaattagaggctctacaccctacagacatggtgattctgtgacatttgcctgtaaaaccaacttctccatgaacggaaacaagtctgtttggtgtcaagcaaataatatgtgggggccgacacgactaccaacctgtgtaagtgttttccctctcgagtgtccagcacttcctatgatccacaatggacatcacacaagtgagaatgttggctccattgctccaggattgtctgtgacttacagctgtgaatctggttacttgcttgttggagaaaagatcattaactgtttgtcttcgggaaaatggagtgctgtcccccccacatgtgaagaggcacgctgtaaatctctaggacgatttcccaatgggaaggtaaaggagcctccaattctccgggttggtgtaactgcaaactttttctgtgatgaagggtatcgactgcaaggcccaccttctagtcggtgtgtaattgctggacagggagttgcttggaccaaaatgccagtatgtgaagaaattttttgcccatcacctccccctattctcaatggaagacatataggcaactcactagcaaatgtctcatatggaagcatagtcacttacacttgtgacccggacccagaggaaggagtgaacttcatccttattggagagagcactctccgttgtacagttgatagtcagaagactgggacctggagtggccctgccccacgctgtgaactttctacttctgcggttcagtgtccacatccccagatcctaagaggccgaatggtatctgggcagaaagatcgatatacctataacgacactgtgatatttgcttgcatgtttggcttcaccttgaagggcagcaagcaaatccgatgcaatgcccaaggcacatgggagccatctgcaccagtctgtgaaaaggaatgccaggcccctcctaacatcctcaatgggcaaaaggaagatagacacatggtccgctttgaccctggaacatctataaaatatagctgtaaccctggctatgtgctggtgggagaagaatccatacagtgtacctctgagggggtgtggacaccccctgtaccccaatgcaaagtggcagcgtgtgaagctacaggaaggcaactcttgacaaaaccccagcaccaatttgttagaccagatgtcaactcttcttgtggtgaagggtacaagttaagtgggagtgtttatcaggagtgtcaaggcacaattccttggtttatggagattcgtctttgtaaagaaatcacctgcccaccaccccctgttatctacaatggggcacacaccgggagttccttagaagattttccatatggaaccacggtcacttacacatgtaaccctgggccagaaagaggagtggaattcagcctcattggagagagcaccatccgttgtacaagcaatgatcaagaaagaggcacctggagtggccctgctcccctgtgtaaactttccctccttgctgtccagtgctcacatgtccatattgcaaatggatacaagatatctggcaaggaagccccatatttctacaatgacactgtgacattcaagtgttatagtggatttactttgaagggcagtagtcagattcgttgcaaagctgataacacctgggatcctgaaataccagtttgtgaaaaagaaacatgccagcatgtgagacagagtcttcaagaacttccagctggttcacgtgtggagctagttaatacgtcctgccaagatgggtaccagttgactggacatgcttatcagatgtgtcaagatgctgaaaatggaatttggttcaaaaagattccactttgtaaagttattcactgtcaccctccaccagtgattgtcaatgggaagcacacaggcatgatggcagaaaactttctatatggaaatgaagtctcttatgaatgtgaccaaggattctatctcctgggagagaaaaaattgcagtgcagaagtgattctaaaggacatggatcttggagcgggccttccccacagtgcttacgatctcctcctgtgactcgctgccctaatccagaagtcaaacatgggtacaagctcaataaaacacattctgcatattcccacaatgacatagtgtatgttgactgcaatcctggcttcatcatgaatggtagtcgcgtgattaggtgtcatactgataacacatgggtgccaggtgtgccaacttgtatcaaaaaagccttcatagggtgtccacctccgcctaagacccctaacgggaaccatactggtggaaacatagctcgattttctcctggaatgtcaatcctgtacagctgtgaccaaggctacctgctggtgggagaggcactccttctttgcacacatgagggaacctggagccaacctgcccctcattgtaaagaggtaaactgtagctcaccagcagatatggatggaatccagaaagggctggaaccaaggaaaatgtatcagtatggagctgttgtaactctggagtgtgaagatgggtatatgctggaaggcagtccccagagccagtgccaatcggatcaccaatggaaccctcccctggcggtttgcagatcccgttcacttgctcctgtcctttgtggtattgctgcaggtttgatacttcttaccttcttgattgtcattaccttatacgtgatatcaaaacacagagcacgcaattattatacagatacaagccagaaagaagcttttcatttagaagcacgagaagtatattctgttgatccatacaacccagccagctgatcagaagacaaactggtgtgtgcctcattgcttggaattcagcggaatattgattagaaagaaactgctctaatatcagcaagtctctttatatggcctcaagatcaatgaaatgatgtcataagcgatcacttcctatatgcacttattctcaagaagaacatctttatggtaaagatgggagcccagtttcactgccatatactcttcaaggactttctgaagcctcacttatgagatgcctgaagccaggccatggctataaacaattacatggctctaaaaagttttgccctttttaaggaaggcactaaaaagagctgtcctggtatctagacccatcttctttttgaaatcagcatactcaatgttactatctgcttttggttataatgtgtttttaattatctaaagtatgaagcattttctggggttatgatggctttacctttattaggaagtatggttttattttgatagtagcttcctcctctggtggtgttaatcatttcatttttacccttacttggtttgagtttctctcacattactgtatatactttgcctttccataatcactcagtgattgcaatttgcacaagtttttttaaattatgggaatcaagatttaatcctagagatttggtgtacaattcaggctttggatgtttctttagcagttttgtgataagttctagttgcttgtaaaatttcacttaataatgtgtacattagtcattcaataaattgtaattgtaaagaaaacat

SEQ ID NO: 3035 - protein, 1033 aa, Homo sapiens; identical to SEQ ID NO: 153

SEQ ID NO: 3036 - DNA, 848 bp, Homo sapiens
gtggagcagagctgcactgactctttcttatccatgggtagcacaagcgaaaaataaacttctgtggtgcaaagtcactgagattcaggagttgttgccaaagcggagccgagctcagtggttcccagtctggtcccagccaccacgtaagatgttcctttgctcttccttcatcttccaccatgattgtgaggcctccccagccatgctgaactgggtaaccaccacaggcccacaggctaaaattgagctggagtaagtggcaacagagagtatttattgtcccctaagagccctggcccttgtaggacatgtgaatgccagtgctcatggagaaaggtggaggaagagagccagagtgcagttcacctctgggagagcagaccagagtggcttccgtgggcacatgctggattgaagtgagaagacgtgactactaaagttgaggccccaagtctcagcttcttccccctccaaagcatgagtggaggattcacttaaggccactttgaagcccatattggaggagcattactcactctgaggatcctggcataggcagatgcatcacttgtattgaagtatattatctgctgtgatatttatgatgaaatgagtttgccagccatcgtctatcaggggatcaaacataggcacctgcctgtccaagggggtctaagtcacagtacagaagtggtttgcaaaggctggtgggatggtgtggcaggcctgtggagttgaataaaaatcctgatgtccttcctggcatgaagaatggagctgccaagctgcccccaggagaagcgtgctgcctatgcatctcactggacttctgtgtacagaagaaa

SEQ ID NO: 3037 - protein, 42 aa, Homo sapiens
MSLPAIVYQGIKHRHLPVQGGLSHSTEVVCKGWWDGVAGLWS

SEQ ID NO: 3038 - DNA, 622 bp, Homo sapiens
gaatggaggaagatattgagagtgctgagtctggggcctaggtatttcttgggaccaggaactgggtaaggggtaaccaccacaggcccacaggctaaaattgagctggagtaagtggcaacagagagtatttattgtcccctaagagccctggtaagcttctgagaaattaagtgctcatttcctagcagataaaaatccactgactcacacctgcctctctgcttgtccagagaggtacagagaagtaatgacttggacttgaggaaggcccttgtaggacatgtgaatgccagtgctcatggagaaaggtggaggaagagagccagagtgcagttcacctctgggagagcagaccagagtggcttccgtgggcacatgctggattgaagtgagaagacgtgactactaaagttgaggccccaagtctcagcttcttccccctccaaagcatgagtggaggattcacttaaggccactttggggatcaaacataggcacctgcctgtccaagggggtctaagtcacagtacagaagtggtttgcaaaggctggtgggatggtgtggcaggcctgtggagttgaataaaaatcctgatgtccttcctggcatgaagaatgg

SEQ ID NO: 3039 - protein, 40 aa, Homo sapiens
MPVLMEKGGGREPECSSPLGEQTRVASVGTCWIEVRRRDY

SEQ ID NO: 3040 - DNA, 3492 bp, Homo sapiens
acggcggcaggggcgtgctcggaggacgcgcgctgcgctgctcctccaaagggcagctccgggggaaagagggtggcgtcccggggaagcccgcagccgccgccgatgtcgctgggactcggaagtgccgaaagaggggtgttgggaactcgcggcgcgcgtgaacgttgccgtcgccgccgcccgggacagcccggagaaactctcagcgtaggcatcgggaaccttcgtgccaaggagccatgctgccccgatgggaactggcactttacctacttgcctcactaggcttccacttctattccttctatgaagtttacaaagtctccagagaacacgaagaggagctggaccaggaatttgagctggagactgacactttatttggaggattaaagaaggatgcgaccgactttgagtggagcttctggatggaatgggggaagcagtggctggtgtggcttctccttggccacatggtagtgtctcaaatggccacactgctggcaagaaagcacagaccctggattctcatgctctatgggatgtgggcctgctggtgtgtgctggggacccctggtgtggctatggttttgctccataccaccatctctttctgcgtggcccagttccggtctcagctcctgacgtggctctgttctctcctcctcctctccacactgaggctgcagggtgtggaagaagttaagagaaggtggtacaagacagaaaacgagtactacctgctgcagttcacgctgaccgttcgctgcctgtactacaccagcttcagcctggagctctgctggcagcagctgcctgctgcatcgacctcctactcctttccctggatgctggcctatgtcttttattatccagtcttacacaatgggcccatcctcagcttctcggagttcatcaaacagatgcagcagcaggagcatgactccctgaaggccagcctgtgtgtcctggccctggggctgggccgccttctttgctggtggtggctggccgagctgatggctcacctgatgtacatgcatgccatctacagcagcatccccctcctggagactgtctcttgttggaccttaggaggactggcgttagcccaggtgctctttttctacgtgaagtacttggtgctctttggcgtgcctgctctgctcatgcgcctggatggactcactccacccgccctcccccgctgcgtgagcaccatgttcagtttcaccgggatgtggaggtattttgatgttggactgcataatttcttaatcaggtatgtgtacattccagtgggcgggtcccagcatggcctgctggggacactgttttccacggcgatgacatttgcatttgtgagctactggcatggcggctacgactacctctggtgctgggcagcgctcaactggctgggagtcactgtggagaatggagtccggaggctggtggagactccctgcatccaggacagtctggcccgatacttctccccacaagctcgccgtcgattccacgctgcccttgcttcttgttccacctcgatgctgatcctgtccaacctggtatttcttgggggcaatgaggttgggaaaacctactggaataggatcttcatacaaggctggccttgggtgaccctctctgtcctgggattcctgtactgctactcccacgtgggcattgcctgggcccagacctacgccacggactaatgctgttgggcccaggccagtccttgttgctggcctccaaggcaaatagtgcttcaccctgacctctcactccaggacagcctctaagggatttgatctgctcatcttcagttgaatgccctcactccaagactggatgctggatctcatagaaaattcacagccagacaatcttctaatctagaatagaatgtagtggaaatttattgattgagacacagaaatcctgattagtgataggcctgtcttctgggcaatatttctaaaatatttgagtgacattgatgtttaagtgacctccttcatcacatcctgcagtatctccagaagcagcactagggtttgagtttcatacttcagcccctctgtaggaatgagaccaagccacagctgtcttttgaattacgtagtcgaagaagacggtagcagccctgtagcattctaaggcatctatacccaaggagtcctgtgatttgagcttcagcagggtgatctacatttgggtgcttgtttctgagatttgcagagaagtataacatggtagttcctctaccttacagttaatcgtttcttaataaagaagcagaatttagaaaccacaggatagtgtacccacagatgggtgttatcaaggccagtcatgaggatggtgtcctggagtcttgtccaccctctccatacaagtctcaaaagtcatcctcctactcagtgattcacgtttagtggtttatattattaaggtttgattcaaacagagccttttctgtcctgtagataatctacatgtttgtagaattattttgaatatgtttgaggaaaatgtttaaaatctaaatatactcacataacttgattattcactcctctgaaaagatgctggataggctaccaaagttcccaagtggtagataattcagaagacttgtttgaatttggattttttttttttttggagtggggaagggtataaaggaggcttaaaatttgaatccataatatatctaattacaggagaatttacaacatctcaagtacgtaaattaagttgtcattgagtgaaaggttcacttggacctagtgctgcctcctgtttattacatagcatggcccttatgtcttgagttgaggttatcatctcaatgaggcttaagctcctagagtacaggaccattttgttgattgtctttcttcatagcttctctgcttggcaaagagatgggagggggccagatactgactacctggggtaggcacattatgtgttaaagcaagacagaggccagagaggggcaggtagacctgcatagcagcagcctcagcagctgtcttggtaaaggagagagagagacatggggccagtaattccggggtgctcagaagttttaggagggaatgagcctcagggaggagtgagcacctaaatgaacgcagtaaaccttcatggaccaacagtgattgaggatttgtgggcagccagagggagtctgactgaagtttacttggaaagaaagggcttgctaagaaaaaagggagtaaaaatgatgatagggaagtgtctaatgtatgtgcacatataagtaatacaaaagttttgagctcttccaagtataccatttatatacaaacaaataggtttattcattcattaaactactttggaagcgtcagtggatatatttgaaagtggtaatcctgaatctcttttaaactattatatgattcataatggttctcaggaattaataaatgattactgtgtttagctctg

SEQ ID NO: 3041 - protein, 493 aa, Homo sapiens
MLPRWELALYLLASLGFHFYSFYEVYKVSREHEEELDQEFELETDTLFGGLKKDATDFEWSFWMEWGKQWLVWLLLGHMVVSQMATLLARKHRPWILMLYGMWACWCVLGTPGVAMVLLHTTISFCVAQFRSQLLTWLCSLLLLSTLRLQGVEEVKRRWYKTENEYYLLQFTLTVRCLYYTSFSLELCWQQLPAASTSYSFPWMLAYVFYYPVLHNGPILSFSEFIKQMQQQEHDSLKASLCVLALGLGRLLCWWWLAELMAHLMYMHAIYSSIPLLETVSCWTLGGLALAQVLFFYVKYLVLFGVPALLMRLDGLTPPALPRCVSTMFSFTGMWRYFDVGLHNFLIRYVYIPVGGSQHGLLGTLFSTAMTFAFVSYWHGGYDYLWCWAALNWLGVTVENGVRRLVETPCIQDSLARYFSPQARRRFHAALASCSTSMLILSNLVFLGGNEVGKTYWNRIFIQGWPWVTLSVLGFLYCYSHVGIAWAQTYATD

SEQ ID NO: 3042 - DNA, 3626 bp, Homo sapiens
agtgcgcccgggcaaaggcggggatctaggcgccgggacaagtccgcgcacggccctgcccacgtcctctctccttggcttcgtccccagcttccggaactgctgcggggagttgcgaactctggtcctcttggcagtatcggcggtgcgcctgcctgcctgctgtgactccagggactctaaaaaactctcagcgtaggcatcgggaaccttcgtgccaaggagccatgctgccccgatgggaactggcactttacctacttgcctcactaggcttccacttctattccttctatgaagtttacaaagtctccagagaacacgaagaggagctggaccaggaatttgagctggagactgacactttatttggaggattaaagaaggatgcgaccgactttgagtggagcttctggatggaatgggggaagcagtggctggtgtggcttctccttggccacatggtagtgtctcaaatggccacactgctggcaagaaagcacagaccctggattctcatgctctatgggatgtgggcctgctggtgtgtgctggggacccctggtgtggctatggttttgctccataccaccatctctttctgcgtggcccagttccggtctcagctcctgacgtggctctgttctctcctcctcctctccacactgaggctgcagggtgtggaagaagttaagagaaggtggtacaagacagaaaacgagtactacctgctgcagttcacgctgaccgttcgctgcctgtactacaccagcttcagcctggagctctgctggcagcagctgcctgctgcatcgacctcctactcctttccctggatgctggcctatgtcttttattatccagtcttacacaatgggcccatcctcagcttctcggagttcatcaaacagatgcagcagcaggagcatgactccctgaaggccagcctgtgtgtcctggccctggggctgggccgccttctttgctggtggtggctggccgagctgatggctcacctgatgtacatgcatgccatctacagcagcatccccctcctggagactgtctcttgttggaccttaggaggactggcgttagcccaggtgctctttttctacgtgaagtacttggtgctctttggcgtgcctgctctgctcatgcgcctggatggactcactccacccgccctcccccgctgcgtgagcaccatgttcagtttcaccgggatgtggaggtattttgatgttggactgcataatttcttaatcaggtatgtgtacattccagtgggcgggtcccagcatggcctgctggggacactgttttccacggcgatgacatttgcatttgtgagctactggcatggcggctacgactacctctggtgctgggcagcgctcaactggctgggagtcactgtggagaatggagtccggaggctggtggagactccctgcatccaggacagtctggcccgatacttctccccacaagctcgccgtcgattccacgctgcccttgcttcttgttccacctcgatgctgatcctgtccaacctggtatttcttgggggcaatgaggttgggaaaacctactggaataggatcttcatacaaggctggccttgggtgaccctctctgtcctgggattcctgtactgctactcccacgtgggcattgcctgggcccagacctacgccacggactaatgctgttgggcccaggccagtccttgttgctggcctccaaggcaaatagtgcttcaccctgacctctcactccaggacagcctctaagggatttgatctgctcatcttcagttgaatgccctcactccaagactggatgctggatctcatagaaaattcacagccagacaatcttctaatctggagtctttgagatcttctaccccaactcatcattttcctattgaggaaacgggtccagggcagtcgtgtgtcttacccagctacacagggtgacattttggtctagaacctagtctcatgagccctttgcattctttccccttaagcaagaatagaatgtagtggaaatttattgattgagacacagaaatcctgattagtgataggcctgtcttctgggcaatatttctaaaatatttgagtgacattgatgtttaagtgacctccttcatcacatcctgcagtatctccagaagcagcactagggtttgagtttcatacttcagcccctctgtaggaatgagaccaagccacagctgtcttttgaattacgtagtcgaagaagacggtagcagccctgtagcattctaaggcatctatacccaaggagtcctgtgatttgagcttcagcagggtgatctacatttgggtgcttgtttctgagatttgcagagaagtataacatggtagttcctctaccttacagttaatcgtttcttaataaagaagcagaatttagaaaccacaggatagtgtacccacagatgggtgttatcaaggccagtcatgaggatggtgtcctggagtcttgtccaccctctccatacaagtctcaaaagtcatcctcctactcagtgattcacgtttagtggtttatattattaaggtttgattcaaacagagccttttctgtcctgtagataatctacatgtttgtagaattattttgaatatgtttgaggaaaatgtttaaaatctaaatatactcacataacttgattattcactcctctgaaaagatgctggataggctaccaaagttcccaagtggtagataattcagaagacttgtttgaatttggattttttttttttttggagtggggaagggtataaaggaggcttaaaatttgaatccataatatatctaattacaggagaatttacaacatctcaagtacgtaaattaagttgtcattgagtgaaaggttcacttggacctagtgctgcctcctgtttattacatagcatggcccttatgtcttgagttgaggttatcatctcaatgaggcttaagctcctagagtacaggaccattttgttgattgtctttcttcatagcttctctgcttggcaaagagatgggagggggccagatactgactacctggggtaggcacattatgtgttaaagcaagacagaggccagagaggggcaggtagacctgcatagcagcagcctcagcagctgtcttggtaaaggagagagagagacatggggccagtaattccggggtgctcagaagttttaggagggaatgagcctcagggaggagtgagcacctaaatgaacgcagtaaaccttcatggaccaacagtgattgaggatttgtgggcagccagagggagtctgactgaagtttacttggaaagaaagggcttgctaagaaaaaagggagtaaaaatgatgatagggaagtgtctaatgtatgtgcacatataagtaatacaaaagttttgagctcttccaagtataccatttatatacaaacaaataggtttattcattcattaaactactttggaagcgtcagtggatatatttgaaagtggtaatcctgaatctcttttaaactattatatgattcataatggttctcaggaattaataaatgattactgtgtttagctctg

SEQ ID NO: 3043 - protein, 493 aa, Homo sapiens; identical to SEQ ID NO: 3041

SEQ ID NO: 3044 - DNA, 571 bp, Homo sapiens
agtttgggggaaggtgatgatgtgacagtgagctggtggtgcaacagccactggggcttgtagagacagagggtgcagagaaccccagcggcagggactgaagggaggtgatggctgggagacgggaaaggatgcgaccgactttgagtggagcttctggatggaatgggggaagcagtggctggtgtggcttctccttggccacatggtagtgtctcaaatggccacactgctggcaagaaaggtattttgatgttggactgcataatttcttaatcaggtatgtgtacattccagtgggcgggtcccagcatggcctgctggggacactgttttccacggcgatgacatttgcatttgtgagctactggcatggcggctacgactacctctggtgctgggcagcgctcaactggctgggagtcactgtggagaatggagtccggaggctggtggagactccctgcatccaggacagtctggcccgatacttctccccacaagctcgccgtcgattccacgctgcccttgcttcttgttccacctcgatgctgatcctgtccaacctggt

SEQ ID NO: 3045 - protein, 74 aa, Homo sapiens
MTFAFVSYWHGGYDYLWCWAALNWLGVTVENGVRRLVETPCIQDSLARYFSPQARRRFHAALASCSTSMLILSN

SEQ ID NO: 3046 - DNA, 571 bp, Homo sapiens
gtggtgtctgggtttccaaactcatacagtcagctccactcccagctgctgcagctggcatgtggaatcctgacttgctggaggactggcgttagcccaggtgctctttttctacgtgaagtacttggtgctctttggcgtgcctgctctgctcatgcgcctggatggactcactccacccgccctcccccgctgcgtgagcaccatgttcagtttcaccgggatgtggaggtattttgatgttggactgcataatttcttaatcaggtatgtgtacattccagtgggcgggtcccagcatggcctgctggggacactgttttccacggcgatgacatttgcatttgtgagctactggcatggcggctacgactacctctggtgctgggcagcgctcaactggctgggagtcactgtggagaatggagtccggaggctggtggagactccctgcatccaggacagtctggcccgatacttctccccacaagctcgccgtcgattccacgctgcccttgcttcttgttccacctcgatgctgatcctgtccaacctggtatttcttgggggc

SEQ ID NO: 3047 - protein, 138 aa, Homo sapiens
MRLDGLTPPALPRCVSTMFSFTGMWRYFDVGLHNFLIRYVYIPVGGSQHGLLGTLFSTAMTFAFVSYWHGGYDYLWCWAALNWLGVTVENGVRRLVETPCIQDSLARYFSPQARRRFHAALASCSTSMLILSNLVFLG

SEQ ID NO: 3048 - DNA, 2714 bp, Homo sapiens
aaagtagaaaaaccttgtggttcttttggagtgaaagccttgtaataggccccttggggcatgctggggctcatttctagacagtgaggcgtgatgagcaggagagatgaagaaaatctgcttctcttgcaaagtaattccttcatgagacttcattaaaagggtcttcaggaggactggcgttagcccaggtgctctttttctacgtgaagtacttggtgctctttggcgtgcctgctctgctcatgcgcctggatggactcactccacccgccctcccccgctgcgtgagcaccatgttcagtttcaccgggatgtggaggtattttgatgttggactgcataatttcttaatcaggtatgtgtacattccagtgggcgggtcccagcatggcctgctggggacactgttttccacggcgatgacatttgcatttgtgagctactggcatggcggctacgactacctctggtgctgggcagcgctcaactggctgggagtcactgtggagaatggagtccggaggctggtggagactccctgcatccaggacagtctggcccgatacttctccccacaagctcgccgtcgattccacgctgcccttgcttcttgttccacctcgatgctgatcctgtccaacctggtatttcttgggggcaatgaggttgggaaaacctactggaataggatcttcatacaaggctggccttgggtgaccctctctgtcctgggattcctgtactgctactcccacgtgggcattgcctgggcccagacctacgccacggactaatgctgttgggcccaggccagtccttgttgctggcctccaaggcaaatagtgcttcaccctgacctctcactccaggacagcctctaagggatttgatctgctcatcttcagttgaatgccctcactccaagactggatgctggatctcatagaaaattcacagccagacaatcttctaatctggagtctttgagatcttctaccccaactcatcattttcctattgaggaaacgggtccagggcagtcgtgtgtcttacccagctacacagggtgacattttggtctagaacctagtctcatgagccctttgcattctttccccttaagcaagaatagaatgtagtggaaatttattgattgagacacagaaatcctgattagtgataggcctgtcttctgggcaatatttctaaaatatttgagtgacattgatgtttaagtgacctccttcatcacatcctgcagtatctccagaagcagcactagggtttgagtttcatacttcagcccctctgtaggaatgagaccaagccacagctgtcttttgaattacgtagtcgaagaagacggtagcagccctgtagcattctaaggcatctatacccaaggagtcctgtgatttgagcttcagcagggtgatctacatttgggtgcttgtttctgagatttgcagagaagtataacatggtagttcctctaccttacagttaatcgtttcttaataaagaagcagaatttagaaaccacaggatagtgtacccacagatgggtgttatcaaggccagtcatgaggatggtgtcctggagtcttgtccaccctctccatacaagtctcaaaagtcatcctcctactcagtgattcacgtttagtggtttatattattaaggtttgattcaaacagagccttttctgtcctgtagataatctacatgtttgtagaattattttgaatatgtttgaggaaaatgtttaaaatctaaatatactcacataacttgattattcactcctctgaaaagatgctggataggctaccaaagttcccaagtggtagataattcagaagacttgtttgaatttggattttttttttttttggagtggggaagggtataaaggaggcttaaaatttgaatccataatatatctaattacaggagaatttacaacatctcaagtacgtaaattaagttgtcattgagtgaaaggttcacttggacctagtgctgcctcctgtttattacatagcatggcccttatgtcttgagttgaggttatcatctcaatgaggcttaagctcctagagtacaggaccattttgttgattgtctttcttcatagcttctctgcttggcaaagagatgggagggggccagatactgactacctggggtaggcacattatgtgttaaagcaagacagaggccagagaggggcaggtagacctgcatagcagcagcctcagcagctgtcttggtaaaggagagagagagacatggggccagtaattccggggtgctcagaagttttaggagggaatgagcctcagggaggagtgagcacctaaatgaacgcagtaaaccttcatggaccaacagtgattgaggatttgtgggcagccagagggagtctgactgaagtttacttggaaagaaagggcttgctaagaaaaaagggagtaaaaatgatgatagggaagtgtctaatgtatgtgcacatataagtaatacaaaagttttgagctcttccaagtataccatttatatacaaacaaataggtttattcattcattaaactactttggaagcgtcagtggatatatttgaaagtggtaatcctgaatctcttttaaactattatatgattcataatggttctcaggaattaataaatgattactgtgtttagctctg

SEQ ID NO: 3049 - protein, 183 aa, Homo sapiens
MRLDGLTPPALPRCVSTMFSFTGMWRYFDVGLHNFLIRYVYIPVGGSQHGLLGTLFSTAMTFAFVSYWHGGYDYLWCWAALNWLGVTVENGVRRLVETPCIQDSLARYFSPQARRRFHAALASCSTSMLILSNLVFLGGNEVGKTYWNRIFIQGWPWVTLSVLGFLYCYSHVGIAWAQTYATD

SEQ ID NO: 3050 - DNA, 498 bp, Homo sapiens
ggaggactggcgttagcccaggtgctctttttctacgtgaagtacttggtgctctttggcgtgcctgctctgctcatgcgcctggatggactcactccacccgccctcccccgctgcgtattttgatgttggactgcataatttcttaatcaggtatgtgtacattccagtgggcgggtcccagcatggcctgctggggacactgttttccacggcgatgacatttgcatttgtgagctactggcatggcggctacgactacctctggtgctgggcagcgctcaactggctgggagtcactgtggagaatggagtccggaggctggtggagactccctgcatccaggacagtctggcccgatacttctccccacaagctcgccgtcgattccacgctgcccttgcttcttgttccacctcgatgctgatcctgtccaacctggtatttcttgggggcaatgaggttgggaaaacctactggaataggatcttcataca

SEQ ID NO: 3051 - protein, 136 aa, Homo sapiens
MDSLHPPSPAAYFDVGLHNFLIRYVYIPVGGSQHGLLGTLFSTAMTFAFVSYWHGGYDYLWCWAALNWLGVTVENGVRRLVETPCIQDSLARYFSPQARRRFHAALASCSTSMLILSNLVFLGGNEVGKTYWNRIF

SEQ ID NO: 3052 - DNA, 547 bp, Homo sapiens
aattgaagctttagtttctctaacgcaattttgtactttgcattattagccttacacgttcaaattattttaaacacagggtgccagtaattagatagaagaatactcccttcattgtttgtctggataaaaggtattttgatgttggactgcataatttcttaatcaggtatgtgtacattccagtgggcgggtcccagcatggcctgctggggacactgttttccacggcgatgacatttgcatttgtgagctactggcatggcggctacgactacctctggtgctgggcagcgctcaactggctgggagtcactgtggagaatggagtccggaggctggtggagactccctgcatccaggacagtctgagttttgctcttgttgcccaggctggagtgcagtggcttgatcttggctcactgcaacctccacctcccaggttcaagcgattctcctgcctcagcctcctgagtagcgggactacaggcccgatacttctccccacaagctcgccgtcgattccacgctgcccttgcttcttgtt

SEQ ID NO: 3053 - protein, 103 aa, Homo sapiens
MTFAFVSYWHGGYDYLWCWAALNWLGVTVENGVRRLVETPCIQDSLSFALVAQAGVQWLDLGSLQPPPPRFKRFSCLSLLSSGTTGPILLPTSSPSIPRCPCF

SEQ ID NO: 3054 - DNA, 562 bp, Homo sapiens
gagaggctcctggtagacagagcttacaggctttggtgaagtgaggaagagaaatgttttatttccaaatggacctttcagattaagaaatgtcaagtcctgagctgcactgaccatggagagtgaaggaagctaatgatcactgaggtatgtgtacattccagtgggcgggtcccagcatggcctgctggggacactgttttccacggcgatgacatttgcatttgtgagctactggcatggcggctacgactacctctggtgctgggcagcgctcaactggctgggagtcactgtggagaatggagtccggaggctggtggagactccctgcatccaggacagtctggcccgatacttctccccacaagctcgccgtcgattccacgctgcccttgcttcttgttccacctcgatgctgatcctgtccaacctggtatttcttgggggcaatgaggttgggaaaacctactggaataggatcttcatacaaggctggccttgggtgaccctctctgtcctgggattcctgtactgctactcccacgtgggcattgcctgg

SEQ ID NO: 3055 - protein, 116 aa, Homo sapiens
MTFAFVSYWHGGYDYLWCWAALNWLGVTVENGVRRLVETPCIQDSLARYFSPQARRRFHAALASCSTSMLILSNLVFLGGNEVGKTYWNRIFIQGWPWVTLSVLGFLYCYSHVGIA

SEQ ID NO: 3056 - DNA, 2280 bp, Homo sapiens
tgagttggagaagatggtgggaccagtgattgagatgtgtgggggtcaagggcgtaaagattgtatgtgaggccaggggagtagacacaattaaccacggagctgtgtagaatgagaagagaacaggtgggagaaaccccagggaatgctggtattgaagggggcagagagaaaggcaggaagatcaaagtgtgacttgcctgacatcctatggagttaacctcagtcacatgggattgggctctgaaaacccggtctgctgctgcctcatgggaccagctatggtctgtgactgaacgcactatttgtgtcctccttggactcaggtgccacagccctgggaactctgattctataaaagtggagggctctgtggaatcatctctcttctgggttctgaggccagagaaactcagcttagaaggctttttctatgtcagtgattatccaaatgagcctgtttgcatctctgctggtctgtcccatgggcctcctgagtcagggaatgtctgctggggttttggcagttgccgcttcgtctattccttgctgtgggtttttgtccctgaaggattgggtttagatatctcttggaggaaagtgaaccagatggtgcccaatctcccatcctggagaactctggatttcatttcataactaatttgacttgatagaagattaatatgaatattcatgttttggtgaaaaaaaataatgagtctatacgatgctccctcagtctctgctgggggtgttcatatatgagctttctaaagttaaaaaaatctgaattccgaaactcatctgaccccaaaaagtttagttaagggattgtcaaactgtatatggagttgttgacaaatgtgcacctttgacagccttgtagtcttggcatcttccctgggacacatgatcagttcctgttgctccagagcccatctttacacactgaggaaatagagtgaagcgagtgagaacgctgactttaggcatggagagcatttaagctcagtgtctagatttccaggtttaagggaaaggtggcccttccctctgcaccttgatgggttgggacctgctgcagcaagagggaggaaccactgacaccacatccctctaacaggtctcacctcagagtcctggaagagcaggaaggggcagacgggtatctaggagatagggattattgaggagatttgcacacacctcacagctaatggggtgtggatacacatgtgtcttaaaagatacacctcattgtttcccagggagccctctcctggcatcactgatgtgcctagaagtatctcatgattcgcctggaaaagttgtcttaaaattggtatcttcctgtcaccagttcacttgaatttagccatagatttgcttgctctaaactacaaagtttattttagtgatttccatgaaaatgtctgtcctggtctctgtgggtcatatgggtgatatgaggctgtaaaaccagacccttccctttctgttgtgcccctgccctgctgtctaaagagtggaagacagagtctgaaggcaagggatagaaatgctcagtggcaaacctagggctctggtaatatgtcatccacaaaacagttttggtcaggaagtgttacctctgctgctgaggttgaagaagtagtgttcagtttattcagcagaaaataaggaatctatgtttttgctttaaaaaaaactccaaatttttaatattgaagtttacttcaagctgcttgaggaatatgcatatctagggctcacaaactttatttaaaagacttagctggtccatggatctgagaaggatatggctggagatttggtccaaatgctgttctaggaggaattctgctgtgtcatgctttgcagagaccaatgcaggttgctttttacaagccctttggctctcagaagcacttgttaatagaaggagctttctcatgcctaccataaatctttgacattgaagcataatatcttcaacaagcagctgaatagagctctgtaattcaaaggtatcaaggagttgtaactccagaccagcaaggccagtccccataaaccagctgtgacctaagcatcttggcagtgatctctccaccgtcctggggtaatgaggagaaaaagtattcaagggggggtgtttatacactgggaatatatctggccttgagagggtggagagccttataatgtgtgtatgggtgcagaatggtgcttcttctgaaaagtctgcctgcttttgtccagggaagccatggactttgt

SEQ ID NO: 3057 - protein, 148 aa, Homo sapiens
MELTSVTWDWALKTRSAAASWDQLWSVTERTICVLLGLRCHSPGNSDSIKVEGSVESSLFWVLRPEKLSLEGFFYVSDYPNEPVCISAGLSHGPPESGNVCWGFGSCRFVYSLLWVFVPEGLGLDISWRKVNQMVPNLPSWRTLDFIS

SEQ ID NO: 3058 - DNA, 3208 bp, Homo sapiens; identical to SEQ ID NO: 158

SEQ ID NO: 3059 - protein, 989 aa, Homo sapiens; identical to SEQ ID NO: 159

SEQ ID NO: 3060 - DNA, 3127 bp, Homo sapiens; identical to SEQ ID NO: 156

SEQ ID NO: 3061 - protein, 962 aa, Homo sapiens; identical to SEQ ID NO: 157

SEQ ID NO: 3062 - DNA, 1991 bp, Homo sapiens
gccgcgcggcgcgggggaggagaccttcatctgttcacgcggtagcgcggattgcggttcgcggcgcgcgccaccggggaaggagcggtgggccgaggggttggaggtggggccccaggaggacctcgggctgtgggccgggagagcggagtcggggagtggggcgggggagcgaggtggcgccggggagcctgggatatggcgcggccagacgatgaggagggggcggcggtggcgcccggacacccgctcgcgaaaggatacctcccgttgccgaggggcgcgcccgttgggaaggagagcgtggagctgcagaacgggcccaaagcgggcaccttcccggtgaatggggccccccgggacagcctcgctgccgcctcgggagttctgggcgggcctcagactccactggccccagaagaggagacccaggcccggctgctgcctgcgggcgcgggagctgagaccccgggggccgagagcagcccgctgccccttacggcgctctccccgcggcgcttcgtggtgctcctgatcttcagcctgtactcgctggtcaacgcctttcagtggatccagtacagcatcattagcaacgtcttcgagggcttctacggtgtcaccttgctgcacatcgactggctgtccatggtgtacatgctggcctacgtgcccctcatcttcccggccacctggctgctggacaccagaggcctgcggctcaccgccctgctgggctccggcctcaactgcctgggtgcctggatcaagtgcggcagtgtgcagcagcatctcttctgggtcaccatgttgggccagtgcttgtgctcggtggcccaggtgttcatcctgggcttgccctcccgcatcgcctcagtgtggtttgggcccaaagaggtgtccacagcttgtgccaccgccgtgctgggcaatcagcttggaactgcagttggctttttgctaccaccagttttagtacccaacacacagaatgacacaaatctcctggcttgtaatatcagcaccatgttttatggaacatcagctgttgccacacttttatttattttaacagcaattgccttcaaagaaaaacctcggtatccaccaagtcaggctcaagcagctcttcaagacagtccccctgaagagtactcctataagaaatcaataagaaacctgtttaaaaacattccttttgtccttctgttgatcacttatggtatcatgactggtgccttttattcagtctcaacgttattaaatcaaatgatattgacatattatgagggagaagaagtcaatgctggaaggattgggctaacgctagtagtagctggaatggtgggctctattctttgtggcttatggctggattatactaaaacatacaaacagactactctgatagtttatattttgtcttttattggaatggttatctttactttcacattggaccttagatatattatcatcgtgtttgttactggaggggtgcttggcttcttcatgactggttacctccctttgggttttgaatttgctgttgaaatcacttaccctgaatctgaaggtacttcatctggtcttcttaatgcttctgcacagatatttggaattttgttcacattggctcaaggaaagctcacatcagactatggtcctaaggcagggaacatttttctctgtgtctggatgtttataggcatcatattaacagcattaatcaagtctgatctgcgaagacacaacataaatataggaattacaaatgttgatgttaaagctataccagctgacagtcccacagaccaagaaccaaaaacggttatgttgtccaagcagtcagaatcagcaatttgaagagaaaggcaaagttactgtcctgtagtaattggggacaatgtgatcatccttggagagagatgtgagcaccaaggctgggtttgtatgtggtgggggaataaacacacttacttgaaaattac

SEQ ID NO: 3063 - protein, 555 aa, Homo sapiens; identical to SEQ ID NO: 161

SEQ ID NO: 3064 - DNA, 3408 bp, Homo sapiens
cttcatctgttcacgcggtagcgcggattgcggttcgcggcgcgcgccaccggggaaggagcggtgggccgaggggttggaggtggggccccaggaggacctcgggctgtgggccgggagagcggagtcggggagtggggcgggggagcgaggtggcgccggggagcctgggatatggcgcggccagacgatgaggagggggcggcggtggcgcccggacacccgctcgcgaaaggatacctcccgttgccgaggggcgcgcccgttgggaaggagagcgtggagctgcagaacgggcccaaagcgggcaccttcccggtgaatggggccccccgggacagcctcgctgccgcctcgggagttctgggcgggcctcagactccactggccccagaagaggagacccaggcccggctgctgcctgcgggcgcgggagctgagaccccgggggccgagagcagcccgctgccccttacggcgctctccccgcggcgcttcgtggtgctcctgatcttcagcctgtactcgctggtcaacgcctttcagtggatccagtacagcatcattagcaacgtcttcgagggcttctacggtgtcaccttgctgcacatcgactggctgtccatggtgtacatgctggcctacgtgcccctcatcttcccggccacctggctgctggacaccagaggcctgcggctcaccgccctgctgggctccggcctcaactgcctgggtgcctggatcaagtgcggcagtgtgcagcagcatctcttctgggtcaccatgttgggccagtgcttgtgctcggtggcccaggtgttcatcctgggcttgccctcccgcatcgcctcagtgtggtttgggcccaaagaggtgtccacagcttgtgccaccgccgtgctgggcaatcagcttggaactgcagttggctttttgctaccaccagttttagtacccaacacacagaatgacacaaatctcctggcttgtaatatcagcaccatgttttatggaacatcagctgttgccacacttttatttattttaacagcaattgccttcaaagaaaaacctcggtatccaccaagtcaggctcaagcagctcttcaagacagtccccctgaagagtactcctataagaaatcaataagaaacctgtttaaaaacattccttttgtccttctgttgatcacttatggtatcatgactggtgccttttattcagtctcaacgttattaaatcaaatgatattgacatattatgagggagaagaagtcaatgctggaaggattgggctaacgctagtagtagctggaatggtgggctctattctttgtggcttatggctggattatactaaaacatacaaacagactactctgatagtttatattttgtcttttattggaatggttatctttactttcacattggaccttagatatattatcatcgtgtttgttactggaggggtgcttggcttcttcatgactggttacctccctttgggttttgaatttgctgttgaaatcacttaccctgaatctgaaggtacttcatctggtcttcttaatgcttctgcacagatatttggaattttgttcacattggctcaaggaaagctcacatcagactatggtcctaaggcagggaacatttttctctgtgtctggatgtttataggcatcatattaacagcattaatcaagtctgatctgcgaagacacaacataaatataggaattacaaatgttgatgttaaagctataccagctgacagtcccacagaccaagaaccaaaaacggttatgttgtccaagcagtcagaatcagcaatttgaagagaaaggcaaagttactgtcctgtagtaattggggacaatgtgatcatccttggagagagatgtgagcaccaaggctgggtttgtatgtggtgggggaataaacacacttacttgaaaattaccatatgaactctaaatgcataattattattttgcttaattgttaaattaagggaaattttcttaaaattcttctgtttacatcatgttaacactactgtttatctaattagtatccggtttttagtctcatattgtatctgaaagtaagcttcttgacgtttactttttaaaagtcgatgtttttcttttttgtagaaaatggaagcttagaatactttttaaagtgataatatggggtgttcagtccccataagatataatagttcatgcagtttatatattaaagtatccagtggaactaaatgtacaatatattcctaattggctgcctttttcactgtgctgaccagctgttcaagccacttcagtttgagtacaacataccaacatgacactactcacccacaaaggacagcattgggatcaggctttcagatgacctctaagatttttcccatttattgtactcttgttacaaagtactttttaacacatgcagtcaatggctataaaaactattctgtgtacagattctacccagactttggtcttagaattatgttctaattaaggagcctggttacaggttcattctgtcttgagttcttttctgtgctgcctttctatcatggataaatgctaacgctgtattttttcactccaacttgagatagagtagttttgtacccattgccttttttttcttttaaactctctttttttttttttcctgatgtgtaactttctagtaagataatttcatcatgtatgttactggctatttcatgatttcatgtatcacatcgtatattttgccttgaagattcctgaaataaggaaatctataataacttcagatagcctacatgtccccatttagtggagacctcttgaatgctatttgaattctgcagtatcatttttatgaccattctcctttgaggaatactatgcccaggtacatgctctatcagtgtgccgggagagtggattcttttcttcactgcagagtcatcacactgttagaatagtctgctcttttacatgctcaggtagggaaaataggaccaaatatatttccacagtgcctaccactgtgtcatgtttacagtgagagtttaaatattgttgatgtcctgactctgtgagctcatagggagtatcttcatagtaatgacatttgatcagccataaaatttacattatgttcatatgcacccaaaaaagctagtcaggtaatgaatacccttgaagtgaatagcaattttgatttaggcagtgtgttaggccatccttgcattgctataaagaaatatttaggctgggcgtggtggctcacgcctgtaatcccagcactttgggaggctgaagcgtgtggatcacctgaggtcaggagttcaagaccagcctggccaacatggtaaaaccccatctctacta

SEQ ID NO: 3065 - protein, 555 aa, Homo sapiens; identical to SEQ ID NO: 161

SEQ ID NO: 3066 - DNA, 593 bp, Homo sapiens
gtgactgtggtggggaaggaacacagatggtgctgcgaggccgtctccagactgtggaagccacaagccactggcgtctgcttctgtggagaaacaaacttcagccacccacgggcgcccccgcaagggccgggctgattcctcgagagtggctggcgctgggcctgcacagcactcttccctactctacgcttaccttcctcccctcccctatcctctggggcaattcagaaacggaagacatggtggattgaaggcagcactgacacccgctccatgcagtcccgggatggccaccaagtgagggagcagcaaaaaagagaagacgcagggaaggaattacctagagatccccaggactgccacgctgggccagactcacaggacactacttccctgaattattcgcttctagaactatggatgatgggttcatctaacccttccttgatttgtttgttttcactatgttatttataaagataatgggttgtatgataaatacttcttttttctttttttctctctctctctttttttttttttttttttttttgagatggaatctcgctctgtcgcccaggctggagtgc

SEQ ID NO: 3067 - protein, 75 aa, Homo sapiens
MVLRGRLQTVEATSHWRLLLWRNKLQPPTGAPARAGLIPREWLALGLHSTLPYSTLTFLPSPILWGNSETEDMVD

SEQ ID NO: 3068 - DNA, 567 bp, Homo sapiens
aaaaagcaaaaattcctcaaatgtatcactgggtataatagtgaaaggggccacttctacttccatcccttggtttctggattcattctttctagccattacagattagtaccatatattggtctttatttcaaagtgtataataacctggaggactgtgccacaaccctgtgagatgttgtcgcctcgctttgccttatctgagtctcagcaggcttttccacgatattatcaggaacaccatgctatgttagccgagcaccatgagtccctgcagagaaggtcatcctgattgcccctctaccttgctgtctgttgtggccattgctgagaccaggctttcaagagccatcccagaaaacaactaggacaagctccagccttccccgctgaacgttaattctcacgttctgtatgtgtgtattagccagggttctccagagagacagaactggtgttcttcttgcagtcaaatgagtcagacaatttcatgaattggcccatttcctttgtctctatgaacctaaggtatgaacagcccctcatcatcccaggtagaggatgaac

SEQ ID NO: 3069 - protein, 38 aa, Homo sapiens
MLSPRFALSESQQAFPRYYQEHHAMLAEHHESLQRRSS

SEQ ID NO: 3070 - DNA, 572 bp, Homo sapiens
gggtataatagtgaaaggggccacttctacttccatcccttggtttctggattcattctttctagccattacagattagtaccatatattggtctttatttcaaagtgtataataacctggaggactgtgccacaaccctgtgagatgttgtcgcctcgctttgccttatctgagtctcagcaggcttttccacgatattatcaggaacaccatgctatgttagccgagcaccatgagtccctgcagagaaggtcatcctgattgcccctctaccttgctgtctgttgtggtatgaacagcccctcatcatcccaggtagaggatgaacaactcatcatcccgggtagaggcagaataacattcgagaatgggacatggaatgaggcgacggccccagcaagccccagcagccccagccccagccccaggcccagcagcagcagcagcagcccctgctctcccgccgcccggagaggctctgcagccatgaagccaaccgtcccgaggcaccgccggcgccaaaggcacccggtcccggagcagccacgcgcggcccgtgagcctcgccacc

SEQ ID NO: 3071 - protein, 92 aa, Homo sapiens
MNSPSSSQVEDEQLIIPGRGRITFENGTWNEATAPASPSSPSPSPRPSSSSSSPCSPAARRGSAAMKPTVPRHRRRQRHPVPEQPRAAREPR

SEQ ID NO: 3072 - DNA, 483 bp, Homo sapiens
ttcggaacatcggcggctgcccgggtgacttggttatatgtcacagaataacattcgagaatgggacatggaatgaggcgacggccccagcaagccccagcagccccagccccagccccaggcccagcagcagcagcagcagcccctgctctcccgccgcccggagaggctctgcagccatgaagccaaccgtcccgaggcaccgccggtaagcagggagcctccgcggagctcccgccgccgctcccccttggcgccaaaggcacccggtcccggagcagccacgcgcggcccgtgagcctcgccaccagcgggggctcagaggaggaggacaaagacggcggggtgctgttccacgtcaacaagagcggcttccccatcgacagccacacctgggagcgcatgtggatgcacgtggccaaggtgcaccctaaggggggagaaatggtgggcgccatcaggaacgccgccttcttggcaaag

SEQ ID NO: 3073 - protein, 40 aa, Homo sapiens
MGHGMRRRPQQAPAAPAPAPGPAAAAAAPALPPPGEALQP

SEQ ID NO: 3074 - DNA, 756 bp, Homo sapiens
ctgcccgggtgacttggttatatgtcacagaataacattcgagaatgggacatggaatgaggcgacggccccagcaagccccagcagccccagccccagccccaggcccagcagcagcagcagcagcccctgctctcccgccgcccggagaggctctgcagccatgaagccaaccgtcccgaggcaccgccggtaagcagggagcctccgcggagctcccgccgccgctcccccttggtgagtcctgccgcagcgagaggcatggagaaggccgcccccgcggggcgctgatcccctcgccgcgcccgcgcgcacacgccccccgccgccgccgccgctgccgccgccgcgcgcccccagtacctcgctccccgcccaggccccaccatgaccggctccgcggccgacactcaccgctgcccccaccccaaaggcgccaaaggcacccggtcccggagcagccacgcgcggcccgtgagcctcgccaccagcgggggctcagaggaggaggacaaagacggcggggtgctgttccacgtcaacaagagcggcttccccatcgacagccacacctgggagcgcatgtggatgcacgtggccaaggtgcaccctaaggggggagaaatggtgggcgccatcaggaacgccgccttcttggcaaagccttcaataccccaggtcccaaactacaggctgtcgatgacgatcccagactggctccaggcgatccagaattacatgaagaccctacagtat

SEQ ID NO: 3075 - protein, 122 aa, Homo sapiens
MTGSAADTHRCPHPKGAKGTRSRSSHARPVSLATSGGSEEEDKDGGVLFHVNKSGFPIDSHTWERMWMHVAKVHPKGGEMVGAIRNAAFLAKPSIPQVPNYRLSMTIPDWLQAIQNYMKTLQ

SEQ ID NO: 3076 - DNA, 3303 bp, Homo sapiens
acagaataacattcgagaatgggacatggaatgaggcgacggccccagcaagccccagcagccccagccccagccccaggcccagcagcagcagcagcagcccctgctctcccgccgcccggagaggctctgcagccatgaagccaaccgtcccgaggcaccgccggtaagcagggagcctccgcggagctcccgccgccgctcccccttggtgagtcctgccgcagcgagaggcatggagaaggccgcccccgcggggcgctgatcccctcgccgcgcccgcgcgcacacgccccccgccgccgccgccgctgccgccgccgcgcgcccccagtacctcgctccccgcccaggccccaccatgaccggctccgcggccgacactcaccgctgcccccaccccaaaggcgccaaaggcacccggtcccggagcagccacgcgcggcccgtgagcctcgccaccagcgggggctcagaggaggaggacaaagacggcggggtgctgttccacgtcaacaagagcggcttccccatcgacagccacacctgggagcgcatgtggatgcacgtggccaaggtgcaccctaaggggggagaaatggtgggcgccatcaggaacgccgccttcttggcaaagccttcaataccccaggtcccaaactacaggctgtcgatgacgatcccagactggctccaggcgatccagaattacatgaagaccctacaatataatcacacagggacccagttctttgaaattaggaaaatgagaccgctgagtgggttaatggaaacagcaaaagaaatgacccgagagtccttgcctatcaaatgccttgaagctgtcatcctgggcataacccacagctaaaacaagggtctagcttctcccacactttctgttccatttttcaccagactcccggctcttcagcctgagaggaatatggtgcagagaaactgtgatggcatcgacatattggtggtgatgaccacctcccttacacaatagtctcatccctgcacaattttatacattcgagcatcatgccattggaatcacccacaaccctttgaaattgtggggatagacccaggaacagcctttgagcctgatctgccacaatcagatagaagagcaaagatgctccgaagtcctatgggatggatggctgtaagggacagtggaaaaggaaacactgcaagacaggagcttgagagatggtcccaggcaagatcagttaggtccttgagcgctgtgctgagaaatgacttttttccaaaaggcaatgggcaacccagatgaaagctctgaagcagaggtgtggcatgcttaggtatatgctctagagaggtagttctccaaagcacaggctgaaggacagattgggaaaggctgggctggatcagcaaagcccgttgggagctgttacatgagggaatggtgaggctagactcatggccctggggatgggaatggatttcagggaatggttttaagagctatcaaggagatagaatgtataggacttgcaggccaaccagacgcaggagttaatgaggaaggagtcaacgtctccaggtttctgaattgggcaatcgactgcgggattagctggaggaatgagagtggcagagaaaggatatgcgtcaatgcagacctgaactaagacagtgccagtgaaggtggagggaagggatggaggcatacatcatcaccaccactaggggactgcttagatgggaggagttattggagaaaggcagtgactccacatttctggcttgcatgataatgccacaagggaagaacttcaaggagaggatcggatttagggaaagatgagctcagatttggacatgtgaaatttgaggtgccttgtgggatgtcggaatgaggtatttgcaatgtggagctcacaggggaatctgcactggaaatgcgaatttaggagctgtgattaggaggttgtgcttactgttcaataagtgaaaggagaaaaagatcaaagatgaaatcagtattttttggtctagtttggcacaaagagcccatgaaagagacttaagaaggaaagagaggtagaaagaaaaccaggagagaaaggggatggagaggtcagtggaaggacatgtggctcagaattagactggggacaggaggattggtctagtctgttttctgggtctcctggacatctttgtgggaaggagaatctctgtgcctctctgcagtctgtggaacacttgcagccctgatctgaaaccagattgaccacaggtgccttggctgacatttgaaaaatggaaacttgaaccttactgaggcccctccccaaccctcttgtcatcctcctccctgtttcccacaaaggagatgaaacatgtgcctggggaacccagcaggaagctgggaatgggggtcggggcagcagatggctcagggccccaactctttagtggcaggagtcagccacagctgttcagcgaagcctcctgcaagtttaatgggggcagatgattggctggggatttgctggtggaagagatcaacgaaggggaacacaagcccaggcccttcatggggtagacaagctaacttcagactctttgttgaggggtgtctgagtgcctctggatttaggtcattgaaatgaccacctcccttacacaatagtctcatccctgcacaattttatacatttgcgcatcatgccactggaatcacccacgaccttttggaattgtggggatagacccaggaacagcctttgagcctgtccaaatcagagacagtgtgctcgtggttttcctttgttcttatccttctgacatttcagaaaagtgcaggaaggtggagagcttcagttcacgctgctgaactcagggaaatttgactcttgcacacagacaggaaacacagatccgaattcttcttcttttttttctttttttgagacggagtctcggtctatcgcaccactgcactccagcctgggtgacagagtgagactgtgtctcaaaaaaatgaaaaaaaaaagaccaccattcctccccagaaatgaaaccccatacccgttaaaaagtactccccatttcccccctccagcccctgcccaccaccgttctactctctgtctgtatgcacttgctactccaggtaccgcagatgagtggaatcataccatatttgtccttttgtattaggctgatttcactcagcatgtcttcaaggctcattctgcacattgcagaatttccctcccttatgaggctgaataaattctattacatgtatacact

SEQ ID NO: 3077 - protein, 169 aa, Homo sapiens
MTGSAADTHRCPHPKGAKGTRSRSSHARPVSLATSGGSEEEDKDGGVLFHVNKSGFPIDSHTWERMWMHVAKVHPKGGEMVGAIRNAAFLAKPSIPQVPNYRLSMTIPDWLQAIQNYMKTLQYNHTGTQFFEIRKMRPLSGLMETAKEMTRESLPIKCLEAVILGITHS

SEQ ID NO: 3078 - DNA, 4298 bp, Homo sapiens
acagaataacattcgagaatgggacatggaatgaggcgacggccccagcaagccccagcagccccagccccagccccaggcccagcagcagcagcagcagcccctgctctcccgccgcccggagaggctctgcagccatgaagccaaccgtcccgaggcaccgccggtaagcagggagcctccgcggagctcccgccgccgctcccccttggtgagtcctgccgcagcgagaggcatggagaaggccgcccccgcggggcgctgatcccctcgccgcgcccgcgcgcacacgccccccgccgccgccgccgctgccgccgccgcgcgcccccagtacctcgctccccgcccaggccccaccatgaccggctccgcggccgacactcaccgctgcccccaccccaaaggcgccaaaggcacccggtcccggagcagccacgcgcggcccgtgagcctcgccaccagcgggggctcagaggaggaggacaaagacggcggggtgctgttccacgtcaacaagagcggcttccccatcgacagccacacctgggagcgcatgtggatgcacgtggccaaggtgcaccctaaggggggagaaatggtgggcgccatcaggaacgccgccttcttggcaaagccttcaataccccaggtcccaaactacaggctgtcgatgacgatcccagactggctccaggcgatccagaattacatgaagaccctacactacttaaccaatgggcagccttccattgagcggttccccatcagctttaaaacctacttctcaggaaactactttcaccacgttgtgctggggatttactgcaatggccgctatggctcattgggcatgagccgcagggctgagctgatggacaagccattgacttttcggactctgagtgacctcatctttgactttgaggactcttacaagaaatacctgcacacagtcaagaaggtcaagattgggctgtacgtcccccatgagcctcatagcttccagcccattgagtggaagcagctggtcctcaacgtctcaaagatgctgagggctgacataaggaaggagctggagaaatatgccagggacatgagaatgaagatcctgaaacctgcaagtgcccactctccgacccaagtgagaagccggggaaaatccctgtcccccagaaggagacaggcaagccccccgaggaggctcggccggcgagagaagtcgcctgcactgcctgaaaagaaggtggctgatctgagcactctgaatgaagtgggctatcaaatccgaatttagccaagccataccggccagcaagagggtttctgtggtgcttctctctgcactttacccagcatcttcaggaggaactgcaactatttattaagaacttgtgaattttatttttaaggattcacctggaaatagaatctgagtgggtggtaaccattagctttaaaaaattcactaaaaggcaccatgaaaaggctgaagtaataagccccactggggttggactatgtccctcactcaagatcttaaggataaccgtaactgaagttttatatttttccatttacctactttcttttacttgctttgaacattatgcctcaccaatagtaaatgttcatgaaataatctcttgaacttttggtatagtaaggtaactctaacagtattactgtctttttcagcaataacagaaagcaaaaatgggtgggttttttttaagcagttattacctcagcattttgacatcagatatgcaaacttaatggcgttttgtttttttatattctatttgtattctttccccagtatttcccatggggatctccacaagtttggagttttttcctggtgcacacacgtgaggagatttaaggtactatatgcaagtgttttactaaaaagcactgaaattcttctggcaatacaagaaccattttcaggatcttggagttacttccttcttaatctttcttaaagcattcactgatgtttttgttttttcaaaatgaaacaaaaatatcacattgagaagctagtctatgttctgtcactaacatttaaactttgcagactctaacaaaaagcacaagaggtcacgtactattatacaaatttagcggtactggatttacctctgacattaacacactcaggcagagaccaggagtgatcagcaggtcttcagaaccaaaaaacctttctgttcacatttcatctgatttttaaactgaggcaggctttgattcttctgaaggatgccaagaatcaaactaagggaggactcactgttaaagatgtgttctgatgtcttatattaagaccaaatgtgacatgatgtgattatcttccagtactttgcttttaggtaccatttcatgacattttaggaatgagtattggaaaatataaagaattagaaaagcagcactttttttttaatggaaaagtcttcggtccagtgttacaccttatagtgtaattcagtccctaagcacagaatgaatgtctggcctgcatatggtagttacagtgtaacctctggctgcagaccacacaggacaaccctaacagcctagtcttgtatggtgtaaatatcaagagtacagcttcaatttcatttgctttatcttagcaacaatgccaactcaggagagcagacggccgatttcagtgaagtctggtagtcaacagatgttatttcagtctcagtgcatctcctctggctttctttgactgaaggtgtttataggaaggaagttaaaaaaaaaaaaagctcattgagattctttaccaattctttacaagatttctgggggtgacagggaaagcaaaaggacttcaaagcaaaagggtgcacaagagcttacttcaccctgaaaatcagtattattaatgaaaagtactgttttcttaaagaagtcgaatgtcctttagatgaacaagaccaagtatacatctccattagattaaaatgtagcacagggttaaaaattatcagtttaatctctttaagaacagtattatcagagtttaaaatgagttagctctgtttatctacacacagcaaacccattcgcagcctcttggccacatgtattcagatgtttgaaatagtgaatcatttcattttcattctaaaacaatactgacttagccatataccttctgtttgtcaatctgaaacttgcttacatctaataagtagacctcttataacactgcaaccattctaagagttggaatttatttttgccaagtattaagtactgttacatctaaaatacagaatgtcaaatggttgcatagcttgtttcccacaacaaggaggaaaagaacaggaatacaaactctgtaatatgctgataaagaagccttagaactgccaactggcttgatggttcaattagtaagctaatttctcccacacccgctccttgatttttagactaattttcccaaagcaaggtttagtcacacaaacttgaaagtacatttaaaatgttcttagttgtcatcctacttttattgcctatggaatatgctaatttctaaaaaaaatacgggagaggcaccaaacccctaaattctagtgcaataatttaaaaaacaaaaaacaaaacaaaacaaaaaacatgttatatgcacccccctcccaaagctgattttaagactggctagaattcaaaatataaaaaataaaactatgaagtgatttgaaatcggttttaaaaagttgttagtgcaagagaaattttatgtttaagccatcatggcaatatatgcaaagtttaaatgaatgacagaaatcttgattttagactgtatgttgtgctgttttgagtacactttatttcggagatatttagtattttctatacactctgaaatcatgagcatttcactttttctaagtcaattatttcataaggattttattaatagatattggtaaatagaactttggaaatcttaattcagaattcttactatacctgagtcttttgtaagctatagttttatgtacaaccttgtacagtttttttgacatacaattcagaactttgtttattctcttggactttgttctggccaatacattttttttaaatctttaagaagaactgtgattgttttagtgggtatttttctaattaaatgaaaacttgtataatggtattttagagaatgccagtaagtgcatgtttcaagttaatgtttttctcatcacttgtatgtttctaacacagcatgggactttaataaaaccatcctggaaacttaa

SEQ ID NO: 3079 - protein, 311 aa, Homo sapiens; identical to SEQ ID NO: 163

SEQ ID NO: 3080 - DNA, 4224 bp, Homo sapiens
attcgagaatgggacatggaatgaggcgacggccccagcaagccccagcagccccagccccagccccaggcccagcagcagcagcagcagcccctgctctcccgccgcccggagaggctctgcagccatgaagccaaccgtcccgaggcaccgccggtaagcagggagcctccgcggagctcccgccgccgctcccccttggcgccaaaggcacccggtcccggagcagccacgcgcggcccgtgagcctcgccaccagcgggggctcagaggaggaggacaaagacggcggggtgctgttccacgtcaacaagagcggcttccccatcgacagccacacctgggagcgcatgtggatgcacgtggccaaggtgcaccctaaggggggagaaatggtgggcgccatcaggaacgccgccttcttggcaaagccttcaataccccaggtcccaaactacaggctgtcgatgacgatcccagactggctccaggcgatccagaattacatgaagaccctacaatataatcacacagggacccagttctttgaaattaggaaaatgagaccgctgagtgggttaatggaaacagcaaaagaaatgacccgagagtccttgcctatcaaatgccttgaagctgtcatcctgggcatctacttaaccaatgggcagccttccattgagcggttccccatcagctttaaaacctacttctcaggaaactactttcaccacgttgtgctggggatttactgcaatggccgctatggctcattgggcatgagccgcagggctgagctgatggacaagccattgacttttcggactctgagtgacctcatctttgactttgaggactcttacaagaaatacctgcacacagtcaagaaggtcaagattgggctgtacgtcccccatgagcctcatagcttccagcccattgagtggaagcagctggtcctcaacgtctcaaagatgctgagggctgacataaggaaggagctggagaaatatgccagggacatgagaatgaagatcctgaaacctgcaagtgcccactctccgacccaagtgagaagccggggaaaatccctgtcccccagaaggagacaggcaagccccccgaggaggctcggccggcgagagaagtcgcctgcactgcctgaaaagaaggtggctgatctgagcactctgaatgaagtgggctatcaaatccgaatttagccaagccataccggccagcaagagggtttctgtggtgcttctctctgcactttacccagcatcttcaggaggaactgcaactatttattaagaacttgtgaattttatttttaaggattcacctggaaatagaatctgagtgggtggtaaccattagctttaaaaaattcactaaaaggcaccatgaaaaggctgaagtaataagccccactggggttggactatgtccctcactcaagatcttaaggataaccgtaactgaagttttatatttttccatttacctactttcttttacttgctttgaacattatgcctcaccaatagtaaatgttcatgaaataatctcttgaacttttggtatagtaaggtaactctaacagtattactgtctttttcagcaataacagaaagcaaaaatgggtgggttttttttaagcagttattacctcagcattttgacatcagatatgcaaacttaatggcgttttgtttttttatattctatttgtattctttccccagtatttcccatggggatctccacaagtttggagttttttcctggtgcacacacgtgaggagatttaaggtactatatgcaagtgttttactaaaaagcactgaaattcttctggcaatacaagaaccattttcaggatcttggagttacttccttcttaatctttcttaaagcattcactgatgtttttgttttttcaaaatgaaacaaaaatatcacattgagaagctagtctatgttctgtcactaacatttaaactttgcagactctaacaaaaagcacaagaggtcacgtactattatacaaatttagcggtactggatttacctctgacattaacacactcaggcagagaccaggagtgatcagcaggtcttcagaaccaaaaaacctttctgttcacatttcatctgatttttaaactgaggcaggctttgattcttctgaaggatgccaagaatcaaactaagggaggactcactgttaaagatgtgttctgatgtcttatattaagaccaaatgtgacatgatgtgattatcttccagtactttgcttttaggtaccatttcatgacattttaggaatgagtattggaaaatataaagaattagaaaagcagcactttttttttaatggaaaagtcttcggtccagtgttacaccttatagtgtaattcagtccctaagcacagaatgaatgtctggcctgcatatggtagttacagtgtaacctctggctgcagaccacacaggacaaccctaacagcctagtcttgtatggtgtaaatatcaagagtacagcttcaatttcatttgctttatcttagcaacaatgccaactcaggagagcagacggccgatttcagtgaagtctggtagtcaacagatgttatttcagtctcagtgcatctcctctggctttctttgactgaaggtgtttataggaaggaagttaaaaaaaaaaaaagctcattgagattctttaccaattctttacaagatttctgggggtgacagggaaagcaaaaggacttcaaagcaaaagggtgcacaagagcttacttcaccctgaaaatcagtattattaatgaaaagtactgttttcttaaagaagtcgaatgtcctttagatgaacaagaccaagtatacatctccattagattaaaatgtagcacagggttaaaaattatcagtttaatctctttaagaacagtattatcagagtttaaaatgagttagctctgtttatctacacacagcaaacccattcgcagcctcttggccacatgtattcagatgtttgaaatagtgaatcatttcattttcattctaaaacaatactgacttagccatataccttctgtttgtcaatctgaaacttgcttacatctaataagtagacctcttataacactgcaaccattctaagagttggaatttatttttgccaagtattaagtactgttacatctaaaatacagaatgtcaaatggttgcatagcttgtttcccacaacaaggaggaaaagaacaggaatacaaactctgtaatatgctgataaagaagccttagaactgccaactggcttgatggttcaattagtaagctaatttctcccacacccgctccttgatttttagactaattttcccaaagcaaggtttagtcacacaaacttgaaagtacatttaaaatgttcttagttgtcatcctacttttattgcctatggaatatgctaatttctaaaaaaaatacgggagaggcaccaaacccctaaattctagtgcaataatttaaaaaacaaaaaacaaaacaaaacaaaaaacatgttatatgcacccccctcccaaagctgattttaagactggctagaattcaaaatataaaaaataaaactatgaagtgatttgaaatcggttttaaaaagttgttagtgcaagagaaattttatgtttaagccatcatggcaatatatgcaaagtttaaatgaatgacagaaatcttgattttagactgtatgttgtgctgttttgagtacactttatttcggagatatttagtattttctatacactctgaaatcatgagcatttcactttttctaagtcaattatttcataaggattttattaatagatattggtaaatagaactttggaaatcttaattcagaattcttactatacctgagtcttttgtaagctatagttttatgtacaaccttgtacagtttttttgacatacaattcagaactttgtttattctcttggactttgttctggccaatacattttttttaaatctttaagaagaactgtgattgttttagtgggtatttttctaattaaatgaaaacttgtataatggtattttagagaatgccagtaagtgcatgtttcaagttaatgtttttctcatcacttgtatgtttctaacacagcatgggactttaataaaaccatcctggaaacttaa

SEQ ID NO: 3081 - protein, 290 aa, Homo sapiens
MWMHVAKVHPKGGEMVGAIRNAAFLAKPSIPQVPNYRLSMTIPDWLQAIQNYMKTLQYNHTGTQFFEIRKMRPLSGLMETAKEMTRESLPIKCLEAVILGIYLTNGQPSIERFPISFKTYFSGNYFHHVVLGIYCNGRYGSLGMSRRAELMDKPLTFRTLSDLIFDFEDSYKKYLHTVKKVKIGLYVPHEPHSFQPIEWKQLVLNVSKMLRADIRKELEKYARDMRMKILKPASAHSPTQVRSRGKSLSPRRRQASPPRRLGRREKSPALPEKKVADLSTLNEVGYQIRI

SEQ ID NO: 3082 - DNA, 4163 bp, Homo sapiens
attcgagaatgggacatggaatgaggcgacggccccagcaagccccagcagccccagccccagccccaggcccagcagcagcagcagcagcccctgctctcccgccgcccggagaggctctgcagccatgaagccaaccgtcccgaggcaccgccggtaagcagggagcctccgcggacccgtgagcctcgccaccagcgggggctcagaggaggaggacaaagacggcggggtgctgttccacgtcaacaagagcggcttccccatcgacagccacacctgggagcgcatgtggatgcacgtggccaaggtgcaccctaaggggggagaaatggtgggcgccatcaggaacgccgccttcttggcaaagccttcaataccccaggtcccaaactacaggctgtcgatgacgatcccagactggctccaggcgatccagaattacatgaagaccctacaatataatcacacagggacccagttctttgaaattaggaaaatgagaccgctgagtgggttaatggaaacagcaaaagaaatgacccgagagtccttgcctatcaaatgccttgaagctgtcatcctgggcatctacttaaccaatgggcagccttccattgagcggttccccatcagctttaaaacctacttctcaggaaactactttcaccacgttgtgctggggatttactgcaatggccgctatggctcattgggcatgagccgcagggctgagctgatggacaagccattgacttttcggactctgagtgacctcatctttgactttgaggactcttacaagaaatacctgcacacagtcaagaaggtcaagattgggctgtacgtcccccatgagcctcatagcttccagcccattgagtggaagcagctggtcctcaacgtctcaaagatgctgagggctgacataaggaaggagctggagaaatatgccagggacatgagaatgaagatcctgaaacctgcaagtgcccactctccgacccaagtgagaagccggggaaaatccctgtcccccagaaggagacaggcaagccccccgaggaggctcggccggcgagagaagtcgcctgcactgcctgaaaagaaggtggctgatctgagcactctgaatgaagtgggctatcaaatccgaatttagccaagccataccggccagcaagagggtttctgtggtgcttctctctgcactttacccagcatcttcaggaggaactgcaactatttattaagaacttgtgaattttatttttaaggattcacctggaaatagaatctgagtgggtggtaaccattagctttaaaaaattcactaaaaggcaccatgaaaaggctgaagtaataagccccactggggttggactatgtccctcactcaagatcttaaggataaccgtaactgaagttttatatttttccatttacctactttcttttacttgctttgaacattatgcctcaccaatagtaaatgttcatgaaataatctcttgaacttttggtatagtaaggtaactctaacagtattactgtctttttcagcaataacagaaagcaaaaatgggtgggttttttttaagcagttattacctcagcattttgacatcagatatgcaaacttaatggcgttttgtttttttatattctatttgtattctttccccagtatttcccatggggatctccacaagtttggagttttttcctggtgcacacacgtgaggagatttaaggtactatatgcaagtgttttactaaaaagcactgaaattcttctggcaatacaagaaccattttcaggatcttggagttacttccttcttaatctttcttaaagcattcactgatgtttttgttttttcaaaatgaaacaaaaatatcacattgagaagctagtctatgttctgtcactaacatttaaactttgcagactctaacaaaaagcacaagaggtcacgtactattatacaaatttagcggtactggatttacctctgacattaacacactcaggcagagaccaggagtgatcagcaggtcttcagaaccaaaaaacctttctgttcacatttcatctgatttttaaactgaggcaggctttgattcttctgaaggatgccaagaatcaaactaagggaggactcactgttaaagatgtgttctgatgtcttatattaagaccaaatgtgacatgatgtgattatcttccagtactttgcttttaggtaccatttcatgacattttaggaatgagtattggaaaatataaagaattagaaaagcagcactttttttttaatggaaaagtcttcggtccagtgttacaccttatagtgtaattcagtccctaagcacagaatgaatgtctggcctgcatatggtagttacagtgtaacctctggctgcagaccacacaggacaaccctaacagcctagtcttgtatggtgtaaatatcaagagtacagcttcaatttcatttgctttatcttagcaacaatgccaactcaggagagcagacggccgatttcagtgaagtctggtagtcaacagatgttatttcagtctcagtgcatctcctctggctttctttgactgaaggtgtttataggaaggaagttaaaaaaaaaaaaagctcattgagattctttaccaattctttacaagatttctgggggtgacagggaaagcaaaaggacttcaaagcaaaagggtgcacaagagcttacttcaccctgaaaatcagtattattaatgaaaagtactgttttcttaaagaagtcgaatgtcctttagatgaacaagaccaagtatacatctccattagattaaaatgtagcacagggttaaaaattatcagtttaatctctttaagaacagtattatcagagtttaaaatgagttagctctgtttatctacacacagcaaacccattcgcagcctcttggccacatgtattcagatgtttgaaatagtgaatcatttcattttcattctaaaacaatactgacttagccatataccttctgtttgtcaatctgaaacttgcttacatctaataagtagacctcttataacactgcaaccattctaagagttggaatttatttttgccaagtattaagtactgttacatctaaaatacagaatgtcaaatggttgcatagcttgtttcccacaacaaggaggaaaagaacaggaatacaaactctgtaatatgctgataaagaagccttagaactgccaactggcttgatggttcaattagtaagctaatttctcccacacccgctccttgatttttagactaattttcccaaagcaaggtttagtcacacaaacttgaaagtacatttaaaatgttcttagttgtcatcctacttttattgcctatggaatatgctaatttctaaaaaaaatacgggagaggcaccaaacccctaaattctagtgcaataatttaaaaaacaaaaaacaaaacaaaacaaaaaacatgttatatgcacccccctcccaaagctgattttaagactggctagaattcaaaatataaaaaataaaactatgaagtgatttgaaatcggttttaaaaagttgttagtgcaagagaaattttatgtttaagccatcatggcaatatatgcaaagtttaaatgaatgacagaaatcttgattttagactgtatgttgtgctgttttgagtacactttatttcggagatatttagtattttctatacactctgaaatcatgagcatttcactttttctaagtcaattatttcataaggattttattaatagatattggtaaatagaactttggaaatcttaattcagaattcttactatacctgagtcttttgtaagctatagttttatgtacaaccttgtacagtttttttgacatacaattcagaactttgtttattctcttggactttgttctggccaatacattttttttaaatctttaagaagaactgtgattgttttagtgggtatttttctaattaaatgaaaacttgtataatggtattttagagaatgccagtaagtgcatgtttcaagttaatgtttttctcatcacttgtatgtttctaacacagcatgggactttaataaaaccatcctggaaacttaa

SEQ ID NO: 3083 - protein, 290 aa, Homo sapiens; identical to SEQ ID NO: 3081

SEQ ID NO: 3084 - DNA, 581 bp, Homo sapiens
ttcgagaatgggacatggaatgaggcgacggccccagcaagccccagcagccccagccccagccccaggcccagcagcagcagcagcagcccctgctctcccgccgcccggagaggctctgcagccatgaagccaaccgtcccgaggtaatcgcagggctggaagcccgtcatcgattctcagggaggctgtcagcgtgcaggggggagcggggagtgtcgtggagacactccgggacccctcactcggttccgctgtgcgtccacttagctgtggtgtcagctgtgtctccgctgatttcaggcaccgccggtaagcagggagcctccgcggagctcccgccgccgctcccccttggcgccaaaggcacccggtcccggagcagccacgcgcggcccgtgagcctcgccaccagcgggggctcagaggaggaggacaaagacggcggggtgctgttccacgtcaacaagagcggcttccccatcgacagccacacctgggagcgcatgtggatgcacgtggccaaggtgcaccctaaggggggagaaatggtgggcgccatcaggaacgccgccttcttg

SEQ ID NO: 3085 - protein, 40 aa, Homo sapiens; identical to SEQ ID NO: 3073

SEQ ID NO: 3086 - DNA, 1731 bp, Homo sapiens
agcagccccagccccagccccaggcccagcagcagcagcagcagcccctgctctcccgccgcccggagaggctctgcagccatgaagccaaccgtcccgagccttcaataccccaggtcccaaactacaggctgtcgatgacgatcccagactggctccaggcgatccagaattacatgaagaccctacagtatccttccaaccaaggtctgagcacacccagccaggggacaggcatggtgatcgcaagcctggtggcaaatctgtccccagctggtcatcaaaagctctctaaggttaatggaaacagcaaaagaaatgacccgagagtccttgcctatcaaatgccttgaagctgtcatcctgggcatctacttaaccaatgggcagccttccattgagcggttccccatcagctttaaaacctacttctcaggaaactactttcaccacgttgtgctggggatttactgcaatggccgctatggctcattgggcatgagccgcagggctgagctgatggacaagccattgacttttcggactctgagtgacctcatctttgactttgaggactcttacaagaaatacctgcacacagtcaagaaggtcaagattgggctgtacgtcccccatgagcctcatagcttccagcccattgagtggaagcagctggtcctcaacgtctcaaagatgctgagggctgacataaggaaggagctggagaaatatgccagggacatgagaatgaagggcttgtgcagtcactaagagaaaaggattatgctgacttcaggcctggctatgtttagcacttgtggacttgtcatcttcactctgcaggacctggagtggagattcctgatcaattaaaaccattctgtcatatgtgtgggatgggagcatcagaggaagaacaggctggtttctgaggcaatagagatgggactttgccttcgtgaggagaggaacttgccaagcaaacaaacacagccccggggagactgaggcattgggctgtgttcctctctctacacggcacagggagcacaatgtgaccatctgtatatctgtcttggaagtggtgcccttgctgcttgacagtacaggacgagagaggaatgtgtgtgtctccagcctccttttttagaagtcttcctgctcaatgccttctaaaccatggcatcatgattgggctggggggtggaatgtggtgctagaagaagacctgagggtggaggtcccttaggaaccagggtgattaactcctcacatctccttcagatcctgaaacctgcaagtgcccactctccgacccaagtgagaagccggggaaaatccctgtcccccagaaggagacaggcaagccccccgaggaggctcggccggcgagagaagtcccctgaggccagtgatcccacatctacttcttagaccaaaataacccacttaagcaatgacagattggagatgctggggatgcccaaattcaccagcgataatccgctggcaaatatttgaactatagccatcctgggaaaaaatactgcttttcttaataatagcagcatgctgtgtcacccagcctcttgccatgctggaaccatgtggcacagtgcacagggggcttggttgaatcccaactgtgccacgtgttagctgtgcagctgggcacatccttcctcctcggggagccttggtttcttcatccataaaagagtatcaaatgct

SEQ ID NO: 3087 - protein, 156 aa, Homo sapiens
METAKEMTRESLPIKCLEAVILGIYLTNGQPSIERFPISFKTYFSGNYFHHVVLGIYCNGRYGSLGMSRRAELMDKPLTFRTLSDLIFDFEDSYKKYLHTVKKVKIGLYVPHEPHSFQPIEWKQLVLNVSKMLRADIRKELEKYARDMRMKGLCSH

SEQ ID NO: 3088 - DNA, 682 bp, Homo sapiens
ccgccgcgcgcccccagtacctcgctccccgcccaggccccaccatgaccggctccgcggccgacactcaccgctgcccccaccccaaaggcgccaaaggcacccggtcccggagcagccacgcgcggcccgtgagcctcgccaccagcgggggctcagaggaggaggacaaagacggcggggtgctgttccacgtcaacaagagcggcttccccatcgacagccacacctgggagcgcatgtggatgcacgtggccaaggtgcaccctaaggggggagaaatggtgggcgccatcaggaacgccgccttcttggcaaagcttatttgtgctccaagaaaaaagaaagacttttggctgagacttaaaagggactttccagtacacatgatgaattagtctcactggatagaaaaagaggatgaggagtgaaactctctttttgccttggagagaagccagtgagccatttgggtttggtggctaaggatatctttaccgagggagggagatgtaccctggtgggagtagatacgttatatgaaacatcaaaatgcaaactggggagaaatgctgccgagcctcggggttatagcgtggcggatggtttcccctggaccctggggacgctggtacggctgagaagattcctgggcaggtctaggaatgccagacttgagacc

SEQ ID NO: 3089 - protein, 117 aa, Homo sapiens [sequence omitted]

SEQ ID NO: 3090 - DNA, 1807 bp, Homo sapiens
tccacaagtttggagttttttcctggtgcacacacgtgaggagatttaagcatgggactttaataaaaccatcctggaaacttaaggattgtttttcttctaaatatgtaagatgtggccgggctcagtggctcaagcctgtaatcccggcactatgggaggccaaggcgggtggatcacctgaggtcaggagttcgagaccagcctgaccaacatggtgaaaccctgtctctactaaaaatacaaaaaattagccgggcatggtggcgggcgcctgtaatcccaggtatttgggaggctgaagcagaagaatcgcttgaacttgggaggcggaggttgcagtgagctgagatcccgccaatgtactccagcctgggcaacagtgcaagactcagtctcaaaaaaaaaaaaagtaagatggtgtgatttttttttttggtcctcttattatatatttattctactgaacctatttatcgttctttcacccttctttcacaatctgcagactctatattaaaaacactctatcactctattttgacatatctcaattcactcatcttttagcatcacccctaagtaaaaatggctgcaaagggcaatgaaatagtttagtaaaggcaacagtacagcttatacatctcagtatacctaccacaaaaccttcaggcacagaagtacgagtataatagtttattacctaacttacaggtacaaagtgcaaatgacttgacgcctctctttccccaatcccttgaactctctggatctcaaactttctttaggaaagcaaaggttaaaagcagacagtaactaaattccaaataaagacaagatttcaaacatgaatattatcttgatagcaaaaggtacagtaaaaccaaaatttcattactccacagtttacctttccatttaaaacttggatagtataacacttgagactgagagatttggtttcaggcattaaccagatttaattgtttttggcaggtaagtacaggctctggcagagttaccaactattctggtcaacaaaagtaaagacaagtggataattatttttagtggagctttaaaaacctgtgagaagctcacattgactttttggcctccagtccacaaaataatacttcatttgataagctaaagtaaagagcaattttatggattaactctatcaaagtgaagcacatgaaaaatgggcctaaagtcacaatatattaatcaggatataaaaaattaaattttcacagaggttttcagggatgtttgtttgttaacaatgacctatatgtaataatgttatttgttaataaattcacacaacacaaagcagtaattaactaatgaattttcatttttctttccccaatattaaaaagggataattatactatcattataatttgataatgtctatatctgctaattagggcacataatatcctgcaaactactactataaaatgtgggaaatcctagaactataattaatactgtaattaaaatccccccaaaggccaggcatggtggctcatgcctgtaatcacagcactttgggagcccgaggcgggtggatcacccctgaggtcaggagttcaagaccagcctggccaacatggcaaaattccatctctactaaaaatacaaaaattagctgggcatggtggtgcatgcctgtaatcccagctacttgggaggctgaggaaggagaattgcttgaacccaggaggcggaggttgcagtgagccgagttcgcgccactgcactccagcctgggcgatagcgtgagacaccatct

SEQ ID NO: 3091 - protein, 73 aa, Homo sapiens [sequence omitted]

SEQ ID NO: 3092 - DNA, 2275 bp, Homo sapiens
aggagctgaagttgctttggttggtggcttgaaacttctagctagactgtcacttcttacagaacaagacttatggactgttaatggacttccaaacgaaaataactcttcagatcatctgcctttattggcaaagttcagacttgagctctgactctctttgatcacatactaattttctttccaatttgtattgtttttcaaagaatgtaaagttcttaagtgtatgcatgttgtttatttttgcactgtggagattctgaagcggttatgttagatgctttgaaactccatatcagaagaaataactttataacaattttttttaataatgaaaaatattttcgtgacaagtgagctctaaattctctttattgtaaaagagatgtaaaggttttatattctaaatcctagtaaaattgacagtgatttttaaatataatgcatcttcctttgtctgcttagtaaaaaatttcatttcataattttggcaagctctgtagtggatccaaagtatctttgagttcttgcaaactacaagttgtttcctttccagaaggcttgatttcattaggagacccctctattgagttctaaatagtttatcttagaaagccttgggtcattcacaggtatccaaccagccattgtttagtttgtttttgaaggggtttgataatgctttttaagttgtacagaatgtaagtctttgtactaaagcatttgctataattatttttaaaaaaacaaacagatgaaaacctcagagaaggcatgtggattataagatttgtctagtaaaaattgtaattgaatatgtttaaatatttaatttctcattttggggggtttttatttttttattttttagatggtgtctcacgctatcgcccaggctggagtgcagtggcgcgaactcggctcactgcaacctccgcctcctgggttcaagcaattctccttcctcagcctcccaagtagctgggattacaggcatgcaccaccatgcccagctaatttttgtatttttagtagagatggaattttgccatgttggccaggctggtcttgaactcctgacctcaggggtgatccacccgcctcgggctcccaaagtgctgtgattacaggcatgagccaccatgcctggcctttggggggattttaattacagtattaattatagttctaggatttcccacattttatagtagtagtttgcaggatattatgtgccctaattagcagatatagacattatcaaattataatgatagtataattatccctttttaatattggggaaagaaaaatgaaaattcattagttaattactgctttgtgttgtgtgaatttattaacaaataacattattacatataggtcattgttaacaaacaaacatccctgaaaacctctgtgaaaatttaattttttatatcctgattaatatattgtgactttaggcccatttttcatgtgcttcactttgatagagttaatccataaaattgctctttactttagcttatcaaatgaagtattattttgtggactggaggccaaaaagtcaatgtgagcttctcacaggtttttaaagctccactaaaaataattatccacttgtctttacttttgttgaccagaatagttggtaactctgccagagcctgtacttacctgccaaaaacaattaaatctggttaatgcctgaaaccaaatctctcagtctcaagtgttatactatccaagttttaaatggaaaggtaaactgtggagtaatgaaattttggttttactgtaccttttgctatcaagataatattcatgtttgaaatcttgtctttatttggaatttagttactgtctgcttttaacctttgctttcctaaagaaagtttgagatccagagagttcaagggattggggaaagagaggcgtcaagtcatttgcactttgtacctgtaagttaggtaataaactattatactcgtacttctgtgcctgaaggttttgtggtaggtatactgagatgtataagctgtactgttgcctttactaaactatttcattgccctttgcagccatttttacttaggggtgatgctaaaagatgagtgaattgagatatgtcaaaatagagtgatagagtgtttttaatatagagtctgcagattgtgaaagaagggtgaaagaacgataaataggttcagtagaataaatatataataagaggaccaaaaaaaaaaatcacaccatcttacttttttttttt

SEQ ID NO: 3093 - protein, 66 aa, Homo sapiens
MVSHAIAQAGVQWRELGSLQPPPPGFKQFSFLSLPSSWDYRHAPPCPANFCIFSRDGILPCWPGWS

SEQ ID NO: 3094 - DNA, 5402 bp, Homo sapiens
aagtgttgggattacaggcatgagccaccgcacctggccaacaatttttaatgtggatgaaaccactttatattgcaagaagatgccatctaggacttcataactagaaagaagaagtcagtgcctggtttcaaaggacaggctgactcttttgttaggagctaatatagcttgttactttaagttaaagtcagcattcattgaccattctgaaaatcctagggcacttaaaaattatgctaaatccactctacctgtgctatgtcagtggaaaaacaaagcttggggatgacagtgcatctgtttatggcatagaatattttaagcacactgctgagaccactattcagaaaaacagattcctttccaaagattactgttcgttcacaaggcacctggtcacccaagagctctgatgaagatgtacaaggaaatgaatgttttttcatccctgctaacacggcatccattctgcagcctatggaatcaaggagtaattttgtacctacaggtctccttatttaagaaatacatttcataggctatagctgccatagaagtgatttctctgatggatctggggaaagtaaattgcaaacctgcaaaggattcagcatcctaaatgctattcagaacattcgtgattcatgggaggaggtcaaaatatcaccattaaaaagagtttggtagaagttgattccagccctcatggatgactttgaggggttcaagacttcaggggaggaagtaactgtagatgtggtggaaatagcaagagaactagaagtggagcctgaagaattaactgaattgtttcaatctcatgataaaacttaaatagatgaggagttgcttcttatagatgagcagagtattttcttgagatgcattctattcctggtgaagatgctgtgaacattgctgaaattacaacaaaggattttaaatgttacataaatttaattgataaaacattggaagggtttccaattttgaaaaaaagttccgtggataaagtgctgtcaaatagcatcagatgctacagaaaaatcttttatgaaaggaagcatcaatggctgcagcaaatttcattgttgtcttattttaagaaattgccacagccaacccccactttaagcaaccatcaccctgatcagccagcagtcattaatatctaggcaagatcctccacctgtaaaaagatgatgactcactgaaggctgagatgattgttaggatattttaacaatgaagtatttttaaattaaggtatgtattttcttaggcataatgctattgcacacttagtaaactacagtatagtataaacgcaacttacatgcactgggaaactgaaaaaattatgtgacttgctttattgagatactcactttattgtggtggcctgaaaccaaacccgcagtacctgtgagcatgcctatatttgatacaataggaactatattgcaggtagtaaaaaatgatgaatagtgttagttcaaagcgatagatgatttgtatgtccaaattaaagaaaagcatgtatgggaaaaagattgtcatttttatgtaaatgataagtgctttctgaattgtatttaaagaaaagaagattttataagtccaaagaatcacttaatacaatgaataaagggtaataatttaccacttttggattaccttttatttaagacataaatttttcaactcataagctatttaaaatcttttcacttaagatacctgttgaaattttgtttaggtatctggccaggaacagtcttcacggggacaaagaattttatctattccaatttggcccccaaacctaggtatctcacagaactgtgtgtatgaggtacagcaggtaccaaaagtagaaaagacagacagtgatctgacacaaacacagctgaagcaaacagaggtcctagtgacagctgaaaaattgtcttcaaatttacagcaccatttcagtttgtcatctgtttattcacattactttcctgacactggaattccagaagtgaccacctgtcattcccgaagtgccataactgtggattatattttctactctgcagaaaaggaagatgttgctgggcacccaggagctgaagttgctttggttggtggcttgaaacttctagctagactgtcacttcttacagaacaagacttatggactgttaatggacttccaaacgaaaataactcttcagatcatctgcctttattggcaaagttcagacttgagctctgactctctttgatcacatactaattttctttccaatttgtattgtttttcaaagaatgtaaagttcttaagtgtatgcatgttgtttatttttgcactgtggagattctgaagcggttatgttagatgctttgaaactccatatcagaagaaataactttataacaattttttttaataatgaaaaatattttcgtgacaagtgagctctaaattctctttattgtaaaagagatgtaaaggttttatattctaaatcctagtaaaattgacagtgatttttaaatataatgcatcttcctttgtctgcttagtaaaaaatttcatttcataattttggcaagctctgtagtggatccaaagtatctttgagttcttgcaaactacaagttgtttcctttccagaaggcttgatttcattaggagacccctctattgagttctaaatagtttatcttagaaagccttgggtcattcacaggtatccaaccagccattgtttagtttgtttttgaaggggtttgataatgctttttaagttgtacagaatgcttaatccatcttattactgtcctgagccatgtaatatgcctgcatcgtgttggggaaatgtttgggaaatataagccagcataacgtgtaaagctcactctttcaccctggaacagacaagaggtgggcttaatagaggcagagactggggatatacctttgtttccctagcatttttatttatttatttttattttattttattttttgagatggagtttcactcttgttgcccaggctgggggtgcaatggcgcaatctttgctcactgcaacccctgcctcccgggctcaagcgattctcctgcctcagcctctcgagtagctgggattacaggcatgcgtcaccactcccagctaattttgtattttcagtagagacagggtttccccatgttggttaggctggtctcgaactcccaacctcaggtgatccgcccacctcagctctcaaagtgctgggattacaggcgggagccactgcacatggcagcattttttaaaaattcagttttaagatctctggtttaggggagagattttattttactgaaccagttctatagaaatttattttattaggaaatttgtctttggaacaaagtggcagctataaaattatttttgttaagcctcagaaatatgaggaagcctgtaaaactctagtggggagatattaacttggagacctaatgctctgtaaatagtcatttaaactgttggttttagtggttttgtttctaaaatgttttcttttaccgtgatgcaccagtatgagatggtgctgacactttctatgaagtggttatgagcaggtttaataaatcctctatacaagtgtttgaatcaattttaaaacataaaaagtggaaatttccttttttgtagacagtaggaacaaggaattatatgcatttttactaagtagtaattttacactgaattgtaaatgtttttacagtgagttttattaatagaatgcttcaccttaaattggaaaacaataatagtcttggactaagtctttgtactaaagcatttgctataattatttttaaaaaaacaaacagatgaaaacctcagagaaggcatgtggattataagatttgtctagtaaaaattgtaattgaatatgtttaaatatttaatttctcattttggggggtttttatttttttattttttagatggtgtctcacgctatcgcccaggctggagtgcagtggcgcgaactcggctcactgcaacctccgcctcctgggttcaagcaattctccttcctcagcctcccaagtagctgggattacaggcatgcaccaccatgcccagctaatttttgtatttttagtagagatggaattttgccatgttggccaggctggtcttgaactcctgacctcaggggtgatccacccgcctcgggctcccaaagtgctgtgattacaggcatgagccaccatgcctggcctttggggggattttaattacagtattaattatagttctaggatttcccacattttatagtagtagtttgcaggatattatgtgccctaattagcagatatagacattatcaaattataatgatagtataattatccctttttaatattggggaaagaaaaatgaaaattcattagttaattactgctttgtgttgtgtgaatttattaacaaataacattattacatataggtcattgttaacaaacaaacatccctgaaaacctctgtgaaaatttaattttttatatcctgattaatatattgtgactttaggcccatttttcatgtgcttcactttgatagagttaatccataaaattgctctttactttagcttatcaaatgaagtattattttgtggactggaggccaaaaagtcaatgtgagcttctcacaggtttttaaagctccactaaaaataattatccacttgtctttacttttgttgaccagaatagttggtaactctgccagagcctgtacttacctgccaaaaacaattaaatctggttaatgcctgaaaccaaatctctcagtctcaagtgttatactatccaagttttaaatggaaaggtaaactgtggagtaatgaaattttggttttactgtaccttttgctatcaagataatattcatgtttgaaatcttgtctttatttggaatttagttactgtctgcttttaacctttgctttcctaaagaaagtttgagatccagagagttcaagggattggggaaagagaggcgtcaagtcatttgcactttgtacctgtaagttaggtaataaactattatactcgtacttctgtgcctgaaggttttgtggtaggtatactgagatgtataagctgtactgttgcctttactaaactatttcattgccctttgcagccatttttacttaggggtgatgctaaaagatgagtgaattgagatatgtcaaaatagagtgatagagtgtttttaatatagagtctgcagattgtgaaagaagggtgaaagaacgataaataggttcagtagaataaatatataataagaggaccaaaaaaaaaaatcacaccatcttacttttttttttt

SEQ ID NO: 3095 - protein, 97 aa, Homo sapiens [sequence omitted]

SEQ ID NO: 3096 - DNA, 4603 bp, Homo sapiens
cggcgagactgcacctcccagcatgccttgcagccaggactggagtcggtacttaagagtgatggggttccctagatactttaggccgtcgcatcgattatagagattgaggtggaacccggggcctgggaactggacgcacgcggagggcgaagatggaagcctggcgctgtgtgaggaagggctacggccactgtgtggtgggaagaggccggtgtgataaagcggaattgggaatatatatgtagccatgataaagaaaaaacgaagatcctaggagacaaaaatgttgatcccaaatgtgaagacagtgagaacaagtttgacttttcagtgatgtcctataatatactttcacaagatttactggaagataactctcacctttatagacattgccggcggccagtattacactggagttttaggtttcccaatattctgaaagaaattaaacattttgatgcagacgtactttgtttgcaagaagttcaagaagatcattatggagcagagatcaggccaagtttggaatcactgggttatcactgtgaatataagatgcggacaggaaggaaacctgatggctgtgctatttgcttcaaacattccaaattttcactcttgtcagtgaacccagtggaattcttccgccctgatatttctctgttggacagagacaatgttggattagttttactcttacagcccaaaattccatatgctgcctgccctgcaatctgcgtagcaaatacgcatctgttgtataatccaaggcgaggtgatattaagctgacgcaattggcaatgctactggcagagatttccagtgttgcccaccagaaagatggcagcttctgccctattgttatgtgtggtgactttaattctgttcctggttctccactatatagtttcataaaggaaggaaaattgaattatgaaggacttcccataggaaaggtatctggccaggaacagtcttcacggggacaaagaattttatctattccaatttggcccccaaacctaggtatctcacagaactgtgtgtatgaggtacagcaggtaccaaaagtagaaaagacagacagtgatctgacacaaacacagctgaagcaaacagaggtcctagtgacagctgaaaaattgtcttcaaatttacagcaccatttcagtttgtcatctgtttattcacattactttcctgacactggaattccagaagtgaccacctgtcattcccgaagtgccataactgtggattatattttctactctgcagaaaaggaagatgttgctgggcacccaggagctgaagttgctttggttggtggcttgaaacttctagctagactgtcacttcttacagaacaagacttatggactgttaatggacttccaaacgaaaataactcttcagatcatctgcctttattggcaaagttcagacttgagctctgactctctttgatcacatactaattttctttccaatttgtattgtttttcaaagaatgtaaagttcttaagtgtatgcatgttgtttatttttgcactgtggagattctgaagcggttatgttagatgctttgaaactccatatcagaagaaataactttataacaattttttttaataatgaaaaatattttcgtgacaagtgagctctaaattctctttattgtaaaagagatgtaaaggttttatattctaaatcctagtaaaattgacagtgatttttaaatataatgcatcttcctttgtctgcttagtaaaaaatttcatttcataattttggcaagctctgtagtggatccaaagtatctttgagttcttgcaaactacaagttgtttcctttccagaaggcttgatttcattaggagacccctctattgagttctaaatagtttatcttagaaagccttgggtcattcacaggtatccaaccagccattgtttagtttgtttttgaaggggtttgataatgctttttaagttgtacagaatgcttaatccatcttattactgtcctgagccatgtaatatgcctgcatcgtgttggggaaatgtttgggaaatataagccagcataacgtgtaaagctcactctttcaccctggaacagacaagaggtgggcttaatagaggcagagactggggatatacctttgtttccctagcatttttatttatttatttttattttattttattttttgagatggagtttcactcttgttgcccaggctgggggtgcaatggcgcaatctttgctcactgcaacccctgcctcccgggctcaagcgattctcctgcctcagcctctcgagtagctgggattacaggcatgcgtcaccactcccagctaattttgtattttcagtagagacagggtttccccatgttggttaggctggtctcgaactcccaacctcaggtgatccgcccacctcagctctcaaagtgctgggattacaggcgggagccactgcacatggcagcattttttaaaaattcagttttaagatctctggtttaggggagagattttattttactgaaccagttctatagaaatttattttattaggaaatttgtctttggaacaaagtggcagctataaaattatttttgttaagcctcagaaatatgaggaagcctgtaaaactctagtggggagatattaacttggagacctaatgctctgtaaatagtcatttaaactgttggttttagtggttttgtttctaaaatgttttcttttaccgtgatgcaccagtatgagatggtgctgacactttctatgaagtggttatgagcaggtttaataaatcctctatacaagtgtttgaatcaattttaaaacataaaaagtggaaatttccttttttgtagacagtaggaacaaggaattatatgcatttttactaagtagtaattttacactgaattgtaaatgtttttacagtgagttttattaatagaatgcttcaccttaaattggaaaacaataatagtcttggactaagtctttgtactaaagcatttgctataattatttttaaaaaaacaaacagatgaaaacctcagagaaggcatgtggattataagatttgtctagtaaaaattgtaattgaatatgtttaaatatttaatttctcattttggggggtttttatttttttattttttagatggtgtctcacgctatcgcccaggctggagtgcagtggcgcgaactcggctcactgcaacctccgcctcctgggttcaagcaattctccttcctcagcctcccaagtagctgggattacaggcatgcaccaccatgcccagctaatttttgtatttttagtagagatggaattttgccatgttggccaggctggtcttgaactcctgacctcaggggtgatccacccgcctcgggctcccaaagtgctgtgattacaggcatgagccaccatgcctggcctttggggggattttaattacagtattaattatagttctaggatttcccacattttatagtagtagtttgcaggatattatgtgccctaattagcagatatagacattatcaaattataatgatagtataattatccctttttaatattggggaaagaaaaatgaaaattcattagttaattactgctttgtgttgtgtgaatttattaacaaataacattattacatataggtcattgttaacaaacaaacatccctgaaaacctctgtgaaaatttaattttttatatcctgattaatatattgtgactttaggcccatttttcatgtgcttcactttgatagagttaatccataaaattgctctttactttagcttatcaaatgaagtattattttgtggactggaggccaaaaagtcaatgtgagcttctcacaggtttttaaagctccactaaaaataattatccacttgtctttacttttgttgaccagaatagttggtaactctgccagagcctgtacttacctgccaaaaacaattaaatctggttaatgcctgaaaccaaatctctcagtctcaagtgttatactatccaagttttaaatggaaaggtaaactgtggagtaatgaaattttggttttactgtaccttttgctatcaagataatattcatgtttgaaatcttgtctttatttggaatttagttactgtctgcttttaacctttgctttcctaaagaaagtttgagatccagagagttcaagggattggggaaagagaggcgtcaagtcatttgcactttgtacctgtaagttaggtaataaactattatactcgtacttctgtgcctgaaggttttgtggtaggtatactgagatgtataagctgtactgttgcctttactaaactatttcattgccctttgcagccatttttacttaggggtgatgctaaaagatgagtgaattgagatatgtcaaaatagagtgatagagtgtttttaatatagagtctgcagattgtgaaagaagggtgaaagaacgataaataggttcagtagaataaatatataataagaggaccaaaaaaaaaaatcacaccatcttacttttttttttt

SEQ ID NO: 3097 - protein, 375 aa, Homo sapiens
MSYNILSQDLLEDNSHLYRHCRRPVLHWSFRFPNILKEIKHFDADVLCLQEVQEDHYGAEIRPSLESLGYHCEYKMRTGRKPDGCAICFKHSKFSLLSVNPVEFFRPDISLLDRDNVGLVLLLQPKIPYAACPAICVANTHLLYNPRRGDIKLTQLAMLLAEISSVAHQKDGSFCPIVMCGDFNSVPGSPLYSFIKEGKLNYEGLPIGKVSGQEQSSRGQRILSIPIWPPNLGISQNCVYEVQQVPKVEKTDSDLTQTQLKQTEVLVTAEKLSSNLQHHFSLSSVYSHYFPDTGIPEVTTCHSRSAITVDYIFYSAEKEDVAGHPGAEVALVGGLKLLARLSLLTEQDLWTVNGLPNENNSSDHLPLLAKFRLEL

SEQ ID NO: 3098 - DNA, 1994 bp, Homo sapiens
aggagctgaagttgctttggttggtggcttgaaacttctagctagactgtcacttcttacagaacaagacttatggactgttaatggacttccaaacgaaaataactcttcagatcatctgcctttattggcaaagttcagacttgagctctgactctctttgatcacatactaattttctttccaatttgtattgtttttcaaagaatgtaaagttcttaagtgtatgcatgttgtttatttttgcactgtggagattctgaagcggttatgttagatgctttgaaactccatatcagaagaaataactttataacaattttttttaataatgaaaaatattttcgtgacaagtgagctctaaattctctttattgtaaaagagatgtaaaggttttatattctaaatcctagtaaaattgacagtgatttttaaatataatgcatcttcctttgtctgcttagtaaaaaatttcatttcataattttggcaagctctgtagtggatccaaagtatctttgagttcttgcaaactacaagttgtttcctttccagaaggcttgatttcattaggagacccctctattgagttctaaatagtttatcttagaaagccttgggtcattcacaggtatccaaccagccattgtttagtttgtttttgaaggggtttgataatgctttttaagttgtacagaatgtaagtctttgtactaaagcatttgctataattatttttaaaaaaacaaacagatgaaaacctcagagaaggcatgtggattataagatttgtctagtaaaaattgtaattgaatatgtttaaatatttaatttctcattttggggggtttttatttttttattttttagatggtgtctcacgctatcgcccaggctggagtgcagtggcgcgaactcggctcactgcaacctccgcctcctgggttcaagcaattctccttcctcagcctcccaagtagctgggattacaggcatgcaccaccatgcccagctaatttttgtatttttagtagagatggaattttgccatgttggccaggctggtcttgaactcctgacctcaggggtgatccacccgcctcgggctcccaaagtgctgtgattacaggcatgagccaccatgcctggcctttggggggattttaattacagtattaattatagttctaggatttcccacattttatagtagtagtttgcaggatattatgtgccctaattagcagatatagacattatcaaattataatgatagtataattatccctttttaatattggggaaagaaaaatgaaaattcattagttaattactgctttgtgttgtgtgaatttattaacaaataacattattacatataggtcattgttaacaaacaaacatccctgaaaacctctgtgaaaatttaattttttatatcctgattaatatattgtgactttaggcccatttttcatgtgcttcactttgatagagttaatccataaaattgctctttactttagcttatcaaatgaagtattattttgtggactggaggccaaaaagtcaatgtgagcttctcacaggtttttaaagctccactaaaaataattatccacttgtctttacttttgttgaccagaatagttggtaactctgccagagcctgtacttacctgccaaaaacaattaaatctggttaatgcctgaaaccaaatctctcagtctcaagtgttatactatccaagttttaaatggaaaggtaaactgtggagtaatgaaattttggttttactgtaccttttgctatcaagataatattcatgtttgaaatcttgtctttatttggaatttagttactgtctgcttttaacctttgctttcctaaagaaagtttgagatccagagagttcaagggattggggaaagagaggcgtcaagtcatttgcactttgtacctgtaagttaggtaataaactattatactcgt

SEQ ID NO: 3099 - protein, 66 aa, Homo sapiens; identical to SEQ ID NO: 3093

SEQ ID NO: 3100 - DNA, 5121 bp, Homo sapiens
aagtgttgggattacaggcatgagccaccgcacctggccaacaatttttaatgtggatgaaaccactttatattgcaagaagatgccatctaggacttcataactagaaagaagaagtcagtgcctggtttcaaaggacaggctgactcttttgttaggagctaatatagcttgttactttaagttaaagtcagcattcattgaccattctgaaaatcctagggcacttaaaaattatgctaaatccactctacctgtgctatgtcagtggaaaaacaaagcttggggatgacagtgcatctgtttatggcatagaatattttaagcacactgctgagaccactattcagaaaaacagattcctttccaaagattactgttcgttcacaaggcacctggtcacccaagagctctgatgaagatgtacaaggaaatgaatgttttttcatccctgctaacacggcatccattctgcagcctatggaatcaaggagtaattttgtacctacaggtctccttatttaagaaatacatttcataggctatagctgccatagaagtgatttctctgatggatctggggaaagtaaattgcaaacctgcaaaggattcagcatcctaaatgctattcagaacattcgtgattcatgggaggaggtcaaaatatcaccattaaaaagagtttggtagaagttgattccagccctcatggatgactttgaggggttcaagacttcaggggaggaagtaactgtagatgtggtggaaatagcaagagaactagaagtggagcctgaagaattaactgaattgtttcaatctcatgataaaacttaaatagatgaggagttgcttcttatagatgagcagagtattttcttgagatgcattctattcctggtgaagatgctgtgaacattgctgaaattacaacaaaggattttaaatgttacataaatttaattgataaaacattggaagggtttccaattttgaaaaaaagttccgtggataaagtgctgtcaaatagcatcagatgctacagaaaaatcttttatgaaaggaagcatcaatggctgcagcaaatttcattgttgtcttattttaagaaattgccacagccaacccccactttaagcaaccatcaccctgatcagccagcagtcattaatatctaggcaagatcctccacctgtaaaaagatgatgactcactgaaggctgagatgattgttaggatattttaacaatgaagtatttttaaattaaggtatgtattttcttaggcataatgctattgcacacttagtaaactacagtatagtataaacgcaacttacatgcactgggaaactgaaaaaattatgtgacttgctttattgagatactcactttattgtggtggcctgaaaccaaacccgcagtacctgtgagcatgcctatatttgatacaataggaactatattgcaggtagtaaaaaatgatgaatagtgttagttcaaagcgatagatgatttgtatgtccaaattaaagaaaagcatgtatgggaaaaagattgtcatttttatgtaaatgataagtgctttctgaattgtatttaaagaaaagaagattttataagtccaaagaatcacttaatacaatgaataaagggtaataatttaccacttttggattaccttttatttaagacataaatttttcaactcataagctatttaaaatcttttcacttaagatacctgttgaaattttgtttaggtatctggccaggaacagtcttcacggggacaaagaattttatctattccaatttggcccccaaacctaggtatctcacagaactgtgtgtatgaggtacagcaggtaccaaaagtagaaaagacagacagtgatctgacacaaacacagctgaagcaaacagaggtcctagtgacagctgaaaaattgtcttcaaatttacagcaccatttcagtttgtcatctgtttattcacattactttcctgacactggaattccagaagtgaccacctgtcattcccgaagtgccataactgtggattatattttctactctgcagaaaaggaagatgttgctgggcacccaggagctgaagttgctttggttggtggcttgaaacttctagctagactgtcacttcttacagaacaagacttatggactgttaatggacttccaaacgaaaataactcttcagatcatctgcctttattggcaaagttcagacttgagctctgactctctttgatcacatactaattttctttccaatttgtattgtttttcaaagaatgtaaagttcttaagtgtatgcatgttgtttatttttgcactgtggagattctgaagcggttatgttagatgctttgaaactccatatcagaagaaataactttataacaattttttttaataatgaaaaatattttcgtgacaagtgagctctaaattctctttattgtaaaagagatgtaaaggttttatattctaaatcctagtaaaattgacagtgatttttaaatataatgcatcttcctttgtctgcttagtaaaaaatttcatttcataattttggcaagctctgtagtggatccaaagtatctttgagttcttgcaaactacaagttgtttcctttccagaaggcttgatttcattaggagacccctctattgagttctaaatagtttatcttagaaagccttgggtcattcacaggtatccaaccagccattgtttagtttgtttttgaaggggtttgataatgctttttaagttgtacagaatgcttaatccatcttattactgtcctgagccatgtaatatgcctgcatcgtgttggggaaatgtttgggaaatataagccagcataacgtgtaaagctcactctttcaccctggaacagacaagaggtgggcttaatagaggcagagactggggatatacctttgtttccctagcatttttatttatttatttttattttattttattttttgagatggagtttcactcttgttgcccaggctgggggtgcaatggcgcaatctttgctcactgcaacccctgcctcccgggctcaagcgattctcctgcctcagcctctcgagtagctgggattacaggcatgcgtcaccactcccagctaattttgtattttcagtagagacagggtttccccatgttggttaggctggtctcgaactcccaacctcaggtgatccgcccacctcagctctcaaagtgctgggattacaggcgggagccactgcacatggcagcattttttaaaaattcagttttaagatctctggtttaggggagagattttattttactgaaccagttctatagaaatttattttattaggaaatttgtctttggaacaaagtggcagctataaaattatttttgttaagcctcagaaatatgaggaagcctgtaaaactctagtggggagatattaacttggagacctaatgctctgtaaatagtcatttaaactgttggttttagtggttttgtttctaaaatgttttcttttaccgtgatgcaccagtatgagatggtgctgacactttctatgaagtggttatgagcaggtttaataaatcctctatacaagtgtttgaatcaattttaaaacataaaaagtggaaatttccttttttgtagacagtaggaacaaggaattatatgcatttttactaagtagtaattttacactgaattgtaaatgtttttacagtgagttttattaatagaatgcttcaccttaaattggaaaacaataatagtcttggactaagtctttgtactaaagcatttgctataattatttttaaaaaaacaaacagatgaaaacctcagagaaggcatgtggattataagatttgtctagtaaaaattgtaattgaatatgtttaaatatttaatttctcattttggggggtttttatttttttattttttagatggtgtctcacgctatcgcccaggctggagtgcagtggcgcgaactcggctcactgcaacctccgcctcctgggttcaagcaattctccttcctcagcctcccaagtagctgggattacaggcatgcaccaccatgcccagctaatttttgtatttttagtagagatggaattttgccatgttggccaggctggtcttgaactcctgacctcaggggtgatccacccgcctcgggctcccaaagtgctgtgattacaggcatgagccaccatgcctggcctttggggggattttaattacagtattaattatagttctaggatttcccacattttatagtagtagtttgcaggatattatgtgccctaattagcagatatagacattatcaaattataatgatagtataattatccctttttaatattggggaaagaaaaatgaaaattcattagttaattactgctttgtgttgtgtgaatttattaacaaataacattattacatataggtcattgttaacaaacaaacatccctgaaaacctctgtgaaaatttaattttttatatcctgattaatatattgtgactttaggcccatttttcatgtgcttcactttgatagagttaatccataaaattgctctttactttagcttatcaaatgaagtattattttgtggactggaggccaaaaagtcaatgtgagcttctcacaggtttttaaagctccactaaaaataattatccacttgtctttacttttgttgaccagaatagttggtaactctgccagagcctgtacttacctgccaaaaacaattaaatctggttaatgcctgaaaccaaatctctcagtctcaagtgttatactatccaagttttaaatggaaaggtaaactgtggagtaatgaaattttggttttactgtaccttttgctatcaagataatattcatgtttgaaatcttgtctttatttggaatttagttactgtctgcttttaacctttgctttcctaaagaaagtttgagatccagagagttcaagggattggggaaagagaggcgtcaagtcatttgcactttgtacctgtaagttaggtaataaactattatactcgt

SEQ ID NO: 3101 - protein, 97 aa, Homo sapiens [sequence omitted]

SEQ ID NO: 3102 - DNA, 4322 bp, Homo sapiens
cggcgagactgcacctcccagcatgccttgcagccaggactggagtcggtacttaagagtgatggggttccctagatactttaggccgtcgcatcgattatagagattgaggtggaacccggggcctgggaactggacgcacgcggagggcgaagatggaagcctggcgctgtgtgaggaagggctacggccactgtgtggtgggaagaggccggtgtgataaagcggaattgggaatatatatgtagccatgataaagaaaaaacgaagatcctaggagacaaaaatgttgatcccaaatgtgaagacagtgagaacaagtttgacttttcagtgatgtcctataatatactttcacaagatttactggaagataactctcacctttatagacattgccggcggccagtattacactggagttttaggtttcccaatattctgaaagaaattaaacattttgatgcagacgtactttgtttgcaagaagttcaagaagatcattatggagcagagatcaggccaagtttggaatcactgggttatcactgtgaatataagatgcggacaggaaggaaacctgatggctgtgctatttgcttcaaacattccaaattttcactcttgtcagtgaacccagtggaattcttccgccctgatatttctctgttggacagagacaatgttggattagttttactcttacagcccaaaattccatatgctgcctgccctgcaatctgcgtagcaaatacgcatctgttgtataatccaaggcgaggtgatattaagctgacgcaattggcaatgctactggcagagatttccagtgttgcccaccagaaagatggcagcttctgccctattgttatgtgtggtgactttaattctgttcctggttctccactatatagtttcataaaggaaggaaaattgaattatgaaggacttcccataggaaaggtatctggccaggaacagtcttcacggggacaaagaattttatctattccaatttggcccccaaacctaggtatctcacagaactgtgtgtatgaggtacagcaggtaccaaaagtagaaaagacagacagtgatctgacacaaacacagctgaagcaaacagaggtcctagtgacagctgaaaaattgtcttcaaatttacagcaccatttcagtttgtcatctgtttattcacattactttcctgacactggaattccagaagtgaccacctgtcattcccgaagtgccataactgtggattatattttctactctgcagaaaaggaagatgttgctgggcacccaggagctgaagttgctttggttggtggcttgaaacttctagctagactgtcacttcttacagaacaagacttatggactgttaatggacttccaaacgaaaataactcttcagatcatctgcctttattggcaaagttcagacttgagctctgactctctttgatcacatactaattttctttccaatttgtattgtttttcaaagaatgtaaagttcttaagtgtatgcatgttgtttatttttgcactgtggagattctgaagcggttatgttagatgctttgaaactccatatcagaagaaataactttataacaattttttttaataatgaaaaatattttcgtgacaagtgagctctaaattctctttattgtaaaagagatgtaaaggttttatattctaaatcctagtaaaattgacagtgatttttaaatataatgcatcttcctttgtctgcttagtaaaaaatttcatttcataattttggcaagctctgtagtggatccaaagtatctttgagttcttgcaaactacaagttgtttcctttccagaaggcttgatttcattaggagacccctctattgagttctaaatagtttatcttagaaagccttgggtcattcacaggtatccaaccagccattgtttagtttgtttttgaaggggtttgataatgctttttaagttgtacagaatgcttaatccatcttattactgtcctgagccatgtaatatgcctgcatcgtgttggggaaatgtttgggaaatataagccagcataacgtgtaaagctcactctttcaccctggaacagacaagaggtgggcttaatagaggcagagactggggatatacctttgtttccctagcatttttatttatttatttttattttattttattttttgagatggagtttcactcttgttgcccaggctgggggtgcaatggcgcaatctttgctcactgcaacccctgcctcccgggctcaagcgattctcctgcctcagcctctcgagtagctgggattacaggcatgcgtcaccactcccagctaattttgtattttcagtagagacagggtttccccatgttggttaggctggtctcgaactcccaacctcaggtgatccgcccacctcagctctcaaagtgctgggattacaggcgggagccactgcacatggcagcattttttaaaaattcagttttaagatctctggtttaggggagagattttattttactgaaccagttctatagaaatttattttattaggaaatttgtctttggaacaaagtggcagctataaaattatttttgttaagcctcagaaatatgaggaagcctgtaaaactctagtggggagatattaacttggagacctaatgctctgtaaatagtcatttaaactgttggttttagtggttttgtttctaaaatgttttcttttaccgtgatgcaccagtatgagatggtgctgacactttctatgaagtggttatgagcaggtttaataaatcctctatacaagtgtttgaatcaattttaaaacataaaaagtggaaatttccttttttgtagacagtaggaacaaggaattatatgcatttttactaagtagtaattttacactgaattgtaaatgtttttacagtgagttttattaatagaatgcttcaccttaaattggaaaacaataatagtcttggactaagtctttgtactaaagcatttgctataattatttttaaaaaaacaaacagatgaaaacctcagagaaggcatgtggattataagatttgtctagtaaaaattgtaattgaatatgtttaaatatttaatttctcattttggggggtttttatttttttattttttagatggtgtctcacgctatcgcccaggctggagtgcagtggcgcgaactcggctcactgcaacctccgcctcctgggttcaagcaattctccttcctcagcctcccaagtagctgggattacaggcatgcaccaccatgcccagctaatttttgtatttttagtagagatggaattttgccatgttggccaggctggtcttgaactcctgacctcaggggtgatccacccgcctcgggctcccaaagtgctgtgattacaggcatgagccaccatgcctggcctttggggggattttaattacagtattaattatagttctaggatttcccacattttatagtagtagtttgcaggatattatgtgccctaattagcagatatagacattatcaaattataatgatagtataattatccctttttaatattggggaaagaaaaatgaaaattcattagttaattactgctttgtgttgtgtgaatttattaacaaataacattattacatataggtcattgttaacaaacaaacatccctgaaaacctctgtgaaaatttaattttttatatcctgattaatatattgtgactttaggcccatttttcatgtgcttcactttgatagagttaatccataaaattgctctttactttagcttatcaaatgaagtattattttgtggactggaggccaaaaagtcaatgtgagcttctcacaggtttttaaagctccactaaaaataattatccacttgtctttacttttgttgaccagaatagttggtaactctgccagagcctgtacttacctgccaaaaacaattaaatctggttaatgcctgaaaccaaatctctcagtctcaagtgttatactatccaagttttaaatggaaaggtaaactgtggagtaatgaaattttggttttactgtaccttttgctatcaagataatattcatgtttgaaatcttgtctttatttggaatttagttactgtctgcttttaacctttgctttcctaaagaaagtttgagatccagagagttcaagggattggggaaagagaggcgtcaagtcatttgcactttgtacctgtaagttaggtaataaactattatactcgt

SEQ ID NO: 3103 - protein, 375 aa, Homo sapiens; identical to SEQ ID NO: 3097

SEQ ID NO: 3104 - DNA, 4670 bp, Homo sapiens
gcaagatggagtgtaggccggccggcgagactgcacctcccagcatgccttgcagccaggactggagtcggtacttaagagtgatggggttccctagatactttaggccgtcgcatcgattatagagattgaggtggaacccggggcctgggaactggacgcacgcggagggcgaagatggaagcctggcgctgtgtgaggaagggctacggccactgtgtggtgggaagaggccgataccccatgtttccccatcactcgaggagtctgggcagagactggactacaccgtgggagaatctgcaaaggtgttgctggaacagacatatttctagttgtatgaggtggcctggacattactctcgagctccttacccatacttcagtagtaggcatttttcactaaattggagaccaccctgtttgtttgagtctagaactcagttccagtactgtaactggagacctgacaacctgagccagacatctttgattcatctctctagttacgtcatgaacgctgagggagatgagccttcatcaaaacgaagaaaacaccaaggtgtgataaagcggaattgggaatatatatgtagccatgataaagaaaaaacgaagatcctaggagacaaaaatgttgatcccaaatgtgaagacagtgagaacaagtttgacttttcagtgatgtcctataatatactttcacaagatttactggaagataactctcacctttatagacattgccggcggccagtattacactggagttttaggtttcccaatattctgaaagaaattaaacattttgatgcagacgtactttgtttgcaagaagttcaagaagatcattatggagcagagatcaggccaagtttggaatcactgggttatcactgtgaatataagatgcggacaggaaggaaacctgatggctgtgctatttgcttcaaacattccaaattttcactcttgtcagtgaacccagtggaattcttccgccctgatatttctctgttggacagagacaatgttggattagttttactcttacagcccaaaattccatatgctgcctgccctgcaatctgcgtagcaaatacgcatctgttgtataatccaaggcgaggtgatattaagctgacgcaattggcaatgctactggcagagatttccagtgttgcccaccagaaagatggcagcttctgccctattgttatgtgtggtgactttaattctgttcctggttctccactatatagtttcataaaggaaggaaaattgaattatgaaggacttcccataggaaaggtatctggccaggaacagtcttcacggggacaaagaattttatctattccaatttggcccccaaacctaggtatctcacagaactgtgtgtatgaggtacagcaggtaccaaaagtagaaaagacagacagtgatctgacacaaacacagctgaagcaaacagaggtcctagtgacagctgaaaaattgtcttcaaatttacagcaccatttcagtttgtcatctgtttattcacattactttcctgacactggaattccagaagtgaccacctgtcattcccgaagtgccataactgtggattatattttctactctgcagaaaaggaagatgttgctgggcacccaggagctgaagttgctttggttggtggcttgaaacttctagctagactgtcacttcttacagaacaagacttatggactgttaatggacttccaaacgaaaataactcttcagatcatctgcctttattggcaaagttcagacttgagctctgactctctttgatcacatactaattttctttccaatttgtattgtttttcaaagaatgtaaagttcttaagtgtatgcatgttgtttatttttgcactgtggagattctgaagcggttatgttagatgctttgaaactccatatcagaagaaataactttataacaattttttttaataatgaaaaatattttcgtgacaagtgagctctaaattctctttattgtaaaagagatgtaaaggttttatattctaaatcctagtaaaattgacagtgatttttaaatataatgcatcttcctttgtctgcttagtaaaaaatttcatttcataattttggcaagctctgtagtggatccaaagtatctttgagttcttgcaaactacaagttgtttcctttccagaaggcttgatttcattaggagacccctctattgagttctaaatagtttatcttagaaagccttgggtcattcacaggtatccaaccagccattgtttagtttgtttttgaaggggtttgataatgctttttaagttgtacagaatgcttaatccatcttattactgtcctgagccatgtaatatgcctgcatcgtgttggggaaatgtttgggaaatataagccagcataacgtgtaaagctcactctttcaccctggaacagacaagaggtgggcttaatagaggcagagactggggatatacctttgtttccctagcatttttatttatttatttttattttattttattttttgagatggagtttcactcttgttgcccaggctgggggtgcaatggcgcaatctttgctcactgcaacccctgcctcccgggctcaagcgattctcctgcctcagcctctcgagtagctgggattacaggcatgcgtcaccactcccagctaattttgtattttcagtagagacagggtttccccatgttggttaggctggtctcgaactcccaacctcaggtgatccgcccacctcagctctcaaagtgctgggattacaggcgggagccactgcacatggcagcattttttaaaaattcagttttaagatctctggtttaggggagagattttattttactgaaccagttctatagaaatttattttattaggaaatttgtctttggaacaaagtggcagctataaaattatttttgttaagcctcagaaatatgaggaagcctgtaaaactctagtggggagatattaacttggagacctaatgctctgtaaatagtcatttaaactgttggttttagtggttttgtttctaaaatgttttcttttaccgtgatgcaccagtatgagatggtgctgacactttctatgaagtggttatgagcaggtttaataaatcctctatacaagtgtttgaatcaattttaaaacataaaaagtggaaatttccttttttgtagacagtaggaacaaggaattatatgcatttttactaagtagtaattttacactgaattgtaaatgtttttacagtgagttttattaatagaatgcttcaccttaaattggaaaacaataatagtcttggactaagtctttgtactaaagcatttgctataattatttttaaaaaaacaaacagatgaaaacctcagagaaggcatgtggattataagatttgtctagtaaaaattgtaattgaatatgtttaaatatttaatttctcattttggggggtttttatttttttattttttagatggtgtctcacgctatcgcccaggctggagtgcagtggcgcgaactcggctcactgcaacctccgcctcctgggttcaagcaattctccttcctcagcctcccaagtagctgggattacaggcatgcaccaccatgcccagctaatttttgtatttttagtagagatggaattttgccatgttggccaggctggtcttgaactcctgacctcaggggtgatccacccgcctcgggctcccaaagtgctgtgattacaggcatgagccaccatgcctggcctttggggggattttaattacagtattaattatagttctaggatttcccacattttatagtagtagtttgcaggatattatgtgccctaattagcagatatagacattatcaaattataatgatagtataattatccctttttaatattggggaaagaaaaatgaaaattcattagttaattactgctttgtgttgtgtgaatttattaacaaataacattattacatataggtcattgttaacaaacaaacatccctgaaaacctctgtgaaaatttaattttttatatcctgattaatatattgtgactttaggcccatttttcatgtgcttcactttgatagagttaatccataaaattgctctttactttagcttatcaaatgaagtattattttgtggactggaggccaaaaagtcaatgtgagcttctcacaggtttttaaagctccactaaaaataattatccacttgtctttacttttgttgaccagaatagttggtaactctgccagagcctgtacttacctgccaaaaacaattaaatctggttaatgcctgaaaccaaatctctcagtctcaagtgttatactatccaagttttaaatggaaaggtaaactgtggagtaatgaaattttggttttactgtaccttttgctatcaagataatattcatgtttgaaatcttgtctttatttggaatttagttactgtctgcttttaacctttgctttcctaaagaaagtttgagatccagagagttcaagggattggggaaagagaggcgtcaagtcatttgcactttgtacctgtaagttaggtaataaactattatactcgt

SEQ ID NO: 3105 - protein, 544 aa, Homo sapiens; identical to SEQ ID NO: 165

SEQ ID NO: 3106 - DNA, 4845 bp, Homo sapiens
aagtgttgggattacaggcatgagccaccgcacctggccaacaatttttaatgtggatgaaaccactttatattgcaagaagatgccatctaggacttcataactagaaagaagaagtcagtgcctggtttcaaaggacaggctgactcttttgttaggagctaatatagcttgttactttaagttaaagtcagcattcattgaccattctgaaaatcctagggcacttaaaaattatgctaaatccactctacctgtgctatgtcagtggaaaaacaaagcttggggatgacagtgcatctgtttatggcatagaatattttaagcacactgctgagaccactattcagaaaaacagattcctttccaaagattactgttcgttcacaaggcacctggtcacccaagagctctgatgaagatgtacaaggaaatgaatgttttttcatccctgctaacacggcatccattctgcagcctatggaatcaaggagtaattttgtacctacaggtctccttatttaagaaatacatttcataggctatagctgccatagaagtgatttctctgatggatctggggaaagtaaattgcaaacctgcaaaggattcagcatcctaaatgctattcagaacattcgtgattcatgggaggaggtcaaaatatcaccattaaaaagagtttggtagaagttgattccagccctcatggatgactttgaggggttcaagacttcaggggaggaagtaactgtagatgtggtggaaatagcaagagaactagaagtggagcctgaagaattaactgaattgtttcaatctcatgataaaacttaaatagatgaggagttgcttcttatagatgagcagagtattttcttgagatgcattctattcctggtgaagatgctgtgaacattgctgaaattacaacaaaggattttaaatgttacataaatttaattgataaaacattggaagggtttccaattttgaaaaaaagttccgtggataaagtgctgtcaaatagcatcagatgctacagaaaaatcttttatgaaaggaagcatcaatggctgcagcaaatttcattgttgtcttattttaagaaattgccacagccaacccccactttaagcaaccatcaccctgatcagccagcagtcattaatatctaggcaagatcctccacctgtaaaaagatgatgactcactgaaggctgagatgattgttaggatattttaacaatgaagtatttttaaattaaggtatgtattttcttaggcataatgctattgcacacttagtaaactacagtatagtataaacgcaacttacatgcactgggaaactgaaaaaattatgtgacttgctttattgagatactcactttattgtggtggcctgaaaccaaacccgcagtacctgtgagcatgcctatatttgatacaataggaactatattgcaggtagtaaaaaatgatgaatagtgttagttcaaagcgatagatgatttgtatgtccaaattaaagaaaagcatgtatgggaaaaagattgtcatttttatgtaaatgataagtgctttctgaattgtatttaaagaaaagaagattttataagtccaaagaatcacttaatacaatgaataaagggtaataatttaccacttttggattaccttttatttaagacataaatttttcaactcataagctatttaaaatcttttcacttaagatacctgttgaaattttgtttaggtatctggccaggaacagtcttcacggggacaaagaattttatctattccaatttggcccccaaacctaggtatctcacagaactgtgtgtatgaggtacagcaggtaccaaaagtagaaaagacagacagtgatctgacacaaacacagctgaagcaaacagaggtcctagtgacagctgaaaaattgtcttcaaatttacagcaccatttcagtttgtcatctgtttattcacattactttcctgacactggaattccagaagtgaccacctgtcattcccgaagtgccataactgtggattatattttctactctgcagaaaaggaagatgttgctgggcacccaggagctgaagttgctttggttggtggcttgaaacttctagctagactgtcacttcttacagaacaagacttatggactgttaatggacttccaaacgaaaataactcttcagatcatctgcctttattggcaaagttcagacttgagctctgactctctttgatcacatactaattttctttccaatttgtattgtttttcaaagaatgtaaagttcttaagtgtatgcatgttgtttatttttgcactgtggagattctgaagcggttatgttagatgctttgaaactccatatcagaagaaataactttataacaattttttttaataatgaaaaatattttcgtgacaagtgagctctaaattctctttattgtaaaagagatgtaaaggttttatattctaaatcctagtaaaattgacagtgatttttaaatataatgcatcttcctttgtctgcttagtaaaaaatttcatttcataattttggcaagctctgtagtggatccaaagtatctttgagttcttgcaaactacaagttgtttcctttccagaaggcttgatttcattaggagacccctctattgagttctaaatagtttatcttagaaagccttgggtcattcacaggtatccaaccagccattgtttagtttgtttttgaaggggtttgataatgctttttaagttgtacagaatgcttaatccatcttattactgtcctgagccatgtaatatgcctgcatcgtgttggggaaatgtttgggaaatataagccagcataacgtgtaaagctcactctttcaccctggaacagacaagaggtgggcttaatagaggcagagactggggatatacctttgtttccctagcatttttatttatttatttttattttattttattttttgagatggagtttcactcttgttgcccaggctgggggtgcaatggcgcaatctttgctcactgcaacccctgcctcccgggctcaagcgattctcctgcctcagcctctcgagtagctgggattacaggcatgcgtcaccactcccagctaattttgtattttcagtagagacagggtttccccatgttggttaggctggtctcgaactcccaacctcaggtgatccgcccacctcagctctcaaagtgctgggattacaggcgggagccactgcacatggcagcattttttaaaaattcagttttaagatctctggtttaggggagagattttattttactgaaccagttctatagaaatttattttattaggaaatttgtctttggaacaaagtggcagctataaaattatttttgttaagcctcagaaatatgaggaagcctgtaaaactctagtggggagatattaacttggagacctaatgctctgtaaatagtcatttaaactgttggttttagtggttttgtttctaaaatgttttcttttaccgtgatgcaccagtatgagatggtgctgacactttctatgaagtggttatgagcaggtttaataaatcctctatacaagtgtttgaatcaattttaaaacataaaaagtggaaatttccttttttgtagacagtaggaacaaggaattatatgcatttttactaagtagtaattttacactgaattgtaaatgtttttacagtgagttttattaatagaatgcttcaccttaaattggaaaacaataatagtcttggactaagtctttgtactaaagcatttgctataattatttttaaaaaaacaaacagatgaaaacctcagagaaggcatgtggattataagatttgtctagtaaaaattgtaattgaatatgtttaaatatttaatttctcattttggggggtttttatttttttattttttagatggtgtctcacgctatcgcccaggctggagtgcagtggcgcgaactcggctcactgcaacctccgcctcctgggttcaagcaattctccttcctcagcctcccaagtagctgggattacaggcatgcaccaccatgcccagctaatttttgtatttttagtagagatggaattttgccatgttggccaggctggtcttgaactcctgacctcaggggtgatccacccgcctcgggctcccaaagtgctgtgattacaggcatgagccaccatgcctggcctttggggggattttaattacagtattaattatagttctaggatttcccacattttatagtagtagtttgcaggatattatgtgccctaattagcagatatagacattatcaaattataatgatagtataattatccctttttaatattggggaaagaaaaatgaaaattcattagttaattactgctttgtgttgtgtgaatttattaacaaataacattattacatataggtcattgttaacaaacaaacatccctgaaaacctctgtgaaaatttaattttttatatcctgattaatatattgtgactttaggcccatttttcatgtgcttcactttgatagagttaatccataaaattgctctttactttagcttatcaaatgaagtattattttgtggactggaggccaaaaagtcaatgtgagcttctcacaggtttttaaagctccactaaaaataattatccacttgtctttacttttgttgaccagaatagttggtaactctgccagagcctgtacttacctgccaaaaacaattaaatctggttaatgcctgaaacc

SEQ ID NO: 3107 - protein, 97 aa, Homo sapiens [sequence omitted]

SEQ ID NO: 3108 - DNA, 4046 bp, Homo sapiens
cggcgagactgcacctcccagcatgccttgcagccaggactggagtcggtacttaagagtgatggggttccctagatactttaggccgtcgcatcgattatagagattgaggtggaacccggggcctgggaactggacgcacgcggagggcgaagatggaagcctggcgctgtgtgaggaagggctacggccactgtgtggtgggaagaggccggtgtgataaagcggaattgggaatatatatgtagccatgataaagaaaaaacgaagatcctaggagacaaaaatgttgatcccaaatgtgaagacagtgagaacaagtttgacttttcagtgatgtcctataatatactttcacaagatttactggaagataactctcacctttatagacattgccggcggccagtattacactggagttttaggtttcccaatattctgaaagaaattaaacattttgatgcagacgtactttgtttgcaagaagttcaagaagatcattatggagcagagatcaggccaagtttggaatcactgggttatcactgtgaatataagatgcggacaggaaggaaacctgatggctgtgctatttgcttcaaacattccaaattttcactcttgtcagtgaacccagtggaattcttccgccctgatatttctctgttggacagagacaatgttggattagttttactcttacagcccaaaattccatatgctgcctgccctgcaatctgcgtagcaaatacgcatctgttgtataatccaaggcgaggtgatattaagctgacgcaattggcaatgctactggcagagatttccagtgttgcccaccagaaagatggcagcttctgccctattgttatgtgtggtgactttaattctgttcctggttctccactatatagtttcataaaggaaggaaaattgaattatgaaggacttcccataggaaaggtatctggccaggaacagtcttcacggggacaaagaattttatctattccaatttggcccccaaacctaggtatctcacagaactgtgtgtatgaggtacagcaggtaccaaaagtagaaaagacagacagtgatctgacacaaacacagctgaagcaaacagaggtcctagtgacagctgaaaaattgtcttcaaatttacagcaccatttcagtttgtcatctgtttattcacattactttcctgacactggaattccagaagtgaccacctgtcattcccgaagtgccataactgtggattatattttctactctgcagaaaaggaagatgttgctgggcacccaggagctgaagttgctttggttggtggcttgaaacttctagctagactgtcacttcttacagaacaagacttatggactgttaatggacttccaaacgaaaataactcttcagatcatctgcctttattggcaaagttcagacttgagctctgactctctttgatcacatactaattttctttccaatttgtattgtttttcaaagaatgtaaagttcttaagtgtatgcatgttgtttatttttgcactgtggagattctgaagcggttatgttagatgctttgaaactccatatcagaagaaataactttataacaattttttttaataatgaaaaatattttcgtgacaagtgagctctaaattctctttattgtaaaagagatgtaaaggttttatattctaaatcctagtaaaattgacagtgatttttaaatataatgcatcttcctttgtctgcttagtaaaaaatttcatttcataattttggcaagctctgtagtggatccaaagtatctttgagttcttgcaaactacaagttgtttcctttccagaaggcttgatttcattaggagacccctctattgagttctaaatagtttatcttagaaagccttgggtcattcacaggtatccaaccagccattgtttagtttgtttttgaaggggtttgataatgctttttaagttgtacagaatgcttaatccatcttattactgtcctgagccatgtaatatgcctgcatcgtgttggggaaatgtttgggaaatataagccagcataacgtgtaaagctcactctttcaccctggaacagacaagaggtgggcttaatagaggcagagactggggatatacctttgtttccctagcatttttatttatttatttttattttattttattttttgagatggagtttcactcttgttgcccaggctgggggtgcaatggcgcaatctttgctcactgcaacccctgcctcccgggctcaagcgattctcctgcctcagcctctcgagtagctgggattacaggcatgcgtcaccactcccagctaattttgtattttcagtagagacagggtttccccatgttggttaggctggtctcgaactcccaacctcaggtgatccgcccacctcagctctcaaagtgctgggattacaggcgggagccactgcacatggcagcattttttaaaaattcagttttaagatctctggtttaggggagagattttattttactgaaccagttctatagaaatttattttattaggaaatttgtctttggaacaaagtggcagctataaaattatttttgttaagcctcagaaatatgaggaagcctgtaaaactctagtggggagatattaacttggagacctaatgctctgtaaatagtcatttaaactgttggttttagtggttttgtttctaaaatgttttcttttaccgtgatgcaccagtatgagatggtgctgacactttctatgaagtggttatgagcaggtttaataaatcctctatacaagtgtttgaatcaattttaaaacataaaaagtggaaatttccttttttgtagacagtaggaacaaggaattatatgcatttttactaagtagtaattttacactgaattgtaaatgtttttacagtgagttttattaatagaatgcttcaccttaaattggaaaacaataatagtcttggactaagtctttgtactaaagcatttgctataattatttttaaaaaaacaaacagatgaaaacctcagagaaggcatgtggattataagatttgtctagtaaaaattgtaattgaatatgtttaaatatttaatttctcattttggggggtttttatttttttattttttagatggtgtctcacgctatcgcccaggctggagtgcagtggcgcgaactcggctcactgcaacctccgcctcctgggttcaagcaattctccttcctcagcctcccaagtagctgggattacaggcatgcaccaccatgcccagctaatttttgtatttttagtagagatggaattttgccatgttggccaggctggtcttgaactcctgacctcaggggtgatccacccgcctcgggctcccaaagtgctgtgattacaggcatgagccaccatgcctggcctttggggggattttaattacagtattaattatagttctaggatttcccacattttatagtagtagtttgcaggatattatgtgccctaattagcagatatagacattatcaaattataatgatagtataattatccctttttaatattggggaaagaaaaatgaaaattcattagttaattactgctttgtgttgtgtgaatttattaacaaataacattattacatataggtcattgttaacaaacaaacatccctgaaaacctctgtgaaaatttaattttttatatcctgattaatatattgtgactttaggcccatttttcatgtgcttcactttgatagagttaatccataaaattgctctttactttagcttatcaaatgaagtattattttgtggactggaggccaaaaagtcaatgtgagcttctcacaggtttttaaagctccactaaaaataattatccacttgtctttacttttgttgaccagaatagttggtaactctgccagagcctgtacttacctgccaaaaacaattaaatctggttaatgcctgaaacc

SEQ ID NO: 3109 - protein, 375 aa, Homo sapiens; identical to SEQ ID NO: 3097

SEQ ID NO: 3110 - DNA, 2098 bp, Homo sapiens
gcaagatggagtgtaggccggccggcgagactgcacctcccagcatgccttgcagccaggactggagtcggtacttaagagtgatggggttccctagatactttaggccgtcgcatcgattatagagattgaggtggaacccggggcctgggaactggacgcacgcggagggcgaagatggaagcctggcgctgtgtgaggaagggctacggccactgtgtggtgggaagaggccgataccccatgtttccccatcactcgaggagtctgggcagagactggactacaccgtgggagaatctgcaaaggtgttgctggaacagacatatttctagttgtatgaggtggcctggacattactctcgagctccttacccatacttcagtagtaggcatttttcactaaattggagaccaccctgtttgtttgagtctagaactcagttccagtactgtaactggagacctgacaacctgagccagacatctttgattcatctctctagttacgtcatgaacgctgagggagatgagccttcatcaaaacgaagaaaacaccaaggtgtgataaagcggaattgggaatatatatgtagccatgataaagaaaaaacgaagatcctaggagacaaaaatgttgatcccaaatgtgaagacagtgagaacaagtttgacttttcagtgatgtcctataatatactttcacaagatttactggaagataactctcacctttatagacattgccggcggccagtattacactggagttttaggtttcccaatattctgaaagaaattaaacattttgatgcagacgtactttgtttgcaagaagttcaagaagatcattatggagcagagatcaggccaagtttggaatcactgggttatcactgtgaatataagatgcggacaggaaggaaacctgatggctgtgctatttgcttcaaacattccaaattttcactcttgtcagtgaacccagtggaattcttccgccctgatatttctctgttggacagagacaatgttggattagttttactcttacagcccaaaattccatatgctgcctgccctgcaatctgcgtagcaaatacgcatctgttgtataatccaaggcgaggtgatattaagctgacgcaattggcaatgctactggcagagatttccagtgttgcccaccagaaagatggcagcttctgccctattgttatgtgtggtgactttaattctgttcctggttctccactatatagtttcataaaggaaggaaaattgaattatgaaggacttcccataggaaaggtatctggccaggaacagtcttcacggggacaaagaattttatctattccaatttggcccccaaacctaggtatctcacagaactgtgtgtatgaggtacagcaggtaccaaaagtagaaaagacagacagtgatctgacacaaacacagctgaagcaaacagaggtcctagtgacagctgaaaaattgtcttcaaatttacagcaccatttcagtttgtcatctgtttattcacattactttcctgacactggaattccagaagtgaccacctgtcattcccgaagtgccataactgtggattatattttctactctgcagaaaaggaagatgttgctgggcacccaggagctgaagttgctttggttggtggcttgaaacttctagctagactgtcacttcttacagaacaagacttatggactgttaatggacttccaaacgaaaataactcttcagatcatctgcctttattggcaaagttcagacttgagctctgactctctttgatcacatactaattttctttccaatttgtattgtttttcaaagaatgtaaagttcttaagtgtatgcatgttgtttatttttgcactgtggagattctgaagcggttatgttagatgctttgaaactccatatcagaagaaataactttataacaattttttttaataatgaaaaatattttcgtgacaagtgagctctaaattctctttattgtaaaagagatgtaaaggttttatattctaaatcctagtaaaattgacagtgatttttaaatat

SEQ ID NO: 3111 - protein, 544 aa, Homo sapiens; identical to SEQ ID NO: 165

SEQ ID NO: 3112 - DNA, 617 bp, Homo sapiens
cagcatgccttgcagccaggactggagtcggtacttaagagtgatggggttccctagatactttaggccgtcgcatcgattatagagattgaggtggaacccggggcctgggaactggacgcacgcggagggcgaagatggaagcctggcgctgtgtgaggaagggctacggccactgtgtggtgggaagaggccgaactcagttccagtactgtaactggagacctgacaacctgagccagacatctttgattcatctctctagttacgtcatgaacgctgagggagatgagccttcatcaaaacgaagaaaacaccaaggtgttgtgaataaggaaaatgctcttcgttaagccatatttgtgacttccgatatttcactaatacttttcaatcaagaaaacagcattgctaacttgcctatcactttaaagtggtatttgaaggatttgtgtgatacaattatgactttgtaattaggcaccctaaaaacctgatcaggcctattgcttactttctttgattcatctgtcttctctgctgtgatcaccttgttcctcctgatatggaaggtatataagcttttgtagtgtgaatttatgttgtgaagcatatga

SEQ ID NO: 3113 - protein, 71 aa, Homo sapiens
MEAWRCVRKGYGHCVVGRGRTQFQYCNWRPDNLSQTSLIHLSSYVMNAEGDEPSSKRRKHQGVVNKENALR

SEQ ID NO: 3114 - DNA, 4190 bp, Homo sapiens
ggaagcagagctgtgcagctgaggcgccgccgtggagccgccttggagccaccgccccctcgccgcttcgccgctgcgttggggaacctggaccgcggcggcgccgggtttccctcatgatcccgggcgggtggcggcggcggcagaggcggcgggaggatgacctcttaccgggagcggagtgccgacctggcccgtttctacactgtcaccgagccccagcgacacccgaggggctacacagtatataaggtcaccgcccgggttgtttcacgaagaaatccagaggatgtccaggagataattgtatggaagagatacagtgattttaagaaactacacaaagaactatggcaaattcacaaaaacttattccgacattcagagttgtttcctccatttgctaaaggaatagtgtttgggcgatttgatgaaactgttatcgaagagagaagacaatgtgctgaagacctgctacagttctctgccaatattcctgctctttacaatagtaaacagcttgaagactttttcaagggtggaataattaatgatagttctgaattaattggtcctgctgaagctcactcagattccctcattgatacctttcctgagtgtagtacggaaggcttctccagtgacagtgatctggtatctcttactgttgatgtggattctcttgctgagttagatgatggaatggcttccaatcaaaattctcccattagaacttttggtctcaatctttcttcggattcttcagcactaggggctgttgcttctgacagtgaacagagcaaaacagaagaagaacgggaaagtcgtagcctctttcctggcagtttaaagccgaagcttggcaagagagattatttggagaaagcaggagaattaataaagctggctttaaaaaaggaagaagaagacgactatgaagctgcttctgatttttataggaagggagttgatttactcctagaaggtgttcaaggagagtcaagccctacccgtcgagaagctgtgaagagaagaacagccgagtacctcatgcgggcagaaagtatctctagtctttatgggaaacctcagcttgatgatgtatctcagcctccaggatcactaagttcaaggcccctttggaacctaaggagccctgccgaggagctgaaggccttcagagtccttggggtgattgacaaggttttacttgtaatggacacaaggacagaacagactttcattttaaaaggtctaaggaaaagcagtgaatacagcaggaacagaaagaccatcatcccccgctgtgtgcccaacatggtgtgtctgcataagtacatcatctctgaggagtcagtatttcttgtgctgcagcatgcggaaggtggcaaactgtggtcatatatcagtaaatttctaaacagaagtcctgaagaaagctttgacatcaaggaagtgaaaaaacctacacttgcaaaagttcacctgcagcagccaacttctagtcctcaggacagcagtagctttgaatccagaggaagtgatggtggaagcatgcttaaagctctgcctttgaagagtagtcttactccaagttctcaagatgacagcaaccaggaagatgatggccaagatagctctccaaagtggccagattctggttcaagttcagaagaagaatgtactactagttatttaacattatgcaatgaatatgggcaagaaaagattgaaccagggtctttgaatgaggagcccttcatgaagactgaagggaatggtgttgatacaaaagctattaaaagcttcccagcacaccttgctgctgacagtgacagccccagcacacagctgagagctcacgagctgaagttcttccccaacgatgacccagaagcagttagttctccaagaacatcagattccctcagtagatcaaaaaatagccccatggaattctttaggatagacagtaaggatagcgcaagtgaactcctgggacttgactttggagaaaaattgtatagtctaaaatcagaacctttgaaaccattctttactcttccagatggagacagtgcttctaggagttttaatactagtgaaagcaaggtagagtttaaagctcaggacaccattagcaggggctcagatgactcagtgccagttatttcatttaaagatgctgcttttgatgatgtcagtggtactgatgaaggaagacctgatcttcttgtaaatttacctggtgaattggagtcaacaagagaagctgcagcaatgggacctactaagtttacacaaactaatatagggataatagaaaataaactcttggaagcccctgatgttttatgcctcaggcttagtactgaacaatgccaagcacatgaggagaaaggcatagaggaactgagtgatccctctgggcccaaatcctatagtataacagagaaacactatgcacaggaggatcccaggatgttatttgtagcagctgttgatcatagtagttcaggagatatgtctttgttacccagctcagatcctaagtttcaaggacttggagtggttgagtcagcagtaactgcaaacaacacagaagaaagcttattccgtatttgtagtccactctcaggtgctaatgaatatattgcaagcacagacactttaaaaacagaagaagtattgctgtttacagatcagactgatgatttggctaaagaggaaccaacttctttattccagagagactctgagactaagggtgaaagtggtttagtgctagaaggagacaaggaaatacatcagatttttgaggaccttgataaaaaattagcactagcctccaggttttacatcccagagggctgcattcaaagatgggcagctgaaatggtggtagcccttgatgctttacatagagagggaattgtgtgccgcgatttgaacccaaacaacatcttattgaatgatagaggacacattcagctaacgtattttagcaggtggagtgaggttgaagattcctgtgacagcgatgccatagagagaatgtactgtgccccagaggttggagcaatcactgaagaaactgaagcctgtgattggtggagtttgggtgctgtcctctttgaacttctcactggcaagactctggttgaatgccatccagcaggaataaatactcacactactttgaacatgccagaatgtgtctctgaagaggctcgctcactcattcaacagctcttgcagttcaatcctctggaacgacttggtgctggagttgctggtgttgaagatatcaaatctcatccattttttacccctgtggattgggcagaactgatgagatgaacgtaatgcagggttatcttcacacattctgatcttctctgtgacaggcatctccagcactgaggcacctctgactcacagttacttatggagcaccaaagcatttggataaagaccgttataggaaatgggggggaaatggctaaaagagaacaattcgtttacaattacaagatattagctaattgtgccaggggctgttatatacatatatacacaaccaaggtgtgatctgaatttaatccacatttggtgttgcagatgagttgtaaagccaactgaaagagttccttcaagaagttcctctgataggaagctagaagtgtagaatgaagttttacttgacagaaggacctttacatggcagctaacagtgctttttgctgaccaggattggtttatatgattaaattaatatttgcttaataatacactaaaagtatatgaacaatgtcatcaatgaaacttaaaagcgagaaaaaagaatatacacataatttctgacggaaaacctgtaccctgatgctgtataatgtatgttgaatgtggtcccagattatttctgtaagaagacactccatgttgtcagctttgtactctttgttgatactgcttatttagagaagggttcatataaacactcactctgtgtcttcaacagcatctttctttccccatctttctattttctgcaccctctgcttgttccctcatattctgttcttccgactcctgctaacacacatgcaacaaaaaagggaagggagtgcttatttccctttgtgtaaggactaagaaatcatgatatcaaataaacatggtgaaacatt

SEQ ID NO: 3115 - protein, 1066 aa, Homo sapiens; identical to SEQ ID NO: 167

SEQ ID NO: 3116 - DNA, 5499 bp, Homo sapiens
ggaagcagagctgtgcagctgaggcgccgccgtggagccgccttggagccaccgccccctcgccgcttcgccgctgcgttggggaacctggaccgcggcggcgccgggtttccctcatgatcccgggcgggtggcggcggcggcagaggcggcgggaggatgacctcttaccgggagcggagtgccgacctggcccgtttctacactgtcaccgagccccagcgacacccgaggggctacacagtatataaggtcaccgcccgggttgtttcacgaagaaatccagaggatgtccaggagataattgtatggaagagatacagtgattttaagaaactacacaaagaactatggcaaattcacaaaaacttattccgacattcagagttgtttcctccatttgctaaaggaatagtgtttgggcgatttgatgaaactgttatcgaagagagaagacaatgtgctgaagacctgctacagttctctgccaatattcctgctctttacaatagtaaacagcttgaagactttttcaagggtggaataattaatgatagttctgaattaattggtcctgctgaagctcactcagattccctcattgatacctttcctgagtgtagtacggaaggcttctccagtgacagtgatctggtatctcttactgttgatgtggattctcttgctgagttagatgatggaatggcttccaatcaaaattctcccattagaacttttggtctcaatctttcttcggattcttcagcactaggggctgttgcttctgacagtgaacagagcaaaacagaagaagaacgggaaagtcgtagcctctttcctggcagtttaaagccgaagcttggcaagagagattatttggagaaagcaggagaattaataaagctggctttaaaaaaggaagaagaagacgactatgaagctgcttctgatttttataggaagggagttgatttactcctagaaggtgttcaaggagagtcaagccctacccgtcgagaagctgtgaagagaagaacagccgagtacctcatgcgggcagaaagtatctctagtctttatgggaaacctcagcttgatgatgtatctcagcctccaggatcactaagttcaaggcccctttggaacctaaggagccctgccgaggagctgaaggccttcagagtccttggggtgattgacaaggttttacttgtaatggacacaaggacagaacagactttcattttaaaaggtctaaggaaaagcagtgaatacagcaggaacagaaagaccatcatcccccgctgtgtgcccaacatggtgtgtctgcataagtacatcatctctgaggagtcagtatttcttgtgctgcagcatgcggaaggtggcaaactgtggtcatatatcagtaaatttctaaacagaagtcctgaagaaagctttgacatcaaggaagtgaaaaaacctacacttgcaaaagttcacctgcagcagccaacttctagtcctcaggacagcagtagctttgaatccagaggaagtgatggtggaagcatgcttaaagctctgcctttgaagagtagtcttactccaagttctcaagatgacagcaaccaggaagatgatggccaagatagctctccaaagtggccagattctggttcaagttcagaagaagaatgtactactagttatttaacattatgcaatgaatatgggcaagaaaagattgaaccagggtctttgaatgaggagcccttcatgaagactgaagggaatggtgttgatacaaaagctattaaaagcttcccagcacaccttgctgctgacagtgacagccccagcacacagctgagagctcacgagctgaagttcttccccaacgatgacccagaagcagttagttctccaagaacatcagattccctcagtagatcaaaaaatagccccatggaattctttaggatagacagtaaggatagcgcaagtgaactcctgggacttgactttggagaaaaattgtatagtctaaaatcagaacctttgaaaccattctttactcttccagatggagacagtgcttctaggagttttaatactagtgaaagcaaggtagagtttaaagctcaggacaccattagcaggggctcagatgactcagtgccagttatttcatttaaagatgctgcttttgatgatgtcagtggtactgatgaaggaagacctgatcttcttgtaaatttacctggtgaattggagtcaacaagagaagctgcagcaatgggacctactaagtttacacaaactaatatagggataatagaaaataaactcttggaagcccctgatgttttatgcctcaggcttagtactgaacaatgccaagcacatgaggagaaaggcatagaggaactgagtgatccctctgggcccaaatcctatagtataacagagaaacactatgcacaggaggatcccaggatgttatttgtagcagctgttgatcatagtagttcaggagatatgtctttgttacccagctcagatcctaagtttcaaggacttggagtggttgagtcagcagtaactgcaaacaacacagaagaaagcttattccgtatttgtagtccactctcaggtgctaatgaatatattgcaagcacagacactttaaaaacagaagaagtattgctgtttacagatcagactgatgatttggctaaagaggaaccaacttctttattccagagagactctgagactaagggtgaaagtggtttagtgctagaaggagacaaggaaatacatcagatttttgaggaccttgataaaaaattagcactagcctccaggttttacatcccagagggctgcattcaaagatgggcagctgaaatggtggtagcccttgatgctttacatagagagggaattgtgtgccgcgatttgaacccaaacaacatcttattgaatgatagaggacacattcagctaacgtattttagcaggtggagtgaggttgaagattcctgtgacagcgatgccatagagagaatgtactgtgccccagaggttggagcaatcactgaagaaactgaagcctgtgattggtggagtttgggtgctgtcctctttgaacttctcactggcaagactctggttgaatgccatccagcaggaataaatactcacactactttgaacatgccagaatgtgtctctgaagaggctcgctcactcattcaacagctcttgcagttcaatcctctggaacgacttggtgctggagttgctggtgttgaagatatcaaatctcatccattttttacccctgtggattgggcagaactgatgagatgaacgtaatgcagggttatcttcacacattctgatcttctctgtgacaggcatctccagcactgaggcacctctgactcacagttacttatggagcaccaaagcatttggataaagaccgttataggaaatgggggggaaatggctaaaagagaacaattcgtttacaattacaagatattagctaattgtgccaggggctgttatatacatatatacacaaccaaggtgtgatctgaatttaatccacatttggtgttgcagatgagttgtaaagccaactgaaagagttccttcaagaagttcctctgataggaagctagaagtgtagaatgaagttttacttgacagaaggacctttacatggcagctaacagtgctttttgctgaccaggattggtttatatgattaaattaatatttgcttaataatacactaaaagtatatgaacaatgtcatcaatgaaacttaaaagcgagaaaaaagaatatacacataatttctgacggaaaacctgtaccctgatgctgtataatgtatgttgaatgtggtcccagattatttctgtaagaagacactccatgttgtcagctttgtactctttgttgatactgcttatttagagaagggttcatataaacactcactctgtgtcttcaacagcatctttctttccccatctttctattttctgcaccctctgcttgttccctcatattctgttcttccgactcctgctaacacacatgcaacaaaaaagggaagggagtgcttatttccctttgtgtaaggactaagaaatcatgatatcaaataaacatggtgaaacattagatctcttcttcatttaataaccctcccccctttttttccttgaagaaatgcgtctgttcctttccttgtgaaatattatcagtttctaccattgcttctcatgcttgactttgttttactttttggcttggtatactaagaagcaaaggatctcatctaaatggaattgaatggcagtcctagtttgttacttatggtgatgagattttcagatttgaactaatctatttgacgtgatttagaaagaatgtaagtattcacacatctccaaacatttgtatttgttacttctttttgttgctaaggtagctcctgtagttatgcattgttgcaaaaatttacaaatgttttaaaagtgttaacatctgtttttttttaaacgttagccaaagaagaagtcactatttccaagttagaaaccaccagaaataattgaaatttttgatatgttctaatcttctttgcatttttgagatctgtgtgagagcccaaccccactccaggagcatctgtacagcttccatctgccatcgaccaggtcctctcatcaaattaaatggaacagaaaatgctctagtgaaacaaaggaaatgtgcaagcatttttcctttttctattattctatttccctttttcctttttggcccccttataatccaaaccccagctgaaaggctgcaacaacaccaggttggggagcaggtcaccaggatcatagttcagtcaaaatgacatcactccctggaactagatttcaactcactagtcccctggcctcataacaggaacttatgcaggtgagacacaagaatgacttcctgtgtaggactagtaggaaatctgcaagtacttagagctggccattacagaacttccttccagaagtgccctgtgacatgaaagtaggacttcacaactaaggtgaagatccctgccctaccacatgatttgagtctcttggattcaaaggacattaatgtcaacagatggttgccatgtcagtctgttgacacaattccattgcttcagtttctccccttttctctctatatgtttggttggagcttgtgcctaatgtaaatacatcattcataattagaatggacattaattattttagtaataaacacaggataaatagctttggggtgatgaaccagagtctgtttttattttatggtgtgtacatattttaagctgtacttctgtgaatggtactgatttttgtggttgttttttttttatattttgtttgtttaagcagaagagtggaatatggggtcaaaatcataaaagaagttgccatg

SEQ ID NO: 3117 - protein, 1066 aa, Homo sapiens; identical to SEQ ID NO: 167

SEQ ID NO: 3118 - DNA, 594 bp, Homo sapiens
tgcagctgaggcgccgccgtggagccgccttggagccaccgccccctcgccgcttcgccgctgcgttggggaacctggaccgcggcggcgccgggtttccctcatgatcccgggcgggtggcggcggcggcagaggcggcgggaggatgacctcttaccgggagcggagtgccgacctggcccgtttctacactgtcaccgagccccagcgacacccgaggggctacacagtatataaggtcaccgcccggataattgtatggaagagatacagtgattttaagaaactacacaaagaactatggcaaattcacaaaaacttattccgacattcagagttgtttcctccatttgctaaaggaatagtgtttgggcgatttgatgaaactgttatcgaagagagaagacaatgtgctgaagacctgctacagttctctgccaatattcctgctctttacaatagtaaacagcttgaagactttttcaaggagagtcaagccctacccgtcgagaagctgtgaagagaagaacagccgagtacctcatgcgggcagaaagtatctctagtctttatgggaaacctcagcttgatga

SEQ ID NO: 3119 - protein, 124 aa, Homo sapiens
MTSYRERSADLARFYTVTEPQRHPRGYTVYKVTARIIVWKRYSDFKKLHKELWQIHKNLFRHSELFPPFAKGIVFGRFDETVIEERRQCAEDLLQFSANIPALYNSKQLEDFFKESQALPVEKL

SEQ ID NO: 3120 - DNA, 4141 bp, Homo sapiens
tgcagctgaggcgccgccgtggagccgccttggagccaccgccccctcgccgcttcgccgctgcgttggggaacctggaccgcggcggcgccgggtttccctcatgatcccgggcgggtggcggcggcggcagaggcggcgggaggatgacctcttaccgggagcggagtgccgacctggcccgtttctacactgtcaccgagccccagcgacacccgaggggctacacagtatataaggtcaccgcccggataattgtatggaagagatacagtgattttaagaaactacacaaagaactatggcaaattcacaaaaacttattccgacattcagagttgtttcctccatttgctaaaggaatagtgtttgggcgatttgatgaaactgttatcgaagagagaagacaatgtgctgaagacctgctacagttctctgccaatattcctgctctttacaatagtaaacagcttgaagactttttcaagggtggaataattaatgatagttctgaattaattggtcctgctgaagctcactcagattccctcattgatacctttcctgagtgtagtacggaaggcttctccagtgacagtgatctggtatctcttactgttgatgtggattctcttgctgagttagatgatggaatggcttccaatcaaaattctcccattagaacttttggtctcaatctttcttcggattcttcagcactaggggctgttgcttctgacagtgaacagagcaaaacagaagaagaacgggaaagtcgtagcctctttcctggcagtttaaagccgaagcttggcaagagagattatttggagaaagcaggagaattaataaagctggctttaaaaaaggaagaagaagacgactatgaagctgcttctgatttttataggaagggagttgatttactcctagaaggtgttcaaggagagtcaagccctacccgtcgagaagctgtgaagagaagaacagccgagtacctcatgcgggcagaaagtatctctagtctttatgggaaacctcagcttgatgatgtatctcagcctccaggatcactaagttcaaggcccctttggaacctaaggagccctgccgaggagctgaaggccttcagagtccttggggtgattgacaaggttttacttgtaatggacacaaggacagaacagactttcattttaaaaggtctaaggaaaagcagtgaatacagcaggaacagaaagaccatcatcccccgctgtgtgcccaacatggtgtgtctgcataagtacatcatctctgaggagtcagtatttcttgtgctgcagcatgcggaaggtggcaaactgtggtcatatatcagtaaatttctaaacagaagtcctgaagaaagctttgacatcaaggaagtgaaaaaacctacacttgcaaaagttcacctgcagcagccaacttctagtcctcaggacagcagtagctttgaatccagaggaagtgatggtggaagcatgcttaaagctctgcctttgaagagtagtcttactccaagttctcaagatgacagcaaccaggaagatgatggccaagatagctctccaaagtggccagattctggttcaagttcagaagaagaatgtactactagttatttaacattatgcaatgaatatgggcaagaaaagattgaaccagggtctttgaatgaggagcccttcatgaagactgaagggaatggtgttgatacaaaagctattaaaagcttcccagcacaccttgctgctgacagtgacagccccagcacacagctgagagctcacgagctgaagttcttccccaacgatgacccagaagcagttagttctccaagaacatcagattccctcagtagatcaaaaaatagccccatggaattctttaggatagacagtaaggatagcgcaagtgaactcctgggacttgactttggagaaaaattgtatagtctaaaatcagaacctttgaaaccattctttactcttccagatggagacagtgcttctaggagttttaatactagtgaaagcaaggtagagtttaaagctcaggacaccattagcaggggctcagatgactcagtgccagttatttcatttaaagatgctgcttttgatgatgtcagtggtactgatgaaggaagacctgatcttcttgtaaatttacctggtgaattggagtcaacaagagaagctgcagcaatgggacctactaagtttacacaaactaatatagggataatagaaaataaactcttggaagcccctgatgttttatgcctcaggcttagtactgaacaatgccaagcacatgaggagaaaggcatagaggaactgagtgatccctctgggcccaaatcctatagtataacagagaaacactatgcacaggaggatcccaggatgttatttgtagcagctgttgatcatagtagttcaggagatatgtctttgttacccagctcagatcctaagtttcaaggacttggagtggttgagtcagcagtaactgcaaacaacacagaagaaagcttattccgtatttgtagtccactctcaggtgctaatgaatatattgcaagcacagacactttaaaaacagaagaagtattgctgtttacagatcagactgatgatttggctaaagaggaaccaacttctttattccagagagactctgagactaagggtgaaagtggtttagtgctagaaggagacaaggaaatacatcagatttttgaggaccttgataaaaaattagcactagcctccaggttttacatcccagagggctgcattcaaagatgggcagctgaaatggtggtagcccttgatgctttacatagagagggaattgtgtgccgcgatttgaacccaaacaacatcttattgaatgatagaggacacattcagctaacgtattttagcaggtggagtgaggttgaagattcctgtgacagcgatgccatagagagaatgtactgtgccccagaggttggagcaatcactgaagaaactgaagcctgtgattggtggagtttgggtgctgtcctctttgaacttctcactggcaagactctggttgaatgccatccagcaggaataaatactcacactactttgaacatgccagaatgtgtctctgaagaggctcgctcactcattcaacagctcttgcagttcaatcctctggaacgacttggtgctggagttgctggtgttgaagatatcaaatctcatccattttttacccctgtggattgggcagaactgatgagatgaacgtaatgcagggttatcttcacacattctgatcttctctgtgacaggcatctccagcactgaggcacctctgactcacagttacttatggagcaccaaagcatttggataaagaccgttataggaaatgggggggaaatggctaaaagagaacaattcgtttacaattacaagatattagctaattgtgccaggggctgttatatacatatatacacaaccaaggtgtgatctgaatttaatccacatttggtgttgcagatgagttgtaaagccaactgaaagagttccttcaagaagttcctctgataggaagctagaagtgtagaatgaagttttacttgacagaaggacctttacatggcagctaacagtgctttttgctgaccaggattggtttatatgattaaattaatatttgcttaataatacactaaaagtatatgaacaatgtcatcaatgaaacttaaaagcgagaaaaaagaatatacacataatttctgacggaaaacctgtaccctgatgctgtataatgtatgttgaatgtggtcccagattatttctgtaagaagacactccatgttgtcagctttgtactctttgttgatactgcttatttagagaagggttcatataaacactcactctgtgtcttcaacagcatctttctttccccatctttctattttctgcaccctctgcttgttccctcatattctgttcttccgactcctgctaacacacatgcaacaaaaaagggaagggagtgcttatttccctttgtgtaaggactaagaaatcatgatatcaaataaacatggtgaaacatt

SEQ ID NO: 3121 - protein, 1054 aa, Homo sapiens
MTSYRERSADLARFYTVTEPQRHPRGYTVYKVTARIIVWKRYSDFKKLHKELWQIHKNLFRHSELFPPFAKGIVFGRFDETVIEERRQCAEDLLQFSANIPALYNSKQLEDFFKGGIINDSSELIGPAEAHSDSLIDTFPECSTEGFSSDSDLVSLTVDVDSLAELDDGMASNQNSPIRTFGLNLSSDSSALGAVASDSEQSKTEEERESRSLFPGSLKPKLGKRDYLEKAGELIKLALKKEEEDDYEAASDFYRKGVDLLLEGVQGESSPTRREAVKRRTAEYLMRAESISSLYGKPQLDDVSQPPGSLSSRPLWNLRSPAEELKAFRVLGVIDKVLLVMDTRTEQTFILKGLRKSSEYSRNRKTIIPRCVPNMVCLHKYIISEESVFLVLQHAEGGKLWSYISKFLNRSPEESFDIKEVKKPTLAKVHLQQPTSSPQDSSSFESRGSDGGSMLKALPLKSSLTPSSQDDSNQEDDGQDSSPKWPDSGSSSEEECTTSYLTLCNEYGQEKIEPGSLNEEPFMKTEGNGVDTKAIKSFPAHLAADSDSPSTQLRAHELKFFPNDDPEAVSSPRTSDSLSRSKNSPMEFFRIDSKDSASELLGLDFGEKLYSLKSEPLKPFFTLPDGDSASRSFNTSESKVEFKAQDTISRGSDDSVPVISFKDAAFDDVSGTDEGRPDLLVNLPGELESTREAAAMGPTKFTQTNIGIIENKLLEAPDVLCLRLSTEQCQAHEEKGIEELSDPSGPKSYSITEKHYAQEDPRMLFVAAVDHSSSGDMSLLPSSDPKFQGLGVVESAVTANNTEESLFRICSPLSGANEYIASTDTLKTEEVLLFTDQTDDLAKEEPTSLFQRDSETKGESGLVLEGDKEIHQIFEDLDKKLALASRFYIPEGCIQRWAAEMVVALDALHREGIVCRDLNPNNILLNDRGHIQLTYFSRWSEVEDSCDSDAIERMYCAPEVGAITEETEACDWWSLGAVLFELLTGKTLVECHPAGINTHTTLNMPECVSEEARSLIQQLLQFNPLERLGAGVAGVEDIKSHPFFTPVDWAELMR

SEQ ID NO: 3122 - DNA, 5450 bp, Homo sapiens
tgcagctgaggcgccgccgtggagccgccttggagccaccgccccctcgccgcttcgccgctgcgttggggaacctggaccgcggcggcgccgggtttccctcatgatcccgggcgggtggcggcggcggcagaggcggcgggaggatgacctcttaccgggagcggagtgccgacctggcccgtttctacactgtcaccgagccccagcgacacccgaggggctacacagtatataaggtcaccgcccggataattgtatggaagagatacagtgattttaagaaactacacaaagaactatggcaaattcacaaaaacttattccgacattcagagttgtttcctccatttgctaaaggaatagtgtttgggcgatttgatgaaactgttatcgaagagagaagacaatgtgctgaagacctgctacagttctctgccaatattcctgctctttacaatagtaaacagcttgaagactttttcaagggtggaataattaatgatagttctgaattaattggtcctgctgaagctcactcagattccctcattgatacctttcctgagtgtagtacggaaggcttctccagtgacagtgatctggtatctcttactgttgatgtggattctcttgctgagttagatgatggaatggcttccaatcaaaattctcccattagaacttttggtctcaatctttcttcggattcttcagcactaggggctgttgcttctgacagtgaacagagcaaaacagaagaagaacgggaaagtcgtagcctctttcctggcagtttaaagccgaagcttggcaagagagattatttggagaaagcaggagaattaataaagctggctttaaaaaaggaagaagaagacgactatgaagctgcttctgatttttataggaagggagttgatttactcctagaaggtgttcaaggagagtcaagccctacccgtcgagaagctgtgaagagaagaacagccgagtacctcatgcgggcagaaagtatctctagtctttatgggaaacctcagcttgatgatgtatctcagcctccaggatcactaagttcaaggcccctttggaacctaaggagccctgccgaggagctgaaggccttcagagtccttggggtgattgacaaggttttacttgtaatggacacaaggacagaacagactttcattttaaaaggtctaaggaaaagcagtgaatacagcaggaacagaaagaccatcatcccccgctgtgtgcccaacatggtgtgtctgcataagtacatcatctctgaggagtcagtatttcttgtgctgcagcatgcggaaggtggcaaactgtggtcatatatcagtaaatttctaaacagaagtcctgaagaaagctttgacatcaaggaagtgaaaaaacctacacttgcaaaagttcacctgcagcagccaacttctagtcctcaggacagcagtagctttgaatccagaggaagtgatggtggaagcatgcttaaagctctgcctttgaagagtagtcttactccaagttctcaagatgacagcaaccaggaagatgatggccaagatagctctccaaagtggccagattctggttcaagttcagaagaagaatgtactactagttatttaacattatgcaatgaatatgggcaagaaaagattgaaccagggtctttgaatgaggagcccttcatgaagactgaagggaatggtgttgatacaaaagctattaaaagcttcccagcacaccttgctgctgacagtgacagccccagcacacagctgagagctcacgagctgaagttcttccccaacgatgacccagaagcagttagttctccaagaacatcagattccctcagtagatcaaaaaatagccccatggaattctttaggatagacagtaaggatagcgcaagtgaactcctgggacttgactttggagaaaaattgtatagtctaaaatcagaacctttgaaaccattctttactcttccagatggagacagtgcttctaggagttttaatactagtgaaagcaaggtagagtttaaagctcaggacaccattagcaggggctcagatgactcagtgccagttatttcatttaaagatgctgcttttgatgatgtcagtggtactgatgaaggaagacctgatcttcttgtaaatttacctggtgaattggagtcaacaagagaagctgcagcaatgggacctactaagtttacacaaactaatatagggataatagaaaataaactcttggaagcccctgatgttttatgcctcaggcttagtactgaacaatgccaagcacatgaggagaaaggcatagaggaactgagtgatccctctgggcccaaatcctatagtataacagagaaacactatgcacaggaggatcccaggatgttatttgtagcagctgttgatcatagtagttcaggagatatgtctttgttacccagctcagatcctaagtttcaaggacttggagtggttgagtcagcagtaactgcaaacaacacagaagaaagcttattccgtatttgtagtccactctcaggtgctaatgaatatattgcaagcacagacactttaaaaacagaagaagtattgctgtttacagatcagactgatgatttggctaaagaggaaccaacttctttattccagagagactctgagactaagggtgaaagtggtttagtgctagaaggagacaaggaaatacatcagatttttgaggaccttgataaaaaattagcactagcctccaggttttacatcccagagggctgcattcaaagatgggcagctgaaatggtggtagcccttgatgctttacatagagagggaattgtgtgccgcgatttgaacccaaacaacatcttattgaatgatagaggacacattcagctaacgtattttagcaggtggagtgaggttgaagattcctgtgacagcgatgccatagagagaatgtactgtgccccagaggttggagcaatcactgaagaaactgaagcctgtgattggtggagtttgggtgctgtcctctttgaacttctcactggcaagactctggttgaatgccatccagcaggaataaatactcacactactttgaacatgccagaatgtgtctctgaagaggctcgctcactcattcaacagctcttgcagttcaatcctctggaacgacttggtgctggagttgctggtgttgaagatatcaaatctcatccattttttacccctgtggattgggcagaactgatgagatgaacgtaatgcagggttatcttcacacattctgatcttctctgtgacaggcatctccagcactgaggcacctctgactcacagttacttatggagcaccaaagcatttggataaagaccgttataggaaatgggggggaaatggctaaaagagaacaattcgtttacaattacaagatattagctaattgtgccaggggctgttatatacatatatacacaaccaaggtgtgatctgaatttaatccacatttggtgttgcagatgagttgtaaagccaactgaaagagttccttcaagaagttcctctgataggaagctagaagtgtagaatgaagttttacttgacagaaggacctttacatggcagctaacagtgctttttgctgaccaggattggtttatatgattaaattaatatttgcttaataatacactaaaagtatatgaacaatgtcatcaatgaaacttaaaagcgagaaaaaagaatatacacataatttctgacggaaaacctgtaccctgatgctgtataatgtatgttgaatgtggtcccagattatttctgtaagaagacactccatgttgtcagctttgtactctttgttgatactgcttatttagagaagggttcatataaacactcactctgtgtcttcaacagcatctttctttccccatctttctattttctgcaccctctgcttgttccctcatattctgttcttccgactcctgctaacacacatgcaacaaaaaagggaagggagtgcttatttccctttgtgtaaggactaagaaatcatgatatcaaataaacatggtgaaacattagatctcttcttcatttaataaccctcccccctttttttccttgaagaaatgcgtctgttcctttccttgtgaaatattatcagtttctaccattgcttctcatgcttgactttgttttactttttggcttggtatactaagaagcaaaggatctcatctaaatggaattgaatggcagtcctagtttgttacttatggtgatgagattttcagatttgaactaatctatttgacgtgatttagaaagaatgtaagtattcacacatctccaaacatttgtatttgttacttctttttgttgctaaggtagctcctgtagttatgcattgttgcaaaaatttacaaatgttttaaaagtgttaacatctgtttttttttaaacgttagccaaagaagaagtcactatttccaagttagaaaccaccagaaataattgaaatttttgatatgttctaatcttctttgcatttttgagatctgtgtgagagcccaaccccactccaggagcatctgtacagcttccatctgccatcgaccaggtcctctcatcaaattaaatggaacagaaaatgctctagtgaaacaaaggaaatgtgcaagcatttttcctttttctattattctatttccctttttcctttttggcccccttataatccaaaccccagctgaaaggctgcaacaacaccaggttggggagcaggtcaccaggatcatagttcagtcaaaatgacatcactccctggaactagatttcaactcactagtcccctggcctcataacaggaacttatgcaggtgagacacaagaatgacttcctgtgtaggactagtaggaaatctgcaagtacttagagctggccattacagaacttccttccagaagtgccctgtgacatgaaagtaggacttcacaactaaggtgaagatccctgccctaccacatgatttgagtctcttggattcaaaggacattaatgtcaacagatggttgccatgtcagtctgttgacacaattccattgcttcagtttctccccttttctctctatatgtttggttggagcttgtgcctaatgtaaatacatcattcataattagaatggacattaattattttagtaataaacacaggataaatagctttggggtgatgaaccagagtctgtttttattttatggtgtgtacatattttaagctgtacttctgtgaatggtactgatttttgtggttgttttttttttatattttgtttgtttaagcagaagagtggaatatggggtcaaaatcataaaagaagttgccatg

SEQ ID NO: 3123 - protein, 1054 aa, Homo sapiens; identical to SEQ ID NO: 3121

SEQ ID NO: 3124 - DNA, 1980 bp, Homo sapiens
ctaaaatcagaacctttgaaaccattctttactcttccagatggagacagtgcttctaggagttttaatactagtgaaagcaaggtagagtttaaagctcaggacaccattagcaggggctcagatgactcagtgccagttatttcatttaaagatgctgcttttgatgatgtcagtggtactgatgaaggaagacctgatcttcttgtaaatttacctggtgaattggagtcaacaagagaagctgcagcaatgggacctactaagtttacacaaactaatatagggataatagaaaataaactcttggaagcccctgatgttttatgcctcaggcttagtactgaacaatgccaagcacatgaggagaaaggcatagaggaactgagtgatccctctgggcccaaatcctatagtataacagagaaacactatgcacaggaggatcccaggatgttatttgtagcagctgttgatcatagtagttcaggagatatgtctttgttacccagctcagatcctaagtttcaaggacttggagtggttgagtcagcagtaactgcaaacaacacagaagaaagcttattccgtatttgtagtccactctcaggtgctaatgaatatattgcaagcacagacactttaaaaacagaagaagtattgctgtttacagatcagactgatgatttggctaaagaggaaccaacttctttattccagagagactctgagactaagggtgaaagtggtttagtgctagaaggagacaaggaaatacatcagatttttgaggaccttgataaaaaattagcactagcctccaggttttacatcccagagggctgcattcaaagatgggcagctgaaatggtggtagcccttgatgctttacatagagagggaatttttgggtgctgtcctctttgaacttctcactggcaagactctggttgaatgccatccagcaggaataaatactcacactactttgaacatgccagaatgtgtctctgaagaggctcgctcactcattcaacagctcttgcagttcaatcctctggaacgacttggtgctggagttgctggtgttgaagatatcaaatctcatccattttttacccctgtggattgggcagaactgatgagatgaacgtaatgcagggttatcttcacacattctgatcttctctgtgacaggcatctccagcactgaggcacctctgactcacagttacttatggagcaccaaagcatttggataaagaccgttataggaaatgggggggaaatggctaaaagagaacaattcgtttacaattacaagatattagctaattgtgccaggggctgttatatacatatatacacaaccaaggtgtgatctgaatttaatccacatttggtgttgcagatgagttgtaaagccaactgaaagagttccttcaagaagttcctctgataggaagctagaagtgtagaatgaagttttacttgacagaaggacctttacatggcagctaacagtgctttttgctgaccaggattggtttatatgattaaattaatatttgcttaataatacactaaaagtatatgaacaatgtcatcaatgaaacttaaaagcgagaaaaaagaatatacacataatttctgacggaaaacctgtaccctgatgctgtataatgtatgttgaatgtggtcccagattatttctgtaagaagacactccatgttgtcagctttgtactctttgttgatactgcttatttagagaagggttcatataaacactcactctgtgtcttcaacagcatctttctttccccatctttctattttctgcaccctctgcttgttccctcatattctgttcttccgactcctgctaacacacatgcaacaaaaaagggaagggagtgcttatttccctttgtgtaaggactaagaaatcatgatatcaaataaacatggtgaaacatt

SEQ ID NO: 3125 - protein, 224 aa, Homo sapiens
MGPTKFTQTNIGIIENKLLEAPDVLCLRLSTEQCQAHEEKGIEELSDPSGPKSYSITEKHYAQEDPRMLFVAAVDHSSSGDMSLLPSSDPKFQGLGVVESAVTANNTEESLFRICSPLSGANEYIASTDTLKTEEVLLFTDQTDDLAKEEPTSLFQRDSETKGESGLVLEGDKEIHQIFEDLDKKLALASRFYIPEGCIQRWAAEMVVALDALHREGIFGCCPL

SEQ ID NO: 3126 - DNA, 3289 bp, Homo sapiens
ctaaaatcagaacctttgaaaccattctttactcttccagatggagacagtgcttctaggagttttaatactagtgaaagcaaggtagagtttaaagctcaggacaccattagcaggggctcagatgactcagtgccagttatttcatttaaagatgctgcttttgatgatgtcagtggtactgatgaaggaagacctgatcttcttgtaaatttacctggtgaattggagtcaacaagagaagctgcagcaatgggacctactaagtttacacaaactaatatagggataatagaaaataaactcttggaagcccctgatgttttatgcctcaggcttagtactgaacaatgccaagcacatgaggagaaaggcatagaggaactgagtgatccctctgggcccaaatcctatagtataacagagaaacactatgcacaggaggatcccaggatgttatttgtagcagctgttgatcatagtagttcaggagatatgtctttgttacccagctcagatcctaagtttcaaggacttggagtggttgagtcagcagtaactgcaaacaacacagaagaaagcttattccgtatttgtagtccactctcaggtgctaatgaatatattgcaagcacagacactttaaaaacagaagaagtattgctgtttacagatcagactgatgatttggctaaagaggaaccaacttctttattccagagagactctgagactaagggtgaaagtggtttagtgctagaaggagacaaggaaatacatcagatttttgaggaccttgataaaaaattagcactagcctccaggttttacatcccagagggctgcattcaaagatgggcagctgaaatggtggtagcccttgatgctttacatagagagggaatttttgggtgctgtcctctttgaacttctcactggcaagactctggttgaatgccatccagcaggaataaatactcacactactttgaacatgccagaatgtgtctctgaagaggctcgctcactcattcaacagctcttgcagttcaatcctctggaacgacttggtgctggagttgctggtgttgaagatatcaaatctcatccattttttacccctgtggattgggcagaactgatgagatgaacgtaatgcagggttatcttcacacattctgatcttctctgtgacaggcatctccagcactgaggcacctctgactcacagttacttatggagcaccaaagcatttggataaagaccgttataggaaatgggggggaaatggctaaaagagaacaattcgtttacaattacaagatattagctaattgtgccaggggctgttatatacatatatacacaaccaaggtgtgatctgaatttaatccacatttggtgttgcagatgagttgtaaagccaactgaaagagttccttcaagaagttcctctgataggaagctagaagtgtagaatgaagttttacttgacagaaggacctttacatggcagctaacagtgctttttgctgaccaggattggtttatatgattaaattaatatttgcttaataatacactaaaagtatatgaacaatgtcatcaatgaaacttaaaagcgagaaaaaagaatatacacataatttctgacggaaaacctgtaccctgatgctgtataatgtatgttgaatgtggtcccagattatttctgtaagaagacactccatgttgtcagctttgtactctttgttgatactgcttatttagagaagggttcatataaacactcactctgtgtcttcaacagcatctttctttccccatctttctattttctgcaccctctgcttgttccctcatattctgttcttccgactcctgctaacacacatgcaacaaaaaagggaagggagtgcttatttccctttgtgtaaggactaagaaatcatgatatcaaataaacatggtgaaacattagatctcttcttcatttaataaccctcccccctttttttccttgaagaaatgcgtctgttcctttccttgtgaaatattatcagtttctaccattgcttctcatgcttgactttgttttactttttggcttggtatactaagaagcaaaggatctcatctaaatggaattgaatggcagtcctagtttgttacttatggtgatgagattttcagatttgaactaatctatttgacgtgatttagaaagaatgtaagtattcacacatctccaaacatttgtatttgttacttctttttgttgctaaggtagctcctgtagttatgcattgttgcaaaaatttacaaatgttttaaaagtgttaacatctgtttttttttaaacgttagccaaagaagaagtcactatttccaagttagaaaccaccagaaataattgaaatttttgatatgttctaatcttctttgcatttttgagatctgtgtgagagcccaaccccactccaggagcatctgtacagcttccatctgccatcgaccaggtcctctcatcaaattaaatggaacagaaaatgctctagtgaaacaaaggaaatgtgcaagcatttttcctttttctattattctatttccctttttcctttttggcccccttataatccaaaccccagctgaaaggctgcaacaacaccaggttggggagcaggtcaccaggatcatagttcagtcaaaatgacatcactccctggaactagatttcaactcactagtcccctggcctcataacaggaacttatgcaggtgagacacaagaatgacttcctgtgtaggactagtaggaaatctgcaagtacttagagctggccattacagaacttccttccagaagtgccctgtgacatgaaagtaggacttcacaactaaggtgaagatccctgccctaccacatgatttgagtctcttggattcaaaggacattaatgtcaacagatggttgccatgtcagtctgttgacacaattccattgcttcagtttctccccttttctctctatatgtttggttggagcttgtgcctaatgtaaatacatcattcataattagaatggacattaattattttagtaataaacacaggataaatagctttggggtgatgaaccagagtctgtttttattttatggtgtgtacatattttaagctgtacttctgtgaatggtactgatttttgtggttgttttttttttatattttgtttgtttaagcagaagagtggaatatggggtcaaaatcataaaagaagttgccatg

SEQ ID NO: 3127 - protein, 224 aa, Homo sapiens; identical to SEQ ID NO: 3125

SEQ ID NO: 3128 - DNA, 708 bp, Homo sapiens
acaacctcaggcttctttttggcaatacagtttcagtgtgtatcttaaaatttttaatctaagaattactgatatttaaggatgttaaaagggcaaccaaataaagtcctttgttctgataattgaaagaattttttttctgttttaacacctataaagaaattctacaactgcttaccttcacctgttctaatatttaagcttcctagctgttaggaagttcttctttatatcttacctaaatacagcctaaatgcagaactctttgtcgtagcttagagtcatgtatgaaaatcaaggacagttggtcatgttaccaatttcacattaattaatgaatcactgcttgatataaagtcattttgaacagtttcaagctgcattgttaaggggatggatttaaaaattattcaatgtcttcttttctggtttccatgaaaaaccaatttacctttttacagttcttatccttctctactactccagtcagattaaagatgacattcagcctagctgccttcatagtttcaaaagcagttttccttagatgggaccagcagtgtctttaggcctaagtgtgttagaaagctgaactaatcatatctgagaggaggcaagaaagaaagtcaatggggaaaattgtcttgggccacataaaatacactaacactaacgatagctgatgagctaaaaaaaaaaaaaagtcgc

SEQ ID NO: 3129 - protein, 51 aa, Homo sapiens
MSSFLVSMKNQFTFLQFLSFSTTPVRLKMTFSLAAFIVSKAVFLRWDQQCL

SEQ ID NO: 3130 - DNA, 5567 bp, Homo sapiens
aggtcccactctgtgcttccatggagaagggcggccaatgtgattctgggcaaagtgtggtgacttgtggattttcactgtgacgatgttgctacacggtccttcacttggagttagtgcaacaaggagacatctgagcttaaaatttatgaaacatctaaagaaatcaagctttatataggatcaccgttgtgggttgaattgtgtatccccaaaagatgttgaagtcctgaccacctccctataccttacaatatagccttttacggaagtagggtctttgcagaagatcaagttaagatgaaatcatttgattgggccctagttcaatatatcttatgtccttataaaaggagacaatttggacacagggacaaggggagaatgccacataaagattggaattatgctgccataagccaaggaactccaaagatcgctggcaagctgctaaaagctagcacagattcatggaacagagtctccgtcatagcctacaaaaggaatcaaccctgctgacatcttgatttcagacttctagcctccagaactctttaaaaagttgaagtctattggaaaccttcttataagaaaccttcctagtcagagaattcaactttcttcttttcttcattcatgaaaatgcagatccactgagaaagggaataaggcttctctgcagaatgtcaaacaaagatcgacacattgattccagctgttcgtccttcatcaagacggaaccttccagcccagcctccctgacggacagcgtcaaccaccacagccctggtggctcttcagacgccagtgggagctacagttcaaccatgaatggccatcagaacggacttgactcgccacctctctacccttctgctcctatcctgggaggtagtgggcctgtcaggaaactgtatgatgactgctccagcaccattgttgaagatccccagaccaagtgtgaatacatgctcaactcgatgcccaagagactgtgtttagtgtgtggtgacatcgcttctgggtaccactatggggtagcatcatgtgaagcctgcaaggcattcttcaagaggacaattcaaggggtgcgtcttgacagagtacgtggaggtcggcagaagtacaagcgcaggatagatgcggagaacagcccatacctgaaccctcagctggttcagccagccaaaaagccatataacaagattgtctcacatttgttggtggctgaaccggagaagatctatgccatgcctgaccctactgtccccgacagtgacatcaaagccctcactacactgtgtgacttggccgaccgagagttggtggttatcattggatgggcgaagcatattccaggcttctccacgctgtccctggcggaccagatgagccttctgcagagtgcttggatggaaattttgatccttggtgtcgtataccggtctctttcgtttgaggatgaacttgtctatgcagacgattatataatggacgaagaccagtccaaattagcaggccttcttgatctaaataatgctatcctgcagctggtaaagaaatacaagagcatgaagctggaaaaagaagaatttgtcaccctcaaagctatagctcttgctaattcagactccatgcacatagaagatgttgaagccgttcagaagcttcaggatgtcttacatgaagcgctgcaggattatgaagctggccagcacatggaagaccctcgtcgagctggcaagatgctgatgacactgccactcctgaggcagacctctaccaaggccgtgcagcatttctacaacatcaaactagaaggcaaagtcccaatgcacaaactttttttggaaatgttggaggccaaggtctgactaaaagctccctgggccttcccatccttcatgttgaaaaagggaaaataaacccaagagtgatgtcgaagaaacttagagtttagttaacaacatcaaaaatcaacagactgcactgataatttagcagcaagactatgaagcagctttcagattcctccataggttcctgatgagtttctttctactttctccatcatcttctttcctctttcttcccacatttctctttctctttattttttctccttttcttctttcacctcccttatttctttgcttctttcattcctagttcccattctcctttattttcttcccgtctgcctgccttctttcttttctttacctactctcattcctctcttttctcatccttccccttttttctaaatttgaaatagctttagtttaaaaaaaaatcctcccttccccctttcctttccctttctttcctttttccctttccttttccctttcctttcctttcctcttgaccttctttccatctttctttttcttccttctgctgctgaacttttaaaagaggtctctaactgaagagagatggaagccagccctgccaaaggatggagatccataatatggatgccagtgaacttattgtgaaccatactgtccccaatgactaaggaatcaaagagagagaaccaacgttcctaaaagtacagtgcaacatatacaaattgactgagtgcagtattagatttcatgggagcagcctctaattagacaacttaagcaacgttgcatcggctgcttcttatcattgcttttccatctagatcagttacagccatttgattccttaattgttttttcaagtcttccaggtatttgttagtttagctactatgtaactttttcagggaatagtttaagctttattcattcatgcaatactaaagagaaataagaatactgcaattttgtgctggctttgaacaattacgaacaataatgaaggacaaatgaatcctgaaggaagatttttaaaaatgttttgtttcttcttacaaatggagatttttttgtaccagctttaccacttttcagccatttattaatatgggaatttaacttactcaagcaatagttgaagggaaggtgcatattatcacggatgcaatttatgttgtgtgccagtctggtcccaaacatcaatttcttaacatgagctccagtttacctaaatgttcactgacacaaaggatgagattacacctacagtgactctgagtagtcacatatataagcactgcacatgagatatagatccgtagaattgtcaggagtgcacctctctacttgggaggtacaattgccatatgatttctagctgccatggtggttaggaatgtgatactgcctgtttgcaaagtcacagaccttgcctcagaaggagctgtgagccagtattcatttaagaggcaataaggcaaatgccagaattaaaaaaaaaaatcatcaaagacagaaaatgcctgaccaaattctaaaacctaatccatataagtttattcatttaggaatgttcgtttaaattaatctgcagtttttaccaagagctaagccaatatatgtgcttttcaaccagtattgtcacagcatgaaagtcaagtcaggttccagactgttaagaggtgtaatctaatgaagaaatcaattagatgccccgaaatctacagtcgctgaataaccaataaacagtaacctccatcaaatgctataccaatggaccagtgttagtagctgctccctgtattatgtgaacagtcttattctatgtacacagatgtaattaaaattgtaatcctaacaaacaaaagaaatgtagttcagcttttcaatgtttcatgtttgctgtgcttttctgaattttatgttgcattcaaagactgttgtcttgttcttgtggtgtttggattcttgtggtgtgtgcttttagacacagggtagaattagagacaatattggatgtacaattcctcaggagactacagtagtatattctattccttaccagtaataaggttcttcctaataataattaagagattgaaactccaaacaagtattcattatgaacagatacacatcaaaatcataataatattttcaaaacaaggaataatttctctaatggtttattatagaataccaatgtatagcttagaaataaaactttgaatatttcaagaatatagataagtctaatttttaaatgctgtatatatggctttcactcaatcatctctcagatgttgttattaactcgctctgtgttgttgcaaaactttttggtgcagattcgtttccaaaactattgctactttgtgtgctttaaacaaaataccttgggttgatgaaacatcaacccagtgctaggaatactgtgtatctatcattagctatatgggactatattgtagattgtggtttctcagtagagaagtgactgtagtgtgattctagataaatcatcattagcaattcattcagatggtcaataacttgaaatttatagctgtgataggagttcagaaattggcacatccctttaaaaataacaacagaaaatacaactcctgggaaaaaaggtgctgattctataagattatttatatatgtaagtgtttaaaaagattattttccagaaagtttgtgcagggtttaagttgctactattcaactacactatatataaataaaatatatacaatatatacattgttttcactgtatcacattaaagtacttgggcttcagaagtaagagccaaccaactgaaaacctgagatggagatatgttcaaagaatgagatacaattttttagttttcagtttaagtaactctcagcattacaaaagagtaagtatctcacaaataggaaataaaactaaaacgtggatttaaaaagaactgcacgggctttagggtaaatgctcatcttaaacctcactagagggaagtcttctcaagtttcaagcaagaccatttacttaatgtgaagttttggaaagttataaaggtgtatgttttagccatatgattttaattttaattttgcttcttttaggttcgttcttatttaaagcaatatgattgtgtgactccttgtagttacacttgtgtttcaatcagatcagattgttgtatttattccactattttgcatttaaatgataacataaaagatataaaaaatttaaaactgctatttttcttatagaagagaaaatgggtgttggtgattgtattttaattatttaagcgtctctgtttacctgcctaggaaaacattttatggcagtcttatgtgcaaagatcgtaaaaggacaaaaaatttaaactgcttataataatccaggagttgcattatagccagtagtaaaaataataataataataataaaaccatgtctatagctgtagatgggcttcacatctgtaaagcaatcaattgtatatttttgtgatgtgtaccatactgtgtgctccagcaaatgtccatttgtgtaaatgtatttattttatattgtatatattgttaaatgcaaaaaggagatatgattctgtaactccaatcagttcagatgtgtaactcaaattattatgcctttcaggatgatggtagagcaatattaaacaagcttccacttttgactgct

SEQ ID NO: 3131 - protein, 396 aa, Homo sapiens
MSNKDRHIDSSCSSFIKTEPSSPASLTDSVNHHSPGGSSDASGSYSSTMNGHQNGLDSPPLYPSAPILGGSGPVRKLYDDCSSTIVEDPQTKCEYMLNSMPKRLCLVCGDIASGYHYGVASCEACKAFFKRTIQGVRLDRVRGGRQKYKRRIDAENSPYLNPQLVQPAKKPYNKIVSHLLVAEPEKIYAMPDPTVPDSDIKALTTLCDLADRELVVIIGWAKHIPGFSTLSLADQMSLLQSAWMEILILGVVYRSLSFEDELVYADDYIMDEDQSKLAGLLDLNNAILQLVKKYKSMKLEKEEFVTLKAIALANSDSMHIEDVEAVQKLQDVLHEALQDYEAGQHMEDPRRAGKMLMTLPLLRQTSTKAVQHFYNIKLEGKVPMHKLFLEMLEAKV

SEQ ID NO: 3132 - DNA, 5234 bp, Homo sapiens
gtgtaagatgtgcaatgttcctgcatgggggttttgtagactttcatagccaaagaaaccggcttcggcttctttaaaatccccgacgactcacctgattaacctgctgcagttctgaccctgccaagagctgacaatttactggttcatcaatgaaacaatattaaattatgaagatgtaaggaaaaaatcctacgctaacactgtcgcagtttgaaaggcttctctgcagaatgtcaaacaaagatcgacacattgattccagctgttcgtccttcatcaagacggaaccttccagcccagcctccctgacggacagcgtcaaccaccacagccctggtggctcttcagacgccagtgggagctacagttcaaccatgaatggccatcagaacggacttgactcgccacctctctacccttctgctcctatcctgggaggtagtgggcctgtcaggaaactgtatgatgactgctccagcaccattgttgaagatccccagaccaagtgtgaatacatgctcaactcgatgcccaagagactgtgtttagtgtgtggtgacatcgcttctgggtaccactatggggtagcatcatgtgaagcctgcaaggcattcttcaagaggacaattcaaggcaatatagaatacagctgccctgccacgaatgaatgtgaaatcacaaagcgcagacgtaaatcctgccaggcttgccgcttcatgaagtgtttaaaagtgggcatgctgaaagaaggggtgcgtcttgacagagtacgtggaggtcggcagaagtacaagcgcaggatagatgcggagaacagcccatacctgaaccctcagctggttcagccagccaaaaagccatataacaagattgtctcacatttgttggtggctgaaccggagaagatctatgccatgcctgaccctactgtccccgacagtgacatcaaagccctcactacactgtgtgacttggccgaccgagagttggtggttatcattggatgggcgaagcatattccaggcttctccacgctgtccctggcggaccagatgagccttctgcagagtgcttggatggaaattttgatccttggtgtcgtataccggtctctttcgtttgaggatgaacttgtctatgcagacgattatataatggacgaagaccagtccaaattagcaggccttcttgatctaaataatgctatcctgcagctggtaaagaaatacaagagcatgaagctggaaaaagaagaatttgtcaccctcaaagctatagctcttgctaattcagactccatgcacatagaagatgttgaagccgttcagaagcttcaggatgtcttacatgaagcgctgcaggattatgaagctggccagcacatggaagaccctcgtcgagctggcaagatgctgatgacactgccactcctgaggcagacctctaccaaggccgtgcagcatttctacaacatcaaactagaaggcaaagtcccaatgcacaaactttttttggaaatgttggaggccaaggtctgactaaaagctccctgggccttcccatccttcatgttgaaaaagggaaaataaacccaagagtgatgtcgaagaaacttagagtttagttaacaacatcaaaaatcaacagactgcactgataatttagcagcaagactatgaagcagctttcagattcctccataggttcctgatgagtttctttctactttctccatcatcttctttcctctttcttcccacatttctctttctctttattttttctccttttcttctttcacctcccttatttctttgcttctttcattcctagttcccattctcctttattttcttcccgtctgcctgccttctttcttttctttacctactctcattcctctcttttctcatccttccccttttttctaaatttgaaatagctttagtttaaaaaaaaatcctcccttccccctttcctttccctttctttcctttttccctttccttttccctttcctttcctttcctcttgaccttctttccatctttctttttcttccttctgctgctgaacttttaaaagaggtctctaactgaagagagatggaagccagccctgccaaaggatggagatccataatatggatgccagtgaacttattgtgaaccatactgtccccaatgactaaggaatcaaagagagagaaccaacgttcctaaaagtacagtgcaacatatacaaattgactgagtgcagtattagatttcatgggagcagcctctaattagacaacttaagcaacgttgcatcggctgcttcttatcattgcttttccatctagatcagttacagccatttgattccttaattgttttttcaagtcttccaggtatttgttagtttagctactatgtaactttttcagggaatagtttaagctttattcattcatgcaatactaaagagaaataagaatactgcaattttgtgctggctttgaacaattacgaacaataatgaaggacaaatgaatcctgaaggaagatttttaaaaatgttttgtttcttcttacaaatggagatttttttgtaccagctttaccacttttcagccatttattaatatgggaatttaacttactcaagcaatagttgaagggaaggtgcatattatcacggatgcaatttatgttgtgtgccagtctggtcccaaacatcaatttcttaacatgagctccagtttacctaaatgttcactgacacaaaggatgagattacacctacagtgactctgagtagtcacatatataagcactgcacatgagatatagatccgtagaattgtcaggagtgcacctctctacttgggaggtacaattgccatatgatttctagctgccatggtggttaggaatgtgatactgcctgtttgcaaagtcacagaccttgcctcagaaggagctgtgagccagtattcatttaagaggcaataaggcaaatgccagaattaaaaaaaaaaatcatcaaagacagaaaatgcctgaccaaattctaaaacctaatccatataagtttattcatttaggaatgttcgtttaaattaatctgcagtttttaccaagagctaagccaatatatgtgcttttcaaccagtattgtcacagcatgaaagtcaagtcaggttccagactgttaagaggtgtaatctaatgaagaaatcaattagatgccccgaaatctacagtcgctgaataaccaataaacagtaacctccatcaaatgctataccaatggaccagtgttagtagctgctccctgtattatgtgaacagtcttattctatgtacacagatgtaattaaaattgtaatcctaacaaacaaaagaaatgtagttcagcttttcaatgtttcatgtttgctgtgcttttctgaattttatgttgcattcaaagactgttgtcttgttcttgtggtgtttggattcttgtggtgtgtgcttttagacacagggtagaattagagacaatattggatgtacaattcctcaggagactacagtagtatattctattccttaccagtaataaggttcttcctaataataattaagagattgaaactccaaacaagtattcattatgaacagatacacatcaaaatcataataatattttcaaaacaaggaataatttctctaatggtttattatagaataccaatgtatagcttagaaataaaactttgaatatttcaagaatatagataagtctaatttttaaatgctgtatatatggctttcactcaatcatctctcagatgttgttattaactcgctctgtgttgttgcaaaactttttggtgcagattcgtttccaaaactattgctactttgtgtgctttaaacaaaataccttgggttgatgaaacatcaacccagtgctaggaatactgtgtatctatcattagctatatgggactatattgtagattgtggtttctcagtagagaagtgactgtagtgtgattctagataaatcatcattagcaattcattcagatggtcaataacttgaaatttatagctgtgataggagttcagaaattggcacatccctttaaaaataacaacagaaaatacaactcctgggaaaaaaggtgctgattctataagattatttatatatgtaagtgtttaaaaagattattttccagaaagtttgtgcagggtttaagttgctactattcaactacactatatataaataaaatatatacaatatatacattgttttcactgtatcacattaaagtacttgggcttcagaagtaagagccaaccaactgaaaacctgagatggagatatgttcaaagaatgagatacaattttttagttttcagtttaagtaactctcagcattacaaaagagtaagtatctcacaaataggaaataaaactaaaacgtggatttaaaaagaactgcacgggctttagggtaaatgctcatcttaaacctcactagagggaagtcttctcaagtttcaagcaagaccatttacttaatgtgaagttttggaaagttataaaggtgtatgttttagccatatgattttaattttaattttgcttcttttaggttcgttcttatttaaagcaatatgattgtgtgactccttgtagttacacttgtgtttcaatcagatcagattgttgtatttattccactattttgcatttaaatgataacataaaagatataaaaaatttaaaactgctatttttcttatagaagagaaaatgggtgttggtgattgtattttaattatttaagcgtctctgtttacctgcctaggaaaacattttatggcagtcttatgtgcaaagatcgtaaaaggacaaaaaatttaaactgcttataataatccaggagttgcattatagccagtagtaaaaataataataataataataaaaccatgtctatagctgtagatgggcttcacatctgtaaagcaatcaattgtatatttttgtgatgtgtaccatactgtgtgctccagcaaatgtccatttgtgtaaatgtatttattttatattgtatatattgttaaatgcaaaaaggagatatgattctgtaactccaatcagttcagatgtgtaactcaaattattatgcctttcaggatgatggtagagcaatattaaacaagcttccacttttgactgct

SEQ ID NO: 3133 - protein, 435 aa, Homo sapiens; identical to SEQ ID NO: 171

SEQ ID NO: 3134 - DNA, 5352 bp, Homo sapiens
gtgtaagatgtgcaatgttcctgcatgggggttttgtagactttcatagccaaagaaaccggcttcggcttctttaaaatccccgacgactcacctgattaacctgctgcagttctgaccctgccaagagctgacaatttactggttcatcaatgaaacaatattaaattatgaagatgtaaggaaaaaatcctacgctaacactgtcgcagtttgaaagctttaaaaagttgaagtctattggaaaccttcttataagaaaccttcctagtcagagaattcaactttcttcttttcttcattcatgaaaatgcagatccactgagaaagggaataaggcttctctgcagaatgtcaaacaaagatcgacacattgattccagctgttcgtccttcatcaagacggaaccttccagcccagcctccctgacggacagcgtcaaccaccacagccctggtggctcttcagacgccagtgggagctacagttcaaccatgaatggccatcagaacggacttgactcgccacctctctacccttctgctcctatcctgggaggtagtgggcctgtcaggaaactgtatgatgactgctccagcaccattgttgaagatccccagaccaagtgtgaatacatgctcaactcgatgcccaagagactgtgtttagtgtgtggtgacatcgcttctgggtaccactatggggtagcatcatgtgaagcctgcaaggcattcttcaagaggacaattcaaggcaatatagaatacagctgccctgccacgaatgaatgtgaaatcacaaagcgcagacgtaaatcctgccaggcttgccgcttcatgaagtgtttaaaagtgggcatgctgaaagaaggggtgcgtcttgacagagtacgtggaggtcggcagaagtacaagcgcaggatagatgcggagaacagcccatacctgaaccctcagctggttcagccagccaaaaagccatataacaagattgtctcacatttgttggtggctgaaccggagaagatctatgccatgcctgaccctactgtccccgacagtgacatcaaagccctcactacactgtgtgacttggccgaccgagagttggtggttatcattggatgggcgaagcatattccaggcttctccacgctgtccctggcggaccagatgagccttctgcagagtgcttggatggaaattttgatccttggtgtcgtataccggtctctttcgtttgaggatgaacttgtctatgcagacgattatataatggacgaagaccagtccaaattagcaggccttcttgatctaaataatgctatcctgcagctggtaaagaaatacaagagcatgaagctggaaaaagaagaatttgtcaccctcaaagctatagctcttgctaattcagactccatgcacatagaagatgttgaagccgttcagaagcttcaggatgtcttacatgaagcgctgcaggattatgaagctggccagcacatggaagaccctcgtcgagctggcaagatgctgatgacactgccactcctgaggcagacctctaccaaggccgtgcagcatttctacaacatcaaactagaaggcaaagtcccaatgcacaaactttttttggaaatgttggaggccaaggtctgactaaaagctccctgggccttcccatccttcatgttgaaaaagggaaaataaacccaagagtgatgtcgaagaaacttagagtttagttaacaacatcaaaaatcaacagactgcactgataatttagcagcaagactatgaagcagctttcagattcctccataggttcctgatgagtttctttctactttctccatcatcttctttcctctttcttcccacatttctctttctctttattttttctccttttcttctttcacctcccttatttctttgcttctttcattcctagttcccattctcctttattttcttcccgtctgcctgccttctttcttttctttacctactctcattcctctcttttctcatccttccccttttttctaaatttgaaatagctttagtttaaaaaaaaatcctcccttccccctttcctttccctttctttcctttttccctttccttttccctttcctttcctttcctcttgaccttctttccatctttctttttcttccttctgctgctgaacttttaaaagaggtctctaactgaagagagatggaagccagccctgccaaaggatggagatccataatatggatgccagtgaacttattgtgaaccatactgtccccaatgactaaggaatcaaagagagagaaccaacgttcctaaaagtacagtgcaacatatacaaattgactgagtgcagtattagatttcatgggagcagcctctaattagacaacttaagcaacgttgcatcggctgcttcttatcattgcttttccatctagatcagttacagccatttgattccttaattgttttttcaagtcttccaggtatttgttagtttagctactatgtaactttttcagggaatagtttaagctttattcattcatgcaatactaaagagaaataagaatactgcaattttgtgctggctttgaacaattacgaacaataatgaaggacaaatgaatcctgaaggaagatttttaaaaatgttttgtttcttcttacaaatggagatttttttgtaccagctttaccacttttcagccatttattaatatgggaatttaacttactcaagcaatagttgaagggaaggtgcatattatcacggatgcaatttatgttgtgtgccagtctggtcccaaacatcaatttcttaacatgagctccagtttacctaaatgttcactgacacaaaggatgagattacacctacagtgactctgagtagtcacatatataagcactgcacatgagatatagatccgtagaattgtcaggagtgcacctctctacttgggaggtacaattgccatatgatttctagctgccatggtggttaggaatgtgatactgcctgtttgcaaagtcacagaccttgcctcagaaggagctgtgagccagtattcatttaagaggcaataaggcaaatgccagaattaaaaaaaaaaatcatcaaagacagaaaatgcctgaccaaattctaaaacctaatccatataagtttattcatttaggaatgttcgtttaaattaatctgcagtttttaccaagagctaagccaatatatgtgcttttcaaccagtattgtcacagcatgaaagtcaagtcaggttccagactgttaagaggtgtaatctaatgaagaaatcaattagatgccccgaaatctacagtcgctgaataaccaataaacagtaacctccatcaaatgctataccaatggaccagtgttagtagctgctccctgtattatgtgaacagtcttattctatgtacacagatgtaattaaaattgtaatcctaacaaacaaaagaaatgtagttcagcttttcaatgtttcatgtttgctgtgcttttctgaattttatgttgcattcaaagactgttgtcttgttcttgtggtgtttggattcttgtggtgtgtgcttttagacacagggtagaattagagacaatattggatgtacaattcctcaggagactacagtagtatattctattccttaccagtaataaggttcttcctaataataattaagagattgaaactccaaacaagtattcattatgaacagatacacatcaaaatcataataatattttcaaaacaaggaataatttctctaatggtttattatagaataccaatgtatagcttagaaataaaactttgaatatttcaagaatatagataagtctaatttttaaatgctgtatatatggctttcactcaatcatctctcagatgttgttattaactcgctctgtgttgttgcaaaactttttggtgcagattcgtttccaaaactattgctactttgtgtgctttaaacaaaataccttgggttgatgaaacatcaacccagtgctaggaatactgtgtatctatcattagctatatgggactatattgtagattgtggtttctcagtagagaagtgactgtagtgtgattctagataaatcatcattagcaattcattcagatggtcaataacttgaaatttatagctgtgataggagttcagaaattggcacatccctttaaaaataacaacagaaaatacaactcctgggaaaaaaggtgctgattctataagattatttatatatgtaagtgtttaaaaagattattttccagaaagtttgtgcagggtttaagttgctactattcaactacactatatataaataaaatatatacaatatatacattgttttcactgtatcacattaaagtacttgggcttcagaagtaagagccaaccaactgaaaacctgagatggagatatgttcaaagaatgagatacaattttttagttttcagtttaagtaactctcagcattacaaaagagtaagtatctcacaaataggaaataaaactaaaacgtggatttaaaaagaactgcacgggctttagggtaaatgctcatcttaaacctcactagagggaagtcttctcaagtttcaagcaagaccatttacttaatgtgaagttttggaaagttataaaggtgtatgttttagccatatgattttaattttaattttgcttcttttaggttcgttcttatttaaagcaatatgattgtgtgactccttgtagttacacttgtgtttcaatcagatcagattgttgtatttattccactattttgcatttaaatgataacataaaagatataaaaaatttaaaactgctatttttcttatagaagagaaaatgggtgttggtgattgtattttaattatttaagcgtctctgtttacctgcctaggaaaacattttatggcagtcttatgtgcaaagatcgtaaaaggacaaaaaatttaaactgcttataataatccaggagttgcattatagccagtagtaaaaataataataataataataaaaccatgtctatagctgtagatgggcttcacatctgtaaagcaatcaattgtatatttttgtgatgtgtaccatactgtgtgctccagcaaatgtccatttgtgtaaatgtatttattttatattgtatatattgttaaatgcaaaaaggagatatgattctgtaactccaatcagttcagatgtgtaactcaaattattatgcctttcaggatgatggtagagcaatattaaacaagcttccacttttgactgct

SEQ ID NO: 3135 - protein, 435 aa, Homo sapiens; identical to SEQ ID NO: 171

SEQ ID NO: 3136 - DNA, 5615 bp, Homo sapiens
gcccaggcggggattggtgacggtcaaaagggagcagttggcactgaatgtcaccctgaaggtaaaatgaaagacaaaagatgaacgcatgcttgctttccgtttgcagcggctgcggcggcggcaggagcagcaggatttaaaggggaaaaaaatcacacgcatatgcacacatatatacacacccagaggcgtcaattatgcaaacgcaataatgcaatcaaatcatgacagtgccgggaattttttttagaaaaatatagatatttatttttaaaaagagaaacgcatgcaaacagaatcgtgcacataccacgtaaccacccgaggagaacctggcagcctctctcttcttctgccaagttatcattgagaaaacagacaggcatcatgacgtcctgggtcacagggagtgcggaccgacgctaccaagagaaaagggaggcgccttggcgctccggctagccgtgggcgcccctctgcccctcgcagcccggctcggtgagtgcacagccgctcgggacgcggaccccgggtgccaggccggccccgcgcccgcgggggcagagcggggggccgtgcccttgccaccggagggccggccagcaccccctcgcctgccgaggtcgcgggagcccagttaaaggaggcgtgtgtaagatgtgcaatgttcctgcatgggggttttgtagactttcatagccaaagaaaccggcttcggcttctttaaaatccccgacgactcacctgattaacctgctgcagttctgaccctgccaaggcttctctgcagaatgtcaaacaaagatcgacacattgattccagctgttcgtccttcatcaagacggaaccttccagcccagcctccctgacggacagcgtcaaccaccacagccctggtggctcttcagacgccagtgggagctacagttcaaccatgaatggccatcagaacggacttgactcgccacctctctacccttctgctcctatcctgggaggtagtgggcctgtcaggaaactgtatgatgactgctccagcaccattgttgaagatccccagaccaagtgtgaatacatgctcaactcgatgcccaagagactgtgtttagtgtgtggtgacatcgcttctgggtaccactatggggtagcatcatgtgaagcctgcaaggcattcttcaagaggacaattcaaggcaatatagaatacagctgccctgccacgaatgaatgtgaaatcacaaagcgcagacgtaaatcctgccaggcttgccgcttcatgaagtgtttaaaagtgggcatgctgaaagaaggggtgcgtcttgacagagtacgtggaggtcggcagaagtacaagcgcaggatagatgcggagaacagcccatacctgaaccctcagctggttcagccagccaaaaagccatataacaagattgtctcacatttgttggtggctgaaccggagaagatctatgccatgcctgaccctactgtccccgacagtgacatcaaagccctcactacactgtgtgacttggccgaccgagagttggtggttatcattggatgggcgaagcatattccaggcttctccacgctgtccctggcggaccagatgagccttctgcagagtgcttggatggaaattttgatccttggtgtcgtataccggtctctttcgtttgaggatgaacttgtctatgcagacgattatataatggacgaagaccagtccaaattagcaggccttcttgatctaaataatgctatcctgcagctggtaaagaaatacaagagcatgaagctggaaaaagaagaatttgtcaccctcaaagctatagctcttgctaattcagactccatgcacatagaagatgttgaagccgttcagaagcttcaggatgtcttacatgaagcgctgcaggattatgaagctggccagcacatggaagaccctcgtcgagctggcaagatgctgatgacactgccactcctgaggcagacctctaccaaggccgtgcagcatttctacaacatcaaactagaaggcaaagtcccaatgcacaaactttttttggaaatgttggaggccaaggtctgactaaaagctccctgggccttcccatccttcatgttgaaaaagggaaaataaacccaagagtgatgtcgaagaaacttagagtttagttaacaacatcaaaaatcaacagactgcactgataatttagcagcaagactatgaagcagctttcagattcctccataggttcctgatgagtttctttctactttctccatcatcccttttttctaaatttgaaatagctttagtttaaaaaaaaatcctcccttccccctttcctttccctttctttcctttttccctttccttttccctttcctttcctttcctcttgaccttctttccatctttctttttcttccttctgctgctgaacttttaaaagaggtctctaactgaagagagatggaagccagccctgccaaaggatggagatccataatatggatgccagtgaacttattgtgaaccatactgtccccaatgactaaggaatcaaagagagagaaccaacgttcctaaaagtacagtgcaacatatacaaattgactgagtgcagtattagatttcatgggagcagcctctaattagacaacttaagcaacgttgcatcggctgcttcttatcattgcttttccatctagatcagttacagccatttgattccttaattgttttttcaagtcttccaggtatttgttagtttagctactatgtaactttttcagggaatagtttaagctttattcattcatgcaatactaaagagaaataagaatactgcaattttgtgctggctttgaacaattacgaacaataatgaaggacaaatgaatcctgaaggaagatttttaaaaatgttttgtttcttcttacaaatggagatttttttgtaccagctttaccacttttcagccatttattaatatgggaatttaacttactcaagcaatagttgaagggaaggtgcatattatcacggatgcaatttatgttgtgtgccagtctggtcccaaacatcaatttcttaacatgagctccagtttacctaaatgttcactgacacaaaggatgagattacacctacagtgactctgagtagtcacatatataagcactgcacatgagatatagatccgtagaattgtcaggagtgcacctctctacttgggaggtacaattgccatatgatttctagctgccatggtggttaggaatgtgatactgcctgtttgcaaagtcacagaccttgcctcagaaggagctgtgagccagtattcatttaagaggcaataaggcaaatgccagaattaaaaaaaaaaatcatcaaagacagaaaatgcctgaccaaattctaaaacctaatccatataagtttattcatttaggaatgttcgtttaaattaatctgcagtttttaccaagagctaagccaatatatgtgcttttcaaccagtattgtcacagcatgaaagtcaagtcaggttccagactgttaagaggtgtaatctaatgaagaaatcaattagatgccccgaaatctacagtcgctgaataaccaataaacagtaacctccatcaaatgctataccaatggaccagtgttagtagctgctccctgtattatgtgaacagtcttattctatgtacacagatgtaattaaaattgtaatcctaacaaacaaaagaaatgtagttcagcttttcaatgtttcatgtttgctgtgcttttctgaattttatgttgcattcaaagactgttgtcttgttcttgtggtgtttggattcttgtggtgtgtgcttttagacacagggtagaattagagacaatattggatgtacaattcctcaggagactacagtagtatattctattccttaccagtaataaggttcttcctaataataattaagagattgaaactccaaacaagtattcattatgaacagatacacatcaaaatcataataatattttcaaaacaaggaataatttctctaatggtttattatagaataccaatgtatagcttagaaataaaactttgaatatttcaagaatatagataagtctaatttttaaatgctgtatatatggctttcactcaatcatctctcagatgttgttattaactcgctctgtgttgttgcaaaactttttggtgcagattcgtttccaaaactattgctactttgtgtgctttaaacaaaataccttgggttgatgaaacatcaacccagtgctaggaatactgtgtatctatcattagctatatgggactatattgtagattgtggtttctcagtagagaagtgactgtagtgtgattctagataaatcatcattagcaattcattcagatggtcaataacttgaaatttatagctgtgataggagttcagaaattggcacatccctttaaaaataacaacagaaaatacaactcctgggaaaaaaggtgctgattctataagattatttatatatgtaagtgtttaaaaagattattttccagaaagtttgtgcagggtttaagttgctactattcaactacactatatataaataaaatatatacaatatatacattgttttcactgtatcacattaaagtacttgggcttcagaagtaagagccaaccaactgaaaacctgagatggagatatgttcaaagaatgagatacaattttttagttttcagtttaagtaactctcagcattacaaaagagtaagtatctcacaaataggaaataaaactaaaacgtggatttaaaaagaactgcacgggctttagggtaaatgctcatcttaaacctcactagagggaagtcttctcaagtttcaagcaagaccatttacttaatgtgaagttttggaaagttataaaggtgtatgttttagccatatgattttaattttaattttgcttcttttaggttcgttcttatttaaagcaatatgattgtgtgactccttgtagttacacttgtgtttcaatcagatcagattgttgtatttattccactattttgcatttaaatgataacataaaagatataaaaaatttaaaactgctatttttcttatagaagagaaaatgggtgttggtgattgtattttaattatttaagcgtctctgtttacctgcctaggaaaacattttatggcagtcttatgtgcaaagatcgtaaaaggacaaaaaatttaaactgcttataataatccaggagttgcattatagccagtagtaaaaataataataataataataaaaccatgtctatagctgtagatgggcttcacatctgtaaagcaatcaattgtatatttttgtgatgtgtaccatactgtgtgctccagcaaatgtccatttgtgtaaatgtatttattttatattgtatatattgttaaatgcaaaaaggagatatgattctgtaactccaatcagttcagatgtgtaactcaaattattatgcctttcaggatgatggtagagcaatattaaacaagcttccacttttgactgct

SEQ ID NO: 3137 - protein, 435 aa, Homo sapiens; identical to SEQ ID NO: 171

SEQ ID NO: 3138 - DNA, 5312 bp, Homo sapiens
gagggcgagggcgggctcctctggaggcggcgggctccaggccgggctccctaaacgggtcagcaattggagcgggaaggccggacagagctgacaatttactggttcatcaatgaaacaatattaaattatgaagatgtaaggaaaaaatcctacgctaacactgtcgcagtttgaaagctttaaaaagttgaagtctattggaaaccttcttataagaaaccttcctagtcagagaattcaactttcttcttttcttcattcatgaaaatgcagatccactgagaaagggaataaggcttctctgcagaatgtcaaacaaagatcgacacattgattccagctgttcgtccttcatcaagacggaaccttccagcccagcctccctgacggacagcgtcaaccaccacagccctggtggctcttcagacgccagtgggagctacagttcaaccatgaatggccatcagaacggacttgactcgccacctctctacccttctgctcctatcctgggaggtagtgggcctgtcaggaaactgtatgatgactgctccagcaccattgttgaagatccccagaccaagtgtgaatacatgctcaactcgatgcccaagagactgtgtttagtgtgtggtgacatcgcttctgggtaccactatggggtagcatcatgtgaagcctgcaaggcattcttcaagaggacaattcaaggcaatatagaatacagctgccctgccacgaatgaatgtgaaatcacaaagcgcagacgtaaatcctgccaggcttgccgcttcatgaagtgtttaaaagtgggcatgctgaaagaaggggtgcgtcttgacagagtacgtggaggtcggcagaagtacaagcgcaggatagatgcggagaacagcccatacctgaaccctcagctggttcagccagccaaaaagccatataacaagattgtctcacatttgttggtggctgaaccggagaagatctatgccatgcctgaccctactgtccccgacagtgacatcaaagccctcactacactgtgtgacttggccgaccgagagttggtggttatcattggatgggcgaagcatattccaggcttctccacgctgtccctggcggaccagatgagccttctgcagagtgcttggatggaaattttgatccttggtgtcgtataccggtctctttcgtttgaggatgaacttgtctatgcagacgattatataatggacgaagaccagtccaaattagcaggccttcttgatctaaataatgctatcctgcagctggtaaagaaatacaagagcatgaagctggaaaaagaagaatttgtcaccctcaaagctatagctcttgctaattcagactccatgcacatagaagatgttgaagccgttcagaagcttcaggatgtcttacatgaagcgctgcaggattatgaagctggccagcacatggaagaccctcgtcgagctggcaagatgctgatgacactgccactcctgaggcagacctctaccaaggccgtgcagcatttctacaacatcaaactagaaggcaaagtcccaatgcacaaactttttttggaaatgttggaggccaaggtctgactaaaagctccctgggccttcccatccttcatgttgaaaaagggaaaataaacccaagagtgatgtcgaagaaacttagagtttagttaacaacatcaaaaatcaacagactgcactgataatttagcagcaagactatgaagcagctttcagattcctccataggttcctgatgagtttctttctactttctccatcatcttctttcctctttcttcccacatttctctttctctttattttttctccttttcttctttcacctcccttatttctttgcttctttcattcctagttcccattctcctttattttcttcccgtctgcctgccttctttcttttctttacctactctcattcctctcttttctcatccttccccttttttctaaatttgaaatagctttagtttaaaaaaaaatcctcccttccccctttcctttccctttctttcctttttccctttccttttccctttcctttcctttcctcttgaccttctttccatctttctttttcttccttctgctgctgaacttttaaaagaggtctctaactgaagagagatggaagccagccctgccaaaggatggagatccataatatggatgccagtgaacttattgtgaaccatactgtccccaatgactaaggaatcaaagagagagaaccaacgttcctaaaagtacagtgcaacatatacaaattgactgagtgcagtattagatttcatgggagcagcctctaattagacaacttaagcaacgttgcatcggctgcttcttatcattgcttttccatctagatcagttacagccatttgattccttaattgttttttcaagtcttccaggtatttgttagtttagctactatgtaactttttcagggaatagtttaagctttattcattcatgcaatactaaagagaaataagaatactgcaattttgtgctggctttgaacaattacgaacaataatgaaggacaaatgaatcctgaaggaagatttttaaaaatgttttgtttcttcttacaaatggagatttttttgtaccagctttaccacttttcagccatttattaatatgggaatttaacttactcaagcaatagttgaagggaaggtgcatattatcacggatgcaatttatgttgtgtgccagtctggtcccaaacatcaatttcttaacatgagctccagtttacctaaatgttcactgacacaaaggatgagattacacctacagtgactctgagtagtcacatatataagcactgcacatgagatatagatccgtagaattgtcaggagtgcacctctctacttgggaggtacaattgccatatgatttctagctgccatggtggttaggaatgtgatactgcctgtttgcaaagtcacagaccttgcctcagaaggagctgtgagccagtattcatttaagaggcaataaggcaaatgccagaattaaaaaaaaaaatcatcaaagacagaaaatgcctgaccaaattctaaaacctaatccatataagtttattcatttaggaatgttcgtttaaattaatctgcagtttttaccaagagctaagccaatatatgtgcttttcaaccagtattgtcacagcatgaaagtcaagtcaggttccagactgttaagaggtgtaatctaatgaagaaatcaattagatgccccgaaatctacagtcgctgaataaccaataaacagtaacctccatcaaatgctataccaatggaccagtgttagtagctgctccctgtattatgtgaacagtcttattctatgtacacagatgtaattaaaattgtaatcctaacaaacaaaagaaatgtagttcagcttttcaatgtttcatgtttgctgtgcttttctgaattttatgttgcattcaaagactgttgtcttgttcttgtggtgtttggattcttgtggtgtgtgcttttagacacagggtagaattagagacaatattggatgtacaattcctcaggagactacagtagtatattctattccttaccagtaataaggttcttcctaataataattaagagattgaaactccaaacaagtattcattatgaacagatacacatcaaaatcataataatattttcaaaacaaggaataatttctctaatggtttattatagaataccaatgtatagcttagaaataaaactttgaatatttcaagaatatagataagtctaatttttaaatgctgtatatatggctttcactcaatcatctctcagatgttgttattaactcgctctgtgttgttgcaaaactttttggtgcagattcgtttccaaaactattgctactttgtgtgctttaaacaaaataccttgggttgatgaaacatcaacccagtgctaggaatactgtgtatctatcattagctatatgggactatattgtagattgtggtttctcagtagagaagtgactgtagtgtgattctagataaatcatcattagcaattcattcagatggtcaataacttgaaatttatagctgtgataggagttcagaaattggcacatccctttaaaaataacaacagaaaatacaactcctgggaaaaaaggtgctgattctataagattatttatatatgtaagtgtttaaaaagattattttccagaaagtttgtgcagggtttaagttgctactattcaactacactatatataaataaaatatatacaatatatacattgttttcactgtatcacattaaagtacttgggcttcagaagtaagagccaaccaactgaaaacctgagatggagatatgttcaaagaatgagatacaattttttagttttcagtttaagtaactctcagcattacaaaagagtaagtatctcacaaataggaaataaaactaaaacgtggatttaaaaagaactgcacgggctttagggtaaatgctcatcttaaacctcactagagggaagtcttctcaagtttcaagcaagaccatttacttaatgtgaagttttggaaagttataaaggtgtatgttttagccatatgattttaattttaattttgcttcttttaggttcgttcttatttaaagcaatatgattgtgtgactccttgtagttacacttgtgtttcaatcagatcagattgttgtatttattccactattttgcatttaaatgataacataaaagatataaaaaatttaaaactgctatttttcttatagaagagaaaatgggtgttggtgattgtattttaattatttaagcgtctctgtttacctgcctaggaaaacattttatggcagtcttatgtgcaaagatcgtaaaaggacaaaaaatttaaactgcttataataatccaggagttgcattatagccagtagtaaaaataataataataataataaaaccatgtctatagctgtagatgggcttcacatctgtaaagcaatcaattgtatatttttgtgatgtgtaccatactgtgtgctccagcaaatgtccatttgtgtaaatgtatttattttatattgtatatattgttaaatgcaaaaaggagatatgattctgtaactccaatcagttcagatgtgtaactcaaattattatgcctttcaggatgatggtagagcaatattaaacaagcttccacttttgactgct

SEQ ID NO: 3139 - protein, 435 aa, Homo sapiens; identical to SEQ ID NO: 171

SEQ ID NO: 3140 - DNA, 5319 bp, Homo sapiens
ggagggcgagggcgggctcctctggaggcggcgggctccaggccgggctccctaaacgggtcagcaattggagcgggaaggccggacagagacagggtcttgctttgtcacccaggctggagtgcagtgccacaatcagagcttactcctgccttgaactcctgggcttcagggatcctgctgcctcggccctccaagcagctgagactacagagctgacaatttactggttcatcaatgaaacaatattaaattatgaagatgtaaggaaaaaatcctacgctaacactgtcgcagtttgaaaggcttctctgcagaatgtcaaacaaagatcgacacattgattccagctgttcgtccttcatcaagacggaaccttccagcccagcctccctgacggacagcgtcaaccaccacagccctggtggctcttcagacgccagtgggagctacagttcaaccatgaatggccatcagaacggacttgactcgccacctctctacccttctgctcctatcctgggaggtagtgggcctgtcaggaaactgtatgatgactgctccagcaccattgttgaagatccccagaccaagtgtgaatacatgctcaactcgatgcccaagagactgtgtttagtgtgtggtgacatcgcttctgggtaccactatggggtagcatcatgtgaagcctgcaaggcattcttcaagaggacaattcaaggcaatatagaatacagctgccctgccacgaatgaatgtgaaatcacaaagcgcagacgtaaatcctgccaggcttgccgcttcatgaagtgtttaaaagtgggcatgctgaaagaaggggtgcgtcttgacagagtacgtggaggtcggcagaagtacaagcgcaggatagatgcggagaacagcccatacctgaaccctcagctggttcagccagccaaaaagccatataacaagattgtctcacatttgttggtggctgaaccggagaagatctatgccatgcctgaccctactgtccccgacagtgacatcaaagccctcactacactgtgtgacttggccgaccgagagttggtggttatcattggatgggcgaagcatattccaggcttctccacgctgtccctggcggaccagatgagccttctgcagagtgcttggatggaaattttgatccttggtgtcgtataccggtctctttcgtttgaggatgaacttgtctatgcagacgattatataatggacgaagaccagtccaaattagcaggccttcttgatctaaataatgctatcctgcagctggtaaagaaatacaagagcatgaagctggaaaaagaagaatttgtcaccctcaaagctatagctcttgctaattcagactccatgcacatagaagatgttgaagccgttcagaagcttcaggatgtcttacatgaagcgctgcaggattatgaagctggccagcacatggaagaccctcgtcgagctggcaagatgctgatgacactgccactcctgaggcagacctctaccaaggccgtgcagcatttctacaacatcaaactagaaggcaaagtcccaatgcacaaactttttttggaaatgttggaggccaaggtctgactaaaagctccctgggccttcccatccttcatgttgaaaaagggaaaataaacccaagagtgatgtcgaagaaacttagagtttagttaacaacatcaaaaatcaacagactgcactgataatttagcagcaagactatgaagcagctttcagattcctccataggttcctgatgagtttctttctactttctccatcatcttctttcctctttcttcccacatttctctttctctttattttttctccttttcttctttcacctcccttatttctttgcttctttcattcctagttcccattctcctttattttcttcccgtctgcctgccttctttcttttctttacctactctcattcctctcttttctcatccttccccttttttctaaatttgaaatagctttagtttaaaaaaaaatcctcccttccccctttcctttccctttctttcctttttccctttccttttccctttcctttcctttcctcttgaccttctttccatctttctttttcttccttctgctgctgaacttttaaaagaggtctctaactgaagagagatggaagccagccctgccaaaggatggagatccataatatggatgccagtgaacttattgtgaaccatactgtccccaatgactaaggaatcaaagagagagaaccaacgttcctaaaagtacagtgcaacatatacaaattgactgagtgcagtattagatttcatgggagcagcctctaattagacaacttaagcaacgttgcatcggctgcttcttatcattgcttttccatctagatcagttacagccatttgattccttaattgttttttcaagtcttccaggtatttgttagtttagctactatgtaactttttcagggaatagtttaagctttattcattcatgcaatactaaagagaaataagaatactgcaattttgtgctggctttgaacaattacgaacaataatgaaggacaaatgaatcctgaaggaagatttttaaaaatgttttgtttcttcttacaaatggagatttttttgtaccagctttaccacttttcagccatttattaatatgggaatttaacttactcaagcaatagttgaagggaaggtgcatattatcacggatgcaatttatgttgtgtgccagtctggtcccaaacatcaatttcttaacatgagctccagtttacctaaatgttcactgacacaaaggatgagattacacctacagtgactctgagtagtcacatatataagcactgcacatgagatatagatccgtagaattgtcaggagtgcacctctctacttgggaggtacaattgccatatgatttctagctgccatggtggttaggaatgtgatactgcctgtttgcaaagtcacagaccttgcctcagaaggagctgtgagccagtattcatttaagaggcaataaggcaaatgccagaattaaaaaaaaaaatcatcaaagacagaaaatgcctgaccaaattctaaaacctaatccatataagtttattcatttaggaatgttcgtttaaattaatctgcagtttttaccaagagctaagccaatatatgtgcttttcaaccagtattgtcacagcatgaaagtcaagtcaggttccagactgttaagaggtgtaatctaatgaagaaatcaattagatgccccgaaatctacagtcgctgaataaccaataaacagtaacctccatcaaatgctataccaatggaccagtgttagtagctgctccctgtattatgtgaacagtcttattctatgtacacagatgtaattaaaattgtaatcctaacaaacaaaagaaatgtagttcagcttttcaatgtttcatgtttgctgtgcttttctgaattttatgttgcattcaaagactgttgtcttgttcttgtggtgtttggattcttgtggtgtgtgcttttagacacagggtagaattagagacaatattggatgtacaattcctcaggagactacagtagtatattctattccttaccagtaataaggttcttcctaataataattaagagattgaaactccaaacaagtattcattatgaacagatacacatcaaaatcataataatattttcaaaacaaggaataatttctctaatggtttattatagaataccaatgtatagcttagaaataaaactttgaatatttcaagaatatagataagtctaatttttaaatgctgtatatatggctttcactcaatcatctctcagatgttgttattaactcgctctgtgttgttgcaaaactttttggtgcagattcgtttccaaaactattgctactttgtgtgctttaaacaaaataccttgggttgatgaaacatcaacccagtgctaggaatactgtgtatctatcattagctatatgggactatattgtagattgtggtttctcagtagagaagtgactgtagtgtgattctagataaatcatcattagcaattcattcagatggtcaataacttgaaatttatagctgtgataggagttcagaaattggcacatccctttaaaaataacaacagaaaatacaactcctgggaaaaaaggtgctgattctataagattatttatatatgtaagtgtttaaaaagattattttccagaaagtttgtgcagggtttaagttgctactattcaactacactatatataaataaaatatatacaatatatacattgttttcactgtatcacattaaagtacttgggcttcagaagtaagagccaaccaactgaaaacctgagatggagatatgttcaaagaatgagatacaattttttagttttcagtttaagtaactctcagcattacaaaagagtaagtatctcacaaataggaaataaaactaaaacgtggatttaaaaagaactgcacgggctttagggtaaatgctcatcttaaacctcactagagggaagtcttctcaagtttcaagcaagaccatttacttaatgtgaagttttggaaagttataaaggtgtatgttttagccatatgattttaattttaattttgcttcttttaggttcgttcttatttaaagcaatatgattgtgtgactccttgtagttacacttgtgtttcaatcagatcagattgttgtatttattccactattttgcatttaaatgataacataaaagatataaaaaatttaaaactgctatttttcttatagaagagaaaatgggtgttggtgattgtattttaattatttaagcgtctctgtttacctgcctaggaaaacattttatggcagtcttatgtgcaaagatcgtaaaaggacaaaaaatttaaactgcttataataatccaggagttgcattatagccagtagtaaaaataataataataataataaaaccatgtctatagctgtagatgggcttcacatctgtaaagcaatcaattgtatatttttgtgatgtgtaccatactgtgtgctccagcaaatgtccatttgtgtaaatgtatttattttatattgtatatattgttaaatgcaaaaaggagatatgattctgtaactccaatcagttcagatgtgtaactcaaattattatgcctttcaggatgatggtagagcaatattaaacaagcttccacttttgactgct

SEQ ID NO: 3141 - protein, 435 aa, Homo sapiens; identical to SEQ ID NO: 171

SEQ ID NO: 3142 - DNA, 550 bp, Homo sapiens
gttcctgcatgggggttttgtagactttcatagccaaagaaaccggcttcggcttctttaaaatccccgacgactcacctgattaacctgctgcagttctgaccctgccaagagacagggtcttgctttgtcacccaggctggagtgcagtgccacaatcagagcttactcctgccttgaactcctgggcttcagggatcctgctgcctcggccctccaagcagctgagactacagagctgacaatttactggttcatcaatgaaacaatattaaattatgaagatgtaaggaaaaaatcctacgctaacactgtcgcagtttgaaagctttaaaaagttgaagtctattggaaaccttcttataagaaaccttcctagtcagagaattcaactttcttcttttcttcattcatgaaaatgcagatccactgagaaagggaataagggtgaaaatatatatgggaaaaattcttccaaaatggagcctgacattgacccctagagcttaaagcctaaccggacagactctccagagaggagctttctgtt

SEQ ID NO: 3143 - protein, 80 aa, Homo sapiens
LTCCSSDPAKRQGLALSPRLECSATIRAYSCLELLGFRDPAASALQAAETTELTIYWFINETILNYEDVRKKSYANTVAV

SEQ ID NO: 3144 - DNA, 519 bp, Homo sapiens
acacaaccagggagcaaatcaaccagcacatttaaagcagcctttttaaccctgagactttccaagatctcctcttcacacaggaagtttccttctctgttgtcagatttagcactgtgctcttgtcatcagatccgagccaggctccctgctgcacagtagagaggcttccttaagacatttgtccttgaaactgcaccaaactcttggaagaacccagaacgtagctgacaatttactggttcatcaatgaaacaatattaaattatgaagatgtaaggaaaaaatcctacgctaacactgtcgcagtttgaaagctttaaaaagttgaagtctattggaaaccttcttataagaaaccttcctagtcagagaattcaactttcttcttttcttcattcatgaaaatgcagatccactgagaaagggaataagggtgaaaatatatatgggaaaaattcttccaaaatggagcctgacattgacccctagagcttaaagcctaaccggacagactct

SEQ ID NO: 3145 - protein, 46 aa, Homo sapiens
HCALVIRSEPGSLLHSREASLRHLSLKLHQTLGRTQNVADNLLVHQ

SEQ ID NO: 3146 - DNA, 531 bp, Homo sapiens
ccaaccaacccaagtaggtatctccacaaacttggcaggtcccactctgtgcttccatggagaagggcggccaatgtgattctgggcaaagtgtggtgacttgtggattttcactgaatccaggctggggcctggagggaatcctgtgccttcttgtgctgtagcttcctggagtccaccagacactatggtgtcttccctagagagttgcctgctgcttctgtgatgtggccgactggcactctgtagagcagacggaattcccttctgagagagctgacaatttactggttcatcaatgaaacaatattaaattatgaagatgtaaggaaaaaatcctacgctaacactgtcgcagtttgaaagtttttggagtctactaatctccaaaccctgctcctgaccctgaagctacagtgatgacgaggagacagagccccagcactcacagacctcaatgtctagtggaggtgttccgttattacctttaaaaagttgaagtctattggaaaccttcttataagaaacctt

SEQ ID NO: 3147 - protein, 35 aa, Homo sapiens
MEKGGQCDSGQSVVTCGFSLNPGWGLEGILCLLVL

SEQ ID NO: 3148 - DNA, 462 bp, Homo sapiens
aaaggaggcgtgtgtaagatgtgcaatgttcctgcatgggggttttgtagactttcatagccaaagaaaccggcttcggcttctttaaaatccccgacgactcacctgattaacctgctgcagttctgaccctgccaagagctgacaatttactggttcatcaatgaaacaatattaaattatgaagatgtaaggaaaaaatcctacgctaacactgtcgcagtttgaaaggtaagctgctccctacaagattaggagatattaacattcttttaaaatctacataacataatgccacgtgatacacattagagggttaagtgtcctcttgacatctttgactactattgtggtgttggctagtatttcatagtaaggtataatgttttccgcattctgccttttaaaatgtaaaaacatcattttaaatgcctttaaagtgtttttttttttttttttttt

SEQ ID NO: 3149 - protein, 32 aa, Homo sapiens
PCQELTIYWFINETILNYEDVRKKSYANTVAV

SEQ ID NO: 3150 - DNA, 723 bp, Homo sapiens
agagctctatgttaagctaaaggagaaacaccagggatttcaccctcttcagagtgctgtgaagtgggaaataagatcatcaactgaacataaggatgggtgaggcttaaggagagagaagcgctgaagtgggaaagtgaaggcactacggaaatgcaatttctgattagcgttaaggggccacctggggttcaacaacaagcagacttaagaacaaaagtgaagtggtggcaaagtgctggaccagatgttagaagtctccaatttgctctcgacaacaacaatccacaagtaaccctgagaaaagtcatctctgtttccccactggtaaataatgaacatctcccaaggttaattttcactggccctaaggggaggtggtggaggaccactgagtcaaaagtgatccaaaagctcataccaggagaagatttttcaattcagaacttgcaactgatgaccggtgtaaaagtttggtgaggcaaaaggatctaattatccagacgtatccacagagagaggaaccagatgaaatgcggaaagcacggttcaccttcaagagaaagaagtaggactctggggttttaagccgaggcatgaaatgtaccgattaatagcgtcattttgtaaccacaggtctcaggagttttgggaaggttagtatgagcttgtcagcattgcttattaataacagtgagattgctgctttgcacctgatctcag

SEQ ID NO: 3151 - protein, 108 aa, Homo sapiens
MQFLISVKGPPGVQQQADLRTKVKWWQSAGPDVRSLQFALDNNNPQVTLRKVISVSPLVNNEHLPRLIFTGPKGRWWRTTESKVIQKLIPGEDFSIQNLQLMTGVKVW

SEQ ID NO: 3152 - DNA, 1902 bp, Homo sapiens
cttcaatgttcttaactatgtcatcttcttggactgctgttactgcgcagcacccaagccccagggagacatggaagcaggtgattccttcaacacccagaatgagccagaagacatgatgaaaaaagagaaaaagtctgaagctctgaatatcagaggtgtacttttgcatgtgatgggagatgccctggggtccgtggttgtggtcatcacggccatcatattctatgtgcttcccctgaagagtgaggacccgtgtaactggcagtgttacattgaccccagcctgactgtcctcatggtcatcatcattttgtcatctgccttcccgcttatcaaggagaccgctgccattctgctacagatggtcccaaaaggagtcaacatggaagagctgatctggtaacaaatagttaatggactgacactggtatgcagaccaaggctttgagtggcactgcgtgcatggaaaagagaagagaatcaaggacggagccctggggcactctgacctttggagatctggcagctgggggaggagccaacaaaaaagctggaggaagagcagccatgagtccagcctgaggaatgcctgctcaactggtttgatcattttgactgaaacaagcggtcatttcatgtcctatgggatgcttgctgaggacattaaacacagaaacaagtagaacatgaattcagagtgaaggagatgttaaagggatggagaaatggagaaagagagttgaaataactctcctattaccatcaagcaaatcaaacacagaatgggaccagcatgccacattccctctgtgaagccttggagtgcaactgcattagctcaatggtgcatttcacaacgtcacaacttcatctcagatcatcacaaattgtccatattgaaacctgggtgcaatgagaataatcacttaaattttctctggtcccacttttctgctttacagtggtagttgagaatgtcatacccctaaggacatggggaagatgtgtccttgactgattgatccctgtgacacagtctgacactttgcttttgttcagcaattctcaaagcactggattgcaatgatgccctgttgacagcactgttcaaaagtcgacctgttgttgctggaacctccaagaatacagtgtttgatctcagccaggatcctgtcttggaagaggagagggaatcccaaaaactacttgtgaagaagatcccattgttcaatcaaatcctcgtcactgtagcaatccatgcatgccattgcagttggcattctgacacgtgtacacagtgttttcatctcttccctggagttgcagccaaagcctgagattcctttcgacacgaccctgaaaaaactctgggtttgtgctcccctctgctctgcaataacataccagctctgtgatgtggccaatgtttacctagttggtgggaggactttttaatatcaaaaggaaaacatttcttctgcattccacatagaatctgccaaggacattcccaaagatctacttacttattagagaaaccaagagagtcccagcagcacagagggatcgagaagactgagaacagaactggagaacaaaagtgaagtggtggcaaagtgctggaccagatgttagaagtctccaatttgctctcgacaacaacaatccacaagtaaccctgagaaaagtcatctctgtttccccactggtaaataatggtaagaaaaatagtgcctagtggggcttacgtagaggactgggaagctgaactgtgaaaaatgattccaaggtttctggtcaccatggctactactcttttgtacccagttctttgctcctcaaggagccttgttttctatacttgtgaatatttcaaccaactaataaagatttaatggc

SEQ ID NO: 3153 - protein, 111 aa, Homo sapiens
MEAGDSFNTQNEPEDMMKKEKKSEALNIRGVLLHVMGDALGSVVVVITAIIFYVLPLKSEDPCNWQCYIDPSLTVLMVIIILSSAFPLIKETAAILLQMVPKGVNMEELIW

SEQ ID NO: 3154 - DNA, 1452 bp, Homo sapiens
gcgcacacccgcgcacccgcggccgcaggagggcccagcgacgccgccgcgccagctcccagggcccggccccccccggcgctcacgctctcggggcggactcccggccctccgcgccctctcgcgcggcgatggccccactcggatacttcttactcctctgcagcctgaagcaggctctgggcagctacccgatctggtggtcgctggctgttgggccacagtattcctccctgggctcgcagcccatcctgtgtgccagcatcccgggcctggtccccaagcagctccgcttctgcaggaactacgtggagatcatgcccagcgtggccgagggcatcaagattggcatccaggagtgccagcaccagttccgcggccgccggtggaactgcaccaccgtccacgacagcctggccatcttcgggcccgtgctggacaaagctaccagggagtcggcctttgtccacgccattgcctcagccggtgtggcctttgcagtgacacgctcatgtgcagaaggcacggccgccatctgtggctgcagcagccgccaccagggctcaccaggcaagggctggaagtggggtggctgtagcgaggacatcgagtttggtgggatggtgtctcgggagttcgccgacgcccgggagaaccggccagatgcccgctcagccatgaaccgccacaacaacgaggctgggcgccaggccatcgccagccacatgcacctcaagtgcaagtgccacgggctgtcgggcagctgcgaggtgaagacatgctggtggtcgcaacccgacttccgcgccatcggtgacttcctcaaggacaagtacgacagcgcctcggagatggtggtggagaagcaccgggagtcccgcggctgggtggagaccctgcggccgcgctacacctacttcaaggtgcccacggagcgcgacctggtctactacgaggcctcgcccaacttctgcgagcccaaccctgagacgggctccttcggcacgcgcgaccgcacctgcaacgtcagctcgcacggcatcgacggctgcgacctgctgtgctgcggccgcggccacaacgcgcgagcggagcggcgccgggagaagtgccgctgcgtgttccactggtgctgctacgtcagctgccaggagtgcacgcgcgtctacgacgtgcacacctgcaagaatcccggctccagagcaggaaattcagcccaccagccacctcatccccaaccccctgtaaggttccatccacccctgcgtcgagctgggaaggttccatgaagcgagtcgggtccccaacccgtgcccctgggatccgagggcccctctccaagcgcctggctttggaatgctccaggcgcgccgacgcctgtgccaccccttcctcagcctggggtttgaccacccacctgaccaggggccctacctggggaaagcctgaagg

SEQ ID NO: 3155 - protein, 385 aa, Homo sapiens
MAPLGYFLLLCSLKQALGSYPIWWSLAVGPQYSSLGSQPILCASIPGLVPKQLRFCRNYVEIMPSVAEGIKIGIQECQHQFRGRRWNCTTVHDSLAIFGPVLDKATRESAFVHAIASAGVAFAVTRSCAEGTAAICGCSSRHQGSPGKGWKWGGCSEDIEFGGMVSREFADARENRPDARSAMNRHNNEAGRQAIASHMHLKCKCHGLSGSCEVKTCWWSQPDFRAIGDFLKDKYDSASEMVVEKHRESRGWVETLRPRYTYFKVPTERDLVYYEASPNFCEPNPETGSFGTRDRTCNVSSHGIDGCDLLCCGRGHNARAERRREKCRCVFHWCCYVSCQECTRVYDVHTCKNPGSRAGNSAHQPPHPQPPVRFHPPLRRAGKVP

SEQ ID NO: 3156 - DNA, 2994 bp, Homo sapiens
gcgcacacccgcgcacccgcggccgcaggagggcccagcgacgccgccgcgccagctcccagggcccggccccccccggcgctcacgctctcggggcggactcccggccctccgcgccctctcgcgcggcgatggccccactcggatacttcttactcctctgcagcctgaagcaggctctgggcagctacccgatctggtggtcgctggctgttgggccacagtattcctccctgggctcgcagcccatcctgtgtgccagcatcccgggcctggtccccaagcagctccgcttctgcaggaactacgtggagatcatgcccagcgtggccgagggcatcaagattggcatccaggagtgccagcaccagttccgcggccgccggtggaactgcaccaccgtccacgacagcctggccatcttcgggcccgtgctggacaaagctaccagggagtcggcctttgtccacgccattgcctcagccggtgtggcctttgcagtgacacgctcatgtgcagaaggcacggccgccatctgtggctgcagcagccgccaccagggctcaccaggcaagggctggaagtggggtggctgtagcgaggacatcgagtttggtgggatggtgtctcgggagttcgccgacgcccgggagaaccggccagatgcccgctcagccatgaaccgccacaacaacgaggctgggcgccaggccatcgccagccacatgcacctcaagtgcaagtgccacgggctgtcgggcagctgcgaggtgaagacatgctggtggtcgcaacccgacttccgcgccatcggtgacttcctcaaggacaagtacgacagcgcctcggagatggtggtggagaagcaccgggagtcccgcggctgggtggagaccctgcggccgcgctacacctacttcaaggtgcccacggagcgcgacctggtctactacgaggcctcgcccaacttctgcgagcccaaccctgagacgggctccttcggcacgcgcgaccgcacctgcaacgtcagctcgcacggcatcgacggctgcgacctgctgtgctgcggccgcggccacaacgcgcgagcggagcggcgccgggagaagtgccgctgcgtgttccactggtgctgctacgtcagctgccaggagtgcacgcgcgtctacgacgtgcacacctgcaagtaggcaccggccgcggctccccctggacggggcgggccctgcctgagggtgggcttttccctgggtggagcaggactcccacctaaacggggcagtactcctccctgggggcgggactcctccctgggggtggggctcctacctgggggcagaactcctacctgaaggcagggctcctccctggagctagtgtctcctctctggtggctgggctgctcctgaatgaggcggagctccaggatggggaggggctctgcgttggcttctccctggggacggggctcccctggacagaggcggggctacagattgggcggggcttctcttgggtgggacagggcttctcctgcgggggcgaggcccctcccagtaagggcgtggctctgggtgggcggggcactaggtaggcttctacctgcaggcggggctcctcctgaaggaggcggggctctaggatggggcacggctctggggtaggctgctccctgagggcggagcgcctccttaggagtggggttttatggtggatgaggcttcttcctggatggggcagagcttctcctgaccagggcaaggccccttccacgggggctgtggctctgggtgggcgtggcctgcataggctccttcctgtgggtggggcttctctgggaccaggctccaatggggcggggcttctctccgcgggtgggactcttccctgggaaccgccctcctgattaaggcgtggcttctgcaggaatcccggctccagagcaggaaattcagcccaccagccacctcatccccaaccccctgtaaggttccatccacccctgcgtcgagctgggaaggttccatgaagcgagtcgggtccccaacccgtgcccctgggatccgagggcccctctccaagcgcctggctttggaatgctccaggcgcgccgacgcctgtgccaccccttcctcagcctggggtttgaccacccacctgaccaggggccctacctggggaaagcctgaagggcctcccagcccccaaccccaagaccaagcttagtcctgggagaggacagggacttcgcagaggcaagcgaccgaggccctcccaaagaggcccgccctgcccgggctcccacaccgtcaggtactcctgccagggaactggcctgctgcgccccaggccccgcccgtctctgctctgctcagctgcgcccccttctttgcagctgcccagcccctcctccctgccctcgggtctccccacctgcactccatccagctacaggagagatagaagcctctcgtcccgtccctccctttcctccgcctgtccacagccccttaagggaaaggtaggaagagaggtccagccccccaggctgcccagagctgctggtctcatttgggggcgttcgggaggtttggggggcatcaaccccccgactgtgctgctcgcgaaggtcccacagccctgagatgggccggcccccttcctggcccctcatggcgggactggagaaatggtccgctttcctggagccaatggcccggcccctcctgactcatccgcctggcccgggaatgaatggggaggccgctgaacccacccggcccatatccctggttgcctcatggccagcgcccctcagcctctgccactgtgaaccggctcccaccctcaaggtgcggggagaagaagcggccaggcggggcgccccaagagcccaaaagagggcacaccgccatcctctgcctcaaattctgcgtttttggttttaatgttatatctgatgctgctatatccactgtccaacggagttagacg

SEQ ID NO: 3157 - protein, 352 aa, Homo sapiens; identical to SEQ ID NO: 175

SEQ ID NO: 3158 - DNA, 984 bp, Homo sapiens
agcgcgcctgcgtcgcgggcgcacggtgggcggagttcccggcgtctccgccccttacccggcgtgccccgcgcccggaggcgctgacgtggccgccgtcagagccgccatcttgtgggagcaaaaccaacgcctggctcggagcagcagcctctgaggtgtccctggccagtgtccttccacctgtccacaagcatggggaacatcttcgccaacctcttcaagggcctttttggcaaaaaagaaatgcgcatcctcatggtgggcctggatgctgcagggaagaccacgatcctctacaagcttaagctgggtgagatcgtgaccaccattcccaccataggcttcaacgtggaaaccgtggagtacaagaacatcagcttcactgtgtgggacgtgggtggccaggacaagatccggcccctgtggcgccactacttccagaacacacaaggcctgatcttcgtggtggacagcaatgacagagagcgtgtgaacgaggcccgtgaggagctcatgaggatgctggccgaggacgagctccgggatgctgtcctcctggtgttcgccaacaagcaggacctccccaacgccatgaatgcggccgagatcacagacaagctggggctgcactcactacgccacaggaactggtacattcaggccacctgcgccaccagcggcgacgggctctatgaaggactggactggctgtccaatcagctccggaaccagaagtgaacgcgacccccctccctctcactcctcttgccctctgctttactctcatgtggcaaacgtgcggctcgtggtgtgagtgccagaagctgcctccgtggtttggtcaccgtgtgcatcgcaccgtgctgtaaatgtggcagacgcagcctgcggccaggctttttatttaatgtaaatagtttttgtttccaatgaggcagtttctggtactcctatgcaatattactcagctttttttattgt

SEQ ID NO: 3159 - protein, 181 aa, Homo sapiens; identical to SEQ ID NO: 177

SEQ ID NO: 3160 - DNA, 984 bp, Homo sapiens; identical to SEQ ID NO: 3158

SEQ ID NO: 3161 - protein, 181 aa, Homo sapiens; identical to SEQ ID NO: 177

SEQ ID NO: 3162 - DNA, 1514 bp, Homo sapiens
agcgcgcctgcgtcgcgggcgcacggtgggcggagttcccggcgtctccgccccttacccggcgtgccccgcgcccggaggcgctgacgtggccgccgtcagagccgccatcttgtgggagcaaaaccaacgcctggctcggagcagcagcctctgaggtgtccctggccagtgtccttccacctgtccacaagcatggggaacatcttcgccaacctcttcaagggcctttttggcaaaaaagaaatgcgcatcctcatggtgggcctggatgctgcagggaagaccacgatcctctacaagcttaagctgggtgagatcgtgaccaccattcccaccataggcttcaacgtggaaaccgtggagtacaagaacatcagcttcactgtgtgggacgtgggtggccaggacaagatccggcccctgtggcgccactacttccagaacacacaaggcctgatcttcgtggtggacagcaatgacagagagcgtgtgaacgaggcccgtgaggagctcatgaggatgctggccgaggacgagctccgggatgctgtcctcctggtgttcgccaacaagcaggacctccccaacgccatgaatgcggccgagatcacagacaagctggggctgcactcactacgccacaggaactggtacattcagtgctgagaggggatgtaggcccatgggcacctggcctccaggagtcgctgtgttgggagagccggccacgcccttggctttagagctgtgttgaaatccattttggtggttggtttttaacccaaactcagtgcattttttaaaatagttaagaatccaagtcgagaacacttgaacacacagaagggagaccccgcctagcatagatttgcagttacggcctggatgccagtcgccagcccagctgttcccctcgggaacatgaggtggtggtggcgcagcagactgcgatcaattctgcatggtcacagtagagatccccgcaactcgcttgtccttgggtcaccctgcattccatagccatgtgcttgtccctgtgctcccacggttcccaggggccaggctgggagcccacagccaccccactatgccgcaggccgccctacccaccttcaggcagcctatgggacgcagggccccatctgtccctcggtcgccgtgtggccagagtgggtccgtcgtccccaacactcgtgctcgctcagacactttggcaggatgtctggggcctcaccagcaggagcgcgtgcaagccgggcaggcggtccacctagacccacagcccctcgggagcaccccacctctgtgtgtgatgtagctttctctccctcagcctgcaagggtccgatttgccatcgaaaaagacaacctctacttttttcttttgtattttgataaacactgaagctggagctgttaaatttatcttggggaaacctcagaactggtctatttggtgtcgtggaacctcttactgctttcaatacacgattagtaatcaactgttttgt

SEQ ID NO: 3163 - protein, 157 aa, Homo sapiens
MGNIFANLFKGLFGKKEMRILMVGLDAAGKTTILYKLKLGEIVTTIPTIGFNVETVEYKNISFTVWDVGGQDKIRPLWRHYFQNTQGLIFVVDSNDRERVNEAREELMRMLAEDELRDAVLLVFANKQDLPNAMNAAEITDKLGLHSLRHRNWYIQC

SEQ ID NO: 3164 - DNA, 1862 bp, Homo sapiens
agcgcgcctgcgtcgcgggcgcacggtgggcggagttcccggcgtctccgccccttacccggcgtgccccgcgcccggaggcgctgacgtggccgccgtcagagccgccatcttgtgggagcaaaaccaacgcctggctcggagcagcagcctctgaggtgtccctggccagtgtccttccacctgtccacaagcatggggaacatcttcgccaacctcttcaagggcctttttggcaaaaaagaaatgcgcatcctcatggtgggcctggatgctgcagggaagaccacgatcctctacaagcttaagctgggtgagatcgtgaccaccattcccaccataggcttcaacgtggaaaccgtggagtacaagaacatcagcttcactgtgtgggacgtgggtggccaggacaagatccggcccctgtggcgccactacttccagaacacacaaggcctgatcttcgtggtggacagcaatgacagagagcgtgtgaacgaggcccgtgaggagctcatgaggatgctggccgaggacgagctccgggatgctgtcctcctggtgttcgccaacaagcaggacctccccaacgccatgaatgcggccgagatcacagacaagctggggctgcactcactacgccacaggaactggtacattcaggccacctgcgccaccagcggcgacgggctctatgaaggactggactggctgtccaatcagctccggaaccagaagtgaacgcgacccccctccctctcactcctcttgccctctgctttactctcatgtggcaaacgtgcggctcgtggtgtgagtgccagaagctgcctccgtggtttggtcaccgtgtgcatcgcaccgtgctgtaaatgtggcagacgcagcctgcggccaggctttttatttaatgtaaatagtttttgtttccaatgaggcagtttctggtactcctatgcaatattactcagctttttttattgtaaaaagaaaaatcaactcactgttcagtgctgagaggggatgtaggcccatgggcacctggcctccaggagtcgctgtgttgggagagccggccacgcccttggctttagagctgtgttgaaatccattttggtggttggtttttaacccaaactcagtgcattttttaaaatagttaagaatccaagtcgagaacacttgaacacacagaagggagaccccgcctagcatagatttgcagttacggcctggatgccagtcgccagcccagctgttcccctcgggaacatgaggtggtggtggcgcagcagactgcgatcaattctgcatggtcacagtagagatccccgcaactcgcttgtccttgggtcaccctgcattccatagccatgtgcttgtccctgtgctcccacggttcccaggggccaggctgggagcccacagccaccccactatgccgcaggccgccctacccaccttcaggcagcctatgggacgcagggccccatctgtccctcggtcgccgtgtggccagagtgggtccgtcgtccccaacactcgtgctcgctcagacactttggcaggatgtctggggcctcaccagcaggagcgcgtgcaagccgggcaggcggtccacctagacccacagcccctcgggagcaccccacctctgtgtgtgatgtagctttctctccctcagcctgcaagggtccgatttgccatcgaaaaagacaacctctacttttttcttttgtattttgataaacactgaagctggagctgttaaatttatcttggggaaacctcagaactggtctatttggtgtcgtggaacctcttactgctttcaatacacgattagtaatcaactgttttgt

SEQ ID NO: 3165 - protein, 181 aa, Homo sapiens; identical to SEQ ID NO: 177

SEQ ID NO: 3166 - DNA, 662 bp, Homo sapiens
agcgcgcctgcgtcgcgggcgcacggtgggcggagttcccggcgtctccgccccttacccggcgtgccccgcgcccggaggcgctgacgtggccgccgtcagagccgccatcttgtgggagcaaaaccaacgcctggctcggagcagcagcctctgaggtgtccctggccagtgtccttccacctgtccacaagcatggggaacatcttcgccaacctcttcaagggcctttttggcaaaaaagaaatgcgcatcctcatggtgggcctggatgctgcagggaagaccacgatcctctacaagcttaagctgggtgagatcgtgaccaccattcccaccataggcttcaacgtggaaaccgtggagtacaagaacatcagcttcactgtgtgggacgtgggtggccaggacaagatccggcccctgtggcgccactacttccagaacacacaaggcctgatcttcgtggtggacagcaatgacagagagcgtgtgaacgaggcccgtgaggagctcatgaggatgctggccgaggacgagctccgggatgctgtcctcctggtgttcgccaacaagcaggacctccccaacgccatgaatgcggccgagatcacagacaagcactgtaattatagctattagaataaaatctcttaactatt

SEQ ID NO: 3167 - protein, 148 aa, Homo sapiens
MGNIFANLFKGLFGKKEMRILMVGLDAAGKTTILYKLKLGEIVTTIPTIGFNVETVEYKNISFTVWDVGGQDKIRPLWRHYFQNTQGLIFVVDSNDRERVNEAREELMRMLAEDELRDAVLLVFANKQDLPNAMNAAEITDKHCNYSY

SEQ ID NO: 3168 - DNA, 1592 bp, Homo sapiens
agcgcgcctgcgtcgcgggcgcacggtgggcggagttcccggcgtctccgccccttacccggcgtgccccgcgcccggaggcgctgacgtggccgccgtcagagccgccatcttgtgggagcaaaaccaacgcctggctcggagcagcagcctctgaggtgtccctggccagtgtccttccacctgtccacaagcatggggaacatcttcgccaacctcttcaagggcctttttggcaaaaaagaaatgcgcatcctcatggtgggcctggatgctgcagggaagaccacgatcctctacaagcttaagctgggtgagatcgtgaccaccattcccaccataggcttcaacgtggaaaccgtggagtacaagaacatcagcttcactgtgtgggacgtgggtggccaggacaagatccggcccctgtggcgccactacttccagaacacacaaggcctgatcttcgtggtggacagcaatgacagagagcgtgtgaacgaggcccgtgaggagctcatgaggatgctggccgaggacgagctccgggatgctgtcctcctggtgttcgccaacaagcaggacctccccaacgccatgaatgcggccgagatcacagacaagctggggctgcactcactacgccacaggaactggtacattcagtgctgagaggggatgtaggcccatgggcacctggcctccaggagtcgctgtgttgggagagccggccacgcccttggctttagagctgtgttgaaatccattttggtggttggtttttaacccaaactcagtgcattttttaaaatagttaagaatccaagtcgagaacacttgaacacacagaagggagaccccgcctagcatagatttgcagttacggcctggatgccagtcgccagcccagctgttcccctcgggaacatgaggtggtggtggcgcagcagactgcgatcaattctgcatggtcacagtagagatccccgcaactcgcttgtccttgggtcaccctgcattccatagccatgtgcttgtccctgtgctcccacggttcccaggggccaggctgggagcccacagccaccccactatgccgcaggccgccctacccaccttcaggcagcctatgggacgcagggccccatctgtccctcggtcgccgtgtggccagagtgggtccgtcgtccccaacactcgtgctcgctcagacactttggcaggatgtctggggcctcaccagcaggagcgcgtgcaagccgggcaggcggtccacctagacccacagcccctcgggagcaccccacctctgtgtgtgatgtagctttctctccctcagcctgcaagggtccgatttgccatcgaaaaagacaacctctacttttttcttttgtattttgataaacactgaagctggagctgttaaatttatcttggggaaacctcagaactggtctatttggtgtcgtggaacctcttactgctttcaatacacgattagtaatcaactgttttgtatacttgttttcagttttcatttcgacaaacaagcactgtaattatagctattagaataaaatctcttaactatttca

SEQ ID NO: 3169 - protein, 157 aa, Homo sapiens; identical to SEQ ID NO: 3163

SEQ ID NO: 3170 - DNA, 1940 bp, Homo sapiens
agcgcgcctgcgtcgcgggcgcacggtgggcggagttcccggcgtctccgccccttacccggcgtgccccgcgcccggaggcgctgacgtggccgccgtcagagccgccatcttgtgggagcaaaaccaacgcctggctcggagcagcagcctctgaggtgtccctggccagtgtccttccacctgtccacaagcatggggaacatcttcgccaacctcttcaagggcctttttggcaaaaaagaaatgcgcatcctcatggtgggcctggatgctgcagggaagaccacgatcctctacaagcttaagctgggtgagatcgtgaccaccattcccaccataggcttcaacgtggaaaccgtggagtacaagaacatcagcttcactgtgtgggacgtgggtggccaggacaagatccggcccctgtggcgccactacttccagaacacacaaggcctgatcttcgtggtggacagcaatgacagagagcgtgtgaacgaggcccgtgaggagctcatgaggatgctggccgaggacgagctccgggatgctgtcctcctggtgttcgccaacaagcaggacctccccaacgccatgaatgcggccgagatcacagacaagctggggctgcactcactacgccacaggaactggtacattcaggccacctgcgccaccagcggcgacgggctctatgaaggactggactggctgtccaatcagctccggaaccagaagtgaacgcgacccccctccctctcactcctcttgccctctgctttactctcatgtggcaaacgtgcggctcgtggtgtgagtgccagaagctgcctccgtggtttggtcaccgtgtgcatcgcaccgtgctgtaaatgtggcagacgcagcctgcggccaggctttttatttaatgtaaatagtttttgtttccaatgaggcagtttctggtactcctatgcaatattactcagctttttttattgtaaaaagaaaaatcaactcactgttcagtgctgagaggggatgtaggcccatgggcacctggcctccaggagtcgctgtgttgggagagccggccacgcccttggctttagagctgtgttgaaatccattttggtggttggtttttaacccaaactcagtgcattttttaaaatagttaagaatccaagtcgagaacacttgaacacacagaagggagaccccgcctagcatagatttgcagttacggcctggatgccagtcgccagcccagctgttcccctcgggaacatgaggtggtggtggcgcagcagactgcgatcaattctgcatggtcacagtagagatccccgcaactcgcttgtccttgggtcaccctgcattccatagccatgtgcttgtccctgtgctcccacggttcccaggggccaggctgggagcccacagccaccccactatgccgcaggccgccctacccaccttcaggcagcctatgggacgcagggccccatctgtccctcggtcgccgtgtggccagagtgggtccgtcgtccccaacactcgtgctcgctcagacactttggcaggatgtctggggcctcaccagcaggagcgcgtgcaagccgggcaggcggtccacctagacccacagcccctcgggagcaccccacctctgtgtgtgatgtagctttctctccctcagcctgcaagggtccgatttgccatcgaaaaagacaacctctacttttttcttttgtattttgataaacactgaagctggagctgttaaatttatcttggggaaacctcagaactggtctatttggtgtcgtggaacctcttactgctttcaatacacgattagtaatcaactgttttgtatacttgttttcagttttcatttcgacaaacaagcactgtaattatagctattagaataaaatctcttaactatttca

SEQ ID NO: 3171 - protein, 181 aa, Homo sapiens; identical to SEQ ID NO: 177

SEQ ID NO: 3172 - DNA, 1973 bp, Homo sapiens
ccttacccggcgtgccccgcgcccggaggcgctgacgtggccgccgtcagagccgccatcttgtgggagcaaaaccaacgcctggctcggagcagcagcctctgaggtgagggcgaggggcgcgggccggtgtgggccgcagagacgttggagccggcgggggctggggactggcctcggggcgacttgaggtgtccctggccagtgtccttccacctgtccacaagcatggggaacatcttcgccaacctcttcaagggcctttttggcaaaaaagaaatgcgcatcctcatggtgggcctggatgctgcagggaagaccacgatcctctacaagcttaagctgggtgagatcgtgaccaccattcccaccataggcttcaacgtggaaaccgtggagtacaagaacatcagcttcactgtgtgggacgtgggtggccaggacaagatccggcccctgtggcgccactacttccagaacacacaaggcctgatcttcgtggtggacagcaatgacagagagcgtgtgaacgaggcccgtgaggagctcatgaggatgctggccgaggacgagctccgggatgctgtcctcctggtgttcgccaacaagcaggacctccccaacgccatgaatgcggccgagatcacagacaagctggggctgcactcactacgccacaggaactggtacattcaggccacctgcgccaccagcggcgacgggctctatgaaggactggactggctgtccaatcagctccggaaccagaagtgaacgcgacccccctccctctcactcctcttgccctctgctttactctcatgtggcaaacgtgcggctcgtggtgtgagtgccagaagctgcctccgtggtttggtcaccgtgtgcatcgcaccgtgctgtaaatgtggcagacgcagcctgcggccaggctttttatttaatgtaaatagtttttgtttccaatgaggcagtttctggtactcctatgcaatattactcagctttttttattgtaaaaagaaaaatcaactcactgttcagtgctgagaggggatgtaggcccatgggcacctggcctccaggagtcgctgtgttgggagagccggccacgcccttggctttagagctgtgttgaaatccattttggtggttggtttttaacccaaactcagtgcattttttaaaatagttaagaatccaagtcgagaacacttgaacacacagaagggagaccccgcctagcatagatttgcagttacggcctggatgccagtcgccagcccagctgttcccctcgggaacatgaggtggtggtggcgcagcagactgcgatcaattctgcatggtcacagtagagatccccgcaactcgcttgtccttgggtcaccctgcattccatagccatgtgcttgtccctgtgctcccacggttcccaggggccaggctgggagcccacagccaccccactatgccgcaggccgccctacccaccttcaggcagcctatgggacgcagggccccatctgtccctcggtcgccgtgtggccagagtgggtccgtcgtccccaacactcgtgctcgctcagacactttggcaggatgtctggggcctcaccagcaggagcgcgtgcaagccgggcaggcggtccacctagacccacagcccctcgggagcaccccacctctgtgtgtgatgtagctttctctccctcagcctgcaagggtccgatttgccatcgaaaaagacaacctctacttttttcttttgtattttgataaacactgaagctggagctgttaaatttatcttggggaaacctcagaactggtctatttggtgtcgtggaacctcttactgctttcaatacacgattagtaatcaactgttttgtatacttgttttcagttttcatttcgacaaacaagcactgtaattatagctattagaataaaatctcttaactatttca

SEQ ID NO: 3173 - protein, 181 aa, Homo sapiens; identical to SEQ ID NO: 177

SEQ ID NO: 3174 - DNA, 1498 bp, Homo sapiens
gtgccccgcgcccggaggcgctgacgtggccgccgtcagagccgccatcttgtgggagcaaaaccaacgcctggctcggagcagcagcctctgaggtgtccctggccagtgtccttccacctgtccacaagcatggggaacatcttcgccaacctcttcaagggcctttttggcaaaaaagaaatgctgtcctcctggtgttcgccaacaagcaggacctccccaacgccatgaatgcggccgagatcacagacaagctggggctgcactcactacgccacaggaactggtacattcaggccacctgcgccaccagcggcgacgggctctatgaaggactggactggctgtccaatcagctccggaaccagaagtgaacgcgacccccctccctctcactcctcttgccctctgctttactctcatgtggcaaacgtgcggctcgtggtgtgagtgccagaagctgcctccgtggtttggtcaccgtgtgcatcgcaccgtgctgtaaatgtggcagacgcagcctgcggccaggctttttatttaatgtaaatagtttttgtttccaatgaggcagtttctggtactcctatgcaatattactcagctttttttattgtaaaaagaaaaatcaactcactgttcagtgctgagaggggatgtaggcccatgggcacctggcctccaggagtcgctgtgttgggagagccggccacgcccttggctttagagctgtgttgaaatccattttggtggttggtttttaacccaaactcagtgcattttttaaaatagttaagaatccaagtcgagaacacttgaacacacagaagggagaccccgcctagcatagatttgcagttacggcctggatgccagtcgccagcccagctgttcccctcgggaacatgaggtggtggtggcgcagcagactgcgatcaattctgcatggtcacagtagagatccccgcaactcgcttgtccttgggtcaccctgcattccatagccatgtgcttgtccctgtgctcccacggttcccaggggccaggctgggagcccacagccaccccactatgccgcaggccgccctacccaccttcaggcagcctatgggacgcagggccccatctgtccctcggtcgccgtgtggccagagtgggtccgtcgtccccaacactcgtgctcgctcagacactttggcaggatgtctggggcctcaccagcaggagcgcgtgcaagccgggcaggcggtccacctagacccacagcccctcgggagcaccccacctctgtgtgtgatgtagctttctctccctcagcctgcaagggtccgatttgccatcgaaaaagacaacctctacttttttcttttgtattttgataaacactgaagctggagctgttaaatttatcttggggaaacctcagaactggtctatttggtgtcgtggaacctcttactgctttcaatacacgattagtaatcaactgttttgt

SEQ ID NO: 3175 - protein, 33 aa, Homo sapiens
MGNIFANLFKGLFGKKEMLSSWCSPTSRTSPTP

SEQ ID NO: 3176 - DNA, 1576 bp, Homo sapiens
gtgccccgcgcccggaggcgctgacgtggccgccgtcagagccgccatcttgtgggagcaaaaccaacgcctggctcggagcagcagcctctgaggtgtccctggccagtgtccttccacctgtccacaagcatggggaacatcttcgccaacctcttcaagggcctttttggcaaaaaagaaatgctgtcctcctggtgttcgccaacaagcaggacctccccaacgccatgaatgcggccgagatcacagacaagctggggctgcactcactacgccacaggaactggtacattcaggccacctgcgccaccagcggcgacgggctctatgaaggactggactggctgtccaatcagctccggaaccagaagtgaacgcgacccccctccctctcactcctcttgccctctgctttactctcatgtggcaaacgtgcggctcgtggtgtgagtgccagaagctgcctccgtggtttggtcaccgtgtgcatcgcaccgtgctgtaaatgtggcagacgcagcctgcggccaggctttttatttaatgtaaatagtttttgtttccaatgaggcagtttctggtactcctatgcaatattactcagctttttttattgtaaaaagaaaaatcaactcactgttcagtgctgagaggggatgtaggcccatgggcacctggcctccaggagtcgctgtgttgggagagccggccacgcccttggctttagagctgtgttgaaatccattttggtggttggtttttaacccaaactcagtgcattttttaaaatagttaagaatccaagtcgagaacacttgaacacacagaagggagaccccgcctagcatagatttgcagttacggcctggatgccagtcgccagcccagctgttcccctcgggaacatgaggtggtggtggcgcagcagactgcgatcaattctgcatggtcacagtagagatccccgcaactcgcttgtccttgggtcaccctgcattccatagccatgtgcttgtccctgtgctcccacggttcccaggggccaggctgggagcccacagccaccccactatgccgcaggccgccctacccaccttcaggcagcctatgggacgcagggccccatctgtccctcggtcgccgtgtggccagagtgggtccgtcgtccccaacactcgtgctcgctcagacactttggcaggatgtctggggcctcaccagcaggagcgcgtgcaagccgggcaggcggtccacctagacccacagcccctcgggagcaccccacctctgtgtgtgatgtagctttctctccctcagcctgcaagggtccgatttgccatcgaaaaagacaacctctacttttttcttttgtattttgataaacactgaagctggagctgttaaatttatcttggggaaacctcagaactggtctatttggtgtcgtggaacctcttactgctttcaatacacgattagtaatcaactgttttgtatacttgttttcagttttcatttcgacaaacaagcactgtaattatagctattagaataaaatctcttaactatttca

SEQ ID NO: 3177 - protein, 33 aa, Homo sapiens; identical to SEQ ID NO: 3175

SEQ ID NO: 3178 - DNA, 686 bp, Homo sapiens
cgtcagagccgccatcttgtgggagcaaaaccaacgcctggctcggagcagcagcctctgaggtgtccctggccagtgtccttccacctgtccacaagcatggggaacatcttcgccaacctcttcaagggcctttttggcaaaaaagaaatgcgcatcctcatggtgggcctggatgctgcagggaagaccacgatcctctacaagcttaagctgggtgagatcgtgaccaccattcccaccataggcttcaacgtggaaaccgtggagtacaagaacatcagcttcactgtgtgggacgtgggtggccaggacaagatccggcccctgtggcgccactacgccacaggaactggtacattcaggccacctgcgccaccagcggcgacgggctctatgaaggactggactggctgtccaatcagctccggaaccagaagtgaacgcgacccccctccctctcactcctcttgccctctgctttactctcatgtggcaaacgtgcggctcgtggtgtgagtgccagaagctgcctccgtggtttggtcaccgtgtgcatcgcaccgtgctgtaaatgtggcagacgcagcctgcggccaggctttttatttaatgtaaatagtttttgtttccaatgaggcagtttctggtactcctatgcaatattactcagctttttttattgt

SEQ ID NO: 3179 - protein, 139 aa, Homo sapiens
MGNIFANLFKGLFGKKEMRILMVGLDAAGKTTILYKLKLGEIVTTIPTIGFNVETVEYKNISFTVWDVGGQDKIRPLWRHYATGTGTFRPPAPPAATGSMKDWTGCPISSGTRSERDPPPSHSSCPLLYSHVANVRLVV

SEQ ID NO: 3180 - DNA, 1564 bp, Homo sapiens
cgtcagagccgccatcttgtgggagcaaaaccaacgcctggctcggagcagcagcctctgaggtgtccctggccagtgtccttccacctgtccacaagcatggggaacatcttcgccaacctcttcaagggcctttttggcaaaaaagaaatgcgcatcctcatggtgggcctggatgctgcagggaagaccacgatcctctacaagcttaagctgggtgagatcgtgaccaccattcccaccataggcttcaacgtggaaaccgtggagtacaagaacatcagcttcactgtgtgggacgtgggtggccaggacaagatccggcccctgtggcgccactacgccacaggaactggtacattcaggccacctgcgccaccagcggcgacgggctctatgaaggactggactggctgtccaatcagctccggaaccagaagtgaacgcgacccccctccctctcactcctcttgccctctgctttactctcatgtggcaaacgtgcggctcgtggtgtgagtgccagaagctgcctccgtggtttggtcaccgtgtgcatcgcaccgtgctgtaaatgtggcagacgcagcctgcggccaggctttttatttaatgtaaatagtttttgtttccaatgaggcagtttctggtactcctatgcaatattactcagctttttttattgtaaaaagaaaaatcaactcactgttcagtgctgagaggggatgtaggcccatgggcacctggcctccaggagtcgctgtgttgggagagccggccacgcccttggctttagagctgtgttgaaatccattttggtggttggtttttaacccaaactcagtgcattttttaaaatagttaagaatccaagtcgagaacacttgaacacacagaagggagaccccgcctagcatagatttgcagttacggcctggatgccagtcgccagcccagctgttcccctcgggaacatgaggtggtggtggcgcagcagactgcgatcaattctgcatggtcacagtagagatccccgcaactcgcttgtccttgggtcaccctgcattccatagccatgtgcttgtccctgtgctcccacggttcccaggggccaggctgggagcccacagccaccccactatgccgcaggccgccctacccaccttcaggcagcctatgggacgcagggccccatctgtccctcggtcgccgtgtggccagagtgggtccgtcgtccccaacactcgtgctcgctcagacactttggcaggatgtctggggcctcaccagcaggagcgcgtgcaagccgggcaggcggtccacctagacccacagcccctcgggagcaccccacctctgtgtgtgatgtagctttctctccctcagcctgcaagggtccgatttgccatcgaaaaagacaacctctacttttttcttttgtattttgataaacactgaagctggagctgttaaatttatcttggggaaacctcagaactggtctatttggtgtcgtggaacctcttactgctttcaatacacgattagtaatcaactgttttgt

SEQ ID NO: 3181 - protein, 139 aa, Homo sapiens; identical to SEQ ID NO: 3179

SEQ ID NO: 3182 - DNA, 1642 bp, Homo sapiens
cgtcagagccgccatcttgtgggagcaaaaccaacgcctggctcggagcagcagcctctgaggtgtccctggccagtgtccttccacctgtccacaagcatggggaacatcttcgccaacctcttcaagggcctttttggcaaaaaagaaatgcgcatcctcatggtgggcctggatgctgcagggaagaccacgatcctctacaagcttaagctgggtgagatcgtgaccaccattcccaccataggcttcaacgtggaaaccgtggagtacaagaacatcagcttcactgtgtgggacgtgggtggccaggacaagatccggcccctgtggcgccactacgccacaggaactggtacattcaggccacctgcgccaccagcggcgacgggctctatgaaggactggactggctgtccaatcagctccggaaccagaagtgaacgcgacccccctccctctcactcctcttgccctctgctttactctcatgtggcaaacgtgcggctcgtggtgtgagtgccagaagctgcctccgtggtttggtcaccgtgtgcatcgcaccgtgctgtaaatgtggcagacgcagcctgcggccaggctttttatttaatgtaaatagtttttgtttccaatgaggcagtttctggtactcctatgcaatattactcagctttttttattgtaaaaagaaaaatcaactcactgttcagtgctgagaggggatgtaggcccatgggcacctggcctccaggagtcgctgtgttgggagagccggccacgcccttggctttagagctgtgttgaaatccattttggtggttggtttttaacccaaactcagtgcattttttaaaatagttaagaatccaagtcgagaacacttgaacacacagaagggagaccccgcctagcatagatttgcagttacggcctggatgccagtcgccagcccagctgttcccctcgggaacatgaggtggtggtggcgcagcagactgcgatcaattctgcatggtcacagtagagatccccgcaactcgcttgtccttgggtcaccctgcattccatagccatgtgcttgtccctgtgctcccacggttcccaggggccaggctgggagcccacagccaccccactatgccgcaggccgccctacccaccttcaggcagcctatgggacgcagggccccatctgtccctcggtcgccgtgtggccagagtgggtccgtcgtccccaacactcgtgctcgctcagacactttggcaggatgtctggggcctcaccagcaggagcgcgtgcaagccgggcaggcggtccacctagacccacagcccctcgggagcaccccacctctgtgtgtgatgtagctttctctccctcagcctgcaagggtccgatttgccatcgaaaaagacaacctctacttttttcttttgtattttgataaacactgaagctggagctgttaaatttatcttggggaaacctcagaactggtctatttggtgtcgtggaacctcttactgctttcaatacacgattagtaatcaactgttttgtatacttgttttcagttttcatttcgacaaacaagcactgtaattatagctattagaataaaatctcttaactatttca

SEQ ID NO: 3183 - protein, 139 aa, Homo sapiens; identical to SEQ ID NO: 3179

SEQ ID NO: 3184 - DNA, 751 bp, Homo sapiens
gtcagagccgccatcttgtgggagcaaaaccaacgcctggctcggagcagcagcctctgaggtgtccctggccagtgtccttccacctgtccacaagcatggggaacatcttcgccaacctcttcaagggcctttttggcaaaaaagaaatgcgcatcctcatggtgggcctggatgctgcagggaagaccacgatcctctacaagcttaagctgggtgagatcgtgaccaccattcccaccataggcttcaacgtggaaaccgtggagtacaagaacatcagcttcactgtgtgggacgtgggtggccaggacaagatccggcccctgtggcgccactacttccagacctccccaacgccatgaatgcggccgagatcacagacaagctggggctgcactcactacgccacaggaactggtacattcaggccacctgcgccaccagcggcgacgggctctatgaaggactggactggctgtccaatcagctccggaaccagaagtgaacgcgacccccctccctctcactcctcttgccctctgctttactctcatgtggcaaacgtgcggctcgtggtgtgagtgccagaagctgcctccgtggtttggtcaccgtgtgcatcgcaccgtgctgtaaatgtggcagacgcagcctgcggccaggctttttatttaatgtaaatagtttttgtttccaatgaggcagtttctggtactcctatgcaatattactcagctttttttattgt

SEQ ID NO: 3185 - protein, 88 aa, Homo sapiens
MGNIFANLFKGLFGKKEMRILMVGLDAAGKTTILYKLKLGEIVTTIPTIGFNVETVEYKNISFTVWDVGGQDKIRPLWRHYFQTSPTP

SEQ ID NO: 3186 - DNA, 1629 bp, Homo sapiens
gtcagagccgccatcttgtgggagcaaaaccaacgcctggctcggagcagcagcctctgaggtgtccctggccagtgtccttccacctgtccacaagcatggggaacatcttcgccaacctcttcaagggcctttttggcaaaaaagaaatgcgcatcctcatggtgggcctggatgctgcagggaagaccacgatcctctacaagcttaagctgggtgagatcgtgaccaccattcccaccataggcttcaacgtggaaaccgtggagtacaagaacatcagcttcactgtgtgggacgtgggtggccaggacaagatccggcccctgtggcgccactacttccagacctccccaacgccatgaatgcggccgagatcacagacaagctggggctgcactcactacgccacaggaactggtacattcaggccacctgcgccaccagcggcgacgggctctatgaaggactggactggctgtccaatcagctccggaaccagaagtgaacgcgacccccctccctctcactcctcttgccctctgctttactctcatgtggcaaacgtgcggctcgtggtgtgagtgccagaagctgcctccgtggtttggtcaccgtgtgcatcgcaccgtgctgtaaatgtggcagacgcagcctgcggccaggctttttatttaatgtaaatagtttttgtttccaatgaggcagtttctggtactcctatgcaatattactcagctttttttattgtaaaaagaaaaatcaactcactgttcagtgctgagaggggatgtaggcccatgggcacctggcctccaggagtcgctgtgttgggagagccggccacgcccttggctttagagctgtgttgaaatccattttggtggttggtttttaacccaaactcagtgcattttttaaaatagttaagaatccaagtcgagaacacttgaacacacagaagggagaccccgcctagcatagatttgcagttacggcctggatgccagtcgccagcccagctgttcccctcgggaacatgaggtggtggtggcgcagcagactgcgatcaattctgcatggtcacagtagagatccccgcaactcgcttgtccttgggtcaccctgcattccatagccatgtgcttgtccctgtgctcccacggttcccaggggccaggctgggagcccacagccaccccactatgccgcaggccgccctacccaccttcaggcagcctatgggacgcagggccccatctgtccctcggtcgccgtgtggccagagtgggtccgtcgtccccaacactcgtgctcgctcagacactttggcaggatgtctggggcctcaccagcaggagcgcgtgcaagccgggcaggcggtccacctagacccacagcccctcgggagcaccccacctctgtgtgtgatgtagctttctctccctcagcctgcaagggtccgatttgccatcgaaaaagacaacctctacttttttcttttgtattttgataaacactgaagctggagctgttaaatttatcttggggaaacctcagaactggtctatttggtgtcgtggaacctcttactgctttcaatacacgattagtaatcaactgttttgt

SEQ ID NO: 3187 - protein, 88 aa, Homo sapiens; identical to SEQ ID NO: 3185

SEQ ID NO: 3188 - DNA, 1707 bp, Homo sapiens
gtcagagccgccatcttgtgggagcaaaaccaacgcctggctcggagcagcagcctctgaggtgtccctggccagtgtccttccacctgtccacaagcatggggaacatcttcgccaacctcttcaagggcctttttggcaaaaaagaaatgcgcatcctcatggtgggcctggatgctgcagggaagaccacgatcctctacaagcttaagctgggtgagatcgtgaccaccattcccaccataggcttcaacgtggaaaccgtggagtacaagaacatcagcttcactgtgtgggacgtgggtggccaggacaagatccggcccctgtggcgccactacttccagacctccccaacgccatgaatgcggccgagatcacagacaagctggggctgcactcactacgccacaggaactggtacattcaggccacctgcgccaccagcggcgacgggctctatgaaggactggactggctgtccaatcagctccggaaccagaagtgaacgcgacccccctccctctcactcctcttgccctctgctttactctcatgtggcaaacgtgcggctcgtggtgtgagtgccagaagctgcctccgtggtttggtcaccgtgtgcatcgcaccgtgctgtaaatgtggcagacgcagcctgcggccaggctttttatttaatgtaaatagtttttgtttccaatgaggcagtttctggtactcctatgcaatattactcagctttttttattgtaaaaagaaaaatcaactcactgttcagtgctgagaggggatgtaggcccatgggcacctggcctccaggagtcgctgtgttgggagagccggccacgcccttggctttagagctgtgttgaaatccattttggtggttggtttttaacccaaactcagtgcattttttaaaatagttaagaatccaagtcgagaacacttgaacacacagaagggagaccccgcctagcatagatttgcagttacggcctggatgccagtcgccagcccagctgttcccctcgggaacatgaggtggtggtggcgcagcagactgcgatcaattctgcatggtcacagtagagatccccgcaactcgcttgtccttgggtcaccctgcattccatagccatgtgcttgtccctgtgctcccacggttcccaggggccaggctgggagcccacagccaccccactatgccgcaggccgccctacccaccttcaggcagcctatgggacgcagggccccatctgtccctcggtcgccgtgtggccagagtgggtccgtcgtccccaacactcgtgctcgctcagacactttggcaggatgtctggggcctcaccagcaggagcgcgtgcaagccgggcaggcggtccacctagacccacagcccctcgggagcaccccacctctgtgtgtgatgtagctttctctccctcagcctgcaagggtccgatttgccatcgaaaaagacaacctctacttttttcttttgtattttgataaacactgaagctggagctgttaaatttatcttggggaaacctcagaactggtctatttggtgtcgtggaacctcttactgctttcaatacacgattagtaatcaactgttttgtatacttgttttcagttttcatttcgacaaacaagcactgtaattatagctattagaataaaatctcttaactatttca

SEQ ID NO: 3189 - protein, 88 aa, Homo sapiens; identical to SEQ ID NO: 3185

SEQ ID NO: 3190 - DNA, 697 bp, Homo sapiens
agagccgccatcttgtgggagcaaaaccaacgcctggctcggagcagcagcctctgaggtgtccctggccagtgtccttccacctgtccacaagcatggggaacatcttcgccaacctcttcaagggcctttttggcaaaaaagaaatgcgcatcctcatggtgggcctggatgctgcagggaagaccacgatcctctacaagcttaagctgggtgagatcgtgaccaccattcccaccataggtgaggtgggggccagcagggagtgggctgggctgggctgggccaaggtacaaggcctcaccctgcatcccgcacccaggcttcaacgtggaaaccgtggagtacaagaacatcagcttcactgtgtgggacgtgggtggccaggacaagatccggcccctgtggcgccactacttccagaacacacaaggtaagtggctggggcctggtcccatgggcactcctgcttctagagagggggggccagcccatagatggggcatcgatgcccatagatgcggcaggggggctgtgttcccatgaccatttgacactggctgcccggcaggcctgatcttcgtggtggacagcaatgacagagagcgtgtgaacgaggcccgtgaggagctcatgaggatgctggccgaggacgagctccgggatgctgtcctcctggtgttcgccaacaagcagg

SEQ ID NO: 3191 - protein, 113 aa, Homo sapiens [sequence omitted]

SEQ ID NO: 3192 - DNA, 665 bp, Homo sapiens
agagccgccatcttgtgggagcaaaaccaacgcctggctcggagcagcagcctctgaggtgtccctggccagtgtccttccacctgtccacaagcatggggaacatcttccgccactacttccagaacacacaaggcctgatcttcgtggtggacagcaatgacagagagcgtgtgaacgaggcccgtgaggagctcatgaggatgctggccgaggacgagctccgggatgctgtcctcctggtgttcgccaacaagcaggacctccccaacgccatgaatgcggccgagatcacagacaagctggggctgcactcactacgccacaggaactggtacattcaggccacctgcgccaccagcggcgacgggctctatgaaggactggactggctgtccaatcagctccggaaccagaagtgaacgcgacccccctccctctcactcctcttgccctctgctttactctcatgtggcaaacgtgcggctcgtggtgtgagtgccagaagctgcctccgtggtttggtcaccgtgtgcatcgcaccgtgctgtaaatgtggcagacgcagcctgcggccaggctttttatttaatgtaaatagtttttgtttccaatgaggcagtttctggtactcctatgcaatattactcagctttttttattgt

SEQ ID NO: 3193 - protein, 108 aa, Homo sapiens
MGNIFRHYFQNTQGLIFVVDSNDRERVNEAREELMRMLAEDELRDAVLLVFANKQDLPNAMNAAEITDKLGLHSLRHRNWYIQATCATSGDGLYEGLDWLSNQLRNQK

SEQ ID NO: 3194 - DNA, 963 bp, Homo sapiens
agagccgccatcttgtgggagcaaaaccaacgcctggctcggagcagcagcctctgaggtgtccctggccagtgtccttccacctgtccacaagcatggggaacatcttcgccaacctcttcaagggcctttttggcaaaaaagaaatgcgcatcctcatggtgggcctggatgctgcagggaagaccacgatcctctacaagcttaagctgggtgagatcgtgaccaccattcccaccataggtgaggtgggggccagcagggagtgggctgggctgggctgggccaaggtacaaggcctcaccctgcatcccgcacccaggcttcaacgtggaaaccgtggagtacaagaacatcagcttcactgtgtgggacgtgggtggccaggacaagatccggcccctgtggcgccactacttccagaacacacaaggcctgatcttcgtggtggacagcaatgacagagagcgtgtgaacgaggcccgtgaggagctcatgaggatgctggccgaggacgagctccgggatgctgtcctcctggtgttcgccaacaagcaggacctccccaacgccatgaatgcggccgagatcacagacaagctggggctgcactcactacgccacaggaactggtacattcaggccacctgcgccaccagcggcgacgggctctatgaaggactggactggctgtccaatcagctccggaaccagaagtgaacgcgacccccctccctctcactcctcttgccctctgctttactctcatgtggcaaacgtgcggctcgtggtgtgagtgccagaagctgcctccgtggtttggtcaccgtgtgcatcgcaccgtgctgtaaatgtggcagacgcagcctgcggccaggctttttatttaatgtaaatagtttttgtttccaatgaggcagtttctggtactcctatgcaatattactcagctttttttattgt

SEQ ID NO: 3195 - protein, 121 aa, Homo sapiens
MGNIFANLFKGLFGKKEMRILMVGLDAAGKTTILYKLKLGEIVTTIPTIGEVGASREWAGLGWAKVQGLTLHPAPRLQRGNRGVQEHQLHCVGRGWPGQDPAPVAPLLPEHTRPDLRGGQQ

SEQ ID NO: 3196 - DNA, 1543 bp, Homo sapiens
agagccgccatcttgtgggagcaaaaccaacgcctggctcggagcagcagcctctgaggtgtccctggccagtgtccttccacctgtccacaagcatggggaacatcttccgccactacttccagaacacacaaggcctgatcttcgtggtggacagcaatgacagagagcgtgtgaacgaggcccgtgaggagctcatgaggatgctggccgaggacgagctccgggatgctgtcctcctggtgttcgccaacaagcaggacctccccaacgccatgaatgcggccgagatcacagacaagctggggctgcactcactacgccacaggaactggtacattcaggccacctgcgccaccagcggcgacgggctctatgaaggactggactggctgtccaatcagctccggaaccagaagtgaacgcgacccccctccctctcactcctcttgccctctgctttactctcatgtggcaaacgtgcggctcgtggtgtgagtgccagaagctgcctccgtggtttggtcaccgtgtgcatcgcaccgtgctgtaaatgtggcagacgcagcctgcggccaggctttttatttaatgtaaatagtttttgtttccaatgaggcagtttctggtactcctatgcaatattactcagctttttttattgtaaaaagaaaaatcaactcactgttcagtgctgagaggggatgtaggcccatgggcacctggcctccaggagtcgctgtgttgggagagccggccacgcccttggctttagagctgtgttgaaatccattttggtggttggtttttaacccaaactcagtgcattttttaaaatagttaagaatccaagtcgagaacacttgaacacacagaagggagaccccgcctagcatagatttgcagttacggcctggatgccagtcgccagcccagctgttcccctcgggaacatgaggtggtggtggcgcagcagactgcgatcaattctgcatggtcacagtagagatccccgcaactcgcttgtccttgggtcaccctgcattccatagccatgtgcttgtccctgtgctcccacggttcccaggggccaggctgggagcccacagccaccccactatgccgcaggccgccctacccaccttcaggcagcctatgggacgcagggccccatctgtccctcggtcgccgtgtggccagagtgggtccgtcgtccccaacactcgtgctcgctcagacactttggcaggatgtctggggcctcaccagcaggagcgcgtgcaagccgggcaggcggtccacctagacccacagcccctcgggagcaccccacctctgtgtgtgatgtagctttctctccctcagcctgcaagggtccgatttgccatcgaaaaagacaacctctacttttttcttttgtattttgataaacactgaagctggagctgttaaatttatcttggggaaacctcagaactggtctatttggtgtcgtggaacctcttactgctttcaatacacgattagtaatcaactgttttgt

SEQ ID NO: 3197 - protein, 108 aa, Homo sapiens; identical to SEQ ID NO: 3193

SEQ ID NO: 3198 - DNA, 1841 bp, Homo sapiens
agagccgccatcttgtgggagcaaaaccaacgcctggctcggagcagcagcctctgaggtgtccctggccagtgtccttccacctgtccacaagcatggggaacatcttcgccaacctcttcaagggcctttttggcaaaaaagaaatgcgcatcctcatggtgggcctggatgctgcagggaagaccacgatcctctacaagcttaagctgggtgagatcgtgaccaccattcccaccataggtgaggtgggggccagcagggagtgggctgggctgggctgggccaaggtacaaggcctcaccctgcatcccgcacccaggcttcaacgtggaaaccgtggagtacaagaacatcagcttcactgtgtgggacgtgggtggccaggacaagatccggcccctgtggcgccactacttccagaacacacaaggcctgatcttcgtggtggacagcaatgacagagagcgtgtgaacgaggcccgtgaggagctcatgaggatgctggccgaggacgagctccgggatgctgtcctcctggtgttcgccaacaagcaggacctccccaacgccatgaatgcggccgagatcacagacaagctggggctgcactcactacgccacaggaactggtacattcaggccacctgcgccaccagcggcgacgggctctatgaaggactggactggctgtccaatcagctccggaaccagaagtgaacgcgacccccctccctctcactcctcttgccctctgctttactctcatgtggcaaacgtgcggctcgtggtgtgagtgccagaagctgcctccgtggtttggtcaccgtgtgcatcgcaccgtgctgtaaatgtggcagacgcagcctgcggccaggctttttatttaatgtaaatagtttttgtttccaatgaggcagtttctggtactcctatgcaatattactcagctttttttattgtaaaaagaaaaatcaactcactgttcagtgctgagaggggatgtaggcccatgggcacctggcctccaggagtcgctgtgttgggagagccggccacgcccttggctttagagctgtgttgaaatccattttggtggttggtttttaacccaaactcagtgcattttttaaaatagttaagaatccaagtcgagaacacttgaacacacagaagggagaccccgcctagcatagatttgcagttacggcctggatgccagtcgccagcccagctgttcccctcgggaacatgaggtggtggtggcgcagcagactgcgatcaattctgcatggtcacagtagagatccccgcaactcgcttgtccttgggtcaccctgcattccatagccatgtgcttgtccctgtgctcccacggttcccaggggccaggctgggagcccacagccaccccactatgccgcaggccgccctacccaccttcaggcagcctatgggacgcagggccccatctgtccctcggtcgccgtgtggccagagtgggtccgtcgtccccaacactcgtgctcgctcagacactttggcaggatgtctggggcctcaccagcaggagcgcgtgcaagccgggcaggcggtccacctagacccacagcccctcgggagcaccccacctctgtgtgtgatgtagctttctctccctcagcctgcaagggtccgatttgccatcgaaaaagacaacctctacttttttcttttgtattttgataaacactgaagctggagctgttaaatttatcttggggaaacctcagaactggtctatttggtgtcgtggaacctcttactgctttcaatacacgattagtaatcaactgttttgt

SEQ ID NO: 3199 - protein, 121 aa, Homo sapiens; identical to SEQ ID NO: 3195

SEQ ID NO: 3200 - DNA, 1621 bp, Homo sapiens
agagccgccatcttgtgggagcaaaaccaacgcctggctcggagcagcagcctctgaggtgtccctggccagtgtccttccacctgtccacaagcatggggaacatcttccgccactacttccagaacacacaaggcctgatcttcgtggtggacagcaatgacagagagcgtgtgaacgaggcccgtgaggagctcatgaggatgctggccgaggacgagctccgggatgctgtcctcctggtgttcgccaacaagcaggacctccccaacgccatgaatgcggccgagatcacagacaagctggggctgcactcactacgccacaggaactggtacattcaggccacctgcgccaccagcggcgacgggctctatgaaggactggactggctgtccaatcagctccggaaccagaagtgaacgcgacccccctccctctcactcctcttgccctctgctttactctcatgtggcaaacgtgcggctcgtggtgtgagtgccagaagctgcctccgtggtttggtcaccgtgtgcatcgcaccgtgctgtaaatgtggcagacgcagcctgcggccaggctttttatttaatgtaaatagtttttgtttccaatgaggcagtttctggtactcctatgcaatattactcagctttttttattgtaaaaagaaaaatcaactcactgttcagtgctgagaggggatgtaggcccatgggcacctggcctccaggagtcgctgtgttgggagagccggccacgcccttggctttagagctgtgttgaaatccattttggtggttggtttttaacccaaactcagtgcattttttaaaatagttaagaatccaagtcgagaacacttgaacacacagaagggagaccccgcctagcatagatttgcagttacggcctggatgccagtcgccagcccagctgttcccctcgggaacatgaggtggtggtggcgcagcagactgcgatcaattctgcatggtcacagtagagatccccgcaactcgcttgtccttgggtcaccctgcattccatagccatgtgcttgtccctgtgctcccacggttcccaggggccaggctgggagcccacagccaccccactatgccgcaggccgccctacccaccttcaggcagcctatgggacgcagggccccatctgtccctcggtcgccgtgtggccagagtgggtccgtcgtccccaacactcgtgctcgctcagacactttggcaggatgtctggggcctcaccagcaggagcgcgtgcaagccgggcaggcggtccacctagacccacagcccctcgggagcaccccacctctgtgtgtgatgtagctttctctccctcagcctgcaagggtccgatttgccatcgaaaaagacaacctctacttttttcttttgtattttgataaacactgaagctggagctgttaaatttatcttggggaaacctcagaactggtctatttggtgtcgtggaacctcttactgctttcaatacacgattagtaatcaactgttttgtatacttgttttcagttttcatttcgacaaacaagcactgtaattatagctattagaataaaatctcttaactatttca

SEQ ID NO: 3201 - protein, 108 aa, Homo sapiens; identical to SEQ ID NO: 3193

SEQ ID NO: 3202 - DNA, 1919 bp, Homo sapiens
agagccgccatcttgtgggagcaaaaccaacgcctggctcggagcagcagcctctgaggtgtccctggccagtgtccttccacctgtccacaagcatggggaacatcttcgccaacctcttcaagggcctttttggcaaaaaagaaatgcgcatcctcatggtgggcctggatgctgcagggaagaccacgatcctctacaagcttaagctgggtgagatcgtgaccaccattcccaccataggtgaggtgggggccagcagggagtgggctgggctgggctgggccaaggtacaaggcctcaccctgcatcccgcacccaggcttcaacgtggaaaccgtggagtacaagaacatcagcttcactgtgtgggacgtgggtggccaggacaagatccggcccctgtggcgccactacttccagaacacacaaggcctgatcttcgtggtggacagcaatgacagagagcgtgtgaacgaggcccgtgaggagctcatgaggatgctggccgaggacgagctccgggatgctgtcctcctggtgttcgccaacaagcaggacctccccaacgccatgaatgcggccgagatcacagacaagctggggctgcactcactacgccacaggaactggtacattcaggccacctgcgccaccagcggcgacgggctctatgaaggactggactggctgtccaatcagctccggaaccagaagtgaacgcgacccccctccctctcactcctcttgccctctgctttactctcatgtggcaaacgtgcggctcgtggtgtgagtgccagaagctgcctccgtggtttggtcaccgtgtgcatcgcaccgtgctgtaaatgtggcagacgcagcctgcggccaggctttttatttaatgtaaatagtttttgtttccaatgaggcagtttctggtactcctatgcaatattactcagctttttttattgtaaaaagaaaaatcaactcactgttcagtgctgagaggggatgtaggcccatgggcacctggcctccaggagtcgctgtgttgggagagccggccacgcccttggctttagagctgtgttgaaatccattttggtggttggtttttaacccaaactcagtgcattttttaaaatagttaagaatccaagtcgagaacacttgaacacacagaagggagaccccgcctagcatagatttgcagttacggcctggatgccagtcgccagcccagctgttcccctcgggaacatgaggtggtggtggcgcagcagactgcgatcaattctgcatggtcacagtagagatccccgcaactcgcttgtccttgggtcaccctgcattccatagccatgtgcttgtccctgtgctcccacggttcccaggggccaggctgggagcccacagccaccccactatgccgcaggccgccctacccaccttcaggcagcctatgggacgcagggccccatctgtccctcggtcgccgtgtggccagagtgggtccgtcgtccccaacactcgtgctcgctcagacactttggcaggatgtctggggcctcaccagcaggagcgcgtgcaagccgggcaggcggtccacctagacccacagcccctcgggagcaccccacctctgtgtgtgatgtagctttctctccctcagcctgcaagggtccgatttgccatcgaaaaagacaacctctacttttttcttttgtattttgataaacactgaagctggagctgttaaatttatcttggggaaacctcagaactggtctatttggtgtcgtggaacctcttactgctttcaatacacgattagtaatcaactgttttgtatacttgttttcagttttcatttcgacaaacaagcactgtaattatagctattagaataaaatctcttaactatttca

SEQ ID NO: 3203 - protein, 121 aa, Homo sapiens; identical to SEQ ID NO: 3195

SEQ ID NO: 3204 - DNA, 776 bp, Homo sapiens
atcttgtgggagcaaaaccaacgcctggctcggagcagcagcctctgaggtgtccctggccagtgtccttccacctgtccacaagcatggggaacatcttcgccaacctcttcaagggcctttttggcaaaaaagaaatgcgcatcctcatggtgggcctggatgctgcagggaagaccacgatcctctacaagcttaagctgggtgagatcgtgaccaccattcccaccataggcttcaacgtggaaaccgtggagtacaagaacatcagcttcactgtgtgggacgtgggtggccaggacaagatccggcccctgtggcgccactacttccagaacacacaagtcctcctggtgttcgccaacaagcaggacctccccaacgccatgaatgcggccgagatcacagacaagctggggctgcactcactacgccacaggaactggtacattcaggccacctgcgccaccagcggcgacgggctctatgaaggactggactggctgtccaatcagctccggaaccagaagtgaacgcgacccccctccctctcactcctcttgccctctgctttactctcatgtggcaaacgtgcggctcgtggtgtgagtgccagaagctgcctccgtggtttggtcaccgtgtgcatcgcaccgtgctgtaaatgtggcagacgcagcctgcggccaggctttttatttaatgtaaatagtttttgtttccaatgaggcagtttctggtactcctatgcaatattactcagctttttttattgt

SEQ ID NO: 3205 - protein, 148 aa, Homo sapiens
MGNIFANLFKGLFGKKEMRILMVGLDAAGKTTILYKLKLGEIVTTIPTIGFNVETVEYKNISFTVWDVGGQDKIRPLWRHYFQNTQVLLVFANKQDLPNAMNAAEITDKLGLHSLRHRNWYIQATCATSGDGLYEGLDWLSNQLRNQK

SEQ ID NO: 3206 - DNA, 1889 bp, Homo sapiens
atcttgtgggagcaaaaccaacgcctggctcggagcagcagcctctgaggtgtccctggccagtgtccttccacctgtccacaagcatggggaacatcttcgccaacctcttcaagggcctttttggcaaaaaagaaatgcgcatcctcatggtgggcctggatgctgcagggaagaccacgatcctctacaagcttaagctgggtgagatcgtgaccaccattcccaccataggcttcaacgtggaaaccgtggagtacaagaacatcagcttcactgtgtgggacgtgggtggccaggacaagatccggcccctgtggcgccactacttccagaacacacaaggcctgatcttcgtggtggacagcaatgacagagagcgtgtgaacgaggcccgtgaggagctcatgaggatgctggccgaggacgagctccgggatgctgtcctcctggtgttcgccaacaagcaggtaggcgcccgggccagcctggggaatgtgaggagccagtgtgggttccgcctggtggtaggggttactggaggctggtggggcccctttctctgtcctgtggacagcccttcccaccaacccttccttcccccaggacctccccaacgccatgaatgcggccgagatcacagacaagctggggctgcactcactacgccacaggaactggtacattcaggccacctgcgccaccagcggcgacgggctctatgaaggactggactggctgtccaatcagctccggaaccagaagtgaacgcgacccccctccctctcactcctcttgccctctgctttactctcatgtggcaaacgtgcggctcgtggtgtgagtgccagaagctgcctccgtggtttggtcaccgtgtgcatcgcaccgtgctgtaaatgtggcagacgcagcctgcggccaggctttttatttaatgtaaatagtttttgtttccaatgaggcagtttctggtactcctatgcaatattactcagctttttttattgtaaaaagaaaaatcaactcactgttcagtgctgagaggggatgtaggcccatgggcacctggcctccaggagtcgctgtgttgggagagccggccacgcccttggctttagagctgtgttgaaatccattttggtggttggtttttaacccaaactcagtgcattttttaaaatagttaagaatccaagtcgagaacacttgaacacacagaagggagaccccgcctagcatagatttgcagttacggcctggatgccagtcgccagcccagctgttcccctcgggaacatgaggtggtggtggcgcagcagactgcgatcaattctgcatggtcacagtagagatccccgcaactcgcttgtccttgggtcaccctgcattccatagccatgtgcttgtccctgtgctcccacggttcccaggggccaggctgggagcccacagccaccccactatgccgcaggccgccctacccaccttcaggcagcctatgggacgcagggccccatctgtccctcggtcgccgtgtggccagagtgggtccgtcgtccccaacactcgtgctcgctcagacactttggcaggatgtctggggcctcaccagcaggagcgcgtgcaagccgggcaggcggtccacctagacccacagcccctcgggagcaccccacctctgtgtgtgatgtagctttctctccctcagcctgcaagggtccgatttgccatcgaaaaagacaacctctacttttttcttttgtattttgataaacactgaagctggagctgttaaatttatcttggggaaacctcagaactggtctatttggtgtcgtggaacctcttactgctttcaatacacgattagtaatcaactgttttgt

SEQ ID NO: 3207 - protein, 212 aa, Homo sapiens
MGNIFANLFKGLFGKKEMRILMVGLDAAGKTTILYKLKLGEIVTTIPTIGFNVETVEYKNISFTVWDVGGQDKIRPLWRHYFQNTQGLIFVVDSNDRERVNEAREELMRMLAEDELRDAVLLVFANKQVGARASLGNVRSQCGFRLVVGVTGGWWGPFLCPVDSPSHQPFLPPGPPQRHECGRDHRQAGAALTTPQELVHSGHLRHQRRRAL

SEQ ID NO: 3208 - DNA, 1654 bp, Homo sapiens
atcttgtgggagcaaaaccaacgcctggctcggagcagcagcctctgaggtgtccctggccagtgtccttccacctgtccacaagcatggggaacatcttcgccaacctcttcaagggcctttttggcaaaaaagaaatgcgcatcctcatggtgggcctggatgctgcagggaagaccacgatcctctacaagcttaagctgggtgagatcgtgaccaccattcccaccataggcttcaacgtggaaaccgtggagtacaagaacatcagcttcactgtgtgggacgtgggtggccaggacaagatccggcccctgtggcgccactacttccagaacacacaagtcctcctggtgttcgccaacaagcaggacctccccaacgccatgaatgcggccgagatcacagacaagctggggctgcactcactacgccacaggaactggtacattcaggccacctgcgccaccagcggcgacgggctctatgaaggactggactggctgtccaatcagctccggaaccagaagtgaacgcgacccccctccctctcactcctcttgccctctgctttactctcatgtggcaaacgtgcggctcgtggtgtgagtgccagaagctgcctccgtggtttggtcaccgtgtgcatcgcaccgtgctgtaaatgtggcagacgcagcctgcggccaggctttttatttaatgtaaatagtttttgtttccaatgaggcagtttctggtactcctatgcaatattactcagctttttttattgtaaaaagaaaaatcaactcactgttcagtgctgagaggggatgtaggcccatgggcacctggcctccaggagtcgctgtgttgggagagccggccacgcccttggctttagagctgtgttgaaatccattttggtggttggtttttaacccaaactcagtgcattttttaaaatagttaagaatccaagtcgagaacacttgaacacacagaagggagaccccgcctagcatagatttgcagttacggcctggatgccagtcgccagcccagctgttcccctcgggaacatgaggtggtggtggcgcagcagactgcgatcaattctgcatggtcacagtagagatccccgcaactcgcttgtccttgggtcaccctgcattccatagccatgtgcttgtccctgtgctcccacggttcccaggggccaggctgggagcccacagccaccccactatgccgcaggccgccctacccaccttcaggcagcctatgggacgcagggccccatctgtccctcggtcgccgtgtggccagagtgggtccgtcgtccccaacactcgtgctcgctcagacactttggcaggatgtctggggcctcaccagcaggagcgcgtgcaagccgggcaggcggtccacctagacccacagcccctcgggagcaccccacctctgtgtgtgatgtagctttctctccctcagcctgcaagggtccgatttgccatcgaaaaagacaacctctacttttttcttttgtattttgataaacactgaagctggagctgttaaatttatcttggggaaacctcagaactggtctatttggtgtcgtggaacctcttactgctttcaatacacgattagtaatcaactgttttgt

SEQ ID NO: 3209 - protein, 148 aa, Homo sapiens; identical to SEQ ID NO: 3205

SEQ ID NO: 3210 - DNA, 1967 bp, Homo sapiens
atcttgtgggagcaaaaccaacgcctggctcggagcagcagcctctgaggtgtccctggccagtgtccttccacctgtccacaagcatggggaacatcttcgccaacctcttcaagggcctttttggcaaaaaagaaatgcgcatcctcatggtgggcctggatgctgcagggaagaccacgatcctctacaagcttaagctgggtgagatcgtgaccaccattcccaccataggcttcaacgtggaaaccgtggagtacaagaacatcagcttcactgtgtgggacgtgggtggccaggacaagatccggcccctgtggcgccactacttccagaacacacaaggcctgatcttcgtggtggacagcaatgacagagagcgtgtgaacgaggcccgtgaggagctcatgaggatgctggccgaggacgagctccgggatgctgtcctcctggtgttcgccaacaagcaggtaggcgcccgggccagcctggggaatgtgaggagccagtgtgggttccgcctggtggtaggggttactggaggctggtggggcccctttctctgtcctgtggacagcccttcccaccaacccttccttcccccaggacctccccaacgccatgaatgcggccgagatcacagacaagctggggctgcactcactacgccacaggaactggtacattcaggccacctgcgccaccagcggcgacgggctctatgaaggactggactggctgtccaatcagctccggaaccagaagtgaacgcgacccccctccctctcactcctcttgccctctgctttactctcatgtggcaaacgtgcggctcgtggtgtgagtgccagaagctgcctccgtggtttggtcaccgtgtgcatcgcaccgtgctgtaaatgtggcagacgcagcctgcggccaggctttttatttaatgtaaatagtttttgtttccaatgaggcagtttctggtactcctatgcaatattactcagctttttttattgtaaaaagaaaaatcaactcactgttcagtgctgagaggggatgtaggcccatgggcacctggcctccaggagtcgctgtgttgggagagccggccacgcccttggctttagagctgtgttgaaatccattttggtggttggtttttaacccaaactcagtgcattttttaaaatagttaagaatccaagtcgagaacacttgaacacacagaagggagaccccgcctagcatagatttgcagttacggcctggatgccagtcgccagcccagctgttcccctcgggaacatgaggtggtggtggcgcagcagactgcgatcaattctgcatggtcacagtagagatccccgcaactcgcttgtccttgggtcaccctgcattccatagccatgtgcttgtccctgtgctcccacggttcccaggggccaggctgggagcccacagccaccccactatgccgcaggccgccctacccaccttcaggcagcctatgggacgcagggccccatctgtccctcggtcgccgtgtggccagagtgggtccgtcgtccccaacactcgtgctcgctcagacactttggcaggatgtctggggcctcaccagcaggagcgcgtgcaagccgggcaggcggtccacctagacccacagcccctcgggagcaccccacctctgtgtgtgatgtagctttctctccctcagcctgcaagggtccgatttgccatcgaaaaagacaacctctacttttttcttttgtattttgataaacactgaagctggagctgttaaatttatcttggggaaacctcagaactggtctatttggtgtcgtggaacctcttactgctttcaatacacgattagtaatcaactgttttgtatacttgttttcagttttcatttcgacaaacaagcactgtaattatagctattagaataaaatctcttaactatttca

SEQ ID NO: 3211 - protein, 212 aa, Homo sapiens; identical to SEQ ID NO: 3207

SEQ ID NO: 3212 - DNA, 1732 bp, Homo sapiens
atcttgtgggagcaaaaccaacgcctggctcggagcagcagcctctgaggtgtccctggccagtgtccttccacctgtccacaagcatggggaacatcttcgccaacctcttcaagggcctttttggcaaaaaagaaatgcgcatcctcatggtgggcctggatgctgcagggaagaccacgatcctctacaagcttaagctgggtgagatcgtgaccaccattcccaccataggcttcaacgtggaaaccgtggagtacaagaacatcagcttcactgtgtgggacgtgggtggccaggacaagatccggcccctgtggcgccactacttccagaacacacaagtcctcctggtgttcgccaacaagcaggacctccccaacgccatgaatgcggccgagatcacagacaagctggggctgcactcactacgccacaggaactggtacattcaggccacctgcgccaccagcggcgacgggctctatgaaggactggactggctgtccaatcagctccggaaccagaagtgaacgcgacccccctccctctcactcctcttgccctctgctttactctcatgtggcaaacgtgcggctcgtggtgtgagtgccagaagctgcctccgtggtttggtcaccgtgtgcatcgcaccgtgctgtaaatgtggcagacgcagcctgcggccaggctttttatttaatgtaaatagtttttgtttccaatgaggcagtttctggtactcctatgcaatattactcagctttttttattgtaaaaagaaaaatcaactcactgttcagtgctgagaggggatgtaggcccatgggcacctggcctccaggagtcgctgtgttgggagagccggccacgcccttggctttagagctgtgttgaaatccattttggtggttggtttttaacccaaactcagtgcattttttaaaatagttaagaatccaagtcgagaacacttgaacacacagaagggagaccccgcctagcatagatttgcagttacggcctggatgccagtcgccagcccagctgttcccctcgggaacatgaggtggtggtggcgcagcagactgcgatcaattctgcatggtcacagtagagatccccgcaactcgcttgtccttgggtcaccctgcattccatagccatgtgcttgtccctgtgctcccacggttcccaggggccaggctgggagcccacagccaccccactatgccgcaggccgccctacccaccttcaggcagcctatgggacgcagggccccatctgtccctcggtcgccgtgtggccagagtgggtccgtcgtccccaacactcgtgctcgctcagacactttggcaggatgtctggggcctcaccagcaggagcgcgtgcaagccgggcaggcggtccacctagacccacagcccctcgggagcaccccacctctgtgtgtgatgtagctttctctccctcagcctgcaagggtccgatttgccatcgaaaaagacaacctctacttttttcttttgtattttgataaacactgaagctggagctgttaaatttatcttggggaaacctcagaactggtctatttggtgtcgtggaacctcttactgctttcaatacacgattagtaatcaactgttttgtatacttgttttcagttttcatttcgacaaacaagcactgtaattatagctattagaataaaatctcttaactatttca

SEQ ID NO: 3213 - protein, 148 aa, Homo sapiens; identical to SEQ ID NO: 3205

SEQ ID NO: 3214 - DNA, 1594 bp, Homo sapiens
tcttgtgggagcaaaaccaacgcctggctcggagcagcagcctctgaggtgtccctggccagtgtccttccacctgtccacaagcatggggaacatcttcgccaacctcttcaagggcctttttggcaaaaaagaaatgcgcatcctcatggtgggcctggatgctgcagggaagaccacgatcctctacaagcttaagctgggtgagatcgtgaccaccattcccaccataggacctccccaacgccatgaatgcggccgagatcacagacaagctggggctgcactcactacgccacaggaactggtacattcaggccacctgcgccaccagcggcgacgggctctatgaaggactggactggctgtccaatcagctccggaaccagaagtgaacgcgacccccctccctctcactcctcttgccctctgctttactctcatgtggcaaacgtgcggctcgtggtgtgagtgccagaagctgcctccgtggtttggtcaccgtgtgcatcgcaccgtgctgtaaatgtggcagacgcagcctgcggccaggctttttatttaatgtaaatagtttttgtttccaatgaggcagtttctggtactcctatgcaatattactcagctttttttattgtaaaaagaaaaatcaactcactgttcagtgctgagaggggatgtaggcccatgggcacctggcctccaggagtcgctgtgttgggagagccggccacgcccttggctttagagctgtgttgaaatccattttggtggttggtttttaacccaaactcagtgcattttttaaaatagttaagaatccaagtcgagaacacttgaacacacagaagggagaccccgcctagcatagatttgcagttacggcctggatgccagtcgccagcccagctgttcccctcgggaacatgaggtggtggtggcgcagcagactgcgatcaattctgcatggtcacagtagagatccccgcaactcgcttgtccttgggtcaccctgcattccatagccatgtgcttgtccctgtgctcccacggttcccaggggccaggctgggagcccacagccaccccactatgccgcaggccgccctacccaccttcaggcagcctatgggacgcagggccccatctgtccctcggtcgccgtgtggccagagtgggtccgtcgtccccaacactcgtgctcgctcagacactttggcaggatgtctggggcctcaccagcaggagcgcgtgcaagccgggcaggcggtccacctagacccacagcccctcgggagcaccccacctctgtgtgtgatgtagctttctctccctcagcctgcaagggtccgatttgccatcgaaaaagacaacctctacttttttcttttgtattttgataaacactgaagctggagctgttaaatttatcttggggaaacctcagaactggtctatttggtgtcgtggaacctcttactgctttcaatacacgattagtaatcaactgttttgtatacttgttttcagttttcatttcgacaaacaagcactgtaattatagctattagaataaaatctcttaactatttca

SEQ ID NO: 3215 - protein, 88 aa, Homo sapiens
MGNIFANLFKGLFGKKEMRILMVGLDAAGKTTILYKLKLGEIVTTIPTIGPPQRHECGRDHRQAGAALTTPQELVHSGHLRHQRRRAL

SEQ ID NO: 3216 - DNA, 607 bp, Homo sapiens
cttgtgggagcaaaaccaacgcctggctcggagcagcagcctctgaggtgtccctggccagtgtccttccacctgtccacaagcatggggaacatcttcgccaacctcttcaagggcctttttggcaaaaaagaaatgcgcatcctcatggtgggcctggatgctgcagggaagaccacgatcctctacaagcttaagctgggtgagatcgtgaccaccattcccaccataggcttcaacgtggaaaccgtggagtacaagaacatcagcttcactgtgtgggacgtgggtggccaggacaagatccggcccctgtggcgccactacttccagaacacacaaggtaagtggctggggcctggtcccatgggcactcctgcttctagagagggggggccagcccatagatggggcatcgatgcccatagatgcggcaggggggctgtgttcccatgaccatttgacactggctgcccggcaggcctgatcttcgtggtggacagcaatgacagagagcgtgtgaacgaggcccgtgaggagctcatgaggatgctggccgaggacgagctccgggatgctgtcctcctggtgttcgccaacaagcagg

SEQ ID NO: 3217 - protein, 123 aa, Homo sapiens
MGNIFANLFKGLFGKKEMRILMVGLDAAGKTTILYKLKLGEIVTTIPTIGFNVETVEYKNISFTVWDVGGQDKIRPLWRHYFQNTQGKWLGPGPMGTPASREGGPAHRWGIDAHRCGRGAVFP

SEQ ID NO: 3218 - DNA, 634 bp, Homo sapiens
cttgtgggagcaaaaccaacgcctggctcggagcagcagcctctgaggtgtccctggccagtgtccttccacctgtccacaagcatggggaacatcttcgccaacctcttcaagggcctttttggcaaaaaagaaatgcgcatcctcatggtgggcctggatgctgcagggaagaccacgatcctctacaagcttaagctgggtgagatcgtgaccaccgccgccctacccaccttcaggcagcctatgggacgcagggccccatctgtccctcggtcgccgtgtggccagagtgggtccgtcgtccccaacactcgtgctcgctcagacactttggcaggatgtctggggcctcaccagcaggagcgcgtgcaagccgggcaggcggtccacctagacccacagcccctcgggagcaccccacctctgtgtgtgatgtagctttctctccctcagcctgcaagggtccgatttgccatcgaaaaagacaacctctacttttttcttttgtattttgataaacactgaagctggagctgttaaatttatcttggggaaacctcagaactggtctatttggtgtcgtggaacctcttactgctttcaatacacgattagtaatcaactgttttgt

SEQ ID NO: 3219 - protein, 118 aa, Homo sapiens
MGNIFANLFKGLFGKKEMRILMVGLDAAGKTTILYKLKLGEIVTTAALPTFRQPMGRRAPSVPRSPCGQSGSVVPNTRARSDTLAGCLGPHQQERVQAGQAVHLDPQPLGSTPPLCVM

SEQ ID NO: 3220 - DNA, 1515 bp, Homo sapiens
cttgtgggagcaaaaccaacgcctggctcggagcagcagcctctgaggtgtccctggccagtgtccttccacctgtccacaagcatggggaacatcttcgccaacctcttcaagggcctttttggcaaaaaagaaatgcgcatcctcatggtgggcctggatgctgcagggaagaccacgatcctctacaagcttaagctgggtgagatcgtgaccaccattcccaccataggacctccccaacgccatgaatgcggccgagatcacagacaagctggggctgcactcactacgccacaggaactggtacattcaggccacctgcgccaccagcggcgacgggctctatgaaggactggactggctgtccaatcagctccggaaccagaagtgaacgcgacccccctccctctcactcctcttgccctctgctttactctcatgtggcaaacgtgcggctcgtggtgtgagtgccagaagctgcctccgtggtttggtcaccgtgtgcatcgcaccgtgctgtaaatgtggcagacgcagcctgcggccaggctttttatttaatgtaaatagtttttgtttccaatgaggcagtttctggtactcctatgcaatattactcagctttttttattgtaaaaagaaaaatcaactcactgttcagtgctgagaggggatgtaggcccatgggcacctggcctccaggagtcgctgtgttgggagagccggccacgcccttggctttagagctgtgttgaaatccattttggtggttggtttttaacccaaactcagtgcattttttaaaatagttaagaatccaagtcgagaacacttgaacacacagaagggagaccccgcctagcatagatttgcagttacggcctggatgccagtcgccagcccagctgttcccctcgggaacatgaggtggtggtggcgcagcagactgcgatcaattctgcatggtcacagtagagatccccgcaactcgcttgtccttgggtcaccctgcattccatagccatgtgcttgtccctgtgctcccacggttcccaggggccaggctgggagcccacagccaccccactatgccgcaggccgccctacccaccttcaggcagcctatgggacgcagggccccatctgtccctcggtcgccgtgtggccagagtgggtccgtcgtccccaacactcgtgctcgctcagacactttggcaggatgtctggggcctcaccagcaggagcgcgtgcaagccgggcaggcggtccacctagacccacagcccctcgggagcaccccacctctgtgtgtgatgtagctttctctccctcagcctgcaagggtccgatttgccatcgaaaaagacaacctctacttttttcttttgtattttgataaacactgaagctggagctgttaaatttatcttggggaaacctcagaactggtctatttggtgtcgtggaacctcttactgctttcaatacacgattagtaatcaactgttttgt

SEQ ID NO: 3221 - protein, 88 aa, Homo sapiens; identical to SEQ ID NO: 3215

SEQ ID NO: 3222 - DNA, 712 bp, Homo sapiens
cttgtgggagcaaaaccaacgcctggctcggagcagcagcctctgaggtgtccctggccagtgtccttccacctgtccacaagcatggggaacatcttcgccaacctcttcaagggcctttttggcaaaaaagaaatgcgcatcctcatggtgggcctggatgctgcagggaagaccacgatcctctacaagcttaagctgggtgagatcgtgaccaccgccgccctacccaccttcaggcagcctatgggacgcagggccccatctgtccctcggtcgccgtgtggccagagtgggtccgtcgtccccaacactcgtgctcgctcagacactttggcaggatgtctggggcctcaccagcaggagcgcgtgcaagccgggcaggcggtccacctagacccacagcccctcgggagcaccccacctctgtgtgtgatgtagctttctctccctcagcctgcaagggtccgatttgccatcgaaaaagacaacctctacttttttcttttgtattttgataaacactgaagctggagctgttaaatttatcttggggaaacctcagaactggtctatttggtgtcgtggaacctcttactgctttcaatacacgattagtaatcaactgttttgtatacttgttttcagttttcatttcgacaaacaagcactgtaattatagctattagaataaaatctcttaactatttca

SEQ ID NO: 3223 - protein, 118 aa, Homo sapiens; identical to SEQ ID NO: 3219

SEQ ID NO: 3224 - DNA, 793 bp, Homo sapiens
gtgggagcaaaaccaacgcctggctcggagcagcagcctctgaggtgtccctggccagtgtccttccacctgtccacaagcatggagagcgtgtgaacgaggcccgtgaggagctcatgaggatgctggccgaggacgagctccgggatgctgtcctcctggtgttcgccaacaagcaggacctccccaacgccatgaatgcggccgagatcacagacaagctgggactgcgatcaattctgcatggtcacagtagagatccccgcaactcgcttgtccttgggtcaccctgcattccatagccatgtgcttgtccctgtgctcccacggttcccaggggccaggctgggagcccacagccaccccactatgccgcaggccgccctacccaccttcaggcagcctatgggacgcagggccccatctgtccctcggtcgccgtgtggccagagtgggtccgtcgtccccaacactcgtgctcgctcagacactttggcaggatgtctggggcctcaccagcaggagcgcgtgcaagccgggcaggcggtccacctagacccacagcccctcgggagcaccccacctctgtgtgtgatgtagctttctctccctcagcctgcaagggtccgatttgccatcgaaaaagacaacctctacttttttcttttgtattttgataaacactgaagctggagctgttaaatttatcttggggaaacctcagaactggtctatttggtgtcgtggaacctcttactgctttcaatacacgattagtaatcaactgttttgt

SEQ ID NO: 3225 - protein, 133 aa, Homo sapiens [sequence omitted]

SEQ ID NO: 3226 - DNA, 871 bp, Homo sapiens
gtgggagcaaaaccaacgcctggctcggagcagcagcctctgaggtgtccctggccagtgtccttccacctgtccacaagcatggagagcgtgtgaacgaggcccgtgaggagctcatgaggatgctggccgaggacgagctccgggatgctgtcctcctggtgttcgccaacaagcaggacctccccaacgccatgaatgcggccgagatcacagacaagctgggactgcgatcaattctgcatggtcacagtagagatccccgcaactcgcttgtccttgggtcaccctgcattccatagccatgtgcttgtccctgtgctcccacggttcccaggggccaggctgggagcccacagccaccccactatgccgcaggccgccctacccaccttcaggcagcctatgggacgcagggccccatctgtccctcggtcgccgtgtggccagagtgggtccgtcgtccccaacactcgtgctcgctcagacactttggcaggatgtctggggcctcaccagcaggagcgcgtgcaagccgggcaggcggtccacctagacccacagcccctcgggagcaccccacctctgtgtgtgatgtagctttctctccctcagcctgcaagggtccgatttgccatcgaaaaagacaacctctacttttttcttttgtattttgataaacactgaagctggagctgttaaatttatcttggggaaacctcagaactggtctatttggtgtcgtggaacctcttactgctttcaatacacgattagtaatcaactgttttgtatacttgttttcagttttcatttcgacaaacaagcactgtaattatagctattagaataaaatctcttaactatttca

SEQ ID NO: 3227 - protein, 133 aa, Homo sapiens [sequence omitted]

SEQ ID NO: 3228 - DNA, 795 bp, Homo sapiens
tgggagcaaaaccaacgcctggctcggagcagcagcctctgaggtgtccctggccagtgtccttccacctgtccacaagcatggggaacatcttcgccaacctcttcaagggcctttttggcaaaaaagaaatgcaccaccattcccaccataggcttcaacgtggaaaccgtggagtacaagaacatcagcttcactgtgtgggacgtgggtggccaggacaagatccggcccctgtggcgccactacttccagaacacacaaggcctgatcttcgtggtggacagcaatgacagagagcgtgtgaacgaggcccgtgaggagctcatgaggatgctggccgaggacgagctccgggatgctgtcctcctggtgttcgccaacaagcaggacctccccaacgccatgaatgcggccgagatcacagacaagctggggctgcactcactacgccacaggaactggtacattcaggccacctgcgccaccagcggcgacgggctctatgaaggactggactggctgtccaatcagctccggaaccagaagtgaacgcgacccccctccctctcactcctcttgccctctgctttactctcatgtggcaaacgtgcggctcgtggtgtgagtgccagaagctgcctccgtggtttggtcaccgtgtgcatcgcaccgtgctgtaaatgtggcagacgcagcctgcggccaggctttttatttaatgtaaatagtttttgtttccaatgaggcagtttctggtactcctatgcaatattactcagctttttttattgt

SEQ ID NO: 3229 - protein, 74 aa, Homo sapiens
MRMLAEDELRDAVLLVFANKQDLPNAMNAAEITDKLGLHSLRHRNWYIQATCATSGDGLYEGLDWLSNQLRNQK

SEQ ID NO: 3230 - DNA, 1673 bp, Homo sapiens
tgggagcaaaaccaacgcctggctcggagcagcagcctctgaggtgtccctggccagtgtccttccacctgtccacaagcatggggaacatcttcgccaacctcttcaagggcctttttggcaaaaaagaaatgcaccaccattcccaccataggcttcaacgtggaaaccgtggagtacaagaacatcagcttcactgtgtgggacgtgggtggccaggacaagatccggcccctgtggcgccactacttccagaacacacaaggcctgatcttcgtggtggacagcaatgacagagagcgtgtgaacgaggcccgtgaggagctcatgaggatgctggccgaggacgagctccgggatgctgtcctcctggtgttcgccaacaagcaggacctccccaacgccatgaatgcggccgagatcacagacaagctggggctgcactcactacgccacaggaactggtacattcaggccacctgcgccaccagcggcgacgggctctatgaaggactggactggctgtccaatcagctccggaaccagaagtgaacgcgacccccctccctctcactcctcttgccctctgctttactctcatgtggcaaacgtgcggctcgtggtgtgagtgccagaagctgcctccgtggtttggtcaccgtgtgcatcgcaccgtgctgtaaatgtggcagacgcagcctgcggccaggctttttatttaatgtaaatagtttttgtttccaatgaggcagtttctggtactcctatgcaatattactcagctttttttattgtaaaaagaaaaatcaactcactgttcagtgctgagaggggatgtaggcccatgggcacctggcctccaggagtcgctgtgttgggagagccggccacgcccttggctttagagctgtgttgaaatccattttggtggttggtttttaacccaaactcagtgcattttttaaaatagttaagaatccaagtcgagaacacttgaacacacagaagggagaccccgcctagcatagatttgcagttacggcctggatgccagtcgccagcccagctgttcccctcgggaacatgaggtggtggtggcgcagcagactgcgatcaattctgcatggtcacagtagagatccccgcaactcgcttgtccttgggtcaccctgcattccatagccatgtgcttgtccctgtgctcccacggttcccaggggccaggctgggagcccacagccaccccactatgccgcaggccgccctacccaccttcaggcagcctatgggacgcagggccccatctgtccctcggtcgccgtgtggccagagtgggtccgtcgtccccaacactcgtgctcgctcagacactttggcaggatgtctggggcctcaccagcaggagcgcgtgcaagccgggcaggcggtccacctagacccacagcccctcgggagcaccccacctctgtgtgtgatgtagctttctctccctcagcctgcaagggtccgatttgccatcgaaaaagacaacctctacttttttcttttgtattttgataaacactgaagctggagctgttaaatttatcttggggaaacctcagaactggtctatttggtgtcgtggaacctcttactgctttcaatacacgattagtaatcaactgttttgt

SEQ ID NO: 3231 - protein, 74 aa, Homo sapiens; identical to SEQ ID NO: 3229

SEQ ID NO: 3232 - DNA, 1751 bp, Homo sapiens
tgggagcaaaaccaacgcctggctcggagcagcagcctctgaggtgtccctggccagtgtccttccacctgtccacaagcatggggaacatcttcgccaacctcttcaagggcctttttggcaaaaaagaaatgcaccaccattcccaccataggcttcaacgtggaaaccgtggagtacaagaacatcagcttcactgtgtgggacgtgggtggccaggacaagatccggcccctgtggcgccactacttccagaacacacaaggcctgatcttcgtggtggacagcaatgacagagagcgtgtgaacgaggcccgtgaggagctcatgaggatgctggccgaggacgagctccgggatgctgtcctcctggtgttcgccaacaagcaggacctccccaacgccatgaatgcggccgagatcacagacaagctggggctgcactcactacgccacaggaactggtacattcaggccacctgcgccaccagcggcgacgggctctatgaaggactggactggctgtccaatcagctccggaaccagaagtgaacgcgacccccctccctctcactcctcttgccctctgctttactctcatgtggcaaacgtgcggctcgtggtgtgagtgccagaagctgcctccgtggtttggtcaccgtgtgcatcgcaccgtgctgtaaatgtggcagacgcagcctgcggccaggctttttatttaatgtaaatagtttttgtttccaatgaggcagtttctggtactcctatgcaatattactcagctttttttattgtaaaaagaaaaatcaactcactgttcagtgctgagaggggatgtaggcccatgggcacctggcctccaggagtcgctgtgttgggagagccggccacgcccttggctttagagctgtgttgaaatccattttggtggttggtttttaacccaaactcagtgcattttttaaaatagttaagaatccaagtcgagaacacttgaacacacagaagggagaccccgcctagcatagatttgcagttacggcctggatgccagtcgccagcccagctgttcccctcgggaacatgaggtggtggtggcgcagcagactgcgatcaattctgcatggtcacagtagagatccccgcaactcgcttgtccttgggtcaccctgcattccatagccatgtgcttgtccctgtgctcccacggttcccaggggccaggctgggagcccacagccaccccactatgccgcaggccgccctacccaccttcaggcagcctatgggacgcagggccccatctgtccctcggtcgccgtgtggccagagtgggtccgtcgtccccaacactcgtgctcgctcagacactttggcaggatgtctggggcctcaccagcaggagcgcgtgcaagccgggcaggcggtccacctagacccacagcccctcgggagcaccccacctctgtgtgtgatgtagctttctctccctcagcctgcaagggtccgatttgccatcgaaaaagacaacctctacttttttcttttgtattttgataaacactgaagctggagctgttaaatttatcttggggaaacctcagaactggtctatttggtgtcgtggaacctcttactgctttcaatacacgattagtaatcaactgttttgtatacttgttttcagttttcatttcgacaaacaagcactgtaattatagctattagaataaaatctcttaactatttca

SEQ ID NO: 3233 - protein, 74 aa, Homo sapiens; identical to SEQ ID NO: 3229

SEQ ID NO: 3234 - DNA, 565 bp, Homo sapiens
gagcaaaaccaacgcctggctcggagcagcagcctctgaggtgtccctggccagtgtccttccacctgtccacaagcatggggaacatcttcgccaacctcttcaagggcctttttggcaaaaaagaaatgctgtcctcctggtgttcgccaacaagcaggacctccccaacgccatgaatgcggccgagatcacagacaagctggggctgcactcactacgccacaggaactggtacattcaggccacctgcgccaccagcggcgacgggctctatgaaggactggactggctgtccaatcagctccggaaccagaagtgaacgcgacccccctccctctcactcctcttgccctctgctttactctcatgtggcaaacgtgcggctcgtggtgtgagtgccagaagctgcctccgtggtttggtcaccgtgtgcatcgcaccgtgctgtaaatgtggcagacgcagcctgcggccaggctttttatttaatgtaaatagtttttgtttccaatgaggcagtttctggtactcctatgcaatattactcagctttttttattgt

SEQ ID NO: 3235 - protein, 33 aa, Homo sapiens; identical to SEQ ID NO: 3175

SEQ ID NO: 3236 - DNA, 949 bp, Homo sapiens
gcaaaaccaacgcctggctcggagcagcagcctctgaggtgagggcgaggggcgcgggccggtgtgggccgcagagacgttggagccggcgggggctggggactggcctcggggcgacttgaggtgtccctggccagtgtccttccacctgtccacaagcatggggaacatcttcgccaacctcttcaagggcctttttggcaaaaaagaaatgcgcatcctcatggtgggcctggatgctgcagggaagaccacgatcctctacaagcttaagctgggtgagatcgtgaccaccattcccaccataggcttcaacgtggaaaccgtggagtacaagaacatcagcttcactgtgtgggacgtgggtggccaggacaagatccggcccctgtggcgccactacttccagaacacacaaggcctgatcttcgtggtggacagcaatgacagagagcgtgtgaacgaggcccgtgaggagctcatgaggatgctggccgaggacgagctccgggatgctgtcctcctggtgttcgccaacaagcaggacctccccaacgccatgaatgcggccgagatcacagacaagctggggctgcactcactacgccacaggaactggtacattcaggccacctgcgccaccagcggcgacgggctctatgaaggactggactggctgtccaatcagctccggaaccagaagtgaacgcgacccccctccctctcactcctcttgccctctgctttactctcatgtggcaaacgtgcggctcgtggtgtgagtgccagaagctgcctccgtggtttggtcaccgtgtgcatcgcaccgtgctgtaaatgtggcagacgcagcctgcggccaggctttttatttaatgtaaatagtttttgtttccaatgaggcagtttctggtactcctatgcaatattactcagctttttttattgt

SEQ ID NO: 3237 - protein, 181 aa, Homo sapiens; identical to SEQ ID NO: 177

SEQ ID NO: 3238 - DNA, 949 bp, Homo sapiens; identical to SEQ ID NO: 3236

SEQ ID NO: 3239 - protein, 181 aa, Homo sapiens; identical to SEQ ID NO: 177

SEQ ID NO: 3240 - DNA, 1430 bp, Homo sapiens
gcaaaaccaacgcctggctcggagcagcagcctctgaggtgtccctggccagtgtccttccacctgtccacaagcatggggaacatcttcgccaacctcttcaagggcctttttggcaaaaaagaaatgcgcatcctcatggtgggcctggatgctgcagggaagaccacgatcctctacaagcttaagctggggctgcactcactacgccacaggaactggtacattcaggccacctgcgccaccagcggcgacgggctctatgaaggactggactggctgtccaatcagctccggaaccagaagtgaacgcgacccccctccctctcactcctcttgccctctgctttactctcatgtggcaaacgtgcggctcgtggtgtgagtgccagaagctgcctccgtggtttggtcaccgtgtgcatcgcaccgtgctgtaaatgtggcagacgcagcctgcggccaggctttttatttaatgtaaatagtttttgtttccaatgaggcagtttctggtactcctatgcaatattactcagctttttttattgtaaaaagaaaaatcaactcactgttcagtgctgagaggggatgtaggcccatgggcacctggcctccaggagtcgctgtgttgggagagccggccacgcccttggctttagagctgtgttgaaatccattttggtggttggtttttaacccaaactcagtgcattttttaaaatagttaagaatccaagtcgagaacacttgaacacacagaagggagaccccgcctagcatagatttgcagttacggcctggatgccagtcgccagcccagctgttcccctcgggaacatgaggtggtggtggcgcagcagactgcgatcaattctgcatggtcacagtagagatccccgcaactcgcttgtccttgggtcaccctgcattccatagccatgtgcttgtccctgtgctcccacggttcccaggggccaggctgggagcccacagccaccccactatgccgcaggccgccctacccaccttcaggcagcctatgggacgcagggccccatctgtccctcggtcgccgtgtggccagagtgggtccgtcgtccccaacactcgtgctcgctcagacactttggcaggatgtctggggcctcaccagcaggagcgcgtgcaagccgggcaggcggtccacctagacccacagcccctcgggagcaccccacctctgtgtgtgatgtagctttctctccctcagcctgcaagggtccgatttgccatcgaaaaagacaacctctacttttttcttttgtattttgataaacactgaagctggagctgttaaatttatcttggggaaacctcagaactggtctatttggtgtcgtggaacctcttactgctttcaatacacgattagtaatcaactgttttgt

SEQ ID NO: 3241 - protein, 77 aa, Homo sapiens
MGNIFANLFKGLFGKKEMRILMVGLDAAGKTTILYKLKLGLHSLRHRNWYIQATCATSGDGLYEGLDWLSNQLRNQK

SEQ ID NO: 3242 - DNA, 1827 bp, Homo sapiens
gcaaaaccaacgcctggctcggagcagcagcctctgaggtgagggcgaggggcgcgggccggtgtgggccgcagagacgttggagccggcgggggctggggactggcctcggggcgacttgaggtgtccctggccagtgtccttccacctgtccacaagcatggggaacatcttcgccaacctcttcaagggcctttttggcaaaaaagaaatgcgcatcctcatggtgggcctggatgctgcagggaagaccacgatcctctacaagcttaagctgggtgagatcgtgaccaccattcccaccataggcttcaacgtggaaaccgtggagtacaagaacatcagcttcactgtgtgggacgtgggtggccaggacaagatccggcccctgtggcgccactacttccagaacacacaaggcctgatcttcgtggtggacagcaatgacagagagcgtgtgaacgaggcccgtgaggagctcatgaggatgctggccgaggacgagctccgggatgctgtcctcctggtgttcgccaacaagcaggacctccccaacgccatgaatgcggccgagatcacagacaagctggggctgcactcactacgccacaggaactggtacattcaggccacctgcgccaccagcggcgacgggctctatgaaggactggactggctgtccaatcagctccggaaccagaagtgaacgcgacccccctccctctcactcctcttgccctctgctttactctcatgtggcaaacgtgcggctcgtggtgtgagtgccagaagctgcctccgtggtttggtcaccgtgtgcatcgcaccgtgctgtaaatgtggcagacgcagcctgcggccaggctttttatttaatgtaaatagtttttgtttccaatgaggcagtttctggtactcctatgcaatattactcagctttttttattgtaaaaagaaaaatcaactcactgttcagtgctgagaggggatgtaggcccatgggcacctggcctccaggagtcgctgtgttgggagagccggccacgcccttggctttagagctgtgttgaaatccattttggtggttggtttttaacccaaactcagtgcattttttaaaatagttaagaatccaagtcgagaacacttgaacacacagaagggagaccccgcctagcatagatttgcagttacggcctggatgccagtcgccagcccagctgttcccctcgggaacatgaggtggtggtggcgcagcagactgcgatcaattctgcatggtcacagtagagatccccgcaactcgcttgtccttgggtcaccctgcattccatagccatgtgcttgtccctgtgctcccacggttcccaggggccaggctgggagcccacagccaccccactatgccgcaggccgccctacccaccttcaggcagcctatgggacgcagggccccatctgtccctcggtcgccgtgtggccagagtgggtccgtcgtccccaacactcgtgctcgctcagacactttggcaggatgtctggggcctcaccagcaggagcgcgtgcaagccgggcaggcggtccacctagacccacagcccctcgggagcaccccacctctgtgtgtgatgtagctttctctccctcagcctgcaagggtccgatttgccatcgaaaaagacaacctctacttttttcttttgtattttgataaacactgaagctggagctgttaaatttatcttggggaaacctcagaactggtctatttggtgtcgtggaacctcttactgctttcaatacacgattagtaatcaactgttttgt

SEQ ID NO: 3243 - protein, 181 aa, Homo sapiens; identical to SEQ ID NO: 177

SEQ ID NO: 3244 - DNA, 1508 bp, Homo sapiens
gcaaaaccaacgcctggctcggagcagcagcctctgaggtgtccctggccagtgtccttccacctgtccacaagcatggggaacatcttcgccaacctcttcaagggcctttttggcaaaaaagaaatgcgcatcctcatggtgggcctggatgctgcagggaagaccacgatcctctacaagcttaagctggggctgcactcactacgccacaggaactggtacattcaggccacctgcgccaccagcggcgacgggctctatgaaggactggactggctgtccaatcagctccggaaccagaagtgaacgcgacccccctccctctcactcctcttgccctctgctttactctcatgtggcaaacgtgcggctcgtggtgtgagtgccagaagctgcctccgtggtttggtcaccgtgtgcatcgcaccgtgctgtaaatgtggcagacgcagcctgcggccaggctttttatttaatgtaaatagtttttgtttccaatgaggcagtttctggtactcctatgcaatattactcagctttttttattgtaaaaagaaaaatcaactcactgttcagtgctgagaggggatgtaggcccatgggcacctggcctccaggagtcgctgtgttgggagagccggccacgcccttggctttagagctgtgttgaaatccattttggtggttggtttttaacccaaactcagtgcattttttaaaatagttaagaatccaagtcgagaacacttgaacacacagaagggagaccccgcctagcatagatttgcagttacggcctggatgccagtcgccagcccagctgttcccctcgggaacatgaggtggtggtggcgcagcagactgcgatcaattctgcatggtcacagtagagatccccgcaactcgcttgtccttgggtcaccctgcattccatagccatgtgcttgtccctgtgctcccacggttcccaggggccaggctgggagcccacagccaccccactatgccgcaggccgccctacccaccttcaggcagcctatgggacgcagggccccatctgtccctcggtcgccgtgtggccagagtgggtccgtcgtccccaacactcgtgctcgctcagacactttggcaggatgtctggggcctcaccagcaggagcgcgtgcaagccgggcaggcggtccacctagacccacagcccctcgggagcaccccacctctgtgtgtgatgtagctttctctccctcagcctgcaagggtccgatttgccatcgaaaaagacaacctctacttttttcttttgtattttgataaacactgaagctggagctgttaaatttatcttggggaaacctcagaactggtctatttggtgtcgtggaacctcttactgctttcaatacacgattagtaatcaactgttttgtatacttgttttcagttttcatttcgacaaacaagcactgtaattatagctattagaataaaatctcttaactatttca

SEQ ID NO: 3245 - protein, 77 aa, Homo sapiens; identical to SEQ ID NO: 3241

SEQ ID NO: 3246 - DNA, 916 bp, Homo sapiens
aaaaccaacgcctggctcggagcagcagcctctgagaggcgtctgggcagtggaggcccttcctgctggagtctccgcagggctctgatggtgtccctggccagtgtccttccacctgtccacaagcatggggaacatcttcgccaacctcttcaagggcctttttggcaaaaaagaaatgcgcatcctcatggtgggcctggatgctgcagggaagaccacgatcctctacaagcttaagctgggtgagatcgtgaccaccattcccaccataggcttcaacgtggaaaccgtggagtacaagaacatcagcttcactgtgtgggacgtgggtggccaggacaagatccggcccctgtggcgccactacttccagaacacacaaggcctgatcttcgtggtggacagcaatgacagagagcgtgtgaacgaggcccgtgaggagctcatgaggatgctggccgaggacgagctccgggatgctgtcctcctggtgttcgccaacaagcaggacctccccaacgccatgaatgcggccgagatcacagacaagctggggctgcactcactacgccacaggaactggtacattcaggccacctgcgccaccagcggcgacgggctctatgaaggactggactggctgtccaatcagctccggaaccagaagtgaacgcgacccccctccctctcactcctcttgccctctgctttactctcatgtggcaaacgtgcggctcgtggtgtgagtgccagaagctgcctccgtggtttggtcaccgtgtgcatcgcaccgtgctgtaaatgtggcagacgcagcctgcggccaggctttttatttaatgtaaatagtttttgtttccaatgaggcagtttctggtactcctatgcaatattactcagctttttttattgt

SEQ ID NO: 3247 - protein, 181 aa, Homo sapiens; identical to SEQ ID NO: 177

SEQ ID NO: 3248 - DNA, 1794 bp, Homo sapiens
aaaaccaacgcctggctcggagcagcagcctctgagaggcgtctgggcagtggaggcccttcctgctggagtctccgcagggctctgatggtgtccctggccagtgtccttccacctgtccacaagcatggggaacatcttcgccaacctcttcaagggcctttttggcaaaaaagaaatgcgcatcctcatggtgggcctggatgctgcagggaagaccacgatcctctacaagcttaagctgggtgagatcgtgaccaccattcccaccataggcttcaacgtggaaaccgtggagtacaagaacatcagcttcactgtgtgggacgtgggtggccaggacaagatccggcccctgtggcgccactacttccagaacacacaaggcctgatcttcgtggtggacagcaatgacagagagcgtgtgaacgaggcccgtgaggagctcatgaggatgctggccgaggacgagctccgggatgctgtcctcctggtgttcgccaacaagcaggacctccccaacgccatgaatgcggccgagatcacagacaagctggggctgcactcactacgccacaggaactggtacattcaggccacctgcgccaccagcggcgacgggctctatgaaggactggactggctgtccaatcagctccggaaccagaagtgaacgcgacccccctccctctcactcctcttgccctctgctttactctcatgtggcaaacgtgcggctcgtggtgtgagtgccagaagctgcctccgtggtttggtcaccgtgtgcatcgcaccgtgctgtaaatgtggcagacgcagcctgcggccaggctttttatttaatgtaaatagtttttgtttccaatgaggcagtttctggtactcctatgcaatattactcagctttttttattgtaaaaagaaaaatcaactcactgttcagtgctgagaggggatgtaggcccatgggcacctggcctccaggagtcgctgtgttgggagagccggccacgcccttggctttagagctgtgttgaaatccattttggtggttggtttttaacccaaactcagtgcattttttaaaatagttaagaatccaagtcgagaacacttgaacacacagaagggagaccccgcctagcatagatttgcagttacggcctggatgccagtcgccagcccagctgttcccctcgggaacatgaggtggtggtggcgcagcagactgcgatcaattctgcatggtcacagtagagatccccgcaactcgcttgtccttgggtcaccctgcattccatagccatgtgcttgtccctgtgctcccacggttcccaggggccaggctgggagcccacagccaccccactatgccgcaggccgccctacccaccttcaggcagcctatgggacgcagggccccatctgtccctcggtcgccgtgtggccagagtgggtccgtcgtccccaacactcgtgctcgctcagacactttggcaggatgtctggggcctcaccagcaggagcgcgtgcaagccgggcaggcggtccacctagacccacagcccctcgggagcaccccacctctgtgtgtgatgtagctttctctccctcagcctgcaagggtccgatttgccatcgaaaaagacaacctctacttttttcttttgtattttgataaacactgaagctggagctgttaaatttatcttggggaaacctcagaactggtctatttggtgtcgtggaacctcttactgctttcaatacacgattagtaatcaactgttttgt

SEQ ID NO: 3249 - protein, 181 aa, Homo sapiens; identical to SEQ ID NO: 177

SEQ ID NO: 3250 - DNA, 1872 bp, Homo sapiens
aaaaccaacgcctggctcggagcagcagcctctgagaggcgtctgggcagtggaggcccttcctgctggagtctccgcagggctctgatggtgtccctggccagtgtccttccacctgtccacaagcatggggaacatcttcgccaacctcttcaagggcctttttggcaaaaaagaaatgcgcatcctcatggtgggcctggatgctgcagggaagaccacgatcctctacaagcttaagctgggtgagatcgtgaccaccattcccaccataggcttcaacgtggaaaccgtggagtacaagaacatcagcttcactgtgtgggacgtgggtggccaggacaagatccggcccctgtggcgccactacttccagaacacacaaggcctgatcttcgtggtggacagcaatgacagagagcgtgtgaacgaggcccgtgaggagctcatgaggatgctggccgaggacgagctccgggatgctgtcctcctggtgttcgccaacaagcaggacctccccaacgccatgaatgcggccgagatcacagacaagctggggctgcactcactacgccacaggaactggtacattcaggccacctgcgccaccagcggcgacgggctctatgaaggactggactggctgtccaatcagctccggaaccagaagtgaacgcgacccccctccctctcactcctcttgccctctgctttactctcatgtggcaaacgtgcggctcgtggtgtgagtgccagaagctgcctccgtggtttggtcaccgtgtgcatcgcaccgtgctgtaaatgtggcagacgcagcctgcggccaggctttttatttaatgtaaatagtttttgtttccaatgaggcagtttctggtactcctatgcaatattactcagctttttttattgtaaaaagaaaaatcaactcactgttcagtgctgagaggggatgtaggcccatgggcacctggcctccaggagtcgctgtgttgggagagccggccacgcccttggctttagagctgtgttgaaatccattttggtggttggtttttaacccaaactcagtgcattttttaaaatagttaagaatccaagtcgagaacacttgaacacacagaagggagaccccgcctagcatagatttgcagttacggcctggatgccagtcgccagcccagctgttcccctcgggaacatgaggtggtggtggcgcagcagactgcgatcaattctgcatggtcacagtagagatccccgcaactcgcttgtccttgggtcaccctgcattccatagccatgtgcttgtccctgtgctcccacggttcccaggggccaggctgggagcccacagccaccccactatgccgcaggccgccctacccaccttcaggcagcctatgggacgcagggccccatctgtccctcggtcgccgtgtggccagagtgggtccgtcgtccccaacactcgtgctcgctcagacactttggcaggatgtctggggcctcaccagcaggagcgcgtgcaagccgggcaggcggtccacctagacccacagcccctcgggagcaccccacctctgtgtgtgatgtagctttctctccctcagcctgcaagggtccgatttgccatcgaaaaagacaacctctacttttttcttttgtattttgataaacactgaagctggagctgttaaatttatcttggggaaacctcagaactggtctatttggtgtcgtggaacctcttactgctttcaatacacgattagtaatcaactgttttgtatacttgttttcagttttcatttcgacaaacaagcactgtaattatagctattagaataaaatctcttaactatttca

SEQ ID NO: 3251 - protein, 181 aa, Homo sapiens; identical to SEQ ID NO: 177

SEQ ID NO: 3252 - DNA, 1393 bp, Homo sapiens
ccaacgcctggctcggagcagcagcctctgaggacctccccaacgccatgaatgcggccgagatcacagacaagctggggctgcactcactacgccacaggaactggtacattcaggccacctgcgccaccagcggcgacgggctctatgaaggactggactggctgtccaatcagctccggaaccagaagtgaacgcgacccccctccctctcactcctcttgccctctgctttactctcatgtggcaaacgtgcggctcgtggtgtgagtgccagaagctgcctccgtggtttggtcaccgtgtgcatcgcaccgtgctgtaaatgtggcagacgcagcctgcggccaggctttttatttaatgtaaatagtttttgtttccaatgaggcagtttctggtactcctatgcaatattactcagctttttttattgtaaaaagaaaaatcaactcactgttcagtgctgagaggggatgtaggcccatgggcacctggcctccaggagtcgctgtgttgggagagccggccacgcccttggctttagagctgtgttgaaatccattttggtggttggtttttaacccaaactcagtgcattttttaaaatagttaagaatccaagtcgagaacacttgaacacacagaagggagaccccgcctagcatagatttgcagttacggcctggatgccagtcgccagcccagctgttcccctcgggaacatgaggtggtggtggcgcagcagactgcgatcaattctgcatggtcacagtagagatccccgcaactcgcttgtccttgggtcaccctgcattccatagccatgtgcttgtccctgtgctcccacggttcccaggggccaggctgggagcccacagccaccccactatgccgcaggccgccctacccaccttcaggcagcctatgggacgcagggccccatctgtccctcggtcgccgtgtggccagagtgggtccgtcgtccccaacactcgtgctcgctcagacactttggcaggatgtctggggcctcaccagcaggagcgcgtgcaagccgggcaggcggtccacctagacccacagcccctcgggagcaccccacctctgtgtgtgatgtagctttctctccctcagcctgcaagggtccgatttgccatcgaaaaagacaacctctacttttttcttttgtattttgataaacactgaagctggagctgttaaatttatcttggggaaacctcagaactggtctatttggtgtcgtggaacctcttactgctttcaatacacgattagtaatcaactgttttgtatacttgttttcagttttcatttcgacaaacaagcactgtaattatagctattagaataaaatctcttaactatttca

SEQ ID NO: 3253 - protein, 118 aa, Homo sapiens [sequence omitted]

SEQ ID NO: 3254 - DNA, 1545 bp, Homo sapiens
cctggctcggagcagcagcctctgaggcttcaacgtggaaaccgtggagtacaagaacatcagcttcactgtgtgggacgtgggtggccaggacaagatccggcccctgtggcgccactacttccagaacacacaaggcctgatcttcgtggtggacagcaatgacagagagcgtgtgaacgaggcccgtgaggagctcatgaggatgctggccgaggacgagctccgggatgctgtcctcctggtgttcgccaacaagcaggacctccccaacgccatgaatgcggccgagatcacagacaagctggggctgcactcactacgccacaggaactggtacattcaggccacctgcgccaccagcggcgacgggctctatgaaggactggactggctgtccaatcagctccggaaccagaagtgaacgcgacccccctccctctcactcctcttgccctctgctttactctcatgtggcaaacgtgcggctcgtggtgtgagtgccagaagctgcctccgtggtttggtcaccgtgtgcatcgcaccgtgctgtaaatgtggcagacgcagcctgcggccaggctttttatttaatgtaaatagtttttgtttccaatgaggcagtttctggtactcctatgcaatattactcagctttttttattgtaaaaagaaaaatcaactcactgttcagtgctgagaggggatgtaggcccatgggcacctggcctccaggagtcgctgtgttgggagagccggccacgcccttggctttagagctgtgttgaaatccattttggtggttggtttttaacccaaactcagtgcattttttaaaatagttaagaatccaagtcgagaacacttgaacacacagaagggagaccccgcctagcatagatttgcagttacggcctggatgccagtcgccagcccagctgttcccctcgggaacatgaggtggtggtggcgcagcagactgcgatcaattctgcatggtcacagtagagatccccgcaactcgcttgtccttgggtcaccctgcattccatagccatgtgcttgtccctgtgctcccacggttcccaggggccaggctgggagcccacagccaccccactatgccgcaggccgccctacccaccttcaggcagcctatgggacgcagggccccatctgtccctcggtcgccgtgtggccagagtgggtccgtcgtccccaacactcgtgctcgctcagacactttggcaggatgtctggggcctcaccagcaggagcgcgtgcaagccgggcaggcggtccacctagacccacagcccctcgggagcaccccacctctgtgtgtgatgtagctttctctccctcagcctgcaagggtccgatttgccatcgaaaaagacaacctctacttttttcttttgtattttgataaacactgaagctggagctgttaaatttatcttggggaaacctcagaactggtctatttggtgtcgtggaacctcttactgctttcaatacacgattagtaatcaactgttttgt

SEQ ID NO: 3255 - protein, 74 aa, Homo sapiens; identical to SEQ ID NO: 3229

SEQ ID NO: 3256 - DNA, 1623 bp, Homo sapiens
cctggctcggagcagcagcctctgaggcttcaacgtggaaaccgtggagtacaagaacatcagcttcactgtgtgggacgtgggtggccaggacaagatccggcccctgtggcgccactacttccagaacacacaaggcctgatcttcgtggtggacagcaatgacagagagcgtgtgaacgaggcccgtgaggagctcatgaggatgctggccgaggacgagctccgggatgctgtcctcctggtgttcgccaacaagcaggacctccccaacgccatgaatgcggccgagatcacagacaagctggggctgcactcactacgccacaggaactggtacattcaggccacctgcgccaccagcggcgacgggctctatgaaggactggactggctgtccaatcagctccggaaccagaagtgaacgcgacccccctccctctcactcctcttgccctctgctttactctcatgtggcaaacgtgcggctcgtggtgtgagtgccagaagctgcctccgtggtttggtcaccgtgtgcatcgcaccgtgctgtaaatgtggcagacgcagcctgcggccaggctttttatttaatgtaaatagtttttgtttccaatgaggcagtttctggtactcctatgcaatattactcagctttttttattgtaaaaagaaaaatcaactcactgttcagtgctgagaggggatgtaggcccatgggcacctggcctccaggagtcgctgtgttgggagagccggccacgcccttggctttagagctgtgttgaaatccattttggtggttggtttttaacccaaactcagtgcattttttaaaatagttaagaatccaagtcgagaacacttgaacacacagaagggagaccccgcctagcatagatttgcagttacggcctggatgccagtcgccagcccagctgttcccctcgggaacatgaggtggtggtggcgcagcagactgcgatcaattctgcatggtcacagtagagatccccgcaactcgcttgtccttgggtcaccctgcattccatagccatgtgcttgtccctgtgctcccacggttcccaggggccaggctgggagcccacagccaccccactatgccgcaggccgccctacccaccttcaggcagcctatgggacgcagggccccatctgtccctcggtcgccgtgtggccagagtgggtccgtcgtccccaacactcgtgctcgctcagacactttggcaggatgtctggggcctcaccagcaggagcgcgtgcaagccgggcaggcggtccacctagacccacagcccctcgggagcaccccacctctgtgtgtgatgtagctttctctccctcagcctgcaagggtccgatttgccatcgaaaaagacaacctctacttttttcttttgtattttgataaacactgaagctggagctgttaaatttatcttggggaaacctcagaactggtctatttggtgtcgtggaacctcttactgctttcaatacacgattagtaatcaactgttttgtatacttgttttcagttttcatttcgacaaacaagcactgtaattatagctattagaataaaatctcttaactatttca

SEQ ID NO: 3257 - protein, 74 aa, Homo sapiens; identical to SEQ ID NO: 3229

SEQ ID NO: 3258 - DNA, 365 bp, Homo sapiens
gagggcgaggggcgcgggccggtgtgggccgcagagacgttggagccggcgggggctggggactggcctcggggcgacttgaggtgtccctggccagtgtccttccacctgtccacaagcatggggaacatcttcgccaacctcttcaagggcctttttggcaaaaaagaaatgcgcatcctcatggtgggcctggatgctgcagggaagaccacgatcctctacaagcttaagctgggtgagatcgtgaccaccattcccaccataggcttcaacgtggaaaccgtggagtacaagaacatcagcttcactgtgtgggacgtgggtggccaggacaagatccggcccctgtggcgccactactt

SEQ ID NO: 3259 - protein, 80 aa, Homo sapiens
MGNIFANLFKGLFGKKEMRILMVGLDAAGKTTILYKLKLGEIVTTIPTIGFNVETVEYKNISFTVWDVGGQDKIRPLWRH

SEQ ID NO: 3260 - DNA, 940 bp, Homo sapiens
gtgggccgcagagacgttggagccggcgggggctggggactggcctcggggcgacttgagaggcgtctgggcagtggaggcccttcctgctggagtctccgcagggctctgatggtgtccctggccagtgtccttccacctgtccacaagcatggggaacatcttcgccaacctcttcaagggcctttttggcaaaaaagaaatgcgcatcctcatggtgggcctggatgctgcagggaagaccacgatcctctacaagcttaagctgggtgagatcgtgaccaccattcccaccataggcttcaacgtggaaaccgtggagtacaagaacatcagcttcactgtgtgggacgtgggtggccaggacaagatccggcccctgtggcgccactacttccagaacacacaaggcctgatcttcgtggtggacagcaatgacagagagcgtgtgaacgaggcccgtgaggagctcatgaggatgctggccgaggacgagctccgggatgctgtcctcctggtgttcgccaacaagcaggacctccccaacgccatgaatgcggccgagatcacagacaagctggggctgcactcactacgccacaggaactggtacattcaggccacctgcgccaccagcggcgacgggctctatgaaggactggactggctgtccaatcagctccggaaccagaagtgaacgcgacccccctccctctcactcctcttgccctctgctttactctcatgtggcaaacgtgcggctcgtggtgtgagtgccagaagctgcctccgtggtttggtcaccgtgtgcatcgcaccgtgctgtaaatgtggcagacgcagcctgcggccaggctttttatttaatgtaaatagtttttgtttccaatgaggcagtttctggtactcctatgcaatattactcagctttttttattgt

SEQ ID NO: 3261 - protein, 181 aa, Homo sapiens; identical to SEQ ID NO: 177

SEQ ID NO: 3262 - DNA, 1818 bp, Homo sapiens
gtgggccgcagagacgttggagccggcgggggctggggactggcctcggggcgacttgagaggcgtctgggcagtggaggcccttcctgctggagtctccgcagggctctgatggtgtccctggccagtgtccttccacctgtccacaagcatggggaacatcttcgccaacctcttcaagggcctttttggcaaaaaagaaatgcgcatcctcatggtgggcctggatgctgcagggaagaccacgatcctctacaagcttaagctgggtgagatcgtgaccaccattcccaccataggcttcaacgtggaaaccgtggagtacaagaacatcagcttcactgtgtgggacgtgggtggccaggacaagatccggcccctgtggcgccactacttccagaacacacaaggcctgatcttcgtggtggacagcaatgacagagagcgtgtgaacgaggcccgtgaggagctcatgaggatgctggccgaggacgagctccgggatgctgtcctcctggtgttcgccaacaagcaggacctccccaacgccatgaatgcggccgagatcacagacaagctggggctgcactcactacgccacaggaactggtacattcaggccacctgcgccaccagcggcgacgggctctatgaaggactggactggctgtccaatcagctccggaaccagaagtgaacgcgacccccctccctctcactcctcttgccctctgctttactctcatgtggcaaacgtgcggctcgtggtgtgagtgccagaagctgcctccgtggtttggtcaccgtgtgcatcgcaccgtgctgtaaatgtggcagacgcagcctgcggccaggctttttatttaatgtaaatagtttttgtttccaatgaggcagtttctggtactcctatgcaatattactcagctttttttattgtaaaaagaaaaatcaactcactgttcagtgctgagaggggatgtaggcccatgggcacctggcctccaggagtcgctgtgttgggagagccggccacgcccttggctttagagctgtgttgaaatccattttggtggttggtttttaacccaaactcagtgcattttttaaaatagttaagaatccaagtcgagaacacttgaacacacagaagggagaccccgcctagcatagatttgcagttacggcctggatgccagtcgccagcccagctgttcccctcgggaacatgaggtggtggtggcgcagcagactgcgatcaattctgcatggtcacagtagagatccccgcaactcgcttgtccttgggtcaccctgcattccatagccatgtgcttgtccctgtgctcccacggttcccaggggccaggctgggagcccacagccaccccactatgccgcaggccgccctacccaccttcaggcagcctatgggacgcagggccccatctgtccctcggtcgccgtgtggccagagtgggtccgtcgtccccaacactcgtgctcgctcagacactttggcaggatgtctggggcctcaccagcaggagcgcgtgcaagccgggcaggcggtccacctagacccacagcccctcgggagcaccccacctctgtgtgtgatgtagctttctctccctcagcctgcaagggtccgatttgccatcgaaaaagacaacctctacttttttcttttgtattttgataaacactgaagctggagctgttaaatttatcttggggaaacctcagaactggtctatttggtgtcgtggaacctcttactgctttcaatacacgattagtaatcaactgttttgt

SEQ ID NO: 3263 - protein, 181 aa, Homo sapiens; identical to SEQ ID NO: 177

SEQ ID NO: 3264 - DNA, 1896 bp, Homo sapiens
gtgggccgcagagacgttggagccggcgggggctggggactggcctcggggcgacttgagaggcgtctgggcagtggaggcccttcctgctggagtctccgcagggctctgatggtgtccctggccagtgtccttccacctgtccacaagcatggggaacatcttcgccaacctcttcaagggcctttttggcaaaaaagaaatgcgcatcctcatggtgggcctggatgctgcagggaagaccacgatcctctacaagcttaagctgggtgagatcgtgaccaccattcccaccataggcttcaacgtggaaaccgtggagtacaagaacatcagcttcactgtgtgggacgtgggtggccaggacaagatccggcccctgtggcgccactacttccagaacacacaaggcctgatcttcgtggtggacagcaatgacagagagcgtgtgaacgaggcccgtgaggagctcatgaggatgctggccgaggacgagctccgggatgctgtcctcctggtgttcgccaacaagcaggacctccccaacgccatgaatgcggccgagatcacagacaagctggggctgcactcactacgccacaggaactggtacattcaggccacctgcgccaccagcggcgacgggctctatgaaggactggactggctgtccaatcagctccggaaccagaagtgaacgcgacccccctccctctcactcctcttgccctctgctttactctcatgtggcaaacgtgcggctcgtggtgtgagtgccagaagctgcctccgtggtttggtcaccgtgtgcatcgcaccgtgctgtaaatgtggcagacgcagcctgcggccaggctttttatttaatgtaaatagtttttgtttccaatgaggcagtttctggtactcctatgcaatattactcagctttttttattgtaaaaagaaaaatcaactcactgttcagtgctgagaggggatgtaggcccatgggcacctggcctccaggagtcgctgtgttgggagagccggccacgcccttggctttagagctgtgttgaaatccattttggtggttggtttttaacccaaactcagtgcattttttaaaatagttaagaatccaagtcgagaacacttgaacacacagaagggagaccccgcctagcatagatttgcagttacggcctggatgccagtcgccagcccagctgttcccctcgggaacatgaggtggtggtggcgcagcagactgcgatcaattctgcatggtcacagtagagatccccgcaactcgcttgtccttgggtcaccctgcattccatagccatgtgcttgtccctgtgctcccacggttcccaggggccaggctgggagcccacagccaccccactatgccgcaggccgccctacccaccttcaggcagcctatgggacgcagggccccatctgtccctcggtcgccgtgtggccagagtgggtccgtcgtccccaacactcgtgctcgctcagacactttggcaggatgtctggggcctcaccagcaggagcgcgtgcaagccgggcaggcggtccacctagacccacagcccctcgggagcaccccacctctgtgtgtgatgtagctttctctccctcagcctgcaagggtccgatttgccatcgaaaaagacaacctctacttttttcttttgtattttgataaacactgaagctggagctgttaaatttatcttggggaaacctcagaactggtctatttggtgtcgtggaacctcttactgctttcaatacacgattagtaatcaactgttttgtatacttgttttcagttttcatttcgacaaacaagcactgtaattatagctattagaataaaatctcttaactatttca

SEQ ID NO: 3265 - protein, 181 aa, Homo sapiens; identical to SEQ ID NO: 177

SEQ ID NO: 3266 - DNA, 403 bp, Homo sapiens
gccgcccgcgcgtggacggttgggattagcggccgcgggggccggtgggggtcgtggggcctcccccacccgagtacaggcgagcgagcggcatccgggcggacccccgcctcggggaccgggaaactgaggctcgggcggcctgagacgccgtcaaggtcatgtaggtggtgggggcttgcatcttcgcctcccgactccatccagttcgtgtttgctgtgaagacggtgtccctggccagtgtccttccacctgtccacaagcatggggaacatcttcgccaacctcttcaagggcctttttggcaaaaaagaaatgcgcatcctcatggtgggcctggatgctgcagggaagaccacgatcctctacaagcttaagctgggtgagatcgtgaccaccatt

SEQ ID NO: 3267 - protein, 45 aa, Homo sapiens
MGNIFANLFKGLFGKKEMRILMVGLDAAGKTTILYKLKLGEIVTT

SEQ ID NO: 3268 - DNA, 1054 bp, Homo sapiens
gccgcccgcgcgtggacggttgggattagcggccgcgggggccggtgggggtcgtggggcctcccccacccgagtacaggcgagcgagcggcatccgggcggacccccgcctcggggaccgggaaactgaggctcgggcggcctgagacgccgtcaaggtcatgtaggtggtgggggcttgcatcttcgcctcccgactccatccagttcgtgtttgctgtgaagacggtgtccctggccagtgtccttccacctgtccacaagcatggggaacatcttcgccaacctcttcaagggcctttttggcaaaaaagaaatgcgcatcctcatggtgggcctggatgctgcagggaagaccacgatcctctacaagcttaagctgggtgagatcgtgaccaccattcccaccataggcttcaacgtggaaaccgtggagtacaagaacatcagcttcactgtgtgggacgtgggtggccaggacaagatccggcccctgtggcgccactacttccagaacacacaaggcctgatcttcgtggtggacagcaatgacagagagcgtgtgaacgaggcccgtgaggagctcatgaggatgctggccgaggacgagctccgggatgctgtcctcctggtgttcgccaacaagcaggacctccccaacgccatgaatgcggccgagatcacagacaagctggggctgcactcactacgccacaggaactggtacattcaggccacctgcgccaccagcggcgacgggctctatgaaggactggactggctgtccaatcagctccggaaccagaagtgaacgcgacccccctccctctcactcctcttgccctctgctttactctcatgtggcaaacgtgcggctcgtggtgtgagtgccagaagctgcctccgtggtttggtcaccgtgtgcatcgcaccgtgctgtaaatgtggcagacgcagcctgcggccaggctttttatttaatgtaaatagtttttgtttccaatgaggcagtttctggtactcctatgcaatattactcagctttttttattgt

SEQ ID NO: 3269 - protein, 181 aa, Homo sapiens; identical to SEQ ID NO: 177

SEQ ID NO: 3270 - DNA, 1932 bp, Homo sapiens
gccgcccgcgcgtggacggttgggattagcggccgcgggggccggtgggggtcgtggggcctcccccacccgagtacaggcgagcgagcggcatccgggcggacccccgcctcggggaccgggaaactgaggctcgggcggcctgagacgccgtcaaggtcatgtaggtggtgggggcttgcatcttcgcctcccgactccatccagttcgtgtttgctgtgaagacggtgtccctggccagtgtccttccacctgtccacaagcatggggaacatcttcgccaacctcttcaagggcctttttggcaaaaaagaaatgcgcatcctcatggtgggcctggatgctgcagggaagaccacgatcctctacaagcttaagctgggtgagatcgtgaccaccattcccaccataggcttcaacgtggaaaccgtggagtacaagaacatcagcttcactgtgtgggacgtgggtggccaggacaagatccggcccctgtggcgccactacttccagaacacacaaggcctgatcttcgtggtggacagcaatgacagagagcgtgtgaacgaggcccgtgaggagctcatgaggatgctggccgaggacgagctccgggatgctgtcctcctggtgttcgccaacaagcaggacctccccaacgccatgaatgcggccgagatcacagacaagctggggctgcactcactacgccacaggaactggtacattcaggccacctgcgccaccagcggcgacgggctctatgaaggactggactggctgtccaatcagctccggaaccagaagtgaacgcgacccccctccctctcactcctcttgccctctgctttactctcatgtggcaaacgtgcggctcgtggtgtgagtgccagaagctgcctccgtggtttggtcaccgtgtgcatcgcaccgtgctgtaaatgtggcagacgcagcctgcggccaggctttttatttaatgtaaatagtttttgtttccaatgaggcagtttctggtactcctatgcaatattactcagctttttttattgtaaaaagaaaaatcaactcactgttcagtgctgagaggggatgtaggcccatgggcacctggcctccaggagtcgctgtgttgggagagccggccacgcccttggctttagagctgtgttgaaatccattttggtggttggtttttaacccaaactcagtgcattttttaaaatagttaagaatccaagtcgagaacacttgaacacacagaagggagaccccgcctagcatagatttgcagttacggcctggatgccagtcgccagcccagctgttcccctcgggaacatgaggtggtggtggcgcagcagactgcgatcaattctgcatggtcacagtagagatccccgcaactcgcttgtccttgggtcaccctgcattccatagccatgtgcttgtccctgtgctcccacggttcccaggggccaggctgggagcccacagccaccccactatgccgcaggccgccctacccaccttcaggcagcctatgggacgcagggccccatctgtccctcggtcgccgtgtggccagagtgggtccgtcgtccccaacactcgtgctcgctcagacactttggcaggatgtctggggcctcaccagcaggagcgcgtgcaagccgggcaggcggtccacctagacccacagcccctcgggagcaccccacctctgtgtgtgatgtagctttctctccctcagcctgcaagggtccgatttgccatcgaaaaagacaacctctacttttttcttttgtattttgataaacactgaagctggagctgttaaatttatcttggggaaacctcagaactggtctatttggtgtcgtggaacctcttactgctttcaatacacgattagtaatcaactgttttgt

SEQ ID NO: 3271 - protein, 181 aa, Homo sapiens; identical to SEQ ID NO: 177

SEQ ID NO: 3272 - DNA, 2010 bp, Homo sapiens
gccgcccgcgcgtggacggttgggattagcggccgcgggggccggtgggggtcgtggggcctcccccacccgagtacaggcgagcgagcggcatccgggcggacccccgcctcggggaccgggaaactgaggctcgggcggcctgagacgccgtcaaggtcatgtaggtggtgggggcttgcatcttcgcctcccgactccatccagttcgtgtttgctgtgaagacggtgtccctggccagtgtccttccacctgtccacaagcatggggaacatcttcgccaacctcttcaagggcctttttggcaaaaaagaaatgcgcatcctcatggtgggcctggatgctgcagggaagaccacgatcctctacaagcttaagctgggtgagatcgtgaccaccattcccaccataggcttcaacgtggaaaccgtggagtacaagaacatcagcttcactgtgtgggacgtgggtggccaggacaagatccggcccctgtggcgccactacttccagaacacacaaggcctgatcttcgtggtggacagcaatgacagagagcgtgtgaacgaggcccgtgaggagctcatgaggatgctggccgaggacgagctccgggatgctgtcctcctggtgttcgccaacaagcaggacctccccaacgccatgaatgcggccgagatcacagacaagctggggctgcactcactacgccacaggaactggtacattcaggccacctgcgccaccagcggcgacgggctctatgaaggactggactggctgtccaatcagctccggaaccagaagtgaacgcgacccccctccctctcactcctcttgccctctgctttactctcatgtggcaaacgtgcggctcgtggtgtgagtgccagaagctgcctccgtggtttggtcaccgtgtgcatcgcaccgtgctgtaaatgtggcagacgcagcctgcggccaggctttttatttaatgtaaatagtttttgtttccaatgaggcagtttctggtactcctatgcaatattactcagctttttttattgtaaaaagaaaaatcaactcactgttcagtgctgagaggggatgtaggcccatgggcacctggcctccaggagtcgctgtgttgggagagccggccacgcccttggctttagagctgtgttgaaatccattttggtggttggtttttaacccaaactcagtgcattttttaaaatagttaagaatccaagtcgagaacacttgaacacacagaagggagaccccgcctagcatagatttgcagttacggcctggatgccagtcgccagcccagctgttcccctcgggaacatgaggtggtggtggcgcagcagactgcgatcaattctgcatggtcacagtagagatccccgcaactcgcttgtccttgggtcaccctgcattccatagccatgtgcttgtccctgtgctcccacggttcccaggggccaggctgggagcccacagccaccccactatgccgcaggccgccctacccaccttcaggcagcctatgggacgcagggccccatctgtccctcggtcgccgtgtggccagagtgggtccgtcgtccccaacactcgtgctcgctcagacactttggcaggatgtctggggcctcaccagcaggagcgcgtgcaagccgggcaggcggtccacctagacccacagcccctcgggagcaccccacctctgtgtgtgatgtagctttctctccctcagcctgcaagggtccgatttgccatcgaaaaagacaacctctacttttttcttttgtattttgataaacactgaagctggagctgttaaatttatcttggggaaacctcagaactggtctatttggtgtcgtggaacctcttactgctttcaatacacgattagtaatcaactgttttgtatacttgttttcagttttcatttcgacaaacaagcactgtaattatagctattagaataaaatctcttaactatttca

SEQ ID NO: 3273 - protein, 181 aa, Homo sapiens; identical to SEQ ID NO: 177

SEQ ID NO: 3274 - DNA, 1027 bp, Homo sapiens
aggaagccctgcttgatgagcatgaggctccacgggggcagtggctgtgacggtgagtgccacacagagctgcccacactggtggagggaaggcagggagataccaggaccatccggaaggggctgagtgtcatttgacaggtgccatgtgagcagagatgtgaaggagtggcccgggacaatcagggcagaatccctgaggtgtccctggccagtgtccttccacctgtccacaagcatggggaacatcttcgccaacctcttcaagggcctttttggcaaaaaagaaatgcgcatcctcatggtgggcctggatgctgcagggaagaccacgatcctctacaagcttaagctgggtgagatcgtgaccaccattcccaccataggcttcaacgtggaaaccgtggagtacaagaacatcagcttcactgtgtgggacgtgggtggccaggacaagatccggcccctgtggcgccactacttccagaacacacaaggcctgatcttcgtggtggacagcaatgacagagagcgtgtgaacgaggcccgtgaggagctcatgaggatgctggccgaggacgagctccgggatgctgtcctcctggtgttcgccaacaagcaggacctccccaacgccatgaatgcggccgagatcacagacaagctggggctgcactcactacgccacaggaactggtacattcaggccacctgcgccaccagcggcgacgggctctatgaaggactggactggctgtccaatcagctccggaaccagaagtgaacgcgacccccctccctctcactcctcttgccctctgctttactctcatgtggcaaacgtgcggctcgtggtgtgagtgccagaagctgcctccgtggtttggtcaccgtgtgcatcgcaccgtgctgtaaatgtggcagacgcagcctgcggccaggctttttatttaatgtaaatagtttttgtttccaatgaggcagtttctggtactcctatgcaatattactcagctttttttattgt

SEQ ID NO: 3275 - protein, 181 aa, Homo sapiens; identical to SEQ ID NO: 177

SEQ ID NO: 3276 - DNA, 1905 bp, Homo sapiens
aggaagccctgcttgatgagcatgaggctccacgggggcagtggctgtgacggtgagtgccacacagagctgcccacactggtggagggaaggcagggagataccaggaccatccggaaggggctgagtgtcatttgacaggtgccatgtgagcagagatgtgaaggagtggcccgggacaatcagggcagaatccctgaggtgtccctggccagtgtccttccacctgtccacaagcatggggaacatcttcgccaacctcttcaagggcctttttggcaaaaaagaaatgcgcatcctcatggtgggcctggatgctgcagggaagaccacgatcctctacaagcttaagctgggtgagatcgtgaccaccattcccaccataggcttcaacgtggaaaccgtggagtacaagaacatcagcttcactgtgtgggacgtgggtggccaggacaagatccggcccctgtggcgccactacttccagaacacacaaggcctgatcttcgtggtggacagcaatgacagagagcgtgtgaacgaggcccgtgaggagctcatgaggatgctggccgaggacgagctccgggatgctgtcctcctggtgttcgccaacaagcaggacctccccaacgccatgaatgcggccgagatcacagacaagctggggctgcactcactacgccacaggaactggtacattcaggccacctgcgccaccagcggcgacgggctctatgaaggactggactggctgtccaatcagctccggaaccagaagtgaacgcgacccccctccctctcactcctcttgccctctgctttactctcatgtggcaaacgtgcggctcgtggtgtgagtgccagaagctgcctccgtggtttggtcaccgtgtgcatcgcaccgtgctgtaaatgtggcagacgcagcctgcggccaggctttttatttaatgtaaatagtttttgtttccaatgaggcagtttctggtactcctatgcaatattactcagctttttttattgtaaaaagaaaaatcaactcactgttcagtgctgagaggggatgtaggcccatgggcacctggcctccaggagtcgctgtgttgggagagccggccacgcccttggctttagagctgtgttgaaatccattttggtggttggtttttaacccaaactcagtgcattttttaaaatagttaagaatccaagtcgagaacacttgaacacacagaagggagaccccgcctagcatagatttgcagttacggcctggatgccagtcgccagcccagctgttcccctcgggaacatgaggtggtggtggcgcagcagactgcgatcaattctgcatggtcacagtagagatccccgcaactcgcttgtccttgggtcaccctgcattccatagccatgtgcttgtccctgtgctcccacggttcccaggggccaggctgggagcccacagccaccccactatgccgcaggccgccctacccaccttcaggcagcctatgggacgcagggccccatctgtccctcggtcgccgtgtggccagagtgggtccgtcgtccccaacactcgtgctcgctcagacactttggcaggatgtctggggcctcaccagcaggagcgcgtgcaagccgggcaggcggtccacctagacccacagcccctcgggagcaccccacctctgtgtgtgatgtagctttctctccctcagcctgcaagggtccgatttgccatcgaaaaagacaacctctacttttttcttttgtattttgataaacactgaagctggagctgttaaatttatcttggggaaacctcagaactggtctatttggtgtcgtggaacctcttactgctttcaatacacgattagtaatcaactgttttgt

SEQ ID NO: 3277 - protein, 181 aa, Homo sapiens; identical to SEQ ID NO: 177

SEQ ID NO: 3278 - DNA, 1983 bp, Homo sapiens
aggaagccctgcttgatgagcatgaggctccacgggggcagtggctgtgacggtgagtgccacacagagctgcccacactggtggagggaaggcagggagataccaggaccatccggaaggggctgagtgtcatttgacaggtgccatgtgagcagagatgtgaaggagtggcccgggacaatcagggcagaatccctgaggtgtccctggccagtgtccttccacctgtccacaagcatggggaacatcttcgccaacctcttcaagggcctttttggcaaaaaagaaatgcgcatcctcatggtgggcctggatgctgcagggaagaccacgatcctctacaagcttaagctgggtgagatcgtgaccaccattcccaccataggcttcaacgtggaaaccgtggagtacaagaacatcagcttcactgtgtgggacgtgggtggccaggacaagatccggcccctgtggcgccactacttccagaacacacaaggcctgatcttcgtggtggacagcaatgacagagagcgtgtgaacgaggcccgtgaggagctcatgaggatgctggccgaggacgagctccgggatgctgtcctcctggtgttcgccaacaagcaggacctccccaacgccatgaatgcggccgagatcacagacaagctggggctgcactcactacgccacaggaactggtacattcaggccacctgcgccaccagcggcgacgggctctatgaaggactggactggctgtccaatcagctccggaaccagaagtgaacgcgacccccctccctctcactcctcttgccctctgctttactctcatgtggcaaacgtgcggctcgtggtgtgagtgccagaagctgcctccgtggtttggtcaccgtgtgcatcgcaccgtgctgtaaatgtggcagacgcagcctgcggccaggctttttatttaatgtaaatagtttttgtttccaatgaggcagtttctggtactcctatgcaatattactcagctttttttattgtaaaaagaaaaatcaactcactgttcagtgctgagaggggatgtaggcccatgggcacctggcctccaggagtcgctgtgttgggagagccggccacgcccttggctttagagctgtgttgaaatccattttggtggttggtttttaacccaaactcagtgcattttttaaaatagttaagaatccaagtcgagaacacttgaacacacagaagggagaccccgcctagcatagatttgcagttacggcctggatgccagtcgccagcccagctgttcccctcgggaacatgaggtggtggtggcgcagcagactgcgatcaattctgcatggtcacagtagagatccccgcaactcgcttgtccttgggtcaccctgcattccatagccatgtgcttgtccctgtgctcccacggttcccaggggccaggctgggagcccacagccaccccactatgccgcaggccgccctacccaccttcaggcagcctatgggacgcagggccccatctgtccctcggtcgccgtgtggccagagtgggtccgtcgtccccaacactcgtgctcgctcagacactttggcaggatgtctggggcctcaccagcaggagcgcgtgcaagccgggcaggcggtccacctagacccacagcccctcgggagcaccccacctctgtgtgtgatgtagctttctctccctcagcctgcaagggtccgatttgccatcgaaaaagacaacctctacttttttcttttgtattttgataaacactgaagctggagctgttaaatttatcttggggaaacctcagaactggtctatttggtgtcgtggaacctcttactgctttcaatacacgattagtaatcaactgttttgtatacttgttttcagttttcatttcgacaaacaagcactgtaattatagctattagaataaaatctcttaactatttca

SEQ ID NO: 3279 - protein, 181 aa, Homo sapiens; identical to SEQ ID NO: 177

SEQ ID NO: 3280 - DNA, 2490 bp, Homo sapiens
gttcgggataaaatcacctgattcgtgaaattgcccactggccagtgaggccaaagcctaacaacttcagtgtcctcacagaggcgtctgggcagtggaggcccttcctgctggagtctccgcagggctctgatggtgggtgccagctgacttaattgctgtccccgatatttgtgttctgctgagggaacccctacccttgcggtgtggggcagacatggcgggcgtgccccatcgaggctgtgtcctcatgggagtgtgtccctgaaggtgtcctgctgagtctggcgtggccctgtgtgctctggtccttgtgagtgtgggcaggcacagtgagtggtgctctctggccctggaaggttctgtgttggggtgtagaggagccttgcacgcacctggaagccagtcctcaggcagccagcctcccctcctgcataggctgggatgaggcagcctttctggccatgcagctgtggggacagcttcccaagatgagggcaacagtttctcaattcctgactcagccattttccctcagcccccatcctgaggtggatttggggggcatgggaggcagggctctttccctgtttccctgcaggcttccaggaggtggggtgaggcagtggtgcatccctgggtgggtgggttctgagcaaccactgctgggcagcacagaaccagacatggagcaccttgtctctccaggtgtccctggccagtgtccttccacctgtccacaagcatggggaacatcttcgccaacctcttcaagggcctttttggcaaaaaagaaatgcgcatcctcatggtgggcctggatgctgcagggaagaccacgatcctctacaagcttaagctgggtgagatcgtgaccaccattcccaccataggcttcaacgtggaaaccgtggagtacaagaacatcagcttcactgtgtgggacgtgggtggccaggacaagatccggcccctgtggcgccactacttccagaacacacaaggcctgatcttcgtggtggacagcaatgacagagagcgtgtgaacgaggcccgtgaggagctcatgaggatgctggccgaggacgagctccgggatgctgtcctcctggtgttcgccaacaagcaggacctccccaacgccatgaatgcggccgagatcacagacaagctggggctgcactcactacgccacaggaactggtacattcaggccacctgcgccaccagcggcgacgggctctatgaaggactggactggctgtccaatcagctccggaaccagaagtgaacgcgacccccctccctctcactcctcttgccctctgctttactctcatgtggcaaacgtgcggctcgtggtgtgagtgccagaagctgcctccgtggtttggtcaccgtgtgcatcgcaccgtgctgtaaatgtggcagacgcagcctgcggccaggctttttatttaatgtaaatagtttttgtttccaatgaggcagtttctggtactcctatgcaatattactcagctttttttattgtaaaaagaaaaatcaactcactgttcagtgctgagaggggatgtaggcccatgggcacctggcctccaggagtcgctgtgttgggagagccggccacgcccttggctttagagctgtgttgaaatccattttggtggttggtttttaacccaaactcagtgcattttttaaaatagttaagaatccaagtcgagaacacttgaacacacagaagggagaccccgcctagcatagatttgcagttacggcctggatgccagtcgccagcccagctgttcccctcgggaacatgaggtggtggtggcgcagcagactgcgatcaattctgcatggtcacagtagagatccccgcaactcgcttgtccttgggtcaccctgcattccatagccatgtgcttgtccctgtgctcccacggttcccaggggccaggctgggagcccacagccaccccactatgccgcaggccgccctacccaccttcaggcagcctatgggacgcagggccccatctgtccctcggtcgccgtgtggccagagtgggtccgtcgtccccaacactcgtgctcgctcagacactttggcaggatgtctggggcctcaccagcaggagcgcgtgcaagccgggcaggcggtccacctagacccacagcccctcgggagcaccccacctctgtgtgtgatgtagctttctctccctcagcctgcaagggtccgatttgccatcgaaaaagacaacctctacttttttcttttgtattttgataaacactgaagctggagctgttaaatttatcttggggaaacctcagaactggtctatttggtgtcgtggaacctcttactgctttcaatacacgattagtaatcaactgttttgtatacttgttttcagttttcatttcgacaaacaagcactgtaattatagctattagaataaaatctcttaactatttca

SEQ ID NO: 3281 - protein, 181 aa, Homo sapiens; identical to SEQ ID NO: 177

SEQ ID NO: 3282 - DNA, 1661 bp, Homo sapiens
ccaggcttcaacgtggaaaccgtggagtacaagaacatcagcttcactgtgtgggacgtgggtggccaggacaagatccggcccctgtggcgccactacttccagaacacacaaggtaagtggctggggcctggtcccatgggcactcctgcttctagagagggggggccagcccatagatggggcatcgatgcccatagatgcggcaggggggctgtgttcccatgaccatttgacactggctgcccggcaggcctgatcttcgtggtggacagcaatgacagagagcgtgtgaacgaggcccgtgaggagctcatgaggatgctggccgaggacgagctccgggatgctgtcctcctggtgttcgccaacaagcaggacctccccaacgccatgaatgcggccgagatcacagacaagctggggctgcactcactacgccacaggaactggtacattcaggccacctgcgccaccagcggcgacgggctctatgaaggactggactggctgtccaatcagctccggaaccagaagtgaacgcgacccccctccctctcactcctcttgccctctgctttactctcatgtggcaaacgtgcggctcgtggtgtgagtgccagaagctgcctccgtggtttggtcaccgtgtgcatcgcaccgtgctgtaaatgtggcagacgcagcctgcggccaggctttttatttaatgtaaatagtttttgtttccaatgaggcagtttctggtactcctatgcaatattactcagctttttttattgtaaaaagaaaaatcaactcactgttcagtgctgagaggggatgtaggcccatgggcacctggcctccaggagtcgctgtgttgggagagccggccacgcccttggctttagagctgtgttgaaatccattttggtggttggtttttaacccaaactcagtgcattttttaaaatagttaagaatccaagtcgagaacacttgaacacacagaagggagaccccgcctagcatagatttgcagttacggcctggatgccagtcgccagcccagctgttcccctcgggaacatgaggtggtggtggcgcagcagactgcgatcaattctgcatggtcacagtagagatccccgcaactcgcttgtccttgggtcaccctgcattccatagccatgtgcttgtccctgtgctcccacggttcccaggggccaggctgggagcccacagccaccccactatgccgcaggccgccctacccaccttcaggcagcctatgggacgcagggccccatctgtccctcggtcgccgtgtggccagagtgggtccgtcgtccccaacactcgtgctcgctcagacactttggcaggatgtctggggcctcaccagcaggagcgcgtgcaagccgggcaggcggtccacctagacccacagcccctcgggagcaccccacctctgtgtgtgatgtagctttctctccctcagcctgcaagggtccgatttgccatcgaaaaagacaacctctacttttttcttttgtattttgataaacactgaagctggagctgttaaatttatcttggggaaacctcagaactggtctatttggtgtcgtggaacctcttactgctttcaatacacgattagtaatcaactgttttgt

SEQ ID NO: 3283 - protein, 74 aa, Homo sapiens; identical to SEQ ID NO: 3229

SEQ ID NO: 3284 - DNA, 1739 bp, Homo sapiens
ccaggcttcaacgtggaaaccgtggagtacaagaacatcagcttcactgtgtgggacgtgggtggccaggacaagatccggcccctgtggcgccactacttccagaacacacaaggtaagtggctggggcctggtcccatgggcactcctgcttctagagagggggggccagcccatagatggggcatcgatgcccatagatgcggcaggggggctgtgttcccatgaccatttgacactggctgcccggcaggcctgatcttcgtggtggacagcaatgacagagagcgtgtgaacgaggcccgtgaggagctcatgaggatgctggccgaggacgagctccgggatgctgtcctcctggtgttcgccaacaagcaggacctccccaacgccatgaatgcggccgagatcacagacaagctggggctgcactcactacgccacaggaactggtacattcaggccacctgcgccaccagcggcgacgggctctatgaaggactggactggctgtccaatcagctccggaaccagaagtgaacgcgacccccctccctctcactcctcttgccctctgctttactctcatgtggcaaacgtgcggctcgtggtgtgagtgccagaagctgcctccgtggtttggtcaccgtgtgcatcgcaccgtgctgtaaatgtggcagacgcagcctgcggccaggctttttatttaatgtaaatagtttttgtttccaatgaggcagtttctggtactcctatgcaatattactcagctttttttattgtaaaaagaaaaatcaactcactgttcagtgctgagaggggatgtaggcccatgggcacctggcctccaggagtcgctgtgttgggagagccggccacgcccttggctttagagctgtgttgaaatccattttggtggttggtttttaacccaaactcagtgcattttttaaaatagttaagaatccaagtcgagaacacttgaacacacagaagggagaccccgcctagcatagatttgcagttacggcctggatgccagtcgccagcccagctgttcccctcgggaacatgaggtggtggtggcgcagcagactgcgatcaattctgcatggtcacagtagagatccccgcaactcgcttgtccttgggtcaccctgcattccatagccatgtgcttgtccctgtgctcccacggttcccaggggccaggctgggagcccacagccaccccactatgccgcaggccgccctacccaccttcaggcagcctatgggacgcagggccccatctgtccctcggtcgccgtgtggccagagtgggtccgtcgtccccaacactcgtgctcgctcagacactttggcaggatgtctggggcctcaccagcaggagcgcgtgcaagccgggcaggcggtccacctagacccacagcccctcgggagcaccccacctctgtgtgtgatgtagctttctctccctcagcctgcaagggtccgatttgccatcgaaaaagacaacctctacttttttcttttgtattttgataaacactgaagctggagctgttaaatttatcttggggaaacctcagaactggtctatttggtgtcgtggaacctcttactgctttcaatacacgattagtaatcaactgttttgtatacttgttttcagttttcatttcgacaaacaagcactgtaattatagctattagaataaaatctcttaactatttca

SEQ ID NO: 3285 - protein, 74 aa, Homo sapiens; identical to SEQ ID NO: 3229

SEQ ID NO: 3286 - DNA, 554 bp, Homo sapiens
gccactacttccagaacacacaaggcctgatcttcgtggtggacagcaatgacagagagcgtgtgaacgaggcccgtgaggagctcatgaggatgctggccgaggacgagctccgggatgctgtcctcctggtgttcgccaacaagcaggacctccccaacgccatgaatgcggccgagatcacagacaagctggggctgcactcactacgccacaggaactggtacattcaggccacctgcgccaccagcggcgacgggctctatgaaggactggactggctgtccaatcagctccggaaccagaagtgaacgcgacccccctccctctcactcctcttgccctctgctttactctcatgtggcaaacgtgcggctcgtggtgtgagtgccagaagctgcctccgtggtttggtcaccgtgtgcatcgcaccgtgctgtaaatgtggcagacgcagcctgcggccaggctttttatttaatgtaaatagtttttgtttccaatgaggcagtttctggtactcctatgcaatattactcagctttttttattgt

SEQ ID NO: 3287 - protein, 74 aa, Homo sapiens; identical to SEQ ID NO: 3229

SEQ ID NO: 3288 - DNA, 1432 bp, Homo sapiens
gccactacttccagaacacacaaggcctgatcttcgtggtggacagcaatgacagagagcgtgtgaacgaggcccgtgaggagctcatgaggatgctggccgaggacgagctccgggatgctgtcctcctggtgttcgccaacaagcaggacctccccaacgccatgaatgcggccgagatcacagacaagctggggctgcactcactacgccacaggaactggtacattcaggccacctgcgccaccagcggcgacgggctctatgaaggactggactggctgtccaatcagctccggaaccagaagtgaacgcgacccccctccctctcactcctcttgccctctgctttactctcatgtggcaaacgtgcggctcgtggtgtgagtgccagaagctgcctccgtggtttggtcaccgtgtgcatcgcaccgtgctgtaaatgtggcagacgcagcctgcggccaggctttttatttaatgtaaatagtttttgtttccaatgaggcagtttctggtactcctatgcaatattactcagctttttttattgtaaaaagaaaaatcaactcactgttcagtgctgagaggggatgtaggcccatgggcacctggcctccaggagtcgctgtgttgggagagccggccacgcccttggctttagagctgtgttgaaatccattttggtggttggtttttaacccaaactcagtgcattttttaaaatagttaagaatccaagtcgagaacacttgaacacacagaagggagaccccgcctagcatagatttgcagttacggcctggatgccagtcgccagcccagctgttcccctcgggaacatgaggtggtggtggcgcagcagactgcgatcaattctgcatggtcacagtagagatccccgcaactcgcttgtccttgggtcaccctgcattccatagccatgtgcttgtccctgtgctcccacggttcccaggggccaggctgggagcccacagccaccccactatgccgcaggccgccctacccaccttcaggcagcctatgggacgcagggccccatctgtccctcggtcgccgtgtggccagagtgggtccgtcgtccccaacactcgtgctcgctcagacactttggcaggatgtctggggcctcaccagcaggagcgcgtgcaagccgggcaggcggtccacctagacccacagcccctcgggagcaccccacctctgtgtgtgatgtagctttctctccctcagcctgcaagggtccgatttgccatcgaaaaagacaacctctacttttttcttttgtattttgataaacactgaagctggagctgttaaatttatcttggggaaacctcagaactggtctatttggtgtcgtggaacctcttactgctttcaatacacgattagtaatcaactgttttgt

SEQ ID NO: 3289 - protein, 74 aa, Homo sapiens; identical to SEQ ID NO: 3229

SEQ ID NO: 3290 - DNA, 1510 bp, Homo sapiens
gccactacttccagaacacacaaggcctgatcttcgtggtggacagcaatgacagagagcgtgtgaacgaggcccgtgaggagctcatgaggatgctggccgaggacgagctccgggatgctgtcctcctggtgttcgccaacaagcaggacctccccaacgccatgaatgcggccgagatcacagacaagctggggctgcactcactacgccacaggaactggtacattcaggccacctgcgccaccagcggcgacgggctctatgaaggactggactggctgtccaatcagctccggaaccagaagtgaacgcgacccccctccctctcactcctcttgccctctgctttactctcatgtggcaaacgtgcggctcgtggtgtgagtgccagaagctgcctccgtggtttggtcaccgtgtgcatcgcaccgtgctgtaaatgtggcagacgcagcctgcggccaggctttttatttaatgtaaatagtttttgtttccaatgaggcagtttctggtactcctatgcaatattactcagctttttttattgtaaaaagaaaaatcaactcactgttcagtgctgagaggggatgtaggcccatgggcacctggcctccaggagtcgctgtgttgggagagccggccacgcccttggctttagagctgtgttgaaatccattttggtggttggtttttaacccaaactcagtgcattttttaaaatagttaagaatccaagtcgagaacacttgaacacacagaagggagaccccgcctagcatagatttgcagttacggcctggatgccagtcgccagcccagctgttcccctcgggaacatgaggtggtggtggcgcagcagactgcgatcaattctgcatggtcacagtagagatccccgcaactcgcttgtccttgggtcaccctgcattccatagccatgtgcttgtccctgtgctcccacggttcccaggggccaggctgggagcccacagccaccccactatgccgcaggccgccctacccaccttcaggcagcctatgggacgcagggccccatctgtccctcggtcgccgtgtggccagagtgggtccgtcgtccccaacactcgtgctcgctcagacactttggcaggatgtctggggcctcaccagcaggagcgcgtgcaagccgggcaggcggtccacctagacccacagcccctcgggagcaccccacctctgtgtgtgatgtagctttctctccctcagcctgcaagggtccgatttgccatcgaaaaagacaacctctacttttttcttttgtattttgataaacactgaagctggagctgttaaatttatcttggggaaacctcagaactggtctatttggtgtcgtggaacctcttactgctttcaatacacgattagtaatcaactgttttgtatacttgttttcagttttcatttcgacaaacaagcactgtaattatagctattagaataaaatctcttaactatttca

SEQ ID NO: 3291 - protein, 74 aa, Homo sapiens; identical to SEQ ID NO: 3229

SEQ ID NO: 3292 - DNA, 532 bp, Homo sapiens
aggcctgatcttcgtggtggacagcaatgacagagagcgtgtgaacgaggcccgtgaggagctcatgaggatgctggccgaggacgagctccgggatgctgtcctcctggtgttcgccaacaagcaggacctccccaacgccatgaatgcggccgagatcacagacaagctggggctgcactcactacgccacaggaactggtacattcaggccacctgcgccaccagcggcgacgggctctatgaaggactggactggctgtccaatcagctccggaaccagaagtgaacgcgacccccctccctctcactcctcttgccctctgctttactctcatgtggcaaacgtgcggctcgtggtgtgagtgccagaagctgcctccgtggtttggtcaccgtgtgcatcgcaccgtgctgtaaatgtggcagacgcagcctgcggccaggctttttatttaatgtaaatagtttttgtttccaatgaggcagtttctggtactcctatgcaatattactcagctttttttattgt

SEQ ID NO: 3293 - protein, 74 aa, Homo sapiens; identical to SEQ ID NO: 3229

SEQ ID NO: 3294 - DNA, 551 bp, Homo sapiens
aggcctgatcttcgtggtggacagcaatgacagagagcgtgtgaacgaggcccgtgaggagctcatgaggatgctggccgaggacgagctccgggatgctgtcctcctggtgttcgccaacaagcaggacctccccaacgccatgaatgcggccgagatcacagacaagactttggcaggatgtctggggcctcaccagcaggagcgcgtgcaagccgggcaggcggtccacctagacccacagcccctcgggagcaccccacctctgtgtgtgatgtagctttctctccctcagcctgcaagggtccgatttgccatcgaaaaagacaacctctacttttttcttttgtattttgataaacactgaagctggagctgttaaatttatcttggggaaacctcagaactggtctatttggtgtcgtggaacctcttactgctttcaatacacgattagtaatcaactgttttgtatacttgttttcagttttcatttcgacaaacaagcactgtaattatagctattagaataaaatctcttaactatttca

SEQ ID NO: 3295 - protein, 71 aa, Homo sapiens
MRMLAEDELRDAVLLVFANKQDLPNAMNAAEITDKTLAGCLGPHQQERVQAGQAVHLDPQPLGSTPPLCVM

SEQ ID NO: 3296 - DNA, 1151 bp, Homo sapiens
caggacctccccaacgccatgaatgcggccgagatcacagacaagctggggctgcactcactacgccacaggaactggtacattcaggccacctgcgccaccagcggcgacgggctctatgaaggactggactggctgtccaatcagctccggaaccagaagtgaacgcgacccccctccctctcactcctcttgccctctgctttactctcatgtggcaaacgtgcggctcgtggtgtgagtgccagaagctgcctccgtggtttggtcaccgtgtgcatcgcaccgtgctgtaaatgtggcagacgcagcctgcggccaggctttttatttaatgtaaatagtttttgtttccaatgaggcagtttctggtactcctatgcaatattactcagctttttttattgtaaaaagaaaaatcaactcactgttcagtgctgagaggggatgtaggcccatgggcacctggcctccaggagtcgctgtgttgggagagccggccacgcccttggctttagagctgtgttgaaatccattttggtggttggtttttaacccaaactcagtgcattttttaaaatagttaagaatccaagtcgagaacacttgaacacacagaagggagaccccgcctagcatagatttgcagttacggcctggatgccagtcgccagcccagctgttcccctcgggaacatgaggtggtggtggcgcagcagactgcgatcaattctgcatggtcacagtagagatccccgcaactcgcttgtccttgggtcaccctgcattccatagccatgtgcttgtccctgtgctcccacggttcccaggggccaggctgggagcccacagccaccccactatgccgcaggccgccctacccaccagcaggagcgcgtgcaagccgggcaggcggtccacctagacccacagcccctcgggagcaccccacctctgtgtgtgatgtagctttctctccctcagcctgcaagggtccgatttgccatcgaaaaagacaacctctacttttttcttttgtattttgataaacactgaagctggagctgttaaatttatcttggggaaacctcagaactggtctatttggtgtcgtggaacctcttactgctttcaatacacgattagtaatc

SEQ ID NO: 3297 - protein, 82 aa, Homo sapiens
MCLSLCSHGSQGPGWEPTATPLCRRPPYPPAGARASRAGGPPRPTAPREHPTSVCDVAFSPSACKGPICHRKRQPLLFSFVF

SEQ ID NO: 3298 - DNA, 771 bp, Homo sapiens
caggacctccccaacgccatgaatgcggccgagatcacagacaagctggggctgcactcactacgccacaggaactggtacattcaggccacctgcgccaccagcggcgacgggctctatgaaggactggactggctgtccaatcagctccggaaccagaagtgaacgcgacccccctccctctcactcctcttgccctctgctttactctcatgtggcaaacgtgcggctcgtggtgtgagtgccagaagctgcctccgtggtttggtcaccgtgtgcatcgcaccgtgctgtaaatgtggcagacgcagcctgcggccaggctgggagcccacagccaccccactatgccgcaggccgccctacccaccttcaggcagcctatgggacgcagggccccatctgtccctcggtcgccgtgtggccagagtgggtccgtcgtccccaacactcgtgctcgctcagacactttggcaggatgtctggggcctcaccagcaggagcgcgtgcaagccgggcaggcggtccacctagacccacagcccctcgggagcaccccacctctgtgtgtgatgtagctttctctccctcagcctgcaagggtccgatttgccatcgaaaaagacaacctctacttttttcttttgtattttgataaacactgaagctggagctgttaaatttatcttggggaaacctcagaactggtctatttggtgtcgtggaacctcttactgctttcaatacacgattagtaatcaactgttttgt

SEQ ID NO: 3299 - protein, 93 aa, Homo sapiens
MWQTQPAARLGAHSHPTMPQAALPTFRQPMGRRAPSVPRSPCGQSGSVVPNTRARSDTLAGCLGPHQQERVQAGQAVHLDPQPLGSTPPLCVM

SEQ ID NO: 3300 - DNA, 849 bp, Homo sapiens
caggacctccccaacgccatgaatgcggccgagatcacagacaagctggggctgcactcactacgccacaggaactggtacattcaggccacctgcgccaccagcggcgacgggctctatgaaggactggactggctgtccaatcagctccggaaccagaagtgaacgcgacccccctccctctcactcctcttgccctctgctttactctcatgtggcaaacgtgcggctcgtggtgtgagtgccagaagctgcctccgtggtttggtcaccgtgtgcatcgcaccgtgctgtaaatgtggcagacgcagcctgcggccaggctgggagcccacagccaccccactatgccgcaggccgccctacccaccttcaggcagcctatgggacgcagggccccatctgtccctcggtcgccgtgtggccagagtgggtccgtcgtccccaacactcgtgctcgctcagacactttggcaggatgtctggggcctcaccagcaggagcgcgtgcaagccgggcaggcggtccacctagacccacagcccctcgggagcaccccacctctgtgtgtgatgtagctttctctccctcagcctgcaagggtccgatttgccatcgaaaaagacaacctctacttttttcttttgtattttgataaacactgaagctggagctgttaaatttatcttggggaaacctcagaactggtctatttggtgtcgtggaacctcttactgctttcaatacacgattagtaatcaactgttttgtatacttgttttcagttttcatttcgacaaacaagcactgtaattatagctattagaataaaatctcttaactatttca

SEQ ID NO: 3301 - protein, 93 aa, Homo sapiens; identical to SEQ ID NO: 3299

SEQ ID NO: 3302 - DNA, 1240 bp, Homo sapiens
caggacctccccaacgccatgaatgcggccgagatcacagacaagctggggctgcactcactacgccacaggaactggtacattcaggccacctgcgccaccagcggcgacgggctctatgaaggactggactggctgtccaatcagctccggaaccagaagtgaacgcgacccccctccctctcactcctcttgccctctgctttactctcatgtggcaaacgtgcggctcgtggtgtgagtgccagaagctgcctccgtggtttggtcaccgtgtgcatcgcaccgtgctgtaaatgtggcagacgcagcctgcggccaggctttttatttaatgtaaatagtttttgtttccaatgaggcagtttctggtactcctatgcaatattactcagctttttttattgtaaaaagaaaaatcaactcactgttcagtgctgagaggggatgtaggcccatgggcacctggcctccaggagtcgctgtgttgggagagccggccacgcccttggctttagagctgtgttgaaatccattttggtggttggtttttaacccaaactcagtgcattttttaaaatagttaagaatccaagtcgagaacacttgaacacacagaagggagaccccgcctagcatagatttgcagttacggcctggatgccagtcgccagcccagctgttcccctcgggaacatgaggtggtggtggcgcagcagactgcgatcaattctgcatggtcacagtagagatccccgcaactcgcttgtccttgggtcaccctgcattccatagccatgtgcttgtccctgtgctcccacggttcccaggggccaggctgggagcccacagccaccccactatgccgcaggccgccctacccaccagcaggagcgcgtgcaagccgggcaggcggtccacctagacccacagcccctcgggagcaccccacctctgtgtgtgatgtagctttctctccctcagcctgcaagggtccgatttgccatcgaaaaagacaacctctacttttttcttttgtattttgataaacactgaagctggagctgttaaatttatcttggggaaacctcagaactggtctatttggtgtcgtggaacctcttactgctttcaatacacgattagtaatcaactgttttgtatacttgttttcagttttcatttcgacaaacaagcactgtaattatagctattagaataaaatctcttaactatttca

SEQ ID NO: 3303 - protein, 82 aa, Homo sapiens; identical to SEQ ID NO: 3297

SEQ ID NO: 3304 - DNA, 1148 bp, Homo sapiens
caggacctccccaacgccatgaatgcggccgagatcacagacaagctggggctgcactcactacgccacaggaactggtacattcaggccacctgcgccaccagcggcgacgggctctatgaaggactggactggctgtccaatcagctccggaaccagaagtgaacgcgacccccctccctctcactcctcttgccctctgctttactctcatgtggcaaacgtgcggctcgtggtgtgagtgccagaagctgcctccgtggtttggtcaccgtgtgcatcgcaccgtgctgtaaatgtggcagacgcagcctgcggccaggctttttatttaatgtaaatagtttttgtttccaatgaggcagtttctggtactcctatgcaatattactcagctttttttattgtaaaaagaaaaatcaactcactgttcagtgctgagaggggatgtaggcccatgggcacctggcctccaggagtcgctgtgttgggagagccggccacgcccttggctttagagctgtgttgaaatccattttggtggttggtttttaacccaaactcagtgcattttttaaaatagttaagaatccaagtcgagaacacttgaacacacagaagggagaccccgcctagcatagatttgcagttacggcctggatgccagtcgccagcccagctgttcccctcgggaacatgaggtggtggtggcgcagcagactgcgatcaattctgcatggtcacagtagagatccccgcaactcgcttgtccttgggtcaccctgcattccatagccatgtgcttgtccctgtgctcccacggttcccaggggccaggctgggagcccacagccaccccactctgtgtgtgatgtagctttctctccctcagcctgcaagggtccgatttgccatcgaaaaagacaacctctacttttttcttttgtattttgataaacactgaagctggagctgttaaatttatcttggggaaacctcagaactggtctatttggtgtcgtggaacctcttactgctttcaatacacgattagtaatcaactgttttgtatacttgttttcagttttcatttcgacaaacaagcactgtaattatagctattagaataaaatctcttaactatttca

SEQ ID NO: 3305 - protein, 46 aa, Homo sapiens
MVTVEIPATRLSLGHPAFHSHVLVPVLPRFPGARLGAHSHPTLCVM

SEQ ID NO: 3306 - DNA, 650 bp, Homo sapiens
caggacctccccaacgccatgaatgcggccgagatcacagacaagctggggctgcactcactacgccacaggaactggtacattcaggccacctgcgccaccagcggcgacgggctctatgaaggactggactggctgtccaatcagctccggaaccagaagtgaacgcgacccccctccctctcactcctcttgccctctgctttactctcatgtggcaaacgtgcggctcgtggtgtgagtgccagaagctgcctccgtggtttggtcaccgtgtgcatcgcaccgtgctgtaaatgtggcagacgcagcctgcggccaggctttttatttaatgtaaatagtttttgtttccaatgaggcagtttctggtactcctatgcaatattactcagctgcaagggtccgatttgccatcgaaaaagacaacctctacttttttcttttgtattttgataaacactgaagctggagctgttaaatttatcttggggaaacctcagaactggtctatttggtgtcgtggaacctcttactgctttcaatacacgattagtaatcaactgttttgtatacttgttttcagttttcatttcgacaaacaagcactgtaattatagctattagaataaaatctcttaactatttca

SEQ ID NO: 3307 - protein, 85 aa, Homo sapiens
MRQFLVLLCNITQLQGSDLPSKKTTSTFFFCILINTEAGAVKFILGKPQNWSIWCRGTSYCFQYTISNQLFCILVFSFHFDKQAL

SEQ ID NO: 3308 - DNA, 1205 bp, Homo sapiens
gatcacagacaagctggggctgcactcactacgccacaggaactggtacattcaggccacctgcgccaccagcggcgacgggctctatgaaggactggactggctgtccaatcagctccggaaccagaagtgaacgcgacccccctccctctcactcctcttgccctctgctttactctcatgtggcaaacgtgcggctcgtggtgtgagtgccagaagctgcctccgtggtttggtcaccgtgtgcatcgcaccgtgctgtaaatgtggcagacgcagcctgcggccaggctttttatttaatgtaaatagtttttgtttccaatgaggcagtttctggtactcctatgcaatattactcagctttttttattgtaaaaagaaaaatcaactcactgttcagtgctgagaggggatgtaggcccatgggcacctggcctccaggagtcgctgtgttgggagagccggccacgcccttggctttagagctgtgttgaaatccattttggtggttggtttttaacccaaactcagtgcattttttaaaatagttaagaatccaagtcgagaacacttgaacacacagaagggagaccccgcaactcgcttgtccttgggtcaccctgcattccatagccatgtgcttgtccctgtgctcccacggttcccaggggccaggctgggagcccacagccaccccactatgccgcaggccgccctacccaccttcaggcagcctatgggacgcagggccccatctgtccctcggtcgccgtgtggccagagtgggtccgtcgtccccaacactcgtgctcgctcagacactttggcaggatgtctggggcctcaccagcaggagcgcgtgcaagccgggcaggcggtccacctagacccacagcccctcgggagcaccccacctctgtgtgtgatgtagctttctctccctcagcctgcaagggtccgatttgccatcgaaaaagacaacctctacttttttcttttgtattttgataaacactgaagctggagctgttaaatttatcttggggaaacctcagaactggtctatttggtgtcgtggaacctcttactgctttcaatacacgattagtaatcaactgttttgtatacttgttttcagttttcatttcgacaaacaagcactgtaattatagctattagaataaaatctcttaactatttca

SEQ ID NO: 3309 - protein, 83 aa, Homo sapiens
MCLSLCSHGSQGPGWEPTATPLCRRPPYPPSGSLWDAGPHLSLGRRVARVGPSSPTLVLAQTLWQDVWGLTSRSACKPGRRST

SEQ ID NO: 3310 - DNA, 324 bp, Homo sapiens
cactacgccacaggaactggtacattcaggccacctgcgccaccagcggcgacgggcttctccctcagcctgcaagggtccgatttgccatcgaaaaagacaacctctacttttttcttttgtattttgataaacactgaagctggagctgttaaatttatcttggggaaacctcagaactggtctatttggtgtcgtggaacctcttactgctttcaatacacgattagtaatcaactgttttgtatacttgttttcagttttcatttcgacaaacaagcactgtaattatagctattagaataaaatctcttaactatttca

SEQ ID NO: 3311 - protein, 95 aa, Homo sapiens [sequence omitted]

SEQ ID NO: 3312 - DNA, 359 bp, Homo sapiens
ccaccagcggcgacgggctctatgaaggactggactggctgtccaatcagagcccctcgggagcaccccacctctgtgtgtgatgtagctttctctccctcagcctgcaagggtccgatttgccatcgaaaaagacaacctctacttttttcttttgtattttgataaacactgaagctggagctgttaaatttatcttggggaaacctcagaactggtctatttggtgtcgtggaacctcttactgctttcaatacacgattagtaatcaactgttttgtatacttgttttcagttttcatttcgacaaacaagcactgtaattatagctattagaataaaatctcttaactatttca

SEQ ID NO: 3313 - protein, 47 aa, Homo sapiens
MKDWTGCPIRAPREHPTSVCDVAFSPSACKGPICHRKRQPLLFSFVF

SEQ ID NO: 3314 - DNA, 1433 bp, Homo sapiens
aggcgcagtgcgcaggcgcccaaagccgacgtggaggtgatgcgcgggagcacagatccggggcagtgcgctgcgcagaggcgcgcggcgaagccgagtgggcgcgggagtgacgtcacggcgcgcgacgcggaggcggggtcgggcctgggtccgacggtagtgggtagcgggtctcgggttgcgggttgcaggttgcaagccgcaggccccaggcaactgccttcccggcgccatgttcggctccagtcgtggaggcgtgcgcggcgggcaggaccagttcaactgggaggacgtgaagactgacaagcagcgggagaactacctgggcaactcgctgatggcgccggtaggccgctggcagaagggccgcgacctcacctggtacgccaagggccgggcgccatgcgcgggcccgagccgcgaggaggaactggcagccgtgcgggaggcggagcgcgaggcgctgctggccgcccttggctacaagaacgtgaagaagcagcccacgggcctgagcaaggaggacttcgcggaggtctgcaagcgggaaggaggcgaccccgaggagaagggcgtggaccggctgctggggctggggagcgcaagtggctccgtgggccgcgtggcgatgtcccgagaggacaaggaggccgccaaactggggctgtctgtgttcacgcatcaccgcgtagagagcggcgggcccgggacctcggcagcctcggccaggaggaagccgcgggcggaggatcagacggaaagcagttgtgagagccacaggaaaagcaagaaggagaagaagaaaaagaaaaagaggaaacacaagaaagagaagaagaagaaagacaaagagcacaggcggccagctgaggccacctcctctcccacatctcctgagaggcccaggcaccaccaccatgactccgactccaactccccctgctgtaagaggaggaagcggggacacagtggggacaggaggagcccgtctcgcaggtggcatgacagaggctctgaggcctgatggctggaccctgctcactgctgttgtgggaccctgaaccctcccttcaccttgcttgcctcctgcctcggaagctccttgggtgtgggtgaagcccgaggctgctcctgtggaagtggctctgggcaccagcctgtggggctaaagacttgacagctagctctggagcagccggcttcctggaaaacctccaggtttcgcataccagggatggcccctggcttggcctgcgaaggtgaacctgcccagatttatcagtagaggctggactccctctgtgtcctgcccatggttgcagcagccatgggcctatgagcggtctaactgtggccaagtatggtgacctctatttttctttatattgactctttgtatttcaataaatatattttaaaaggaaggtata

SEQ ID NO: 3315 - protein, 263 aa, Homo sapiens; identical to SEQ ID NO: 185

SEQ ID NO: 3316 - DNA, 2278 bp, Homo sapiens
aggcgcagtgcgcaggcgcccaaagccgacgtggaggtgatgcgcgggagcacagatccggggcagtgcgctgcgcagaggcgcgcggcgaagccgagtgggcgcgggagtgacgtcacggcgcgcgacgcggaggcggggtcgggcctgggtccgacggtagtgggtagcgggtctcgggttgcgggttgcaggttgcaagccgcaggccccaggcaactgccttcccggcgccatgttcggctccagtcgtggaggcgtgcgcggcgggcaggaccagttcaactgggaggacgtgaagactgacaagcagcgggagaactacctgggcaactcgctgatggcgccggtaggccgctggcagaagggccgcgacctcacctggtacgccaagggccgggcgccatgcgcgggcccgagccgcgaggaggaactggcagccgtgcgggaggcggagcgcgaggcgctgctggccgcccttggctacaagaacgtgaagaagcagcccacgggcctgagcaaggaggacttcgcggaggtctgcaagcgggaaggaggcgaccccgaggagaagggcgtggaccggctgctggggctggggagcgcaaggtgcgggcgggtttccaggggagggcagcactgggctcgattgctcgggtgaggcggacccctgccgtactgtcttcatcgccatgtccctgcagtggctccgtgggccgcgtggcgatgtcccgagaggacaaggaggccgccaaactggggctgtctgtgttcacggtaatcccccgccccgcctgaccgcagcaggggctaacaggggtggggcggggcgggggcactgaacggagctccccggggcgctgcggggcgtggtgtggggccggcccgcagactcctccgcagagctcgcttctcccgcagcatcaccgcgtagagagcggcgggcccgggacctcggcagcctcggccaggaggaagccgcgggcggaggatcagacggaaagcaggtgaggctgtgccacctgggctagctgtgccccggggtggggggtctcgggaggaccggagcggctcccactcgggcaggtggcagcttctcttggcgcaccggcccggcgggtggcctgccctactttacttcctgtcccagttactcctaggtttttctctaggggagtttctcgggtcacccttgaagagaggtcctaagtactggcagtggtcgggcgctgtgccgtgggagggcactcaggacctggggcggggccttttcctgccgtgggtggcacctccagggcttctcctggatggtgagcctgggcctgaccctaagagtggcctggtgggtgcaggtaggaaggtgtcaacctgccaagggcacggctggggtggggcaggggcgtgctgtggagatggggatattgcatctgtttctaacccacgtagccactggccacgtgactacgtaactgaggagtggaatttgtagtttgatttaactgatttaaagacgcacttgtgggtggtggcttcatctggatggggcctgcttgtgttcactctcttggcttgcaagactagggtctgaggcacaccttgtatcctccttgtagttgtgagagccacaggaaaagcaagaaggagaagaagaaaaagaaaaagaggaaacacaagaaagagaagaagaagaaagacaaagagcacaggcggccagctgaggccacctcctctcccacatctcctgagaggcccaggcaccaccaccatgactccgactccaactccccctgctgtaagaggaggaagcggggacacagtggggacaggaggagcccgtctcgcaggtggcatgacagaggctctgaggcctgatggctggaccctgctcactgctgttgtgggaccctgaaccctcccttcaccttgcttgcctcctgcctcggaagctccttgggtgtgggtgaagcccgaggctgctcctgtggaagtggctctgggcaccagcctgtggggctaaagacttgacagctagctctggagcagccggcttcctggaaaacctccaggtttcgcataccagggatggcccctggcttggcctgcgaaggtgaacctgcccagatttatcagtagaggctggactccctctgtgtcctgcccatggttgcagcagccatgggcctatgagcggtctaactgtggccaagtatggtgacctctatttttctttatattgactctttgtatttcaataaatatattttaaaaggaaggtata

SEQ ID NO: 3317 - protein, 141 aa, Homo sapiens
MFGSSRGGVRGGQDQFNWEDVKTDKQRENYLGNSLMAPVGRWQKGRDLTWYAKGRAPCAGPSREEELAAVREAEREALLAALGYKNVKKQPTGLSKEDFAEVCKREGGDPEEKGVDRLLGLGSARCGRVSRGGQHWARLLG

SEQ ID NO: 3318 - DNA, 1577 bp, Homo sapiens
aggcgcagtgcgcaggcgcccaaagccgacgtggaggtgatgcgcgggagcacagatccggggcagtgcgctgcgcagaggcgcgcggcgaagccgagtgggcgcgggagtgacgtcacggcgcgcgacgcggaggcggggtcgggcctgggtccgacggtagtgggtagcgggtctcgggttgcgggttgcaggttgcaagccgcaggccccaggcaactgccttcccggcgccatgttcggctccagtcgtggaggcgtgcgcggcgggcaggaccagttcaactgggaggacgtgaagactgacaagcagcgggagaactacctgggcaactcgctgatggcgccggtaggccgctggcagaagggccgcgacctcacctggtacgccaagggccgggcgccatgcgcgggcccgagccgcgaggaggaactggcagccgtgcgggaggcggagcgcgaggcgctgctggccgcccttggctacaagaacgtgaagaagcagcccacgggcctgagcaaggaggacttcgcggaggtctgcaagcgggaaggaggcgaccccgaggagaagggcgtggaccggctgctggggctggggagcgcaagtggctccgtgggccgcgtggcgatgtcccgagaggacaaggaggccgccaaactggggctgtctgtgttcacggtaatcccccgccccgcctgaccgcagcaggggctaacaggggtggggcggggcgggggcactgaacggagctccccggggcgctgcggggcgtggtgtggggccggcccgcagactcctccgcagagctcgcttctcccgcagcatcaccgcgtagagagcggcgggcccgggacctcggcagcctcggccaggaggaagccgcgggcggaggatcagacggaaagcagttgtgagagccacaggaaaagcaagaaggagaagaagaaaaagaaaaagaggaaacacaagaaagagaagaagaagaaagacaaagagcacaggcggccagctgaggccacctcctctcccacatctcctgagaggcccaggcaccaccaccatgactccgactccaactccccctgctgtaagaggaggaagcggggacacagtggggacaggaggagcccgtctcgcaggtggcatgacagaggctctgaggcctgatggctggaccctgctcactgctgttgtgggaccctgaaccctcccttcaccttgcttgcctcctgcctcggaagctccttgggtgtgggtgaagcccgaggctgctcctgtggaagtggctctgggcaccagcctgtggggctaaagacttgacagctagctctggagcagccggcttcctggaaaacctccaggtttcgcataccagggatggcccctggcttggcctgcgaaggtgaacctgcccagatttatcagtagaggctggactccctctgtgtcctgcccatggttgcagcagccatgggcctatgagcggtctaactgtggccaagtatggtgacctctatttttctttatattgactctttgtatttcaataaatatattttaaaaggaaggtata

SEQ ID NO: 3319 - protein, 155 aa, Homo sapiens
MFGSSRGGVRGGQDQFNWEDVKTDKQRENYLGNSLMAPVGRWQKGRDLTWYAKGRAPCAGPSREEELAAVREAEREALLAALGYKNVKKQPTGLSKEDFAEVCKREGGDPEEKGVDRLLGLGSASGSVGRVAMSREDKEAAKLGLSVFTVIPRPA

SEQ ID NO: 3320 - DNA, 3562 bp, Homo sapiens
atgcaacctccaccctggtgacccctcctcctgtggcctacggcttgtcaggctaatgggctcaaaactgaccaggtcttccccacaaacctggtcctcatgttgacaggtggctgcttcatcctcacagttgcccagaccagagcctcagagccgtcctggactcctgcccaatgtccacctggccctgctatcccctctccaccacacctgacatccagtcagtggtcagactccacagctgggccctgcccacatggcccaagtccaccctggcctggcaagctgcaatggcacccaggagatgatgccctacaccccagggagccttcctgggagtcggccagtcaccttctgtgtgcctggctgtggcctgctgctctgccctcgccatgcacctgctccatgatgaaagctcatgcagtgcctcatgagggagatggcagccagtacttgctaagtagatagatgagccagacgtgtggctgtctgccagcctgctctaacagcctgacccatggactgggtcactaagaaacagaaatttcccacaggacagtagacctgtatttcatccagttcaacctgtggctggaattgccccaaaagtggtggcagtagagttcccacaagggagtgccccacaccatcctgagatggggctggttaggattctacagattgagcatgccagggtgattcgcccagagcatttattcgtggggcttttgtacagagtgggctgcagcagttcttgcaataggcagtgagagaaatgaagttctctctaggtatgtccgtgggggagggggttggtgaatggaatttatatgagggtttgaggaatctggctcaggctgagtccagtttctttctgtgttttgagcaacaacctagttactgtcatctgtgcctgggaacgttcatggctatggctcgggttcaagtctgcagaggaaattatacagttggcgaagtcacagagtggccaagggactctgtttctcagtcagcactgggaatgaaagtggaaaggggaagcaggggtacgtcacaacctccaaaatcagggtgcccagcacgctgaggttctggtaaggggtttcttccagactgcagacttccttcccgctgccttcacacagtagaaagctgcacaaagctcttggggtcccttttatgaaggctctgtcctcatgacctagtcacctccgaagcaccaacgccttggggtgaggatttcacatgggagttagggtgcacattcagtttaacacggcagggataggaccagtgctctgagggtgtctgggtagctgctggttcatccagaagtttactgggtaatactcagaaattccacaaatcattaaggtcattaccttgttaagctcccgatatggaatcgcgactagcagtgaccaattggcggtgttaactaggcgcatcttgtgtgttttcttttttctttttttatgagacagggtccgctcactcgttcaggttggagtgcagtggcgcgaagtcctgggttcgagatcctcccgcctcagcctcaaagcgttggggctacaggggcgcgcgcgcgcctggcccattttaacttcttatttttgagacagtctcgctctgtcgcccaggcgggagtgcagtggcgcgatctcggctcactgcaacctctgcctcccggctcaagtgattctcctgcttcagcctcctgagtagctggaattacaggtgtgcaccaccacacccggctaatttttgtatttgagtagagaccgggtttcaccatgttggacaggctagtctcgaactcccgacctcaagcgatccgcccgcctcggcctcccaacttgctgggattacaggcgagagccactccgcccggccccgttttaaccatttttaaacttccagttcagaggcgttcccgcgcccggcagggtaggcgcagtgcgcaggcgcccaaagccgacgtggaggtgatgcgcgggagcacagatccggggcagtgcgctgcgcagaggcgcgcggcgaagccgagtgggcgcgggagtgacgtcacggcgcgcgacgcggaggcggggtcgggcctgggtccgacggtagtgggtagcgggtctcgggttgcgggttgcaggttgcaagccgcaggccccaggcaactgccttcccggcgccatgttcggctccagtcgtggaggcgtgcgcggcgggcaggaccagttcaactgggaggacgtgaagactgacaagcagcgggagaactacctgggcaactcgctgatggcgccggtaggccgctggcagaagggccgcgacctcacctggtacgccaagggccgggcgccatgcgcgggcccgagccgcgaggaggaactggcagccgtgcgggaggcggagcgcgaggcgctgctggccgcccttggctacaagaacgtgaagaagcagcccacgggcctgagcaaggaggacttcgcggaggtctgcaagcgggaaggaggcgaccccgaggagaagggcgtggaccggctgctggggctggggagcgcaagtggctccgtgggccgcgtggcgatgtcccgagaggacaaggaggccgccaaactggggctgtctgtgttcacgcatcaccgcgtagagagcggcgggcccgggacctcggcagcctcggccaggaggaagccgcgggcggaggatcagacggaaagcaggggagtttctcgggtcacccttgaagagaggtcctaagtactggcagtggtcgggcgctgtgccgtgggagggcactcaggacctggggcggggccttttcctgccgtgggtggcacctccagggcttctcctggatggtgagcctgggcctgaccctaagagtggcctggtgggtgcagttgtgagagccacaggaaaagcaagaaggagaagaagaaaaagaaaaagaggaaacacaagaaagagaagaagaagaaagacaaagagcacaggcggccagctgaggccacctcctctcccacatctcctgagaggcccaggcaccaccaccatgactccgactccaactccccctgctgtaagaggaggaagcggggacacagtggggacaggaggagcccgtctcgcaggtggcatgacagaggctctgaggcctgatggctggaccctgctcactgctgttgtgggaccctgaaccctcccttcaccttgcttgcctcctgcctcggaagctccttgggtgtgggtgaagcccgaggctgctcctgtggaagtggctctgggcaccagcctgtggggctaaagacttgacagctagctctggagcagccggcttcctggaaaacctccaggtttcgcataccagggatggcccctggcttggcctgcgaaggtgaacctgcccagatttatcagtagaggctggactccctctgtgtcctgcccatggttgcagcagccatgggcctatgagcggtctaactgtggccaagtatggtgacctctatttttctttatattgactctttgtatttcaataaatatattttaaaaggaaggtata

SEQ ID NO: 3321 - protein, 189 aa, Homo sapiens
MFGSSRGGVRGGQDQFNWEDVKTDKQRENYLGNSLMAPVGRWQKGRDLTWYAKGRAPCAGPSREEELAAVREAEREALLAALGYKNVKKQPTGLSKEDFAEVCKREGGDPEEKGVDRLLGLGSASGSVGRVAMSREDKEAAKLGLSVFTHHRVESGGPGTSAASARRKPRAEDQTESRGVSRVTLEERS

SEQ ID NO: 3322 - DNA, 1279 bp, Homo sapiens
aggcgcagtgcgcaggcgcccaaagccgacgtggaggtgatgcgcgggagcacagatccggggcagtgcgctgcgcagaggcgcgcggcgaagccgagtgggcgcgggagtgacgtcacggcgcgcgacgcggaggcggggtcgggcctgggtccgacggtagtgggtagcgggtctcgggttgcgggttgcaggttgcaagccgcaggccccaggcaactgccttcccggcgccatgttcggctccagtcgtggaggcgtgcgcggcgggcaggaccagttcaactgggaggacgtgaagactgacaagcagcgggagaactacctgggcaactcgctgatggcgccggtaggccgctggcagaagggccgcgacctcacctggtacgccaagggccgggcgccatgcgcgggcccgagccgcgaggaggaactggcagccgtgcgggaggcggagcgcgaggcgctgctggccgcccttggctacaagaacgtgaagaagcagcccacgggcctgagcaaggaggacttcgcggaggtctgcaagcgggaaggaggcgaccccgaggagaagggcgtggaccggctgctggggctggggagcgcaagtggctccgtgggccgcgtggcgatgtcccgagaggacaaggaggccgccaaactggggctgtctgtgttcacgcatcaccgcgtagagagcggcgggcccgggacctcggcagcctcggccaggaggaagccgcgggcggaggatcagacggaaagcagttgtgagagccacaggaaaagcaagaaggagaagaagaaaaagaaaaagaggaaacacaagaaagagaagaagaagaaagacaaagagcaagaggctctgaggcctgatggctggaccctgctcactgctgttgtgggaccctgaaccctcccttcaccttgcttgcctcctgcctcggaagctccttgggtgtgggtgaagcccgaggctgctcctgtggaagtggctctgggcaccagcctgtggggctaaagacttgacagctagctctggagcagccggcttcctggaaaacctccaggtttcgcataccagggatggcccctggcttggcctgcgaaggtgaacctgcccagatttatcagtagaggctggactccctctgtgtcctgcccatggttgcagcagccatgggcctatgagcggtctaactgtggccaagtatggtgacctctatttttctttatattgactctttgtatttcaataaatatattttaaaaggaaggt

SEQ ID NO: 3323 - protein, 225 aa, Homo sapiens
MFGSSRGGVRGGQDQFNWEDVKTDKQRENYLGNSLMAPVGRWQKGRDLTWYAKGRAPCAGPSREEELAAVREAEREALLAALGYKNVKKQPTGLSKEDFAEVCKREGGDPEEKGVDRLLGLGSASGSVGRVAMSREDKEAAKLGLSVFTHHRVESGGPGTSAASARRKPRAEDQTESSCESHRKSKKEKKKKKKRKHKKEKKKKDKEQEALRPDGWTLLTAVVGP

SEQ ID NO: 3324 - DNA, 815 bp, Homo sapiens
cgcagaggcgcgcggcgaagccgagtgggcgcgggagtgacgtcacggcgcgcgacgcggaggcggggtcgggcctgggtccgacggtagtgggtagcgggtctcgggttgcgggttgcaggttgcaagccgcaggccccaggcaactgccttcccggcgccatgttcggctccagtcgtggaggcgtgcgcggcgggcaggaccagttcaactgggaggacgtgaagactgacaagcagcgggagaactacctgggcaactcgctgatggcgccggtaggccgctggcagaagggccgcgacctcacctggtacgccaagggccgggcgccatgcgcgggcccgagccgcgaggaggaactggcagccgtgcgggaggcggagcgcgaggcgctgctggccgcccttggctacaagaacgtgaagaagcagcccacgggcctgagcaaggaggtaactccccggggtggggggcgcgtggagggccgtgggtgtggggccgactcgagcgctccctgtgctctcgcacctgcaggacttcgcggaggtctgcaagcgggaaggaggcgaccccgaggagaagggcgtggaccggctgctggggctggggagcgcaaggtgcgggcgggtttccaggggagggcagcactgggctcgattgctcgggtgaggcggacccctgccgtactgtcttcatcgccatgtccctgcagtggctccgtgggccgcgtggcgatgtcccgagaggacaaggaggccgccaaactggggctgtctgtgttcacggtaatcccccgccccgcctgaccgcagca

SEQ ID NO: 3325 - protein, 214 aa, Homo sapiens [sequence omitted]

SEQ ID NO: 3326 - DNA, 817 bp, Homo sapiens
acggccagaacagacagcctgggccctgccgcaggctgactcagaatctttgggagtagtgaccaacttctgcttttggaaaaacctctacaggcggttctgagaagtccaagggttgctgggagaggttggttgcacgccagggcctgtactgaccacctccacgtgccactggggctgtaaggaggaatggcggccgtgggcagcctgcttggtccttgctattgtccactgtcccctgtgctggaagctttgtgcccttgctcagcctggcagcctcttcctggctagggggccagaacgcctctgaccacagcctgtggctcctgaggaagccccgaggctcatcctgccccggcacgggtcaccagctctgccggctgaggcagagcaccgtgaaggccaccggacctgcactccgccgcctgcacacatcctcctggcgagctgacagcagcagggcctcactcactcgtgtgcaccgccaggcttatgcacgactctaccccgtgctgctggtgaagcaggatggctccaccatccacatccgctacagggagccacggcgcatgctggcgatgcccatagatctggacaccctgtctcctgaggagcgccgggccaggctgcggaagcgtgaggctcagctccagtcgaggaaggagtacgagcaggagctcagtgatgacttgcatgtggagcgctaccgacagttctggaccaggaccaagaagtgaccgtggctccagccaccccgggacattgctaagatgggagggctgttcttaaatcactcgttcttgaagctgccacctgg

SEQ ID NO: 3327 - protein, 55 aa, Homo sapiens; identical to SEQ ID NO: 195

SEQ ID NO: 3328 - DNA, 893 bp, Homo sapiens
tgatctcctgcgtggcctcgtccctggtcttagttccaccgggcagcgggagtcaggaccgcctgtcctcagacccctccgcagcgactgtggcggccgcaggttggcgcctcgtgtgggccgggaacagaggcgggaggcgctgtaccctcccggtggagtcgggagggagggaggcagggaaggggacagggggctgcacctgtgataagcccttgtccccatgcagtctagcaggaaaggagagggagctttccccgaagaccctcctggaccagccccaggctcctgtgctgtgaccaacttctgcttttggaaaaacctctacaggcggttctgagaagtccaagggttgctgggagaggttggttgcacgccagggcctgtactgaccacctccacgtgccactggggctgtaaggaggaatggcggccgtgggcagcctgcttggccggctgaggcagagcaccgtgaaggccaccggacctgcactccgccgcctgcacacatcctcctggcgagctgacagcagcagggcctcactcactcgtgtgcaccgccaggcttatgcacgactctaccccgtgctgctggtgaagcaggatggctccaccatccacatccgctacagggagccacggcgcatgctggcgatgcccatagatctggacaccctgtctcctgaggagcgccgggccaggctgcggaagcgtgaggctcagctccagtcgaggaaggagtacgagcaggagctcagtgatgacttgcatgtggagcgctaccgacagttctggaccaggaccaagaagtgaccgtggctccagccaccccgggacattgctaagatgggagggctgttcttaaatcactcgttcttgaagctgccacctgg

SEQ ID NO: 3329 - protein, 128 aa, Homo sapiens; identical to SEQ ID NO: 187

SEQ ID NO: 3330 - DNA, 821 bp, Homo sapiens
tgatctcctgcgtggcctcgtccctggtcttagttccaccgggcagcgggagtcaggaccgcctgtcctcagacccctccgcagcgactgtggcggccgcaggttggcgcctcgtgtgggccgggaacagaggcgggaggcgctgtaccctcccggtggagtcgggagggagggaggcagggaaggggacagggggctgcacctgtgataagcccttgtccccatgcagtctagcaggaaaggagagggagctttccccgaagaccctcctggaccagccccaggctcctgtgctggttgcacgccagggcctgtactgaccacctccacgtgccactggggctgtaaggaggaatggcggccgtgggcagcctgcttggccggctgaggcagagcaccgtgaaggccaccggacctgcactccgccgcctgcacacatcctcctggcgagctgacagcagcagggcctcactcactcgtgtgcaccgccaggcttatgcacgactctaccccgtgctgctggtgaagcaggatggctccaccatccacatccgctacagggagccacggcgcatgctggcgatgcccatagatctggacaccctgtctcctgaggagcgccgggccaggctgcggaagcgtgaggctcagctccagtcgaggaaggagtacgagcaggagctcagtgatgacttgcatgtggagcgctaccgacagttctggaccaggaccaagaagtgaccgtggctccagccaccccgggacattgctaagatgggagggctgttcttaaatcactcgttcttgaagctgccacctgg

SEQ ID NO: 3331 - protein, 128 aa, Homo sapiens; identical to SEQ ID NO: 187

SEQ ID NO: 3332 - DNA, 729 bp, Homo sapiens
gcgcagcagcacccaacgcagtgagtaccttgatctcctgcgtggcctcgtccctggtcttagttccaccgggcagcgggagtcaggaccgcctgtcctcagacccctccgcagcgactgtggcggccgcagtgaccaacttctgcttttggaaaaacctctacaggcggttctgagaagtccaagggttgctgggagaggttggttgcacgccagggcctgtactgaccacctccacgtgccactggggctgtaaggaggaatggcggccgtgggcagcctgcttggccggctgaggcagagcaccgtgaaggccaccggacctgcactccgccgcctgcacacatcctcctggcgagctgacagcagcagggcctcactcactcgtgtgcaccgccaggcttatgcacgactctaccccgtgctgctggtgaagcaggatggctccaccatccacatccgctacagggagccacggcgcatgctggcgatgcccatagatctggacaccctgtctcctgaggagcgccgggccaggctgcggaagcgtgaggctcagctccagtcgaggaaggagtacgagcaggagctcagtgatgacttgcatgtggagcgctaccgacagttctggaccaggaccaagaagtgaccgtggctccagccaccccgggacattgctaagatgggagggctgttcttaaatcactcgttcttgaagctgccacctgg

SEQ ID NO: 3333 - protein, 128 aa, Homo sapiens; identical to SEQ ID NO: 187

SEQ ID NO: 3334 - DNA, 1422 bp, Homo sapiens
agtgacgtcgtgggctgcagcgcagcagcacccaacgcagtgagtaccttgatctcctgcgtggcctcgtccctggtcttagttccaccgggcagcgggagtcaggaccgcctgtcctcagacccctccgcagcgactgtggcggccgcagtctagcaggaaaggagagggagctttccccgaagaccctcctggaccagccccaggctcctgtgctggtgaggccgagggagagggatgtgggcataggacacgtagcaggatttccattttagaggcagccggacctgtcttcaggtcccttccttggtgagagacaggggtacgccagaggaagctgggcgctcggcctctgtgcagcctcatctcctggaatctgagtattgaaaactgggcttttacttcgcacacctcagcacagactcccatgggaatccaggtcacagcaaagcagccctgggcctccattctcctttaagcaagcatgacaatcctcacttcactgagtttttattaaaactagcaatgaccttagaaagcaaggcatgacctcagctccacttttgaggctgcagtccattcagagaggtttcgcagactcggtaacggccagaacagacagcctgggccctgccgcaggctgactcagaatctttgggagtagtgaccaacttctgcttttggaaaaacctctacaggcggttctgagaagtccaagggttgctgggagaggttggttgcacgccagggcctgtactgaccacctccacgtgccactggggctgtaaggaggaatggcggccgtgggcagcctgcttggtccttgctattgtccactgtcccctgtgctggaagctttgtgcccttgctcagcctggcagcctcttcctggctagggggccagaacgcctctgaccacagcctgtggctcctgaggaagccccgaggctcatcctgccccggcacgggtcaccagctctgccggctgaggcagagcaccgtgaaggccaccggacctgcactccgccgcctgcacacatcctcctggcgagctgacagcagcagggcctcactcactcgtgtgcaccgccaggcttatgcacgactctaccccgtgctgctggtgaagcaggatggctccaccatccacatccgctacagggagccacggcgcatgctggcgatgcccatagatctggacaccctgtctcctgaggagcgccgggccaggctgcggaagcgtgaggctcagctccagtcgaggaaggagtacgagcaggagctcagtgatgacttgcatgtggagcgctaccgacagttctggaccaggaccaagaagtgaccgtggctccagccaccccgggacattgctaagatgggagggctgttcttaaatcactcgttcttgaagctgccacctgg

SEQ ID NO: 3335 - protein, 55 aa, Homo sapiens; identical to SEQ ID NO: 195

SEQ ID NO: 3336 - DNA, 680 bp, Homo sapiens
tgccagtgacgtcgtgggctgcagcgcagcagcacccaacgcagtgagtaccttgatctcctgcgtggcctcgtccctggtcttagttccaccgggcagcgggagtcaggaccgcctgtcctcagacccctccgcagcgactgtggcggccgcaggttgcacgccagggcctgtactgaccacctccacgtgccactggggctgtaaggaggaatggcggccgtgggcagcctgcttggccggctgaggcagagcaccgtgaaggccaccggacctgcactccgccgcctgcacacatcctcctggcgagctgacagcagcagggcctcactcactcgtgtgcaccgccaggcttatgcacgactctaccccgtgctgctggtgaagcaggatggctccaccatccacatccgctacagggagccacggcgcatgctggcgatgcccatagatctggacaccctgtctcctgaggagcgccgggccaggctgcggaagcgtgaggctcagctccagtcgaggaaggagtacgagcaggagctcagtgatgacttgcatgtggagcgctaccgacagttctggaccaggaccaagaagtgaccgtggctccagccaccccgggacattgctaagatgggagggctgttcttaaatcactcgttcttgaagctgccacctgg

SEQ ID NO: 3337 - protein, 128 aa, Homo sapiens; identical to SEQ ID NO: 187

SEQ ID NO: 3338 - DNA, 635 bp, Homo sapiens
tgccagtgacgtcgtgggctgcagcgcagcagcacccaacgcatctagcaggaaaggagagggagctttccccgaagaccctcctggaccagccccaggctcctgtgctggttgcacgccagggcctgtactgaccacctccacgtgccactggggctgtaaggaggaatggcggccgtgggcagcctgcttggccggctgaggcagagcaccgtgaaggccaccggacctgcactccgccgcctgcacacatcctcctggcgagctgacagcagcagggcctcactcactcgtgtgcaccgccaggcttatgcacgactctaccccgtgctgctggtgaagcaggatggctccaccatccacatccgctacagggagccacggcgcatgctggcgatgcccatagatctggacaccctgtctcctgaggagcgccgggccaggctgcggaagcgtgaggctcagctccagtcgaggaaggagtacgagcaggagctcagtgatgacttgcatgtggagcgctaccgacagttctggaccaggaccaagaagtgaccgtggctccagccaccccgggacattgctaagatgggagggctgttcttaaatcactcgttcttgaagctgccacctgg

SEQ ID NO: 3339 - protein, 128 aa, Homo sapiens; identical to SEQ ID NO: 187

SEQ ID NO: 3340 - DNA, 673 bp, Homo sapiens
tgccagtgacgtcgtgggctgcagcgcagcagcacccaacgcatctagcaggaaaggagagggagctttccccgaagaccctcctggaccagccccaggctcctgtgctggcggttctgagaagtccaagggttgctgggagaggttggttgcacgccagggcctgtactgaccacctccacgtgccactggggctgtaaggaggaatggcggccgtgggcagcctgcttggccggctgaggcagagcaccgtgaaggccaccggacctgcactccgccgcctgcacacatcctcctggcgagctgacagcagcagggcctcactcactcgtgtgcaccgccaggcttatgcacgactctaccccgtgctgctggtgaagcaggatggctccaccatccacatccgctacagggagccacggcgcatgctggcgatgcccatagatctggacaccctgtctcctgaggagcgccgggccaggctgcggaagcgtgaggctcagctccagtcgaggaaggagtacgagcaggagctcagtgatgacttgcatgtggagcgctaccgacagttctggaccaggaccaagaagtgaccgtggctccagccaccccgggacattgctaagatgggagggctgttcttaaatcactcgttcttgaagctgccacctgg

SEQ ID NO: 3341 - protein, 128 aa, Homo sapiens; identical to SEQ ID NO: 187

SEQ ID NO: 3342 - DNA, 855 bp, Homo sapiens
tgccagtgacgtcgtgggctgcagcgcagcagcacccaacgcagtgagtaccttgatctcctgcgtggcctcgtccctggtcttagttccaccgggcagcgggagtcaggaccgcctgtcctcagacccctccgcagcgactgtggcggccgcagtctagcaggaaaggagagggagctttccccgaagaccctcctggaccagccccaggctcctgtgctggttgcacgccagggcctgtactgaccacctccacgtgccactggggctgtaaggaggaatggcggccgtgggcagcctgcttggcctggcagcctcttcctggctagggggccagaacgcctctgaccacagcctgtggctcctgaggaagccccgaggctcatcctgccccggcacgggtcaccagctctgccggctgaggcagagcaccgtgaaggccaccggacctgcactccgccgcctgcacacatcctcctggcgagctgacagcagcagggcctcactcactcgtgtgcaccgccaggcttatgcacgactctaccccgtgctgctggtgaagcaggatggctccaccatccacatccgctacagggagccacggcgcatgctggcgatgcccatagatctggacaccctgtctcctgaggagcgccgggccaggctgcggaagcgtgaggctcagctccagtcgaggaaggagtacgagcaggagctcagtgatgacttgcatgtggagcgctaccgacagttctggaccaggaccaagaagtgaccgtggctccagccaccccgggacattgctaagatgggagggctgttcttaaatcactcgttcttgaagctgccacctgg

SEQ ID NO: 3343 - protein, 164 aa, Homo sapiens
MAAVGSLLGLAASSWLGGQNASDHSLWLLRKPRGSSCPGTGHQLCRLRQSTVKATGPALRRLHTSSWRADSSRASLTRVHRQAYARLYPVLLVKQDGSTIHIRYREPRRMLAMPIDLDTLSPEERRARLRKREAQLQSRKEYEQELSDDLHVERYRQFWTRTKK

SEQ ID NO: 3344 - DNA, 718 bp, Homo sapiens
tgccagtgacgtcgtgggctgcagcgcagcagcacccaacgcagtgagtaccttgatctcctgcgtggcctcgtccctggtcttagttccaccgggcagcgggagtcaggaccgcctgtcctcagacccctccgcagcgactgtggcggccgcaggcggttctgagaagtccaagggttgctgggagaggttggttgcacgccagggcctgtactgaccacctccacgtgccactggggctgtaaggaggaatggcggccgtgggcagcctgcttggccggctgaggcagagcaccgtgaaggccaccggacctgcactccgccgcctgcacacatcctcctggcgagctgacagcagcagggcctcactcactcgtgtgcaccgccaggcttatgcacgactctaccccgtgctgctggtgaagcaggatggctccaccatccacatccgctacagggagccacggcgcatgctggcgatgcccatagatctggacaccctgtctcctgaggagcgccgggccaggctgcggaagcgtgaggctcagctccagtcgaggaaggagtacgagcaggagctcagtgatgacttgcatgtggagcgctaccgacagttctggaccaggaccaagaagtgaccgtggctccagccaccccgggacattgctaagatgggagggctgttcttaaatcactcgttcttgaagctgccacctgg

SEQ ID NO: 3345 - protein, 128 aa, Homo sapiens; identical to SEQ ID NO: 187

SEQ ID NO: 3346 - DNA, 747 bp, Homo sapiens
tgccagtgacgtcgtgggctgcagcgcagcagcacccaacgcagtgagtaccttgatctcctgcgtggcctcgtccctggtcttagttccaccgggcagcgggagtcaggaccgcctgtcctcagacccctccgcagcgactgtggcggccgcagtctagcaggaaaggagagggagctttccccgaagaccctcctggaccagccccaggctcctgtgctggttgcacgccagggcctgtactgaccacctccacgtgccactggggctgtaaggaggaatggcggccgtgggcagcctgcttggccggctgaggcagagcaccgtgaaggccaccggacctgcactccgccgcctgcacacatcctcctggcgagctgacagcagcagggcctcactcactcgtgtgcaccgccaggcttatgcacgactctaccccgtgctgctggtgaagcaggatggctccaccatccacatccgctacagggagccacggcgcatgctggcgatgcccatagatctggacaccctgtctcctgaggagcgccgggccaggctgcggaagcgtgaggctcagctccagtcgaggaaggagtacgagcaggagctcagtgatgacttgcatgtggagcgctaccgacagttctggaccaggaccaagaagtgaccgtggctccagccaccccgggacattgctaagatgggagggctgttcttaaatcactcgttcttgaagctgccacctgg

SEQ ID NO: 3347 - protein, 128 aa, Homo sapiens; identical to SEQ ID NO: 187

SEQ ID NO: 3348 - DNA, 568 bp, Homo sapiens
tgccagtgacgtcgtgggctgcagcgcagcagcacccaacgcagttgcacgccagggcctgtactgaccacctccacgtgccactggggctgtaaggaggaatggcggccgtgggcagcctgcttggccggctgaggcagagcaccgtgaaggccaccggacctgcactccgccgcctgcacacatcctcctggcgagctgacagcagcagggcctcactcactcgtgtgcaccgccaggcttatgcacgactctaccccgtgctgctggtgaagcaggatggctccaccatccacatccgctacagggagccacggcgcatgctggcgatgcccatagatctggacaccctgtctcctgaggagcgccgggccaggctgcggaagcgtgaggctcagctccagtcgaggaaggagtacgagcaggagctcagtgatgacttgcatgtggagcgctaccgacagttctggaccaggaccaagaagtgaccgtggctccagccaccccgggacattgctaagatgggagggctgttcttaaatcactcgttcttgaagctgccacctgg

SEQ ID NO: 3349 - protein, 128 aa, Homo sapiens; identical to SEQ ID NO: 187

SEQ ID NO: 3350 - DNA, 1518 bp, Homo sapiens
gcagcgcctgccagtgacgtcgtgggctgcagcgcagcagcacccaacgcagtgagtaccttgatctcctgcgtggcctcgtccctggtcttagttccaccgggcagcgggagtcaggaccgcctgtcctcagacccctccgcagcgactgtggcggccgcaggttggcgcctcgtgtgggccgggaacagaggcgggaggcgctgtaccctcccggtggagtcgggagggagggaggcagggaaggggacagggggctgcacctgtgataagcccttgtccccatgcagtctagcaggaaaggagagggagctttccccgaagaccctcctggaccagccccaggctcctgtgctggtgaggccgagggagagggatgtgggcataggacacgtagcaggatttccattttagaggcagccggacctgtcttcaggtcccttccttggtgagagacaggggtacgccagaggaagctgggcgctcggcctctgtgcagcctcatctcctggaatctgagtattgaaaactgggcttttacttcgcacacctcagcacagactcccatgggaatccaggtcacagcaaagcagccctgggcctccattctcctttaagcaagcatgacaatcctcacttcactgagtttttattaaaactagcaatgaccttagaaagcaaggcatgacctcagctccacttttgaggctgcagtccattcagagaggtttcgcagactcggtaacggccagaacagacagcctgggccctgccgcaggctgactcagaatctttgggagtagtgaccaacttctgcttttggaaaaacctctacaggcggttctgagaagtccaagggttgctgggagaggttggtgagtggcgtggtgattacatgtgtcttggaagcatcctgggctgggatttgataagaaaccattaggtggaagaaccttccttttaaaaaagatctcttcattctctgcctagcaggttgcacgccagggcctgtactgaccacctccacgtgccactggggctgtaaggaggaatggcggccgtgggcagcctgcttggccggctgaggcagagcaccgtgaaggccaccggacctgcactccgccgcctgcacacatcctcctggcgagctgacagcagcagggcctcactcactcgtgtgcaccgccaggcttatgcacgactctaccccgtgctgctggtgaagcaggatggctccaccatccacatccgctacagggagccacggcgcatgctggcgatgcccatagatctggacaccctgtctcctgaggagcgccgggccaggctgcggaagcgtgaggctcagctccagtcgaggaaggagtacgagcaggagctcagtgatgacttgcatgtggagcgctaccgacagttctggaccaggaccaagaagtgaccgtggctccagccaccccgggacattgctaagatgggagggctgttcttaaatcactcgttcttgaagctgccacctgg

SEQ ID NO: 3351 - protein, 128 aa, Homo sapiens; identical to SEQ ID NO: 187

SEQ ID NO: 3352 - DNA, 1199 bp, Homo sapiens
aaggcatgacctcagctccacttttgaggctgcagtccattcagagaggtttcgcagactcggtaacggccagaacagacagcctgggccctgccgcaggctgactcagaatctttgggagtagtgaccaacttctgcttttggaaaaacctctacaggcggttctgagaagtccaagggttgctgggagaggttggtgagtggcgtggtgattacatgtgtcttggaagcatcctgggctgggatttgataagaaaccattaggtggaagaaccttccttttaaaaaagatctcttcattctctgcctagcaggttgcacgccagggcctgtactgaccacctccacgtgccactggggctgtaaggaggaatggcggccgtgggcagcctgcttgggtaagcatggacttttaggtccctggggattactgtcaggggccaccccagggaacccctctcttcagcaggaaaccgccattctaatcctccctagtccttgctattgtccactgtcccctgtgctggaagctttgtgcccttgctcagcctggcagcctcttcctggctagggggccagaacgcctctgaccacagcctgtggctcctgaggaagccccgaggctcatcctgccccggcacgggtcaccagctctggtaatgtctcctgtggcccggcagtgcccaatcacagccagcctcagtcatgttggcactctgctgcagcactgtcggctgaccagagcttgaacatttatctgcagccggctgaggcagagcaccgtgaaggccaccggacctgcactccgccgcctgcacacatcctcctggcgagctgacagcagcagggcctcactcactcgtgtgcaccgccaggcttatgcacgactctaccccgtgctgctggtgaagcaggatggctccaccatccacatccgctacagggagccacggcgcatgctggcgatgcccatagatctggacaccctgtctcctgaggagcgccgggccaggctgcggaagcgtgaggctcagctccagtcgaggaaggagtacgagcaggagctcagtgatgacttgcatgtggagcgctaccgacagttctggaccaggaccaagaagtgaccgtggctccagccaccccgggacattgctaagatgggagggctgttcttaaatcactcgttcttgaagctgcca

SEQ ID NO: 3353 - protein, 55 aa, Homo sapiens; identical to SEQ ID NO: 195

SEQ ID NO: 3354 - DNA, 1384 bp, Homo sapiens
gtgggctgcagcgcagcagcacccaacgcatctagcaggaaaggagagggagctttccccgaagaccctcctggaccagccccaggctcctgtgctggtgaggccgagggagagggatgtgggcataggacacgtagcaggatttccattttagaggcagccggacctgtcttcaggtcccttccttggtgagagacaggggtacgccagaggaagctgggcgctcggcctctgtgcagcctcatctcctggaatctgagtattgaaaactgggcttttacttcgcacacctcagcacagactcccatgggaatccaggtcacagcaaagcagccctgggcctccattctcctttaagcaagcatgacaatcctcacttcactgagtttttattaaaactagcaatgaccttagaaagcaaggcatgacctcagctccacttttgaggctgcagtccattcagagaggtttcgcagactcggtaacggccagaacagacagcctgggccctgccgcaggctgactcagaatctttgggagtagtgaccaacttctgcttttggaaaaacctctacaggcggttctgagaagtccaagggttgctgggagaggttggtgagtggcgtggtgattacatgtgtcttggaagcatcctgggctgggatttgataagaaaccattaggtggaagaaccttccttttaaaaaagatctcttcattctctgcctagcaggttgcacgccagggcctgtactgaccacctccacgtgccactggggctgtaaggaggaatggcggccgtgggcagcctgcttgggtaagcatggacttttaggtccctggggattactgtcaggggccaccccagggaacccctctcttcagcaggaaaccgccattctaatcctccctagtccttgctattgtccactgtcccctgtgctggaagctttgtgcccttgctcagcctggcagcctcttcctggctagggggccagaacgcctctgaccacagcctgtggctcctgaggaagccccgaggctcatcctgccccggcacgggtcaccagctctggtaatgtctcctgtggcccggcagtgcccaatcacagccagcctcagtcatgttggcactctgctgcagcactgtcggctgaccagagcttgaacatttatctgcagccggctgaggcagagcaccgtgaaggccaccggacctgcactccgccgcctgcacacatcctcctggcgagctgacagcagcagggcctcactcactcgtgtgcaccgccaggcttatgcacgactctaccccgtgctgctggtgaagcaggatggctccaccatccacatccgctacagggagccacggcgcatgctggcg

SEQ ID NO: 3355 - protein, 32 aa, Homo sapiens
MTSAPLLRLQSIQRGFADSVTARTDSLGPAAG

SEQ ID NO: 3356 - DNA, 1288 bp, Homo sapiens
cgcagcgcctgccagtgacgtcgtgggctgcagcgcagcagcacccaacgcatctagcaggaaaggagagggagctttccccgaagaccctcctggaccagccccaggctcctgtgctggtgaggccgagggagagggatgtgggcataggacacgtagcaggatttccattttagaggcagccggacctgtcttcaggtcccttccttggtgagagacaggggtacgccagaggaagctgggcgctcggcctctgtgcagcctcatctcctggaatctgagtattgaaaactgggcttttacttcgcacacctcagcacagactcccatgggaatccaggtcacagcaaagcagccctgggcctccattctcctttaagcaagcatgacaatcctcacttcactgagtttttattaaaactagcaatgaccttagaaagcaaggcatgacctcagctccacttttgaggctgcagtccattcagagaggtttcgcagactcggtaacggccagaacagacagcctgggccctgccgcaggctgactcagaatctttgggagtagtgaccaacttctgcttttggaaaaacctctacaggcggttctgagaagtccaagggttgctgggagaggttggttgcacgccagggcctgtactgaccacctccacgtgccactggggctgtaaggaggaatggcggccgtgggcagcctgcttgggtaagcatggacttttaggtccctggggattactgtcaggggccaccccagggaacccctctcttcagcaggaaaccgccattctaatcctccctagtccttgctattgtccactgtcccctgtgctggaagctttgtgcccttgctcagcctggcagcctcttcctggctagggggccagaacgcctctgaccacagcctgtggctcctgaggaagccccgaggctcatcctgccccggcacgggtcaccagctctggtaatgtctcctgtggcccggcagtgcccaatcacagccagcctcagtcatgttggcactctgctgcagcactgtcggctgaccagagcttgaacatttatctgcagccggctgaggcagagcaccgtgaaggccaccggacctgcactccgccgcctgcacacatcctcctggcgagctgacagcagcagggcctcactcactcgtgtgcaccgccaggcttatgcacgactctaccccgtgctgctggtgaagcaggatggctccaccatccacatccgctacagggagccacggcgcatgctggcg

SEQ ID NO: 3357 - protein, 32 aa, Homo sapiens; identical to SEQ ID NO: 3355

SEQ ID NO: 3358 - DNA, 723 bp, Homo sapiens
atgactgtctctgattatgacaacagatggtttggtgaactcttattatcttcacccaactgccgccgcactgccatcatggacaccagccacatgcagcctatcaagctggtcagggtcaccaagcttctgggcagaatgggctctaaaggacagtggtcgcaggtgtgcatggaatttatggaggatgcgagccgctccatcatccacaatgtaaaaggccccgtgtgcgagggcgatgtgctcaccctgttgcagtcagagtcagaggtcgggaggttgcgctgagcttggctgctggctgggtcttggatgttgggttcgaccacttgaccagtgggaatggtgtgctgcgttctcctttattttattcttggcctgccacgcaggaattgagatgtgtctttaaataaagcatttgtgtttcaagttaaaaaaaaattggctgggcacggtggctcaagcctgtaatcccagaactttgggaggccaaggcaggcagatcacctcaggtcaggcgttcaagaccagcctggccaacatggcaaaacctcgtctctactaaaaatacaaaagctagctgggcatggtggcgggcgcctgtgatcccagctactcaggaggctgaagcaggagaaatgcttgaacccgggaggcggaggttgcagtgagctgagatcatgccactgtactccagcccgggcaatggagcaagactgtctc

SEQ ID NO: 3359 - protein, 95 aa, Homo sapiens
MTVSDYDNRWFGELLLSSPNCRRTAIMDTSHMQPIKLVRVTKLLGRMGSKGQWSQVCMEFMEDASRSIIHNVKGPVCEGDVLTLLQSESEVGRLR

SEQ ID NO: 3360 - DNA, 1052 bp, Homo sapiens
cttctctgagtgacaagcgggacaagtacgccgtgggcggggccggcgggtcgtgatgttagttcgcgctgtgtggaggcgggccggcgtggcgctgtgacgcagcgggagaagacgggctgggagggcgctgtgctgaacgcccctgcggtcgcgacaggccagcgcaggtggaggcggggctagcgaggcactgaggcatgtcgggccccaggcctgtggtgctgagcgggccttcgggagctgggaagagcaccctgctgaagaggctgctccaggagcacagcggcatctttggcttcagcgtgtcccataccacgaggaacccgaggcccggcgaggagaacggcaaagattactactttgtaaccagggaggtgatgcagcgtgacatagcagccggcgacttcatcgagcatgccgagttctcggggaacctgtatggcacgagcaaggtggcggtgcaggccgtgcaggccatgaaccgcatctgtgtgctggacgtggacctgcagggtgtgcggaacatcaaggccaccgatctgcggcccatctacatctctgtgcagccgccttcactgcacgtgctggagcagcggctgcggcagcgcaacactgaaaccgaggagagcctggtgaagcggctggctgctgcccaggccgacatggagagcagcaaggagcccggcctgtttgatgtggtcatcattaacgacagcctggaccaggcctacgcagagctgaaggaggcgctctctgaggaaatcaagaaagctcaaaggaccggcgcctgaggcttgctgtctgttctcggcaccccgggcccatacaggaccagggcagcagcattgagccacccccttggcaggcgatacggcagctctgtgcccttggccagcatgtggagtggaggagatgctgcccctgtggttggaacatcctggggtgacccccgacccagcctcgctgggctgtcccctgtccctatctctcactctggacccagggctgacatcctaataaaataactgttggattagaaactccataaa

SEQ ID NO: 3361 - protein, 197 aa, Homo sapiens; identical to SEQ ID NO: 205

SEQ ID NO: 3362 - DNA, 1038 bp, Homo sapiens
agtctcgcgcgcgggcggaggtgggccggtgcggcgctgtcacgtaggttcagtgggcggaagaggtggccccggatgctgcggcgcccgctggccgggctggctgcggccgccctgggccgggccccaccggacggcatgtcgggccccaggcctgtggtgctgagcgggccttcgggagctgggaagagcaccctgctgaagaggctgctccaggagcacagcggcatctttggcttcagcgtgtcccataccacgaggaacccgaggcccggcgaggagaacggcaaagattactactttgtaaccagggaggtgatgcagcgtgacatagcagccggcgacttcatcgagcatgccgagttctcggggaacctgtatggcacgagcaaggtggcggtgcaggccgtgcaggccatgaaccgcatctgtgtgctggacgtggacctgcagggtgtgcggaacatcaaggccaccgatctgcggcccatctacatctctgtgcagccgccttcactgcacgtgctggagcagcggctgcggcagcgcaacactgaaaccgaggagagcctggtgaagcggctggctgctgcccaggccgacatggagagcagcccggctgggctggaaagctgtcccacagccgcagtgaggacagccgcaggccagagcccggcctgtttgatgtggtcatcattaacgacagcctggaccaggcctacgcagagctgaaggaggcgctctctgaggaaatcaagaaagctcaaaggaccggcgcctgaggcttgctgtctgttctcggcaccccgggcccatacaggaccagggcagcagcattgagccacccccttggcaggcgatacggcagctctgtgcccttggccagcatgtggagtggaggagatgctgcccctgtggttggaacatcctggggtgacccccgacccagcctcgctgggctgtcccctgtccctatctctcactctggacccagggctgacatcctaataaaataactgttggattagaaactccata

SEQ ID NO: 3363 - protein, 218 aa, Homo sapiens
MLRRPLAGLAAAALGRAPPDGMSGPRPVVLSGPSGAGKSTLLKRLLQEHSGIFGFSVSHTTRNPRPGEENGKDYYFVTREVMQRDIAAGDFIEHAEFSGNLYGTSKVAVQAVQAMNRICVLDVDLQGVRNIKATDLRPIYISVQPPSLHVLEQRLRQRNTETEESLVKRLAAAQADMESSPAGLESCPTAAVRTAAGQSPACLMWSSLTTAWTRPTQS

SEQ ID NO: 3364 - DNA, 1071 bp, Homo sapiens
agtctcgcgcgcgggcggaggtgggccggtgcggcgctgtcacgtaggttcagtgggcggaagaggtggccccggatgctgcggcgcccgctggccgggctggctgcggccgccctgggccgggccccaccggacggcatgtcgggccccaggcctgtggtgctgagcgggccttcgggagctgggaagagcaccctgctgaagaggctgctccaggagcacagcggcatctttggcttcagcgtgtcccataccacgaggaacccgaggcccggcgaggagaacggcaaagattactactttgtaaccagggaggtgatgcagcgtgacatagcagccggcgacttcatcgagcatgccgagttctcggggaacctgtatggcacgagcaaggtggcggtgcaggccgtgcaggccatgaaccgcatctgtgtgctggacgtggacctgcagggtgtgcggaacatcaaggccaccgatctgcggcccatctacatctctgtgcagccgccttcactgcacgtgctggagcagcggctgcggcagcgcaacactgaaaccgaggagagcctggtgaagcggctggctgctgcccaggccgacatggagagcagcaaggagcccggcctgtttgatgtggtcatcattaacgacagcctggaccaggcctacgcagagctgaaggaggcgctctctgaggtgggcccatccttgtgcctacctgggcaaggcccaaggggaggcctgggggccaggcctttgttgtccatgaggccactgaggaaatcaagaaagctcaaaggaccggcgcctgaggcttgctgtctgttctcggcaccccgggcccatacaggaccagggcagcagcattgagccacccccttggcaggcgatacggcagctctgtgcccttggccagcatgtggagtggaggagatgctgcccctgtggttggaacatcctggggtgacccccgacccagcctcgctgggctgtcccctgtccctatctctcactctggacccagggctgacatcctaataaaataactgttggattagaaactccata

SEQ ID NO: 3365 - protein, 265 aa, Homo sapiens
MLRRPLAGLAAAALGRAPPDGMSGPRPVVLSGPSGAGKSTLLKRLLQEHSGIFGFSVSHTTRNPRPGEENGKDYYFVTREVMQRDIAAGDFIEHAEFSGNLYGTSKVAVQAVQAMNRICVLDVDLQGVRNIKATDLRPIYISVQPPSLHVLEQRLRQRNTETEESLVKRLAAAQADMESSKEPGLFDVVIINDSLDQAYAELKEALSEVGPSLCLPGQGPRGGLGARPLLSMRPLRKSRKLKGPAPEACCLFSAPRAHTGPGQQH

SEQ ID NO: 3366 - DNA, 902 bp, Homo sapiens
agtctcgcgcgcgggcggaggtgggccggtgcggcgctgtcacgtaggttcagtgggcggaagaggtggccccggatgctgcggcgcccgctggccgggctggctgcggccgccctgggccgggccccaccggacggcatgtcgggccccaggcctgtggtgctgagcgggccttcgggagctgggaagagcaccctgctgaagaggctgctccaggagcacagcggcatctttggcttcagcgtgtcccataccacgaggaacccgaggcccggcgaggagaacggcaaagattactactttgtaaccagggaggtgatgcagcgtgacatagcagccggcgacttcatcgagcatgccgagttctcggggaacctgtatggcacgagcaaggtggcggtgcaggccgtgcaggccatgaaccgcatctgtgtgctggacgtggacctgcagggtgtgcggaacatcaaggccaccgatctgcggcccatctacatctctgtgcagccgccttcactgcacgtgctggagcagcggctgcggcagcgcaacactgaaaccgaggagagcctggtgaagcggctggctgctgcccaggccgacatggagagcagaaatcaagaaagctcaaaggaccggcgcctgaggcttgctgtctgttctcggcaccccgggcccatacaggaccagggcagcagcattgagccacccccttggcaggcgatacggcagctctgtgcccttggccagcatgtggagtggaggagatgctgcccctgtggttggaacatcctggggtgacccccgacccagcctcgctgggctgtcccctgtccctatctctcactctggacccagggctgacatcctaataaaataactgttggattagaaactccata

SEQ ID NO: 3367 - protein, 241 aa, Homo sapiens
MLRRPLAGLAAAALGRAPPDGMSGPRPVVLSGPSGAGKSTLLKRLLQEHSGIFGFSVSHTTRNPRPGEENGKDYYFVTREVMQRDIAAGDFIEHAEFSGNLYGTSKVAVQAVQAMNRICVLDVDLQGVRNIKATDLRPIYISVQPPSLHVLEQRLRQRNTETEESLVKRLAAAQADMESRNQESSKDRRLRLAVCSRHPGPIQDQGSSIEPPPWQAIRQLCALGQHVEWRRCCPCGWNILG

SEQ ID NO: 3368 - DNA, 990 bp, Homo sapiens
agtctcgcgcgcgggcggaggtgggccggtgcggcgctgtcacgtaggttcagtgggcggaagaggtggccccggatgctgcggcgcccgctggccgggctggctgcggccgccctgggccgggccccaccggacggcatgtcgggccccaggcctgtggtgctgagcgggccttcgggagctgggaagagcaccctgctgaagaggctgctccaggagcacagcggcatctttggcttcagcgtgtcccataccacgaggaacccgaggcccggcgaggagaacggcaaagattactactttgtaaccagggaggtgatgcagcgtgacatagcagccggcgacttcatcgagcatgccgagttctcggggaacctgtatggcacgagcaaggtggcggtgcaggccgtgcaggccatgaaccgcatctgtgtgctggacgtggacctgcagggtgtgcggaacatcaaggccaccgatctgcggcccatctacatctctgtgcagccgccttcactgcacgtgctggagcagcggctgcggcagcgcaacactgaaaccgaggagagcctggtgaagcggctggctgctgcccaggccgacatggagagcagcaaggagcccggcctgtttgatgtggtcatcattaacgacagcctggaccaggcctacgcagagctgaaggaggcgctctctgaggaaatcaagaaagctcaaaggaccggcgcctgaggcttgctgtctgttctcggcaccccgggcccatacaggaccagggcagcagcattgagccacccccttggcaggcgatacggcagctctgtgcccttggccagcatgtggagtggaggagatgctgcccctgtggttggaacatcctggggtgacccccgacccagcctcgctgggctgtcccctgtccctatctctcactctggacccagggctgacatcctaataaaataactgttggattagaaactccataaa

SEQ ID NO: 3369 - protein, 218 aa, Homo sapiens
MLRRPLAGLAAAALGRAPPDGMSGPRPVVLSGPSGAGKSTLLKRLLQEHSGIFGFSVSHTTRNPRPGEENGKDYYFVTREVMQRDIAAGDFIEHAEFSGNLYGTSKVAVQAVQAMNRICVLDVDLQGVRNIKATDLRPIYISVQPPSLHVLEQRLRQRNTETEESLVKRLAAAQADMESSKEPGLFDVVIINDSLDQAYAELKEALSEEIKKAQRTGA

SEQ ID NO: 3370 - DNA, 1117 bp, Homo sapiens
gtcacgtaggttcagtgggcggaagaggtggccccggatgctgcggcgcccgctggccgggctggctgcggccgccctgggccgggccccaccggacggcttgctctgctctttacctggggttgctgtcgaggaccctgtgcaagactcggccggtttttctttctccctgatggacagacccaaacatagccgcgcagcatcgtgaagggctggggccttcactcctctgtggctctggaagagcccgatttcctcaggaggcatgtcgggccccaggcctgtggtgctgagcgggccttcgggagctgggaagagcaccctgctgaagaggctgctccaggagcacagcggcatctttggcttcagcgtgtcccataccacgaggaacccgaggcccggcgaggagaacggcaaagattactactttgtaaccagggaggtgatgcagcgtgacatagcagccggcgacttcatcgagcatgccgagttctcggggaacctgtatggcacgagcaaggtggcggtgcaggccgtgcaggccatgaaccgcatctgtgtgctggacgtggacctgcagggtgtgcggaacatcaaggccaccgatctgcggcccatctacatctctgtgcagccgccttcactgcacgtgctggagcagcggctgcggcagcgcaacactgaaaccgaggagagcctggtgaagcggctggctgctgcccaggccgacatggagagcagcaaggagcccggcctgtttgatgtggtcatcattaacgacagcctggaccaggcctacgcagagctgaaggaggcgctctctgaggaaatcaagaaagctcaaaggaccggcgcctgaggcttgctgtctgttctcggcaccccgggcccatacaggaccagggcagcagcattgagccacccccttggcaggcgatacggcagctctgtgcccttggccagcatgtggagtggaggagatgctgcccctgtggttggaacatcctggggtgacccccgacccagcctcgctgggctgtcccctgtccctatctctcactctggacccagggctgacatcctaataaaataactgttggattagaaactccataaa

SEQ ID NO: 3371 - protein, 197 aa, Homo sapiens; identical to SEQ ID NO: 205

SEQ ID NO: 3372 - DNA, 881 bp, Homo sapiens
aggttcagtgggcggaagaggtggccccggatgctgcggcgcccgctggccgggctggctgcggccgccctgggccgggccccaccggacggcttgctctgctctttacctggggttgctgtcgaggaccctgtgcaagactcggccggtttttctttctccctgatggacagacccaaacatagccgcgcagcatcgtgaagggctggggccttcactcctctgtggctctggaagagcccgatttcctcaggaggtaaaggaatgttcctgtcccccccggggaaagaaagtgaaaatgaaagcgccctggctgctcctggtgtggtcccatttaaaacgaggttgctgaaggccaggatgcgtgctacccggatgtgtgcccagaaaccctgcagccaagagcagccgcctggaccaccagcctccccttcatccacctggcccagcccagagcccaggcccacgtctggtggtttgtgtcttacgagaggccaggcgggggctgaattctctcggttctcagaaggtcaagccctctgttagcatctcctcgaacagtgggccgggggcaaggtggtgactctgttcagtccttaggatggctggaagccagaaggaggagattatgccgccacagcagggagtgcctttccaggaaagcggctgctggggcagcatgggagcccagtccagggagcgttctggcagagaccattccggaacatggatctgcgccggcggctcccaggagaccttccatctcggagctcctgtggagaccacgtgcctggcaggtccttacagttgtgggttgtgtggcttcttgccaggcagctgattggagtttgcgactgtgggttggtgagagtggagagcac

SEQ ID NO: 3373 - protein, 56 aa, Homo sapiens
MLRRPLAGLAAAALGRAPPDGLLCSLPGVAVEDPVQDSAGFSFSLMDRPKHSRAAS

SEQ ID NO: 3374 - DNA, 1022 bp, Homo sapiens
aggttcagtgggcggaagaggtggccccggatgctgcggcgcccgctggccgggctggctgcggccgccctgggccgggccccaccggacggcttgctctgctctttacctggggttgctgtcgaggaccctgtgcaagactcggccggtttttctttctccctgatggacagacccaaacatagccgcgcagcatcgtgaagggctggggccttcactcctctgtggctctggaagagcccgatttcctcaggaggcatgtcgggccccaggcctgtggtgctgagcgggccttcgggagctgggaagagcaccctgctgaagaggctgctccaggagcacagcggcatctttggcttcagcgtgtcccataccacgaggaacccgaggcccggcgaggagaacggcaaagattactactttgtaaccagggaggtgatgcagcgtgacatagcagccggcgacttcatcgagcatgccgagttctcggggaacctgtatggcacgagcaaggtggcggtgcaggccgtgcaggccatgaaccgcatctgtgtgctggacgtggacctgcagggtgtgcggaacatcaaggccaccgatctgcggcccatctacatctctgtgcagccgccttcactgcacgtgctggagcagcggctgcggcagcgcaacactgaaaccgaggagagcctggtgaagcggctggctgctgcccaggccgacatggagagcagaaatcaagaaagctcaaaggaccggcgcctgaggcttgctgtctgttctcggcaccccgggcccatacaggaccagggcagcagcattgagccacccccttggcaggcgatacggcagctctgtgcccttggccagcatgtggagtggaggagatgctgcccctgtggttggaacatcctggggtgacccccgacccagcctcgctgggctgtcccctgtccctatctctcactctggacccagggctgacatcctaataaaataactgttggattagaaactccata

SEQ ID NO: 3375 - protein, 220 aa, Homo sapiens
MSGPRPVVLSGPSGAGKSTLLKRLLQEHSGIFGFSVSHTTRNPRPGEENGKDYYFVTREVMQRDIAAGDFIEHAEFSGNLYGTSKVAVQAVQAMNRICVLDVDLQGVRNIKATDLRPIYISVQPPSLHVLEQRLRQRNTETEESLVKRLAAAQADMESRNQESSKDRRLRLAVCSRHPGPIQDQGSSIEPPPWQAIRQLCALGQHVEWRRCCPCGWNILG

SEQ ID NO: 3376 - DNA, 799 bp, Homo sapiens
gtgggcggaagaggtggccccggatgctgcggcgcccgctggccgggctggctgcggccgccctgggccgggccccaccggacggcatgtcgggccccaggcctgtggtgctgagcgggccttcgggagctgggaagagcaccctgctgaagaggctgctccaggagcacagcggcatctttggcttcagcgtgtcccataccacgaggaacccgaggcccggcgaggagaacggcaaagattactactttgtaaccagggaggtgatgcagcgtgacatagcagccggcgacttcatcgagcatgccgagttctcggggaacctgtatggcacgaggagcagcggctgcggcagcgcaacactgaaaccgaggagagcctggtgaagcggctggctgctgcccaggccgacatggagagcagcaaggagcccggcctgtttgatgtggtcatcattaacgacagcctggaccaggcctacgcagagctgaaggaggcgctctctgaggaaatcaagaaagctcaaaggaccggcgcctgaggcttgctgtctgttctcggcaccccgggcccatacaggaccagggcagcagcattgagccacccccttggcaggcgatacggcagctctgtgcccttggccagcatgtggagtggaggagatgctgcccctgtggttggaacatcctggggtgacccccgacccagcctcgctgggctgtcccctgtccctatctctcactctggacccagggctgacatcctaataaaataactgttggattagaaactccataaa

SEQ ID NO: 3377 - protein, 120 aa, Homo sapiens
MLRRPLAGLAAAALGRAPPDGMSGPRPVVLSGPSGAGKSTLLKRLLQEHSGIFGFSVSHTTRNPRPGEENGKDYYFVTREVMQRDIAAGDFIEHAEFSGNLYGTRSSGCGSATLKPRRAW

SEQ ID NO: 3378 - DNA, 1009 bp, Homo sapiens
ctggccgggctggctgcggccgccctgggccgggccccaccggacggatggctggaagccagaaggaggagattatgccgccacagcagggagtgcctttccaggaaagcggctgctggggcagcatgggagcccagtccagggagcgttctggcagagaccattccggaacatggatctgcgccggcggctcccaggagaccttccatctcggagctcctgtggagaccacgtgcctggcaggcatgtcgggccccaggcctgtggtgctgagcgggccttcgggagctgggaagagcaccctgctgaagaggctgctccaggagcacagcggcatctttggcttcagcgtgtcccataccacgaggaacccgaggcccggcgaggagaacggcaaagattactactttgtaaccagggaggtgatgcagcgtgacatagcagccggcgacttcatcgagcatgccgagttctcggggaacctgtatggcacgagcaaggtggcggtgcaggccgtgcaggccatgaaccgcatctgtgtgctggacgtggacctgcagggtgtgcggaacatcaaggccaccgatctgcggcccatctacatctctgtgcagccgccttcactgcacgtgctggagcagcggctgcggcagcgcaacactgaaaccgaggagagcctggtgaagcggctggctgctgcccaggccgacatggagagcagaaatcaagaaagctcaaaggaccggcgcctgaggcttgctgtctgttctcggcaccccgggcccatacaggaccagggcagcagcattgagccacccccttggcaggcgatacggcagctctgtgcccttggccagcatgtggagtggaggagatgctgcccctgtggttggaacatcctggggtgacccccgacccagcctcgctgggctgtcccctgtccctatctctcactctggacccagggctgacatcctaataaaataactgttggattagaaactccata

SEQ ID NO: 3379 - protein, 286 aa, Homo sapiens
MAGSQKEEIMPPQQGVPFQESGCWGSMGAQSRERSGRDHSGTWICAGGSQETFHLGAPVETTCLAGMSGPRPVVLSGPSGAGKSTLLKRLLQEHSGIFGFSVSHTTRNPRPGEENGKDYYFVTREVMQRDIAAGDFIEHAEFSGNLYGTSKVAVQAVQAMNRICVLDVDLQGVRNIKATDLRPIYISVQPPSLHVLEQRLRQRNTETEESLVKRLAAAQADMESRNQESSKDRRLRLAVCSRHPGPIQDQGSSIEPPPWQAIRQLCALGQHVEWRRCCPCGWNILG

SEQ ID NO: 3380 - DNA, 1289 bp, Homo sapiens
gctgcggccgccctgggccgggccccaccggacggcatgtcgggccccaggcctgtggtgctgagcgggccttcgggagctgggaagagcaccctgctgaagaggctgctccaggagcacagcggcatctttggcttcagcgtgtcccgtgagtccagggctctcgtggaggggtgcgtagacctcaaggctgctgagtagtcctagcaccgtgagcaggccaggagcccaaacccaacaggcacacccaccctgcagactgtccgaactcttgcacactcccccccacacagaacctgaggttatcacactcctgctgtcctgcgtgcctgtgtctcccttccctgggtctgttgagtactgataactgggccacagtgtttctttctgggagaaccctcgccttgtaggctcctgcgccttcccagtggtgtgcttcactggctgcctgcatcctggggctcaagtgctgtcgggactgcaagggaaacgctgggtggggcattgggctccgagcagcccccgatgggtgacaggtctctctgctagataccacgaggaacccgaggcccggcgaggagaacggcaaagattactactttgtaaccagggaggtgatgcagcgtgacatagcagccggcgacttcatcgagcatgccgagttctcggggaacctgtatggcacgagcaaggtggcggtgcaggccgtgcaggccatgaaccgcatctgtgtgctggacgtggacctgcagggtgtgcggaacatcaaggccaccgatctgcggcccatctacatctctgtgcagccgccttcactgcacgtgctggagcagcggctgcggcagcgcaacactgaaaccgaggagagcctggtgaagcggctggctgctgcccaggccgacatggagagcagcaaggagcccggcctgtttgatgtggtcatcattaacgacagcctggaccaggcctacgcagagctgaaggaggcgctctctgaggaaatcaagaaagctcaaaggaccggcgcctgaggcttgctgtctgttctcggcaccccgggcccatacaggaccagggcagcagcattgagccacccccttggcaggcgatacggcagctctgtgcccttggccagcatgtggagtggaggagatgctgcccctgtggttggaacatcctggggtgacccccgacccagcctcgctgggctgtcccctgtccctatctctcactctggacccagggctgacatcctaataaaataactgttggattagaaactccataaa

SEQ ID NO: 3381 - protein, 137 aa, Homo sapiens [sequence omitted]

SEQ ID NO: 3382 - DNA, 1799 bp, Homo sapiens
gccaggagggcatggggtgcatggtgagatgaaaacgatgtgtgcttgtgacaaaaagcccagaagaggcagtaaggagggaggagtctatcccttatggagagcacatggacttctgggtgggtgtcctgcagttcccttcctcttgagtctttttaactgggggtccggtgtgtttgtgatcaatgacatgtatgcgtgtgcatgtgtacctttgcaggtacacatgtgtggtgtgtgtgcatttgcttggtgtgcgtgcatttgtgtgtgtgtttgtgtgtgcatgcatgtgtgtgtgtttgtggtaggtttgtgcacacatcctgcatacctttgtgcctgggagtggcatgtgtgtggtgggtgtcgctgtgcatgatggagttgcagccgtggtgcatttgtgagattacctcggtggcctaaattggggattaggagggcatcctcaggtccttcccactgtctgctcgtctgcccacaggcggctgtgccctaaacaggaggaggccattcacgcctcgcctgagttgtgtccaaggtgtgcgtgtggccaggggtccatccgcttccctctagcccagcccctgaacacagctgcagtgcacggccccactcctcagctctgctccccatcccaactcgaagacgctgccctggccctgtgtgtgcagctcatgtggactgggagggcagggcaggtgcaggtcttggggcaagagctggagctgtcttttccttcctgcacagccgcagagcaggtggatggggctgcttccctgcaagggcccagggccaggccccctggggatttattcgtggcttagaagggtggggccagaagcaggcgtagtggggattagggactcagcacccccagctctcagtccagcagacagacccaccccaggctgactacagaggctgcacctcagcaaacaggcatgtcgggccccaggcctgtggtgctgagcgggccttcgggagctgggaagagcaccctgctgaagaggctgctccaggagcacagcggcatctttggcttcagcgtgtcccataccacgaggaacccgaggcccggcgaggagaacggcaaagattactactttgtaaccagggaggtgatgcagcgtgacatagcagccggcgacttcatcgagcatgccgagttctcggggaacctgtatggcacgagcaaggtggcggtgcaggccgtgcaggccatgaaccgcatctgtgtgctggacgtggacctgcagggtgtgcggaacatcaaggccaccgatctgcggcccatctacatctctgtgcagccgccttcactgcacgtgctggagcagcggctgcggcagcgcaacactgaaaccgaggagagcctggtgaagcggctggctgctgcccaggccgacatggagagcagcaaggagcccggcctgtttgatgtggtcatcattaacgacagcctggaccaggcctacgcagagctgaaggaggcgctctctgaggaaatcaagaaagctcaaaggaccggcgcctgaggcttgctgtctgttctcggcaccccgggcccatacaggaccagggcagcagcattgagccacccccttggcaggcgatacggcagctctgtgcccttggccagcatgtggagtggaggagatgctgcccctgtggttggaacatcctggggtgacccccgacccagcctcgctgggctgtcccctgtccctatctctcactctggacccagggctgacatcctaataaaataactgttggattagaaactccataaa

SEQ ID NO: 3383 - protein, 197 aa, Homo sapiens; identical to SEQ ID NO: 205

SEQ ID NO: 3384 - DNA, 2770 bp, Homo sapiens
cacccccagctctcagtccagcagacagacccaccccaggctgactacagaggctgcacctcagcaaacaggtaggccctgttcttggggaggattcccaccaggcaaaggccagctcccgggccctcacctgccacgtgtccaagctaggatcctgtttgcctttcccttgggggctgggagggaggcctccaaccccctctggcattaccagcatcacagataggagtcccaagtcctatgagaagttcctggaataggtgtagattcagtagatctttacaagaccatatctgcagggcaaggtaccagaggacagaggcggggacagggacacttccattccagacctagcagcccagcactcagcaccatgcatgggagcaaatggctggactcctgggtggggtgggggtctcagagcaggctcccagagggcttggaggtgactccaccaggtggggacggcagctcccaggtagggtgtcatcagagtagacagcattgcttgctagggacccctggggaggctgacagggtcagtgggtttcagttggggggctcccctgctgagaacccagtaaagccggccttccattcgtctcccgtgtgcccagagcctggtctgagggccgccctgtgcatgccggcccttccaacgtggcagagctcagggggaagaacacccaggctctcaggagactctcaggccaatgtctccatccctgggtcagccctttcctgccatgaattcaggaaggcagaggcagctcagcagatggggactagaggccgcactgctatccacagcctctcttctcacccccaggcatgtcgggccccaggcctgtggtgctgagcgggccttcgggagctgggaagagcaccctgctgaagaggctgctccaggagcacagcggcatctttggcttcagcgtgtcccgtgagtccagggctctcgtggaggggtgcgtagacctcaaggctgctgagtagtcctagcaccgtgagcaggccaggagcccaaacccaacaggcacacccaccctgcagactgtccgaactcttgcacactcccccccacacagaacctgaggttatcacactcctgctgtcctgcgtgcctgtgtctcccttccctgggtctgttgagtactgataactgggccacagtgtttctttctgggagaaccctcgccttgtaggctcctgcgccttcccagtggtgtgcttcactggctgcctgcatcctggggctcaagtgctgtcgggactgcaagggaaacgctgggtggggcattgggctccgagcagcccccgatgggtgacaggtctctctgctagataccacgaggaacccgaggcccggcgaggagaacggcaaaggtgagtggggtggggccctatggctggagcacccccagtgtgggcagggctgctgggccctgcagctgtgttggctgtgctgcccgtctcctgcccccatcaatccctaatctgtgagatgggtccttgcctccaagggccggtgaactcaatcagggtgtcagcgccacagcgtggtgtcgccttccttgggtacagtgtgagaggccggccaaggcctggggctgtcttcctcccaccttggaggcggccacagtgctgctgtccccagccctgtcctggactcggcacttatcagcacttttgagctgtcttctggagtcctggtaaaaagggctactctgcctgcctgattcaagacaagggacccccttcccaacagcacccccgccccttgccgtgcaacccagtggtctccagtcaccccaccacatcgtcccctctgtaacctgacggtctccagttcccccaccaccttcccccagaacctgttggtctccagtccccaccccatcaccaccaactcccaactccccactggaacccagcagtctcgtatctccatcagtgaggacagtgtgagaaatggtgtctggctcaggcacttggcagcacttgaggggtcctcagatgtctcctgcccagcaaggatctgactaaagcagtcgtgggtgtgggaggggcctgcaggcatgcctgggttgggggcagctggccctgggcaccctggtgcaggtccagtctgccctctggatggcccctcctcttccccagattactactttgtaaccagggaggtgatgcagcgtgacatagcagccggcgacttcatcgagcatgccgagttctcggggaacctgtatggcacgagcaaggtggcggtgcaggccgtgcaggccatgaaccgcatctgtgtgctggacgtggacctgcagggtgtgcggaacatcaaggccaccgatctgcggcccatctacatctctgtgcagccgccttcactgcacgtgctggagcagcggctgcggcagcgcaacactgaaaccgaggagagcctggtgaagcggctggctgctgcccaggccgacatggagagcagaaatcaagaaagctcaaaggaccggcgcctgaggcttgctgtctgttctcggcaccccgggcccatacaggaccagggcagcagcattgagccacccccttggcaggcgatacggcagctctgtgcccttggccagcatgtggagtggaggagatgctgcccctgtggttggaacatcctggggtgacccccgacccagcctcgctgggctgtcccctgtccctatctctcactctggacccagggctgacatcctaataaaataactgttggattagaaactccata

SEQ ID NO: 3385 - protein, 196 aa, Homo sapiens
MPGLGAAGPGHPGAGPVCPLDGPSSSPDYYFVTREVMQRDIAAGDFIEHAEFSGNLYGTSKVAVQAVQAMNRICVLDVDLQGVRNIKATDLRPIYISVQPPSLHVLEQRLRQRNTETEESLVKRLAAAQADMESRNQESSKDRRLRLAVCSRHPGPIQDQGSSIEPPPWQAIRQLCALGQHVEWRRCCPCGWNILG

SEQ ID NO: 3386 - DNA, 1433 bp, Homo sapiens
cctggaataggtgtagattcagtagatctttacaagaccatatctgcagggcaaggtaccagaggacagaggcggggacagggacacttccattccagacctagcagcccagcactcagcaccatgcatgggagcaaatggctggactcctgggtggggtgggggtctcagagcaggctcccagagggcttggaggtgactccaccaggtggggacggcagctcccaggtagggtgtcatcagagtagacagcattgcttgctagggacccctggggaggctgacagggtcagtgggtttcagttggggggctcccctgctgagaacccagtaaagccggccttccattcgtctcccgtgtgcccagagcctggtctgagggccgccctgtgcatgccggcccttccaacgtggcagagctcagggggaagaacacccaggctctcaggagactctcaggccaatgtctccatccctgggtcagccctttcctgccatgaattcaggaaggcagaggcagctcagcagatggggactagaggccgcactgctatccacagcctctcttctcacccccaggcatgtcgggccccaggcctgtggtgctgagcgggccttcgggagctgggaagagcaccctgctgaagaggctgctccaggagcacagcggcatctttggcttcagcgtgtcccataccacgaggaacccgaggcccggcgaggagaacggcaaagattactactttgtaaccagggaggtgatgcagcgtgacatagcagccggcgacttcatcgagcatgccgagttctcggggaacctgtatggcacgagcaaggtggcggtgcaggccgtgcaggccatgaaccgcatctgtgtgctggacgtggacctgcagggtgtgcggaacatcaaggccaccgatctgcggcccatctacatctctgtgcagccgccttcactgcacgtgctggagcagcggctgcggcagcgcaacactgaaaccgaggagagcctggtgaagcggctggctgctgcccaggccgacatggagagcagcaaggagcccggcctgtttgatgtggtcatcattaacgacagcctggaccaggcctacgcagagctgaaggaggcgctctctgaggaaatcaagaaagctcaaaggaccggcgcctgaggcttgctgtctgttctcggcaccccgggcccatacaggaccagggcagcagcattgagccacccccttggcaggcgatacggcagctctgtgcccttggccagcatgtggagtggaggagatgctgcccctgtggttggaacatcctggggtgacccccgacccagcctcgctgggctgtcccctgtccctatctctcactctggacccagggctgacatcctaataaaataactgttggattagaaactccataaa

SEQ ID NO: 3387 - protein, 197 aa, Homo sapiens; identical to SEQ ID NO: 205

SEQ ID NO: 3388 - DNA, 788 bp, Homo sapiens
agaacccacccccagtcaccaagggtctcattgagggtcctcagatttccctctgttacccagagtctccgtgagggcccccagaccccccatcgcccagggtcccatgagatgtccccaaccttctagccccgggggtgtcatgtgcatcctcttacagctgttgcctcttctctgggtctgactgcagcccacaagaagagggcatttaatgttctgctgtgtgtgtagaggatagtgtagcccctaaccagagtcctgatgggtgctggtgtccagacccaagttctggggctccagagagagcaggagtggtgcctgaggactgaggcccagggggcggcccttccctaccctgcacaggcccggctgggctggaaagctgtcccacagccgcagtgaggacagccgcaggccagagcccggcctgtttgatgtggtcatcattaacgacagcctggaccaggcctacgcagagctgaaggaggcgctctctgaggaaatcaagaaagctcaaaggaccggcgcctgaggcttgctgtctgttctcggcaccccgggcccatacaggaccagggcagcagcattgagccacccccttggcaggcgatacggcagctctgtgcccttggccagcatgtggagtggaggagatgctgcccctgtggttggaacatcctggggtgacccccgacccagcctcgctgggctgtcccctgtccctatctctcactctggacccagggctgacatcctaataaaataactgttggattagaaactccata

SEQ ID NO: 3389 - protein, 46 aa, Homo sapiens [sequence omitted]

SEQ ID NO: 3390 - DNA, 875 bp, Homo sapiens
agaacccacccccagtcaccaagggtctcattgagggtcctcagatttccctctgttacccagagtctccgtgagggcccccagaccccccatcgcccagggtcccatgagatgtccccaaccttctagccccgggggtgtcatgtgcatcctcttacagctgttgcctcttctctgggtctgactgcagcccacaagaagagggcatttaatgttctgctgtgtgtgtagaggatagtgtagcccctaaccagagtcctgatgggtgctggtgtccagacccaagttctggggctccagagagagcaggagtggtgcctgaggactgaggcccagggggcggcccttccctaccctgcacaggcccggctgggctggaaagctgtcccacagccgcagtgaggacagccgcaggccagtgggctgctctgggggtcgtgtgggacctggggtggggctgcatgggctcactgtgccctgaccccaggccccacccacaggcaaggagcccggcctgtttgatgtggtcatcattaacgacagcctggaccaggcctacgcagagctgaaggaggcgctctctgaggaaatcaagaaagctcaaaggaccggcgcctgaggcttgctgtctgttctcggcaccccgggcccatacaggaccagggcagcagcattgagccacccccttggcaggcgatacggcagctctgtgcccttggccagcatgtggagtggaggagatgctgcccctgtggttggaacatcctggggtgacccccgacccagcctcgctgggctgtcccctgtccctatctctcactctggacccagggctgacatcctaataaaataactgttggattagaaactccata

SEQ ID NO: 3391 - protein, 46 aa, Homo sapiens [sequence omitted]

SEQ ID NO: 3392 - DNA, 2380 bp, Homo sapiens
gcccccggtcgcttgctccagggcaggtggactgagcttcggaggctggggctggcctctgacctgcttgggcttggagagccctgcccgctgccctgccccccaggacaatcagggattcagaccctgaggccgaggggggaacaatggggcccttgagggcccctcctccagcccccattgtgcttggtggtgagaggtggccctggctcggccacacaccctcggggaggaccagcatccaagcaggtggaagggctctgagggagactggaattttctggcctggagaaggacccgcccgcccgcccctatgaccaacatgagctggagcttcctgacgcggctgctggaggagatccacaaccactccaccttcgtgggcaaggtgtggctcacggtgctggtggtcttccgcatcgtgctgacggctgtgggcggcgaggccatctactcggacgagcaggccaagttcacttgcaacacgcggcagccaggctgcgacaacgtctgctatgacgccttcgcgcccctgtcgcacgtgcgcttctgggtcttccagattgtggtcatctccacgccctcggtcatgtacctgggctacgccgtgcaccgcctggcccgtgcgtctgagcaggagcggcgccgcgccctccgccgccgcccggggccacgccgcgcgccccgagcgcacctgccgcccccgcacgccggctggcctgagcccgccgacctgggcgaggaggagcccatgctgggcctgggcgaggaggaggaggaggaggagacgggggcagccgagggcgccggcgaggaagcggaggaggcaggcgcggaggaggcgtgcactaaggcggtcggcgctgacggcaaggcggcagggaccccgggcccgaccgggcaacacgatgggcggaggcgcatccagcgggagggcctgatgcgcgtgtacgtggcccagctggtggccagggcagctttcgaggtggccttcctggtgggccagtacctgctgtacggcttcgaggtgcgaccgttctttccctgcagccgccagccctgcccgcacgtggtggactgcttcgtgtcgcgccctactgaaaagacggtcttcctgctggttatgtacgtggtcagctgcctgtgcctgctgctcaacctctgtgagatggcccacctgggcttgggcagcgcgcaggacgcggtgcgcggccgccgcggccccccggcctccgcccccgcccccgcgccgcggcccccgccctgcgccttccctgcggcggccgctggcttggcctgcccgcccgactacagcctggtggtgcgggcggccgagcgcgctcgggcgcatgaccagaacctggcaaacctggccctgcaggcgctgcgcgacggggcagcggctggggaccgcgaccgggacagttcgccgtgcgtcggcctccctgcggcctcccgggggccccccagagcaggcgcccccgcgtcccggacgggcagtgctacctctgcgggcactgtcggggagcagggccggcccggcacccacgagcggccaggagccaagcccagggctggctccgagaagggcagtgccagcagcagggacgggaagaccaccgtgtggatctgagggcgctggcttgcgagctgggccagggaggaggagggttggggggctccggtggaaacctgcgaccccttctcctcagccttctccttagccggtggcctcaggcagactctgcccagaggggcagccaggctgctcagggaaggggctgaaagcggcagaggagtgccctggcttggtcaccactggggccaaggtggggtggagagaggcctaggagccagaaagggccctctgctgtggtctgaaccccagggggagtggggcattgactccacccctgtcctgagctggaataggtcctctgggatgccagctctcccctttgtgcttccctgcagcaacccatggagggcccagggtgcctggtatgggcatcagttggtgggggtgcgggggtgcgtgtccccattccctgcaacagcaaatggggctccttcttcagccctccccttcccagccccaaactgagacagactgggagctgggagcctggggtggacaggaccataccctctttgagcttctgcgatgccggccttccgttcctctgggaggcttgaagttctgcaaagatgttgatatgccttgcagcttggacccaatgggtggtggtcagggcctgggggcttggccatgctgggggaatggggctctgggttcctgcctgtggcctgtctgtcctcctccctaattcagacccagcctcaagaggaaagggagtaaaataaaactaacttgtttata

SEQ ID NO: 3393 - protein, 56 aa, Homo sapiens
MGPLRAPPPAPIVLGGERWPWLGHTPSGRTSIQAGGRALRETGIFWPGEGPARPPL

SEQ ID NO: 3394 - DNA, 446 bp, Homo sapiens
ggactcggcctatccgtcagcacgcaggctccaccctcgctgaactcacagaggacaatttaggcaggaaccacacactgctatgacatatccaccccaccgtgctttctcgaggagtgatgtcccataccccctgctgagcagccctgtacagtggccactttccctggtagtaggtgacacatctacaaggtggccccagcagccttcagccctagagtctgactgccctggtccaagccatccctgccttgctggcctcctggggcccatgcaccctgttgacattcccctctccactgccctccactcaaagcaccaaagaagacttactcaatgtgtccttatggtgcagagtcccagcaagcagaggtctttgtatctgttgaataaaaaaattcctcatgatgcgtagtaacatcagtgaggaagactgcaccaaggcg

SEQ ID NO: 3395 - protein, 110 aa, Homo sapiens
MTYPPHRAFSRSDVPYPLLSSPVQWPLSLVVGDTSTRWPQQPSALESDCPGPSHPCLAGLLGPMHPVDIPLSTALHSKHQRRLTQCVLMVQSPSKQRSLYLLNKKIPHDA

SEQ ID NO: 3396 - DNA, 594 bp, Homo sapiens
ccagcgtccacgtgtggctgttgtgtcatttttttcatttgctggaccattgggacttcagctgcaggtggcaggaggctccatccccaagtgtctccacggataaggacaggcaccatccagcccacaacccctccgcacccctaatcagtgtgacatgatgagacacaatcacagcttcaaatcacatccttgctgaactcacagaggacaatttaggcaggaaccacacactgctatgacatatccaccccaccgtgctttctcgaggagtgatgtcccataccccctgctgagcagccctgtacagtggccactttccctggtagtaggtgacacatctacaaggtggccccagcagccttcagccctagagtctgactgccctggtccaagccatccctgccttgctggcctcctggggcccatgcaccctgttgacattcccctctccactgccctccactcaaagcaccaaagaagacttactcaatgtgtccttatggtgcagagtcccagcaagcagaggtctttgtatctgttgaataaaaaaattcctcatgatgcgtagtaacatcagtgaggaagactgca

SEQ ID NO: 3397 - protein, 110 aa, Homo sapiens; identical to SEQ ID NO: 3395

SEQ ID NO: 3398 - DNA, 2028 bp, Homo sapiens
ctccctccggcggccaccgccaggggccgctgtggcacccgcccctcccgcttccttgggcccttcccgctgccccactcttgtccaagatggcgaccgcggcgctgcttcgaggcgccactccggggcgcggcggcccggtctggcgctggcggctgcgcgcggccccaaggtgccgcctggcccacagctcctgcagtcctggtggcgacccaacggccggagcggcctgggcctgcttccggctggacgggcgcaccctgctgcgcgtgcgtggccccgacgcggcgcccttcctgctagggctgctgaccaatgaactgccgcttccgagtcctgcggccgcgggggccccgcctgctgcgcgcgcgggctacgcccacttcctgaacgtgcagggccggacgctctatgacgtcatcttgtacgggctccaggaacactcggaggtgtctggcttccttctggagtgtgacagctcggtgcagggcgcgctgcagaagcacctcgcgctatacaggatccggcggaaggtcacggtggagccgcacccggagctgcgagtgtgggcggtgttgcccagttcccctgaggcctgcggggctgcatcgctgcaggagagggcaggggctgccgccatcctcatccgcgacccgcgaacagcacgcatggggtggcggctcctcacccaggatgaaggcccagccctggtgcccgggggccggctcggggacttgtgggattatcaccagcaccgatacctgcaaggcgttcctgagggggtccgagacttgcctcctggggtggccctgcccctggagtccaacctggccttcatgaacggcgtgagcttcaccaaaggctgctacattggccaggagctgacggcccgcacccaccacatgggcgtcatccgcaagcgcctcttccctgtccggttcttggacccccttcccaccagtggcatcacccctggtgccacggtgctgactgcctcaggacagactgtgggcaagttcagggctggccagggcaacgtggggctggccctgctgtggtcagagaagatcaagggtcctctgcacatcagagcctctgagggtgcccaggtggccttagccgcatctgtgccagactggtggcctacagtctccaagtagtccgaagccttggctggcgcaggctgatggggaggctggggcctggggcctttggcctctgtccagggtcttcccgtcccatctgtctgctgcgcctactgggtgggagccctggtttccatctgggaaagtcccccttgtaggtgccctgcctggccccacccatgctcaggggccccaggcacgtgggttgttttctccctggacttcctgtggccccagaggagcccaccgtgtgagtgctgggctccagatggcgccgggtcccaatcgtggctccacacagggttgtctgggaggacgggacggtgtctctggccagcactggcagcttccgggccttgtaccccactctgcctggcatgagcctcatggggggttggtccctgtgcctggaagcggggtggtgtccagggtctgcaggctggggctcgggctttgggagttgtttcactgtgcttgcttccagcatgtctcagggtggggctatgcgtggtctagaggggtctggggcattggatcaggtggcatgtgggtgtctacacatcgagaagcacacagggatgagccactaggtatcccatgctggaggcttgtggaaggctgtgcccatctcccatgtttccccacctctgttcctcctcagagccctccaggagcgtggggtgggggccagcgcagggctcaggagccagcagggcagagttctgcctgtgtgtgctgggttttggcatagcctgtgtttgcagtgagagtgacttgctgtcagtcacggggcacagcctcctgttcacccactggcttcccccttcccactgaagtgtgagctctatgtttcagggcatctattaaagagtgagccacaggc

SEQ ID NO: 3399 - protein, 356 aa, Homo sapiens; identical to SEQ ID NO: 209

SEQ ID NO: 3400 - DNA, 7904 bp, Homo sapiens
ctccctccggcggccaccgccaggggccgctgtggcacccgcccctcccgcttccttgggcccttcccgctgccccactcttgtccaagatggcgaccgcggcgctgcttcgaggcgccactccggggcgcggcggcccggtctggcgctggcggctgcgcgcggccccaaggtgccgcctggcccacagctcctgcagtcctggtggcgacccaacggccggagcggcctgggcctgcttccggctggacgggcgcaccctgctgcgcgtgcgtggccccgacgcggcgcccttcctgctagggctgctgaccaatgaactgccgcttccgagtcctgcggccgcgggggccccgcctgctgcgcgcgcgggctacgcccacttcctgaacgtgcagggccggacgctctatgacgtcatcttgtacgggctccaggaacactcggaggtgtctggcttccttctggagtgtgacagctcggtgcagggcgcgctgcagaagcacctcgcgctatacaggatccggcggaaggtcacggtggagccgcacccggagctgcgagtgtgggcggtgttgcccagttcccctgaggcctgcggggctgcatcgctgcaggagagggcaggggctgccgccatcctcatccgcgacccgcgaacagcacgcatggggtggcggctcctcacccaggatgaaggcccagccctggtgcccgggggccggctcggggacttgtgggattatcaccagcaccgatacctgcaaggcgttcctgagggggtccgagacttgcctcctggggtggccctgcccctggagtccaacctggccttcatgaacggcgtgagcttcaccaaaggctgctacattggccaggagctgacggcccgcacccaccacatgggcgtcatccgcaagcgcctcttccctgtccggttcttggacccccttcccaccagtggcatcacccctggtgccacggtgctgactgcctcaggacagactgtgggcaagttcagggctggccagggcaacgtggggctggccctgctgtggtcagagaagatcaagggtcctctgcacatcagagcctctgagggtgcccaggtggccttagccgcatctgtgccagactggtggcctacagtctccaagtagtccgaagccttggctggcgcaggctgatggggaggctggggcctggggcctttggcctctgtccagggtcttcccgtcccatctgtctgctgcgcctactgggtgggagccctggtttccatctgggaaagtcccccttgtaggtgccctgcctggccccacccatgctcaggggccccaggcacgtgggttgttttctccctggacttcctgtggccccagaggagcccaccgtgtgagtgctgggctccagatggcgccgggtcccaatcgtggctccacacagggttgtctgggaggacgggacggtgtctctggccagcactggcagcttccgggccttgtaccccactctgcctggcatgagcctcatggggggttggtccctgtgcctggaagcggggtggtgtccagggtctgcaggctggggctcgggctttgggagttgtttcactgtgcttgcttccagcatgtctcagggtggggctatgcgtggtctagaggggtctggggcattggatcaggtggcatgtgggtgtctacacatcgagaagcacacagggatgagccactaggtatcccatgctggaggcttgtggaaggctgtgcccatctcccatgtttccccacctctgttcctcctcagagccctccaggagcgtggggtgggggccagcgcagggctcaggagccagcagggcagagttctgcctgtgtgtgctgggttttggcatagcctgtgtttgcagtgagagtgacttgctgtcagtcacggggcacagcctcctgttcacccactggcttcccccttcccactgaagtgtgagctctatgtttcagggcatctattaaagagtgagccacaggcagccccttgggagctctggtttcatttgggggagagggaggtgggggcttagtttttgtgatctggctgactggaccccgggaacagcgctcctttgagaacgcccagacctaccagatgaagcacttggcatggctgcaggccagcaggggaggcctcagaggcccaggctgggcacgtgggtgccgagtctgcaaaggacagccccatggctgtgagctgtcggctgcagggcgcagggcctggggggcaggcgtttgggccaccaagctggacgttagggtggccacagagggccaagcaggcagggagcctgtgccgccatcctggggggccacaggtgctctctagaaatctgcagccatggcggttttggggtcaggggtctaaaggcagctctgagctgcagtgtagtttgtgatcacccaggaggagggtgtagagcggatggacgggaggaagcggctgcagctggagggaagagaggggccgtccagcctcacccgctgcagtcagctctcctatgggcaaggaaacagctaggtggccctgacccctgcggtcctgagagccggtggccttcagcccctcttggacaggtcatggtctggaagcgcccagcgcaggatggattccagaccagcatccctgcaaccttttcagccccactggctgctgctttaaactggcatggagacatttgatcagcttcccagccagttttctctccagctcagccaggagtgggtgcctgtggcctgtgtcaccaagagctggtgtctcctgcatgaggggcatgcacccctggaatgagggtctgtgcctcgagctcaaagtgtcccggctctgtcatctgcctgaagttgcctggcttttccagtggggcctccttgagtgctgcagcatctgggagcatcctagcctgtcccgtgggtgtggctgggtgagggctaggaggtgagccaggaaggaagcactccactccagagtgaggtgccgcctgagccatcctgtgccccctcagtgtcttcaggtctctgcaggtgtcaggatctcaaaatacttggttcagatcaaacacatttcgtgttcttctgtgtccttttttttttttttttttttttttgagatggagtcttgctctgttggccaggctggagctcagtggcacaatctctgctcactgcaacctctgcctcccaggttccagtgattttcctgcctcagcctcctgggtagctgggactacaggcacatgccccatgcccggctaatttttgtatttttagtagagatggggttttaccatgttggccaggatggtctcaattacaggcatgagccactgtgcccagcctcttctgtgtctttaaaaaggaaagtgtcagtcaacaaaagagcccctctgtcatacaaaccaaatcagttttcaccaaaatgtccttagtcctctcagaaaggcctggcctttaggaccttggaagcaggccctaaagcgcatcggcagggtcagagctttgtgttcaggaacactgggatctgctgagagctggtgtagccgctccaaaactgcacactgcttttcctgtctgctttagtttgtgttgtaaaaacataggaagttcgtgtgtgtgtgtgtgtgtgtgaattcaaggcataaggtgcagttgtgttatgtgggtatagtgcatggtggtgcagtctgggcttcttaccctcacacctcctgcctcccctcgttagagtcccccacatccgccttccactttctgagcccacattgcctgttgggcagctcctggttatgaggcaggacgtgtggtgtttgactgtctgtttctgagctgttttacttaacacagtgtatatggtgcatctttaggaaagcatgcttgtattttcctttcaaagccagatatgggcgggtgtggtggctcatgcctgtgatcccagcactttgggaggccgaggcaggaggattgcttgagcccaggagtttgagagcagcctgggcaacatatcaagactctgtctcttaaaaaaaaaaaaattagccaggcatggtggtccacacctgtggtcccacctattcgggaggctgaagtgcgaggatcacttgagcccaggaggttgaggctgcagtgagctgtgattgtgccactgcactccagcctgggcaacagagcaagaccctgtcttaaaacaaagaaagaataaaaaagaagagaagttgcagttggtagtatttccagagcccggcagacagtgtagaaactgtgagaaacccacctccaaatcaggccttagatagaaaacatcctaagaagtatacgttcattgtaaaatcattatcatcatcatcttctaatccccaaggagacaagctccctgttctgtgttcttgtatgaggcggtcagtcaagcgcagcccgagaggagaggcaggagcctgggagagcctctgctagacctttcctggcacttccccaggaaaggcaaggcagggcagatgtgcggctggccagctggagtgatttccatgggctccaagctgtaggagtggtccctggctgccagagtgctctggccagatagaggtgggctctggactggtgaggctgcattgcggaggcgcgcacacccagctgggcccttatctgtaaggactggctggcctgggaggggcagtctcccagccagaaggtggaatttttttttttttttgagataccaaaacatcctaaggtacaggaaagaaattgtcaacacacacacacagtaccataaacaaggcccagcagaaaggcagacagaagcacacacaccaatgttctgatcttagagtaagcagacacatcacatggaatgaggatgtttaatatatttaaagaaaacaatttatgcacaggaagcaagagactataaaaatgaccaagcagattttaaaaagagaacttgttgaaataaaaataaaatactctaaaaaatattccatgatgtgtttcctgaagaatcgggaactgtttgaagaaatgacccaaagtgcagcacagaaagacagagctggaaaatatgagatgggatgagacaagaagatggagagtttagtatgacatccgcaatttacgagtaattccagaaggaggggaaagagaatatggggtggaggcaagtattcagagaaatacggctgagaactttcccaaaccaacaggagcccctgctccttaggttcaggaaccagcagctcccaagcagcatagttaaaaagctctacccaaacagtcacgtcttggtgaaagtacagaatctcatgacaaagagatcttaaggcagaaaagaaagagattatctggaaagaagaaaataagtagttgattaaaagcaacagtggaagccagaaagatagtaaataatatcttcaaagtcctgggagaaaatagtgatagcctagaattgtgtacccagaaaatccgtctttcaagaatgaggggccaggcgcagtggctcacgtctgtattcccagcactttgggaggccaaggcaggtggatcacctgaggtcaggagttcaagaccagcctgatcaacatggtgaaaccctgtctctactaaaaatataaaaattagctgggtgtggtggcatattcctgtaatcccagctactcgggaggctgaggcaggagaatcacttgaacccaggaggcagaggttgcagtgagccaagattgtgccattgcactccagcctgggcaatagaatgagactctgtctcaaaaaaaaaaaaaaaaaaaaaaaaaaaaagagggctaaacgcattttcataccacgaaactgccctcactccggagtttgctgccagcagagcctagagcgtctaaggcatgtctgggcttctggcgagggatcctgtggggaagctggagatggaagaaggagtgaataggcaggaaggtggatttgtgggcatgtctaaaacaccacatctagaagcttctacttagaatgcctacttttggagtttataaaaaagatgccacatgttgagttgggagagaggtgcccaaacctacagtgttctaaagtccccctactggtcggaaggagggcacggacactgacttcagcatctgttacaaggcttatcagagttttcagataatctctaaaagaatggaaatatatcttccaaactatagagggaagaccatggaatttaaaagccagtccttcaaggagaaatgaacaaactcaaaatcgtagttgggagtgttttttttttttttgagacagagtctcactcttgcccaggctggagtggagtggcataaacacagctcactacagcctcaaccttctgggctcagatgattctcctgcctcagcctcctgagtagcaggaactacaggtgtgagtcatcacactcagctaattttttttttttttttttactttttgtagagatggggttctcactgcattgcccaggctggtcttgaatttctgggctcaggtgatcttcccacctcagcctcctgagtagctgggaccacaggtgcatgctaatttttaaaattttttgtttttaaatgctggtcttcaactcttgtccccaagtagctgggattggggcatgaggcactgtgctaacttcatgttgaaattgaattgccattctaacagtgttaagagatggggcctgtaagaggtgattaggctgtgagggctccactctccaagggcggagttaatgttatgaaagggtaagtccagcccgcttgtgcctctcttgccctccagtgttcaaagcaccatcttggaggtggaattcccaagtcggccagttcctggatcttggactgtccggtctccagaaccgtgagccaataaacctctgttccttgtaaatgagtcagcctcaggtattctcttgtagcagcacaaatggaggcagacacttccttcaccaatctcatgggaggcccactcctgtgagctgcctctagttccccaggccacagactccatcagggctcacctggagccgtccctgtctcacctggaagctctcccactcctctggccagcctgggcatctccacccaatatgagtgatggcgactgattcccttactttagcaagctgggaataaggaatgtttgcctgttcttattcaggggtctctgcatctccacacttgcacaggttgtgtgtacatacattttcctgtctttctggtaagcccctggggtggagctctgggccacagggcaggaaaactcagtgttgctaggaactgccagacattttcccggagtgagtgcagcatttacattcccaccagaagtgtgccaggttcttgtcatactgcgtcctcgccagcgcttggtgctgtcagtcttcttagtttccatttagagattcagtgtttaaattttgaacgtcttgggtgaacaccttggtttgagaaaagtaagaaaaagggtctgtctggctatgggccatggagacccagggcagtgctccacgtgccaaccctggggcagggagcccaagctaggactgtgactgtctgggctgtgggcatctgaccatctccagtgtccccgtctttgatttccctggcgatggtgctagcttagtttgtgcgcatcggcatttgtgggagaaatgaaggattaatacattttgttttatgtcagactctctcagtgagaagttctcagggacaataatagcagggggtcctgctgaagaaaaactgggagatggctgagctctggtccatctttcattgattcattcatttcttcattcattcaaccatgtattgaatgcttatagccaatgaaaataaagtacacagtatatttta

SEQ ID NO: 3401 - protein, 356 aa, Homo sapiens; identical to SEQ ID NO: 209
